United States Patent Application Publication US 2004/0031072 A1 - sequence listing, part 10

SEQ ID NO: 42841 - DNA, 874 bp, Glycine max
  Clone ID: PAT_MRT3847_138686C.1
aaaccagagaaatctatgaagaatcctgtgaaattgaaattgaatgatagctaaatcagaaacatggatcaaccacagaatcagagaccagcgacatcaacaaccacaccctcgcgctctttccagttccacccccttcgtgtccccattttcgatctcttcaacctctacttaggactcggccgaaacagtcgccagaaacccgatgactcacttcgcgacccaccgaacaagacgcagaaacgcgtacacgccctgaatcgggagcttcctccaccaaatgagcagttcattctggattttgagcaactccagagccagtgtgctgaccaggatcaattacgttctgttacagaagcgattcttatatcgctagtagtgcagtgtagtggccatggaccaagggcagactttcttctttttgttttacggagcttatgtggtattggatgcattaactgggactcccttctgccgtcccttctttcatcagtttcttctgcagaattgcctgttggtcaactaagtcaagcagtgccaactgtttcctcatcgagcttatcacagacaggaatgctgccaccaccaagcacgattgctaattcttcaaattttcagtcttcaaatcctgcgtctcctttgacctctgttcatactattggctcgcctgcgcagtcaacgatggaaccattatcttgtgcagctatgtctcctgtcaaatcatctgatatttcctctgctggacaaacatctaaacttagaggcagtccatctgttagaactaatgatatcagtaatagtagccttcgtcagctatgttgcaagatattttaactgggcttgagttcagtttaaaacagttacttatgctgaa

SEQ ID NO: 42842 - DNA, 362 bp, Glycine max
  unsure (1)..(362): unsure at all n locations
  Clone ID: PAT_MRT3847_138687C.1
tcgctcgagctcaaaccgattcggctcgagctcgagccgaacnaagctatcctgtactcgtacangcaacancacaccgcaattttcaatacagggagagggactngggaaaaaaaaaaaaatncctcaccacaaactaaacttctagtggaaacataaattcatctgcgacatgttcttccagcactcaaagcctcacttatgaatagagtctcaaagcagaattgatgcctacaatgtctgagagatggctaaaaatttgatccttacactactgcaccaaaattctgaaccaacatttgaccattatgcacgcaagatcgcaataacacctccacaatacgtgaaccctgacgcactcc

SEQ ID NO: 42843 - DNA, 389 bp, Glycine max
  unsure (1)..(389): unsure at all n locations
  Clone ID: PAT_MRT3847_138688C.1
aggagactnccaagttccaattttggcacctttgtcttttggttttgccgcgcccctagggcagttggctacaatagctgttgcacggaccatattcccccctgctagaattctatttgcacccattatctttcaacattttccaaactttttatgaccattggataatatgttttgggcacttcattgaagcttctcttgctcttttgcaccattatataatgatcttggcgcattcccttcacttttaatttatgtttctatataactatttattgaatgatttatgcctcattaataaattttttttctagttttgttctattcaactttttcactttaaaatatgtatctttaattcttgtttcgattaattttttctcttcttt

SEQ ID NO: 42844 - DNA, 984 bp, Glycine max
  Clone ID: PAT_MRT3847_138689C.1
gggaaaatctgcccttgtgagccacttccaaaattcaagtttgatgaatgaagataaacgatgtcgccctattctcttccactcagagggttctgaagttggtgatctgattgtacaagagcacctttcttccaactccaacaatctaaacattcaggcacctaggccaagtgaattctattcaagtgattttgctgggagtcctccaaaggcgggcccttctgcaagcttggatacaaattaacatttatattagatgctgagttgcttagccggaatccatcgccgttaatgttaacattttgcaaatatgtctctctctctttggggctgcttgcatatatttaggaaggataacagaaggatgtagattttgtatcatagctattttcccaagtattttgccagcaagctttagaattagaagcttggagcatattttgattgatttgctgcacaggtagctgctgatctgattatgtacacaaggtcaaggtggtgggagcaaaagcctgaagagtttaaattgagcaaaggtgtttgtttttctcttcaaaatttgctcatttttgcattttggtgtcttgtcatgtcattgagcattttttttttttggctttctgaaaaatgttaatatgggggtagagttcagtttggttggaagttggtaagttcatcacgtgggggtacaaattgtatagagagaaaataaagacttcctttctttctatgttttcctctaatgtattagtcctcttgaaaacaaaaagtgtaaaacgcatatttaaatatgatggtgtacaagttgctcactatctgaatcaagacattgttgttttggtaggattgtcctttgaaagtgcatctttgacacgtcaagtgacaaagtcacgcttcattaaagttaatttaaaaaaaaaaaaaaaaaaaaaaaaaaaaaaaaaaaaaaaaaaaaaaaaaaaaaaaaaaaaaaaaaaaaaaaaa

SEQ ID NO: 42845 - DNA, 713 bp, Glycine max
  Clone ID: PAT_MRT3847_13868C.1
caatgaataacccccccaaccccttagctgtgtgtttagccagatctcctttactgtatgttgaaatgtattatccctcaaccagcagtctagaaccctgaacggtttgggtccccaatcagccatttttgctctgagtaggatagggcagtgatccgagaagttcctatctaagatgtactgtgtgcttcctggccatttcgtcacccagtcatccgagacaaggaacctgtccaatttactttttgcagtcccgttcggtcaaatccatgtgaatcttctgccaacgcttggcacttcttcaacttcaagatctgaaatccattcattgaattctgagatactgttgctgtccccctctctttgtgacatggtcaacctctcatctgggtgtttgatgctattaaaatcccccacaatacaccattttccatctgtatgaagttgtttaatctgcttgatggataaccatagttctctctttgcagcagcctcacatggtgcatatatgttaactataaataacttttgcatctcttgaatccacataccctccaataggataaaacccctacctgtgattctcctttttaccttaaacatgccgtcattccaaatacacaacaatccaccagctgaattgatggcagggtatatttcccagctcaagtctgtgtctccccatagagcctgacaaactcctctatctatct

SEQ ID NO: 42846 - DNA, 147 bp, Glycine max
  Clone ID: PAT_MRT3847_138690C.1
aaacggggggagtttttaaaacagtaggccttatgcctcaaaaaagagggccttcaaccatggttctccacaacaagccacaataaaactactactgtcgcgggattttgttgttaaataccacgaggggccgtattcaccccggtg

SEQ ID NO: 42847 - DNA, 550 bp, Glycine max
  Clone ID: PAT_MRT3847_138691C.1
gggtgattaagaaatggatgcttaaattcctttttgtttaaatttacctgatggttctcaaaaaaagaattgcatttcaatgtttctcaataactcacttgttctgtattgtagtagggtcctactgagcccacctgcattttctggctatgttgtaaattgtaattagtgtttaagcatttgttttcctatcatagtttctcgtaattgctattgattttttaaagtaaaaaacaacattttgtctgcaactgatgttttgagggtagcacattccactttaatttgggcttctatcaataaaggcaatagccataggtgattgattatgaaagatgattaagatccaattttgaggtttatcttcaggagttgatatggtacacccccggtgggtgtcttaggtatttctttgggtttctaacctaatgagtgtatcaaactttgctctcaagtgtgcattatctaggagcaatttgtgaatatataaacacttcatcttggccttcaaatgataacgacaacaccaattccacaactacttactgca

SEQ ID NO: 42848 - DNA, 206 bp, Glycine max
  Clone ID: PAT_MRT3847_138692C.1
cggttaaaaatgagtagaaaaaaattatctatatccacatcaattaaaaaaactctggaaagtctaaccgtttatctcatacaaaattaattgcttaaccatttacagggggggcacttatttgcaagcaattcatttctgagaccggggaaaacaacagaatctgcttccggggctggaacttaattagagcagaaaggaccagg

SEQ ID NO: 42849 - DNA, 252 bp, Glycine max
  Clone ID: PAT_MRT3847_138693C.1
acgacacataattccaattcatatatgaacatttttgcctccctataacttgaaaatggggaatcggaatttccacaagcattccaatcgcatttattttggcttgaagatacgtcttattagtaaccagatactcaccattggtatatccacattttcgacttcttattttttgaaaacgtgcaattggaatgaaacacaagaagttccgtcttatggaaattgtcaaactgaacggcctaataagaaaac

SEQ ID NO: 42850 - DNA, 374 bp, Glycine max
  Clone ID: PAT_MRT3847_138694C.1
tccctattatatcataacaggagctggcacacatgcttcttattattttcctgcaaaagaagatcaagaaaaacccaaaaagattgatgccagattgagacaaagaatagatcctgaatacaatgaggttcaggctcagatggaaacaaatttgtttaaattgtctcttgatgatgttgtaactcctaaaggctccatgttggatcttaaaattcctcaatgtaaaatcgcacttgccaaaaacacagatggaggtaccattctgcgtggtgatctattggcagatttttttacaaatggcaaacatagagcaagtgtcgatgtgcatcgcactcacggtagtcaaggattgacttaatcgttggccactgttg

SEQ ID NO: 42851 - DNA, 403 bp, Glycine max
  unsure (1)..(403): unsure at all n locations
  Clone ID: PAT_MRT3847_138695C.1
ccgggttcgacccacgcgtccggtgtgagcaagatgaatacgaatagaaggctcccaagggtttattctttttggtgtgttatgctttatcctgtattgattctttgtcttgcggaggataatggacttgtttttaatttttcatggaatatgcccttatgctgaagactcattaaatacaagttaagtttttttacatgccctcattatcacttttttcncctggcgcagaaacancnnccangaccgtgctgttcagagttgtgatgcttcactgttgctggactccacaagaaggagcttgtctgagaaggaaacagatagaagctttgggttgagaaatttcaggtacattgagaccatcaaagaagctttggaaagggaatgccccagagttggttcc

SEQ ID NO: 42852 - DNA, 361 bp, Glycine max
  Clone ID: PAT_MRT3847_138696C.1
aaaaaaaaaaaaatttaaaaaaaaaaaaaaaaaaaaaggaaaaagggagggcggacaacatctaagagccgtgaactaacaggggagttaattcctgaccgcaacctaaaatgcccccaaactttctctatagcgaggcttggcaaaagctatgggaatagcatgttccctgtgtgatatggggggggccctgatatttggtttcttcttccccccgatatattttccggccccctccctgggggcccccattttttctttttgagggcattaattgactttggctgaatgccggctaattgctttttttgcggaaaattatctcttcctccaagatccaaaaaaaaacccgcccccaggc

SEQ ID NO: 42853 - DNA, 459 bp, Glycine max
  unsure (1)..(459): unsure at all n locations
  Clone ID: PAT_MRT3847_138697C.1
gaagaaagaccgacccacgccacccgtccgttcctataatactacatacagattttctaacacctgngctactatctcccacgcccggttctttttttactcatcctcaattgcccttcattgtggctgctctctaccttattatctatatgaagcaactggctggggtttggaaatacctgtactcaataaacaattggaggctcccaaatctaatggcatcaattttattgcttaatgtgttatatatcctttctatccaacatgtcatccttttagtgattcatattttttatatatattataattttccatctaaaaaagttttgctcttttaacttcttacttattttataaataaagcttattttcctttacattaaattttaattcttttaaaaaaattttttccttcccttcttattattttaataaattattttcatctttttatttttt

SEQ ID NO: 42854 - DNA, 1056 bp, Glycine max
  Clone ID: PAT_MRT3847_138698C.1
atgtatagagaagcagcggtgaagaaagaggaataccaagtgttggaagaactcgggcgaggccgtttcggcaccgtgttccgctgcttccaccgcacttcaaacaaattctacgcggctaaactcatcgagaagcgcagactcctaaacgaggacaggcgctgcatcgaaatggaggccaaggccatgagcttcctctctccacacccaaacatcctccaaatcatggacgccttcgaggacgccgactcctgctccatagtcctggagctctgccagccacacaccctcttggaccgcatcgccgcccaaggccccttgacggagccccacgccgccagcctcctcaaacagcttctggaggccgtggcgcactgccacgcccagggactcgcgcacagggacatcaagccggaaaacatcctgttcgatgaagggaacaagcttaagctctcagacttcgggtccgccgagtggttgggtgaggggagtagcatgagcggtgtggtggggacgccctattacgttgcacccgaagtgattatggggagagagtacgatgagaaggttgatgtgtggagcagcggggtcattctttacgccatgttggctggctttccacccttttatggagagtctgctcccgaaatctttgagtctgttttgagggctaatcttaggtttcccagcctaatctttagctctgtttctgcacctgctaaggacctccttaggaaaatgatttccagggatccctctaaccgcatttccgcacatcaagccttgcgacacccgtggattttgactggggctctcaccactgcaactatatccaattttctcacttaatttgctggaatcaagctgtttatgcttcgagtagtctttcctattaggttctgtttattttttctcaacggaccctttttactaactcatgtataatagaggtttaaagagtttcagtttcggattgtatagcaaataagaatcctgcatttccctcccttttccgtatctaattaaataaaatattataaatatttatctgcttta

SEQ ID NO: 42855 - DNA, 444 bp, Glycine max
  Clone ID: PAT_MRT3847_138699C.1
gagctcaaaaaataaggaaaaagttggtcattcagaacacagaaaacctgtaactttaccgactgtatgctgatattgtaccaagccctcgcaaccaatatttccttacattactggatacccttatacccatgtgaggatctgaagtacgggcgttttcaaagtcttaaatgacaaccacatcacgcatgtcaggatgcataccaaagagtgtacctgcgccaccatatttacgacaatgtgtgtattcaaatagacccataattcttaaattgatgcgggtttttggccaatatctggtcctcttgaaaagctaccggtacagactggattgggacatgcaccattgcttaagtggtgagacactttgttacgacggtcttgccacaatgttgcttgaaagtacaaacatgactacccctgtttcgggattcttgtggcaag

SEQ ID NO: 42856 - DNA, 107 bp, Glycine max
  Clone ID: PAT_MRT3847_13869C.1
tggtagtacacttagagtgccctttgctgaatactggctgccctttgactattaaatgcagctgaagtataatatgcatcaaattaatagatggtccacacaacata

SEQ ID NO: 42857 - DNA, 284 bp, Glycine max
  Clone ID: PAT_MRT3847_1386C.1
acttaatagaattgattagttctaatcgacagattttatttttttgatttatgtgtatttttgcggccaaaaaaaatccaaaataatcaaatgggaactgggtttggcaacccctttttttcgccctcaggccatttttgggcccccggccccctaaaatttgtacggggagaacacattaagacacatttttgtttttttgaaacgggccttttctttgtgggtaccgaaataaaaaaccaattttaatccactgggtcccaagggtcattcggttggggggg

SEQ ID NO: 42858 - DNA, 260 bp, Glycine max
  Clone ID: PAT_MRT3847_138700C.1
agattatataaggtcctgtgcttttgaatctttttcaaaacatttatttctgcctgcttaaaaaaaatacttttatttccccacagagagttcaggacttcagattagtttgtgttcagctcacttaactggatagacaattttgcgttttgcaacaccatcctgtaggttttctttactagtcaaagtgtaggtctttttaaaatttttaatctttatttttatttttattttgaaacagagtctcactctgttgccca

SEQ ID NO: 42859 - DNA, 763 bp, Glycine max
  Clone ID: PAT_MRT3847_138701C.1
gacgtaagcatgtctcacgtatcgttgcactgcgtacgctctctagcggccgccctagcggtcgtcctttgttcaatgaactttcattacgattcaaagcagagttacacatgattgtattaagatcactttacaagatttcaatgccaggtttaatccgtgaacaatgaaaaaccttaattgtctctacttcaatcattagtttcacatgattaaagttaaaacaaacaaacaaacaaaccaaaataaattagacaaaaacaacacaagtgcatatatgaaagaaaaccaatgccgattaaaatttaactcacttgtggagtggataaaatagcagcatcaattttgctaagtctagggtgcacgagtacaaagtatatcttccaaaagttaccatcactcatgtatccggggcacagctccattctaagagctgcctagcttggtgccagatgttcaacagcaagagcatgttcctttgtaattctgtgaccactcccacccaaagtttgtattcccatgaaaaaatattcgccatcaacaactcccactgtgcacaatatcctagtttcatatctagtccccatccatggacaaggtcattctggataagatacaaatgatagtgatgagccaatattgagcaccaacatagaggattattttcatctatttttaatctatgacaaaaatgacaatttgaattctgaaaatttcataacaaacaaggttaaacttcatcaggatgcccccaaaaataaaa

SEQ ID NO: 42860 - DNA, 230 bp, Glycine max
  Clone ID: PAT_MRT3847_138702C.1
cccacgcgtccgtggttatagaggacctgattcacctgagcaccttatatccagtgtctcgacacttgcgcatagggtgcttaacgggttgttacggaatgacgagtctacaccggaaagttcgatgatacaggaggtcatgttgcaagatgttactgctcatgttacagacactaatgatcatgatgcttgatctcactggtacactagctcctacgtcgcgccaaact

SEQ ID NO: 42861 - DNA, 361 bp, Glycine max
  Clone ID: PAT_MRT3847_138703C.1
tgacattcttccaccacgttatgggttgccttgcgtggctactttcctccctctgaggtctctcttctaggtgcagcatatgaactcatggttggatattggaccttgacctaaccaagtttaccacacagaaacaggggtcttcactgttccaactatggaagagtgagcatggacctgtctaccataaccaccaagaatagggacagagacttgagattgtcaagaataacttgaactatgtcatggacatgaatgcgaacagaagatcaccccattctcatcgattaggattgaacaagcttggtggcatcactcctcaagagttcagcaaaaagtacttgcaagctcccaaggatgt

SEQ ID NO: 42862 - DNA, 350 bp, Glycine max
  Clone ID: PAT_MRT3847_138704C.1
gggcatagcaaactgaatgggatttgaatgacattaacgacaaaagcagacacctctctgcatgtgatattctttcgagaatctgtcaacaaattgaagatgctgtgtagcctactatgccatgtggaatttgtgcacaggctacaggataatcttattgaacggccctatcacaatgattatcggcataatgcttctcttcttgcttatggaagtggaaagaagaactgctgagactgcgcttaacatatattgaaaaacatgctctggctatgggagacatatcacattcaatggaacacttctcatgcaactagaatatcgtgaatgcttaaatttcaatgtaaatg

SEQ ID NO: 42863 - DNA, 949 bp, Glycine max
  Clone ID: PAT_MRT3847_138705C.1
gaggaacgaagcaatcgcaagtcgtctgttctgtcccgcgggagcagacgacctgtcttcatcgccaaacaacctcaaaaacattcatcaacgttcactattaatccatccatcattaagtaagaaaataaggttcgatttttttatctttgttttgcttctgatccatcatggaggtgccgagttcctgggatgcccttcgcaaacagctgacgctgcagagagtgatctagagtcttggattgagcgtttactaaaacaactccaacaagtaaacacacagatgcaagcttgggtatcatctggtggttcagaaatggtttctcatactttgactagacaccaagaaattcttcaagatctcacccaggagttttatcgtcttcgctcaagtcttaaagctaagcaagaacatgcttcactgctagaagattttaaagaatttgatcgaacaagattagatttggaacaagtagactctgaacagcatgcactcctaaaagaacgcacatctatcagccgaagtgcaggacatatggacaatgtaatttcacaagcacaagcaacactaggagcacttgtcttccaacgttcgacatttggcggtatcaattcaaagcttggcaatgtgagcagtcgcctcccaacggtaaataacatactttcagcaataaagagaaaaaagtcaatggatcccattatactttcccttgtttttgccgtatgcacatttctcattttcatgtactggctatccaagtgaagctgttgtttgtgttgggtgctcaacttttgtaaactcttgtatgttccttgtctattggccttggtagctcgtgccatgctgaaacacattttgcaagtagtctattttttaatcgattgtttatccatgtatcagaaagcaataccgagtaaagatcagaaattacatattacatagtgttcc

SEQ ID NO: 42864 - DNA, 1444 bp, Glycine max
  Clone ID: PAT_MRT3847_138706C.1
ccgcgcgcccgaaaaagcaaaggatctgttatttctcgcgttggcagtccctctggcccaaacgccctaacggctgagagaaaaaaacaaaagaaggaaaaaaggaagaggaacgaagcaatcgcaagtcgtctgttctgtcccgcgggagcagacgacctgtcttcatcgccaaacaacctcaaaaacattcatcaacgttcactattaatccatccatcattaagtaagaaaataaggttcgatttttttatctttgttttgcttctgatccatcatggaggtgccgagttcctgggatgcccttcgcaaacaggcaagaaaacttgaagctcagttggatgagcagatgaattcttatcgtaaattggtttctaataatgtttctacaaaagctgacgctgcagagagtgatctagagtcttggattgagcgtttactaaaacaactccaacaagtaaacacacagatgcaagcttgggtatcatctggtggttcagaaatggtttctcatactttgactagacaccaagaaattcttcaagatctcacccaggagttttatcgtcttcgctcaagtcttaaagctaagcaagaacatgcttcactgctagaagattttaaagaatttgatcgaacaagattagatttggaacaagtagactctgaacagcatgcactcctaaaagaacgcacatctatcagccgaaatacaggacatatggacaatgtaatttcacaagcacaagcaacactaggagcacttgtcttccaacgttcgacatttggtggtatcaattcaaagctcggcaatgtgagcagtcgcctcccaacggtaaatagcatactttcagcaataaagagaaaaaagtcaatggataccatcatactttcccttgttgcagccgtatgcacatttctcattttcatctactggctatccaagtgaagaagttgttgtttttgttgggtgctccaacttttgtatgttgtctattgagcttagtagctcgtgccgtgccgaaacacattttgcaagtagtatgttttttaatccattgtttatccatgtaacagaaagcaataccgagtaaagatcagaaattacgtagttccatttcttggttccggtttcatatatcataacttgtagtgagtgaaaagaatatatatattttttacggtgtgtttgactcaatttattttgaagaattatttttatatcagtttgttaagtagtttttgacgtttcttcattttgtcggtgatggggaattcatgggatcaaggatgggattctactacccttttgctatctgtgctttgaacatggtttgatttgttgagttgcaggttttcagtgttggaattcccccccgcggagacgaggctatagtttgcttttggaattgttaatggattggattatgaattttcgcaatgc

SEQ ID NO: 42865 - DNA, 790 bp, Glycine max
  Clone ID: PAT_MRT3847_138707C.1
caaacaatggccttacgaagtgttttcttctaccttctatctatctctttctttcttcatcagtgtcctgttactgtttaagctcgcaagaagaaccaaaccagaaaccaatttttgaaactgcccatctccccccccaattctcatacatcggcaatattcatcagtttggaacactaccacatcgatctcttcgagatctctctctcaaatatggtgaaatgatgatgctgcagttggggcagatgcaaactccaaccctagtggtgtcatctgtagatgttgccatggaaataatcaaaacttacgacctagctttttctgaccgaccacacaacactgctgcaaagatcttgctctatggatgcgcggacgttggctttgcaagctatggagaaaagtggagacagaaaaggaaaatatgcgtccttgaacttctaagcatgaaaagggtgcaatcatttcgtgtcataagggaagaagaggctgcgaagttggtaaataagctacgtgaggcaagctcgagtgatgcaagttacgtgaacctaagtgagatgcttatgtcaacgtctaataatattgtgtgtaagtgtgctattggaaggaactttacaagagatggtaacaacagtgggaaagtgttagcgagggaggctatgattcatctcacagctttcacagtgagagattacttcccatggttgggttggatggatgttctcactggaaaaattcagaaatacaaggccactgctggagcaatggatgctttgtttgatacggcaattgc

SEQ ID NO: 42866 - DNA, 470 bp, Glycine max
  Clone ID: PAT_MRT3847_138708C.1
taaaaagaatggctctactcaaacaatggccttacgaagtgttttcttctaccttctatatatctctttctttctttatcagtgtgcttttattgtttaagctcacaaaaagaaccaaacccaaaaccaatctgaatctgcctccatctctaccaaaactaccaatcatcggtaacattcatcagtttggaacactgccacatcgatctcttcgagacctctctctcaaatatggtgatatgatgatgttgcagttggggcagatgcaaactccaaccctagtggtttcatctgtagatgtggccatggaaataatcaaaactcatgacctagccttttctgacagaccccacaacactgctgcaaagatcttgctctatggatgcacggtggctggcttcgcaagctatggaaaaaagtggagacagaaaaggaaaatatgcgtccttgaacttctaagcatgaaaagg

SEQ ID NO: 42867 - DNA, 616 bp, Glycine max
  Clone ID: PAT_MRT3847_138709C.1
aaaaagggaagggggcccatcattaggggttgaatttccatccccgaataaaaaaaaaaatttggtttggaaaaaaagacacaaaaaaatgggtaaataaaatcatctaaaactggggggggggttaaaaaaattcattcatgctttaaagaagcttttgcttccttggacgggggcatatccttccaagaggcaaaaaccccaaaagcaagggctataaactcatttgaaaaaaggaaacctttgggatcacttaaccttaaataagccacccttccctttggattagttttgctcaaaaaaaaattaagggcatctattttaaggggtctcctatgctcggccaagcaaaccaaaagtccactttaaaaaaaagggttaaaagcctcaagcaaaaacaaaacaacaaagctgccaaacgattcttggaaactctttaagtctatgccttgggcagttcttagggacagcatcaccacatccaggatgggggccttgccactaagggggcctttaacagagctatttactaacccattttgtaagatccgggcaaaagtaaggggagggggggcctttgttggggtgggaaacccgggccccccccccacgccgg

SEQ ID NO: 42868 - DNA, 440 bp, Glycine max
  Clone ID: PAT_MRT3847_13870C.1
agacgtgacataaaaacgagaagggattgtgaaaaataatagagagaacagagggtatgattgaaaagcaaatagggaaaggagaccaaaagtagcgaggtgggagaaagcggtgaagacaataacgaaaaagaaagcactaaaagagtggggaagcagcgaaaaagacaggcaaaaataatggagaaaaaaggaacgtaaaggagaaaaaccagtaaaaaagagcaggggcaaaaacctgcgaaagatagattggaaaaaagaaataaatagagaaaaggattcgtataaaaatgacagagtaagaggagaaaaaagcaggtgttcggatttaaataacccacgtgaaataattcataaagtaaagcgaatagaggagaaaaaaaaacagttaagagaaaaaaataagagacaaccagcaaagaagaataagataaaga

SEQ ID NO: 42869 - DNA, 736 bp, Glycine max
  Clone ID: PAT_MRT3847_138710C.1
attcggtcgagcgacaacggttcaaacaattctgcatttgctgacccttttgcatttggttcaggccatgttaaccctgaaagagcttctgatccagggttagtctatgacatcaccaccaaagattacttaaattacttgtgcagtttgaaatacacatcctcccagattgctatactgtcaaaaggtaattttaaatgtgacaaaaaatcagctcttcatgctggtgacttgaactacccttcatttgctgtgctatttggcacgagtgctagaaatgctagtgtggcatacaagagggtagtcacaaatgttgggaagccctcaagttcttatgcagtgaaagtggaagaaccaaagggagtatctgtctcggttgaaccaaggaatattagtttcagaaaaattggtgacaaattgagttataaagtgacctttgtttcatatggaagaacagcaattgctggcagttcatcatttggatcacttacttgggtatcagataaatatactgttaggagtcctatagcagtaacatggcaataataggaaaggtctttgtaacgtttgagacttcagagaagcataaaactattttttaagctcttagctagcaggggaactttacttgatgaatgatgatccgtcacagtactattgttgtaaccttgttaccatctttaaactttatagaataaaaagaacacactttgttgtgaaattatcactcatagtt

SEQ ID NO: 42870 - DNA, 353 bp, Glycine max
  Clone ID: PAT_MRT3847_138711C.1
atttacttctccctttaaattattttgcacaatagagagcacttgatatttggggaggggggaagcaaaaaagggatacaaaaggcgggccccaacaaatagaaagtgattaagcacacaaggggaaaaaagaaatagaattgcgggggtccggaaccccacgaaaacgagaagagacacccaacgtcgatgagaatgacaaaagattacagaagaaaaggaacattcccaactcaactatatccaattagaagacgatgcagaggtgggaggtaaccaggagacaccggataactgccacacatggagagaaccagtgcagccacgggggcagacaccaatattccagtaac

SEQ ID NO: 42871 - DNA, 412 bp, Glycine max
  Clone ID: PAT_MRT3847_138712C.1
caaaaaaaaaagtatattttatttattaggccaaggcttttgggagttacataacaaaaaaccaacataaacaaggggtacaaacaatagcactacttagtataatcagggtggaaaagcaccatataacattatccttagggactcctcccataattccaagcccaactactattttttagccattcgaacttttaactctaacattttaagttaattaatggctgctggccttcttcctattcgggctggaagttttttttggggttggttgggaggctggggttttgaaagtgcctaaactaggttgggaaaaaaacttttttttaacctgtcctgcaaatggttgaaagcaacaaaatttctaaacaggtatctaagttttgagggatgccattttacactacttttc

SEQ ID NO: 42872 - DNA, 291 bp, Glycine max
  unsure (1)..(291): unsure at all n locations
  Clone ID: PAT_MRT3847_138713C.1
gtcgcangctcgcgttcgtnngctcggnattcggctcgngngcaggttggcntcctgnaganntgtaggacctgggccgnggngctggatcctcncctgagaggagccgnaagttctgccaaattctgnctctggtgaatntcctaanttccatcctgggncctggtgcctctgacccctgctccccatnnnggtccccggctgtcgtgacggcggctctctggggttctnccttccgttcccnggncccccctcctggtngtggnctggatcctctancgttgcngcctn

SEQ ID NO: 42873 - DNA, 489 bp, Glycine max
  Clone ID: PAT_MRT3847_138714C.1
gccgtcttcattatacatttttctttttccaccaattcaatttgcctctttggtggcccataccaccactgcttggggacaatgccaactaccaaagaaagcttgtttgtcactcactgtccttaaagaaaaaggaacccgattttgattgtgaaaaaaggctccatttcaataacgcgtggtgcgaatatttgataaagaacccaaaatcttgtttggcattcaacactttaccctttgaccgttaacaaagtctaaaaggaagatccgccctttctttttccatgactgccgacattgtagccagtaacagggactcttattggatggctttaaaagatgcataaattgggaggctaaactcgttcccagacatagaggaagagccatgctttatccaatgcgcacaatctcatgcaaatagcatggatagctgatgggtatgaagacgaacctgtcccttggatacagcaccaagaggtgatccca

SEQ ID NO: 42874 - DNA, 374 bp, Glycine max
  Clone ID: PAT_MRT3847_138715C.1
tacggctgcgagaagacgacagaaggggttggtcatcttctttgtttcccgttgtcacccccaattgctggatcatttcccacattttaaaagcttcctgggcctgtatagtatcttcatttggctcctgttctaagtctctgttgatatctcttgtttcacttctggaattatttctgctgctattttgctgtatgatatttggttgcttatggcttccttccaaatgtatctgcccttctagcctttgatgtctcctatgggaccaacttccacgggaggatacctggcaattacattccattggttttttattggtggaggggggtttggcccaagttacctggagggtcattaagtaatttaaacccaca

SEQ ID NO: 42875 - DNA, 333 bp, Glycine max
  Clone ID: PAT_MRT3847_138716C.1
ctattctttcttttttttttgaccagaaacacggctgattaatgctattgaagatgctgcttccagaaacataccataagaggagagtgcacgtgatggcgcaagctctctgatcatagccgccaaacaggcatgcgcgggcgacttcttagtttcgagctatcataagggtgtaacagactccgactaatctagatctgatgcgtgagaatcagggctgcatttcttgtgctgaggcacgaccaccgcctggggctcttccagatctgtgtgacacagcactaatgattgggttgcaaacggctgcagcctccttgacctagtcttcataaa

SEQ ID NO: 42876 - DNA, 181 bp, Glycine max
  Clone ID: PAT_MRT3847_138717C.1
gcagttgttggaaaaggccacaaactatggtgcggggaaaggcacctccatgcccaatccattggcgagtgtattcgacacggactttgagtgcgtgagccgtaacagagtggaagacttggataaggtttcagttgaaaacccttatgccacttacattccaatatatgagatcaagtac

SEQ ID NO: 42877 - DNA, 425 bp, Glycine max
  Clone ID: PAT_MRT3847_138718C.1
cgtctcctcgttattctgctcgagcgtgtgtgtactgtacaagttgattctggacaaggtttcaatgacgaggagttcatattgttgcttgttgggaggttaaactaagatgaaagggttttattttatttaaaacttgatgatatagtatggttgttgcattgtgacttggaagtcccaagttcaaattatggaaacaacctgtgtttgcgggataaggctgactatatcttcctcccccctccctaatacaccactttgtcggagcctcatgcattgagttgcactttttatgttggacagaataataggcctttttcacacttattgggtcttcttttagtttttatacacacatgatagcctttttcttattctcggtctctttctgcttttcacttttgttttgggatgagggcggggtg

SEQ ID NO: 42878 - DNA, 1416 bp, Glycine max
  Clone ID: PAT_MRT3847_138719C.1
cgtcgctctcggctcgtgctttgcaaaccggtcatgcaggtgacatcttcatcgacaagaagggttcccacccacaacagacattttcgctttgctgttccggccaaactctctccttctgattttcaagattttcagagctatgctaggccttcacatctcttgccagcctctgctcgagccgaatcggctcgagtacggctgcgagaagacgacagaagggggaaggaggatggatccaaatctttatttagggtcaagttagttacaagcaacgcttatggctcagctattagtgacttaagtgctggacttctactatgcttgatagatgaaaacggaaattctatattgcaaaggatccctgtgagtttgatgatgggtcgttctacagaatcaggggatatgactaatattgacatgcttcatttccaaagaggttctttagatgaattcatttttgagggtcctaaaattgcacgacttgaggctctttgggtcagtgttgaatcaggtcaggtcagtggcgcctaggaagtgtatccttaatggttattagctgtgaagggaaaccatcaggactggaagatggggtaacaagttacactggcttccagtatgactttcagattgatgatgtgttgcttggtgagggaactgatctgtccatgttggaattaagacctagccttgtgactgagctggaagggattgatcccataagcatcttcaacaaaggacttaatgaccctaccttgttctcaagtcctaagatctcaaatgaagagagcatgaaggaatatgcagatttgaagttctcattgttattttatgatgctatgttgacactattcggtacatcagttgcttccctctcagctggggaaaatgctgggattgctttcttgattggtgggattggaggcttcttgtatctgctactattgcagagatctgtggatgaattgccagcttcagaattaatcaccaatgaaagggaagaactgatgcattgttcagaggagtgaagggtccaatagcaagtgtagcattggctctaggcttggctgtaattgcatcaagatatagctctggagatcttgaactgatgctaacaccaaaagatctcatagttggaatgatgggatttcttgcatgtaaagtttctgtggtgttagctgcatttaagcctattacactaggtccaaagttaccaagtgatatgtaacattgtacttttttgtcgtttgtgaagtggtttaatttttaaaccaggtgtaacttacaattatcaataccgtgaccattatagttgtatagtgctcattttaagtgtttcttacgtactctttggctggaaaggaatggaaaaggggaatgagattttgataaaaaaaaaacctgctacttaaaagg

SEQ ID NO: 42879 - DNA, 533 bp, Glycine max
  Clone ID: PAT_MRT3847_13871C.1
cctctctctctccttcacattttctctctcatccatttcaatggcttctgcttccatttctgatgcttctctctccaccaagaagaaaaggggtttgaatttgtattggcatagttgcgggttcagattcacatagaaggcattggtcatcaggtgagtggttttcttttcaatccatttttttctttcatcgttgttgttcccgaaggcttcagaattcaacttcaattttcagttttagttcccaactttgccctttgagtaattgaagccttacacacagatgcaggtgcaccatctatttttcataatcctaatgcagattaactaaatcctacttttgcatcattttccaccatgactaatttacaatgattcatctctttgatgtacccaatggtaatgccttctaattttctgttctttatttttgaaagatagtaagagtaatgccttctaatttattcaccttaaattttgatgtacttgctttaatttacatacccttcttttttcttttcatcttcttttct

SEQ ID NO: 42880 - DNA, 815 bp, Glycine max
  Clone ID: PAT_MRT3847_138720C.1
acaatgaaaattatattaaaaagcacaagaagtgcataagcaatatttacatctcttaagttctgttaacattgcctaaactgacaatgtgaaccaaaacaaacaaaaaatacagctaaatcaaatgaggagctgaatcttaatatatacaaactataactacatagagaaagatacatcacctctcagcaatacaaaccagtagttataataaatcatcctatgaatttaaaatttgcaaaagaagctctaaggtcaatttgctgtagttgataagtgatagaaaaatctcgttgaaatgccttcaagcatgagcaaacgtaaaacatatataattttattccacatgaactttctcacaataattcctttccttcaaacacaatttcattgcattagctccataagatccaaatgatggtacaccacccaccaaccattagcttttctcccaaccaatctatgtgcatgttgccaagaatgatctattgctaagtgaggcaatgtagaatttaatctcatgatgtgataccaacgcttccaaatgttgtgtgagattggacaagcaaagaacaaacgagataaatcctctggcacctctttacaaaatgcacacaataaatattgtccatgaagttggatttgtctcttttgtaggttcacttttgttgggatcctatccaaaaatattctccacaacaaaaatgatacctttgggggattctaatttcccacaaagtttttaaaatgtcaacctcggacgaatcaaaccttgtgccatacaaaatattgtatgtcgaattaactgtgctcgt

SEQ ID NO: 42881 - DNA, 437 bp, Glycine max
  Clone ID: PAT_MRT3847_138721C.1
attgttaaatctttatatggtttgaaacaagctccaaagcaatgacatgaaaagtttgatcaagtcattctttcgtatgtttttcaaatcaataataatgataaatgtgtgtatttgaaacaatttgatgataatggatgtgtcattttatgtttgtatctagatgacatattgatatttagtagtaacatgcattttataaatgatgtgaagtttttcttgtctagaaattttgatatgaaagatcttggtcgtgtagatatgattttggatattgagcttataaagaaaaacgatgacatagcttttacccaatcttattatgttgaaaagctagtgaagaagtttaattattttgatctgaaacaagctgctactccttacgacactgtgagatatgaactaatctctaagtgacactcacgaaacaagataca

SEQ ID NO: 42882 - DNA, 315 bp, Glycine max
  Clone ID: PAT_MRT3847_138722C.1
caaatgaaaccttggaaaagatgtattgaagcagtgaactagattccaaacggaagaataaaattaaagaggcagtcgacagtctcaaagaccaccccagctagtatacagaccttcgaatgagacgcttacttcttcgcaggcttggccttttttgccgcggacttcttaaccacttttttcttcgagggcttaggtttcttggccaaaaccttctggactaaaatctttttggccgcaggcttcttggccatcttcatggccttcttagcagccgggttcgctgccttctttgtcgcggctcgagctcgagcc

SEQ ID NO: 42883 - DNA, 890 bp, Glycine max
  Clone ID: PAT_MRT3847_138723C.1
aaaggaaagggaaaacaatgtatctttattcaatttgtatggttacatgttgtatttgatattttttttcacagtaatttttaatcgtgcctagtaaatcaatggaacttatgccaggctcagccactacgtggcaagacagaacacattttccaacagttatagcccaaacgtgcaagtcatgaacatcctgcactcccttgatatttctgaggccactttccagcttactaatatcgatctcacttggtgtcctttccatcagaatgccataaatattcctaagcaagggaagagtagtgcttactgacaaaacagaaaatataagagtacacacaaggtcaaccataaaccactcaggttttgcccatattatggctccagcaatcatcactccaatagattgaatcatatcagccatgacatgcaaatatgccccctgaagatttatgttcaagacattagtatttgtctgactacttgaaaccagggtaacattctcctcatcagttattttagattgttcctccttcccatgatcatgatctgtctggtattgatgatgactatgatcatgacccgagctttcacaaccatcatgatgatgatgatgatgatgatgatgatgatgatgataatgatggtgatgactatgatcatgaccaatccatgcaaccatgatgaagttaagaacaaacccaagtgctgcaattgcaagcatgagcttttcattcacactgccatttcggacgagaattctacctactgcttcatatatcaaaaaaccggatatcaaccaaattaactgcacagatacaagagcccccaaaacctcaagacgattgtatccaaaagattggtgcggcgttgcctcccaacctgaagcccac

SEQ ID NO: 42884 - DNA, 308 bp, Glycine max
  Clone ID: PAT_MRT3847_138724C.1
gaaagtgcgagactttttggggagccatacgccaggggatcgtgaggggaatatgatagctggctgttttctcttgtgctgcgacagatttgggagcatgggcattccacggcgcaagctaccaaaggtgccctctccgaatgaaaactggctatggtgagcgaatcttggaggtaaaatgcccaagttctaggcttgctgtggaagcacacatcatcccggccttttaaaccattcctgaagagtgggtcgaaccaactgagggctaccttaacggggcacaatttagagcagactgttaaacaggt

SEQ ID NO: 42885 - DNA, 600 bp, Glycine max
  Clone ID: PAT_MRT3847_138725C.1
tcggaattcggctcgagaaagaacttaaagcttgtccctttgatcactttttctttcttctctcgcattgcttcgttcccttttttccatcattcccacacgctcacgtccgcatttgggtcccttcttctttagcattctttcctcagcccaaagtttttgtgcattttttttcagcttatgatactagaagaagggtgtgcaaaaatgcaattttttcagccatctaaggagagagaagatgagaatgcgaagattgaagaagctggtgtggatctgaaggtgatgattgaggaaatggaatccattgatgtgccttcagtgttcatctgcccaatctcccttgaaccaatgcaagaccctgtgaccctttgcactggtcaaacctacgacagatccaacatcctcaaatggttctcacttggccacaaaacatgttccacaacaatgcaagagctttgggacgatgttgtcactcccaacagcaccctttcccacttgatgatcactaggttctctcataagtacttggccatgaagaagaagctcaggatgttcaggacgagccttgaaatcttgacatgctcaagaggtaagggt

SEQ ID NO: 42886 - DNA, 461 bp, Glycine max
  Clone ID: PAT_MRT3847_138726C.1
agcggaggagttgcctgtgattattatatcatccgtaaataaacaatgcagaagttgtggtagtaaatgaacagagaaggggcatatttcctgtctttaaagccaaattgtagtaaagcggtcttgagtctctcaaaccaagcccttggagcttgtttgagaccatagatgactttatgaggcatgcacactagagaagtatcagtggcttcaacgcccaaaaggttgggccatgtaaacttcttcaaggaagccattgagcaaaaaccttgttaacatccaactaaaaaatagaccattagtgagtgagagctagaatcaaaataatcctgatggaggcatgtttgatgataggggaaaatgtctcattaaagtttacttaatatgtatgatgattttttttgttggtctgatggtgtcaatcactacgctctttttatttatttataagatgcacatat

SEQ ID NO: 42887 - DNA, 390 bp, Glycine max
  Clone ID: PAT_MRT3847_138727C.1
gggaaaaaagaaataaatttaaacattgttgaggtgtaaatgatatcaacatcaaaaaaactttacaaggaaattatgttcaacttaaacctgcattgagcttaatacctaaatttaacctaaattgattatggtttagtgagtttggaatttccataatccaaccaccccaccaagccattattttaaaacaacttccccaaaaatttttacatgctacaaagaaaaaagcacataaacaatgtacaaaaaaaaaaaaattttttaaaaaaagaaaatttttaacttatgggaaggaaagttaaaggccatgaagatggcctgatttaaataaaatagaatcactttctacccacaccttataaaaggccgcaaatgctttgctttggc

SEQ ID NO: 42888 - DNA, 395 bp, Glycine max
  Clone ID: PAT_MRT3847_138728C.1
gccctgtccgtggcattttcgtctttctctaatttcttcttctttctttctctcagttctcttttgaatcaatctcatctcatccctaacaaccacacatgcacgcaccaccatcagatgttgttctgagataatccagataccctttaaggttttttacttcatagctgcagaattccttgcactttgcttggtttttgtctctttccttgagggttatcggattcttcctttgccaaatcttgactgctatgttcttcagttgggatgaaacatgatgaagacttcggctcgattttacaataaagggatattggtattcagtgaagtgaagttaacatttgagatacagaacaagagaaaagcaaatttgatgtaactttttctgatttttt

SEQ ID NO: 42889 - DNA, 417 bp, Glycine max
  Clone ID: PAT_MRT3847_138729C.1
aattcccgactccggccgatcgcgtgcacatatcatcagtgtaaacaattgcgatcacgtttatcatgcaaactttgcctacttggctagtgacaatgttccactcacgggtcatgccaagcttatcaaggagtcaagcgaggaagaaaggtagcatgcttataaatcgatggcatatcatctcacgcgagatttagaggtgaagctacattctatagcgatgcctattactgaatttgaccatgaggaaaatgtagatgcgctatatgcaatgtaactagacctgtcaatggagacgctgacaaatgtaaagctgtttaactgcacaaggttccctcaatgaacattgatgtgcaattgtctcattttattgaaagcgagttttagggtgaccatttggactcaataaaaaaaaga

SEQ ID NO: 42890 - DNA, 235 bp, Glycine max
  Clone ID: PAT_MRT3847_13872C.1
aggtaaatattaagtatgcttcagtaactaaatcatataactcaagaatcttggcccatcaaaagaaaatgaaaactcacatgcacacacgtgcacacagagtctcatcctgaaattaattgggatatgatgagccaacaattcaaaagcagaatgagtatgtagccaaaacatgtagtctatctaattgtgtgtggggccttatattcatatttttgttatatagtctacctaa

SEQ ID NO: 42891 - DNA, 259 bp, Glycine max
  Clone ID: PAT_MRT3847_138730C.1
atctggacactactcactcctcacaccacctttacctactcaacctccttctttggaccaggcactaatcactatactcattaccttctctttatatactccattattattttcacttaaccctctactgaaaattcctccaattttcatattaaacgtttcaattcaatttccttcatttcaccacaaataataaaaataactatacatatatcttaacattacaaatatatttattacccattacatttactaaaca

SEQ ID NO: 42892 - DNA, 203 bp, Glycine max
  Clone ID: PAT_MRT3847_138731C.1
gagggagaatttctttggaggataaggccttttggttacatttcatgctggaagaaacaacttgtctttacaagtgcatgtgtggttataaaggcttttggtttatggatgagggtgagaagggtttgcctgaccatgttatgggtgatgagaggagggtttttcaagtaattttgcatatggatgggaacctactggaacac

SEQ ID NO: 42893 - DNA, 284 bp, Glycine max
  unsure (1)..(284): unsure at all n locations
  Clone ID: PAT_MRT3847_138732C.1
gtatttccctacctctcccttcaagatgcagatcntcgtcaagaccctcaccggcaagaccatcacccttgaggtggaaagtctgacaccatcgacaacgtcaaggcaagatccaggacaaggaaggaatcccccggaccagaacgtccattcgcggaanaacttgaggaggcgtaccttgtgatacanatcagaagagagacctcactgtctcgctcgtgtgnatganttcgtagaatacggaaacatactgagtgaagtcgaacangtagnaagcagtcagc

SEQ ID NO: 42894 - DNA, 351 bp, Glycine max
  Clone ID: PAT_MRT3847_138733C.1
ccctcgcgtccgcccacgcgtacgcggacgcgtgggcggacgcttggtatcaaattcctgctgttgacaagtcgtattctactaaggttaataagttcgcaaaaattatgaaccttaaacaaagttgttgttggtgatcttaaactttttactgatggaaagttgtatgagggaaagcactttcctgtatctaatattatagcaagggagaattatgtatttaaaatacccaataaagtgacaggaggaaatacttacttctagtcgaagtgatttcagaatagcaatggtgagtaaagatatcaagtcctaacctacttgaacgcatgtggcagctatagaaattattat

SEQ ID NO: 42895 - DNA, 1671 bp, Glycine max
  Clone ID: PAT_MRT3847_138734C.1
gctcgtggagcgtggcccagtgcagctacatgggatgtcacgcggctccgtgggagcggcatctctccgccgcacactttgggtccgtgcgccttccgtccttgctcttgctgccttcgtgtgcctcggcggcctggtttactagttggactccccctcgcatcacgcccctcaccttacagagcctgaccccttgcattcttgcctggtaacgtccctcaaccagaggtgaggctgggaccctcccattagaaccctatcaagtaaagagggttagagaaataaaaagagaaagccgacagcacatagatagagagaggaaaacgacttaatattctttttccttgagacctgaaggggctaaggaaaattagaaggacacacaagtataaaggcggtgaaataaaagagaaagacaagaagaagacatgggaagaccaccttgttgtgacaaagaaggggtcaagaaagggccttggactcctgaagaagacatcatattggtgtcttatattcaggaacatggtcctggaaattggagggcagttcctgccaaaacagggttgtcaagatgcagcaagagttgcagacttagatggactaattacctgaggccaggaatcaaacggggcaacttcacagaacaagaggagaagatgataatccatcttcaagatcttttaggaaacagatgggctgcaatagcttcataccttccacagagaacagacaatgacataaagaactattggaacacccatttgagaaagaagctgaagaagatgcaagtaggttgtgaaggtggtagctttggagaagggttttcagcctcaaggcaaatccctagaggccagtgggaaagaaggctccaaactgatatccaaatggcaaagagagccctcagtgaagctctttcaccagagaagccatcttgtaatttatctgcctcaaactcaaacccttcagatagtagcagctccttctcttccacaaaaccaacaacaacacaaactgtgtgctatgcctcaagtgctgacaacatagctagaatgctaaagggttggatgaaaaacccaccaaagtcctcaagaacaaactcatcatctgtgactcagaactccttcaacaactttgctgcagcaggtgctgatactgcttctagtattggagcaaagggaccaccaagcagtgctgaattgtctgaaaacaattttgaatcattgtttgattttgatcagtctttggagtcttcaaactctgatgaattctctcggtcattgtctcctgaggccactgttttgcaagatgaaagcaagcctgatgttattggtgcagaaattatgccattctctttgcttgagaaatggcttcttgatgaggctggttgccaagagaaattagttggttgtggtgatgatgccaagtttttctaagttgggttcattttgtgacatatatgagactgtggaattttttattttatttcataagttataggtagggcctcatcaattaatcttcgctttggccttagagagagaagtttttcaagcctttggtgctagacgtgtatatgttaataactattgaaattatgattattgttatcatactgtgttagatgccacactggaaaacctgcttcttttatgtaaagttgatcctgcgatg

SEQ ID NO: 42896 - DNA, 1495 bp, Glycine max
  Clone ID: PAT_MRT3847_138735C.1
ggaagaccaccttgttgtgacaaagaaggggtcaagaaagggccttggactcctgaagaagacatcatattggtgtcttatattcaggaacatggtcctggaaattggagggcagttcctgccaaaacagggttgtcaagatgcagcaagagttgcagacttagatggacgaattacctgaggccaggaatcaagcgtggtaacttcacagaacaagaggagaagatgataatccatcttcaagatcttttaggaaacaggtacaagtcaatcttccaagcacctacttacttggagttttgtgttcaattcaagcaattaagttactaatgaaatcttttagcttataaaaaagaaaaaaactttgttttgaagatttattttttataactgtttttgagtattttgatttgggaagttctatcttttggatccacatgcttaacttaactggatcacattggctatgttacagatgggctgcaatagcttcataccttccacagagaacagacaatgacataaagaactattggaacacccatttgagaaagaagctgaagaagatgcaagcaggttgtgaaggtggtagctttggagaagggttttcagcctcaaggcaaatccctagaggccagtgggaaagaaggctccaaactgatatccaaatggcaaagagagccctcagtgaagctctttcaccagagaaaaagccatcttgtttatctgcctcaaactcaaacccttcagatagtagcagctccttctcttccacaaaaccaacaacaacacaatctgtgtgctatgcatcaagtgctgacaacatagctagaatgctcaagggttggatgaagaacccaccaaagtcctcaagaaccaactcgtctatgactcagaactcattcaacaacttagcaggtgctgatactgcttgtagtagtggagcaaagggaccactaagcagtgccgaattgtctgagaataattttgaatccttgtttgattttgatcagtctttggagtcttcaaactctgatcaattctctcagtccttgtctcctgaggccactgttttgcaagatgaaagcaagcctgatattaatattgctgcagaaattatgcccttctctttgcttgagaaatggctccttgatgaggcaggttgccaagagaaattagttggttgttgtggtgatgccaagtttttctaagttgggttcattttgtgacatatgagcctgtgggatttttttattttattttattttatttcataagttataggtagggcctcatcaattaatctcgcttcggccttattagagagagaagttttccagcctttggtgctagacgtgtatatgttaattattattgacattatgatgattattatcatactgtgttagttgccatacactggcaaacttgcttctcttatgtaaagttgatcttgcgacgagatcttgctttatgaattaattgtttttaaagt

SEQ ID NO: 42897 - DNA, 228 bp, Glycine max
  unsure (1)..(228): unsure at all n locations
  Clone ID: PAT_MRT3847_138736C.1
accgaagaggcagccaagggaatataangaanngatggaaagttccttgatggatgggttatnnnnaaaaatacgctaaacccaaaccaccggcggatgaaacagggatgaattcgcaaccccagcagtcatggggagcttcatcaagttcctggggtgcacaagaaatgaagtgatattgtgagagccccttcctttccccaggcctggggctcgtatcggatcgtg

SEQ ID NO: 42898 - DNA, 240 bp, Glycine max
  unsure (1)..(240): unsure at all n locations
  Clone ID: PAT_MRT3847_138737C.1
anattatccttgcaacacacattgtcttntcngcaaaatcttccacacaananacaannnnnaaagnacgctcaaacattctnnctcantctccttcccttccnaaaacctacagccantccttaaaccaaaacgcgttatcccaaaagcttnnattttgctncncctcaaattcaaagccaccacaaaaccacgtgctntcanagcgnttctcttcncanaangctgtcaaaacctcgt

SEQ ID NO: 42899 - DNA, 168 bp, Glycine max
  Clone ID: PAT_MRT3847_138738C.1
cacgctcttattggtgaagtttgtgaaaccatacaaagccgtcatggtccttcagggtcgctacagcctgtgaattatcgcggcttgttcgaaccttcgctgaaggcactcgcgtgcgcccctggaggcactgcttgctggcatggattcagaagaaccctgcgaaag

SEQ ID NO: 42900 - DNA, 538 bp, Glycine max
  Clone ID: PAT_MRT3847_138739C.1
cttttcgcggccgctttaaattaatcaattactaatatgttattaaacagagatactcgtttgttttacactcaaaaccctacgcaccgccgtatacggggcgccgtcgcacacggggcgccggcgtactttgcacttggctttgctctggtcaacaggatgcacgataaggttgggctttcgaggaccaggactatcgttttggttagtgaaaaaaaccctaaaccctatactacgctcttctcaggaagaaaaagaacaagagatgaatagggcgagaactgaaggcttaactttcacgaaggagccgtttatggtggatacagggcctggcaagataaagaacatgaagttctgcacgttatcggagttggaaatccgctgattcggtgcagttcaagtgtggaatggttcctactatgacttctttaagaagccttgccacggtggcttgttggatcctggtatgggccctgctagtaagagtcttgtgtgtgcaacatgcgaagggaactttaatgattgttcagggctctat

SEQ ID NO: 42901 - DNA, 370 bp, Glycine max
  Clone ID: PAT_MRT3847_13873C.1
gtccacaaaaaaaaaaaaagtggggtttttttgttttccgaccctccccgcaaaattgtttgggtgccaggaaatcttgtacattttttccgtttgacccgcttttaccaaacctgtttctcttggttttcattgaacgcacctcagatttgcttaacctaataatggtctcagaattttcccccccattaaccctttttattcttttctggctaaaggttactattctatttattctgcaaggtcccccacccttcaaagggggggactttttttttcatctgtttcccttgagttggtacctgtggcagacttctatctttttcttccacccccccgggttttggcccgtttttctccctgaactttt

SEQ ID NO: 42902 - DNA, 452 bp, Glycine max
  Clone ID: PAT_MRT3847_138740C.1
gctttctactgcgcggaccaaatgaaaatcatgggtttgcttcctgatgttttctagatcaatgatcagttgtctcatgttgatgacataggttactttatacaactttctgatttcgacttgtgggaaatgcaagaactcgaataaggctattcagattttggaagagatgaaatgcatggaagtaaagccaaatatacaaacatacatctgcttgctaaatgcttgtgctgctgatggacgcatagaccgagtgtatgcaattgttcgtgatatgactgcagctggtctgggattaaatgagttctgctatgctgggcttatagttgcacacaagaataaaacacctcttcctgatgattttgctgcaaaagttattgagtttgtggagagatcgaagatgtggtcttctgttgaaaccaacagtgccaatgctgagaatgtgatgatgg

SEQ ID NO: 42903 - DNA, 1765 bp, Glycine max
  Clone ID: PAT_MRT3847_138741C.1
gtccgggtcttcccgcattcgacccacgcgtccgggagacggggaatggacgggaacaggattgtgtttgttcttcgtttatcaaagatcatcaaacggggaatttagattttggagagaaaaaaaagaaagacgcactccctcctcctcctctgtctccgggttcaatttcaaacccataaattcggcttccaaattgagcggatttcagagattatatttttcttctactcttactttgcgaaaaaatggaagaggcaaacaaagggattgcaccagcaacaacaacaacgcagcaacaacaacaacaacaacaaccaattctgttacaacaacagcaacaacaacaacatcaacaacattatctgctcttacagcaattgcaaaagcagcagcagcaacatcaacaacaagctgccgccatttctcgtttcccttccaacattgacgctcacttgcgtcctatcagacccctcaatctccaacaaaaccctaaccctaaccctaacctcaatcccgctcccaaccctaaccctaatcccattctcaatttgcatcagaaccctaattccaaccatctaccaccgcagcagcaaccgccgcaacagcaacagcagcagcagcagaagattgttcgacccgggaaccagatggagctccagatggcgtaccaagacgcgtggcgggtctgccacccggacttcaagagacccttctcttctcttgaagatgcctgcgagaggttattgccttatcatgttgtggcagactatgaagaagaagaggatgataggattcttgattctgacactactggccagatgctttcacggtcccagcagtgggataataatattactgctaaaattgctgagttcactgcatcattagagtaaccagcacttgccgtctgcataataacccaaatgaggagtttgggggagttccgcagtcacttgagactgatgattgagcaggcacttctccaagaagaaaaacggctacctctgaattaagagcagaaatagagtccagggagaaggctggtcgtgaagcccatgaggctaaattacggatggcagcaatgtttcaagcagagcaggctcgggcagatttacagtctcatgctgaaatgatgtctcgagcacccatgagagggagtgcactagggtcccaaggcaatgacattgtgattggccacgacatgggagagcaggatcaggcaggtaaccccggtgagatgattaatggatggggaaacaatacacagagagatgagaaggagccatctgaagatttcttgaatgatgaagccgaaaatggagatactgggacccaggatggctggcgtgaagttggtgaatttgatttgaatgctaggtgattctcgacagtgattgaatgaaaccttttgggagagttttaattacgtgtaagggattaatatccattttaaaaaaagtcattatcttgggtatcaaccattgtcttgaagttagtatcttagattacttttcaagatcaaaatctatttcacaagagcgcaaggaaaactattgaaccagtactagattggatgaatatcaaagtttatgctcttacactagtgtagtgcacatggttggatcactaggtcctcttgagtgttatataagcatacaaattctgacaaatgtatatccttagttttcaaggaaactcttgtttcatcgttttggcatctgatttttcaggttgctgtcaaatctttgctatctttactact

SEQ ID NO: 42904 - DNA, 367 bp, Glycine max
  Clone ID: PAT_MRT3847_138742C.1
cacactttgaatactaagtaagtttgggtaatagtgccgtatgaatgccaagatgtttgatttctctttgagaagcttggacataggtagccaatagaaaccaaacttccgtcatctcaataaacatgcaaacaaaaaatgaaattggtacattttaggctttcattttaatttttagtttcagtttagtatcttaagttttacaaaaactattttgatgacttaaagaattaacgatttcctatttgaccaaaatagttatttctttaacttttttactacttgtgttaattttgactgaaatcacattgtgactgaaatagttatttcattgtgtccattttatattttgggagcttattatata

SEQ ID NO: 42905 - DNA, 381 bp, Glycine max
  Clone ID: PAT_MRT3847_138743C.1
aatcactgttggatgccattttggtccctttttaagtgcaaaatgcgcaaattcacagattggtggcaaccctcgctcccgtctgtccatccaagccggccgtcagcacatcctccgacttcgggaggaaaagccgtctctgagtgccggacaagtgcagcaaatgctggtcgaacggggcatttgctcccgccaaaatgtgccgagcgcttcccgaacaatcgtctgcttcaagcgtccaacagcaacaccaacaaaaggcgaggccaaaaaaggacggccattctgcggccacacagggcgaggaaggcgcaaaaaagccattgagtcattccatggaaaacattctcggcaacggaggcggcataaaagcgtaggcaa

SEQ ID NO: 42906 - DNA, 1263 bp, Glycine max
  Clone ID: PAT_MRT3847_138744C.1
cctgaccaaagaggtccaaaaagctggagcaatctgaagaagttaatcctcttgaaaaggtttgtgaaagcattagagaaggtaagaaacatcaacccccaaagaccaagacattttccttccgatgctaacttagaaatggaaaaagtttttctcaagcaccaaacagcagaagagaagaagaatgctgaggaatggatgcttgactatgcacttcaaaaggttgtttctaaacttgcacctgctcaaagacaaaaggtgacacttctagtaaaagcttttgaaacaattctgccatttcaagttgctgaaaatagtccacggttttctccaacaatggaacctcaagcaaatccagttcaaccccttgacaattcctcaaatcacagcgaggaagaaacatcattttctcatgatagcagtatggaactgacagaaaatactagtgatgatccaatgccagaactgcacaatcctactacgctcaaagaaagatgtcttgagtctcttgattttcctggaaccgagacagtcaagaatatgcctgcctttggagctactgaagaagacttgagtggaaagcaaagtttagctggcagttatgataatgaggagaagatatcaagtgacagtgataatatttatcttgtagagatcaaagatactacctcaagttccttaaatgagccagttgaaattataagaagcagtcatgaggaggctccaaccaatgaaacagtcaatgatgttccagaagatttgctatccagtgtgaatacagaaaatccagatatgaaatctgagtcacctggaagagacgttgaaaccaagagtctgaagggtgacaatgggcgacaattttccatgtccaaaagtttagtcctagaaggtctagttagatcactcagatctaatttgatcggttcaggagcaccagcaaatgaagcaactactgaaagaaaagaagaaattgaaaatgttaatatgggaattgagactcttgaagagttccctacagaggaacaatctgtagctcctacaagtgcggttgaggaacctgagacccctgtagagaaacaaagcaacacaggattgtggtacttggtgtataagcacatggtatcaaatgtggcggaaaacaactctgagtcactaattgatggggcagacgagaaagagtcagggttggatgacatcagaacaggagtaacttttaatgcttatggaaatacacctatgaaggatcatgagatgcaatttagg

SEQ ID NO: 42907 - DNA, 1405 bp, Glycine max
  Clone ID: PAT_MRT3847_138745C.1
gtcactttacattggttgctagcaagtggtatggggaggcaaccctgctgtgacaaacttggggtgaagaaaggtccatggactgctgaggaagacaaaaaactcataaacttcattctctccaatggccagtgctgttggcgagctgttcccaagcttgctgggcttcggcgttgtggtaagagttgtcgtcttcgttggactaattatctaaggcctgacttgaagagagggctcctcacacaggctgaagagcagcttgttatcgatctccatgcccgtcttggcaacaggtggtccaagattgctgccaggttaccaggtaggacagacaacgaaattaaaaatcactggaacacccacatcaagaaaaagctccttaagatgggtattgatcctgttactcacgaacctcttaacaaacaagtctcatccaaagatagttcatcccctgcagagcatttctcacaagtgaataacattaacattcatcaggttgagcaaaatgatggggttctcaactcagaagagaattcaacctcatcaccggctgaaaattcttctggggaagaatcccttttggtggatagcatttgcagtgatgtttctctaattaacagcatgtggctggatgaaactcctctgatggacacattatgggacaatacacctaaagttgagaatgcaaataataacatgggcttaccaataggggaggataattgtgcttggttgttggactgccaggactttggtattcatgattttggcttcaattgtttcagcgaggttgaaacaaatgtactgcaagctataggcatggacagaaaagggctttaggatgcagtacatatggtaattaaagttagttgtccttaagaaacagagcatgcaatcaaaaaatatgtgtatatgtgaatgtgacaaaatgggaataaatcctctcgtgtccatgtcacgttcaaattttgtgtttataactttcttgatgaatattagataaagttctccttatttattatttgtcaagaaagtgatacacacgagatttgaacgtgattttgttaagttaaaatttttccctaaaggattaataaaatgccatggactcgaaattaggtttttggtgttgttgaattttatctagttattatgctacataatattcctggatggtagacgacgaacctttcctcttatcaggctcttccccaaccttttctccaaaaggattccgaacaaaatcccccaaatgacccccctttcgtcctcttgttaatgctgttagcttttgtgtatggttggccccagaaaataggaggagccaaacaaatagtgggttttgtgattgtgtaacttattgtaaaaaaatgtttaatttaaaaaaactgttaaatattcattt

SEQ ID NO: 42908 - DNA, 389 bp, Glycine max
  Clone ID: PAT_MRT3847_138746C.1
aaccaagcccaaagttggacccacacttttaaggatataattgagtgtttccagaacatgagcattcagcacaattacgcagaggcagagttagcatccacagaactaagacctcaactaaaatgaaaacttaaactattcaaattctatttacctaattacctcaacgagaaaatacgccagctccatatgtacatgagagtgtatcaacaagaagaggaaactgttaaagggcaaacaatattgcagggaaacaagcaacaagggttgttggaatgacaatccaagccaattgatgtccaaatacaatgaaaaatgttgcaccaaaagctatgagcattgtaatgatggagaagaaaagggttgcaatgccaacactcaacctttta

SEQ ID NO: 42909 - DNA, 263 bp, Glycine max
  Clone ID: PAT_MRT3847_138747C.1
gggcaccctaggctgtcatggaacctggcctgccccgctgcaggccggtccggagggtcgctgtcccacgccagagccggtcggggaccaggatctctcgctgtgctgcgtgcctcgcttctgcgccttgcaagccccgggcgtcctctctgggcccggagcctgaggagctggggcgcggccccagtgtgcgggccctcaggccccctgcgcctggcggctgggcccggatggcctgaagcacctctgggcaccgaccgggc

SEQ ID NO: 42910 - DNA, 304 bp, Glycine max
  Clone ID: PAT_MRT3847_138748C.1
acttctacacatggccatcgaagaacttggcaagatgatcagtgctcgagctcgggaaaggttccagagaggccttaccagaaagcctatggccgtgatcaagaagcttcggaaagcgaaaagggaagctccaccaggtgagaagccagaaccagtacgcacccacctgcgcaacatgattattgtgcctgagatgattggtagcatcattggagtgtacaagggcaaaacctttaataaggtgtgaatacaacctggaaggattggcactattcttgctgagtcttctagttcatacaaaccc

SEQ ID NO: 42911 - DNA, 420 bp, Glycine max
  Clone ID: PAT_MRT3847_138749C.1
ggttcaaggtctaactaagcgctacctctctgctaaagctcatgttgtatatgtcactgccagtgctgaaccctaactccgcactgctgaacatatcgtgggtactgcacatgaacattaatgccgcgcagggtcttaacgacgtactgataaacaacctgggtgccctaggcaccatcataatgctcgtcggaggtgctccgtgatgtcaagcttaccaaagatggccacactctatcgatagagatgcatattcaaaaccccacggatattatgatcgctagaactggtgtcgctcatgatgacgctagtcgtgatcgcaccacttccactgtcatcatcattggcgcgcttatgaaacaatctgaccgtagcattgatgaaagcatgcacactggcgtgttgattgacgggcttgat

SEQ ID NO: 42912 - DNA, 346 bp, Glycine max
  Clone ID: PAT_MRT3847_13874C.1
cggacgcgtgggaaaaaaaaaaaaaaaaatttaaaaaaaaaaaaaaaaaaaaaaaaaaaagaggaaaaattaaaaatcgaaaccgtccttctatagaatccatacttacatacacatcctataaaaattaatacctttcatttaaatatcccctaaattaatttaattgcccttctttttacacctttgtttctgtcaaacccctttcttttcccattttaatccccttctttaacatccccttttccccaattgccttattatctataagtcccctccctttcccccttcccaccattttctcatcctgattgttaaataaaacccccctttttactgcccttta

SEQ ID NO: 42913 - DNA, 289 bp, Glycine max
  Clone ID: PAT_MRT3847_138750C.1
ggttccgtgtagcacggctgagaaagaggctgtcgcggatgcagctgcatgggtgttcaatgatgctgcatctgttggaatcatcattgcaaacatggctgggatggccacttagggcttcagtggtggcacaacattaacaggcatgcacttaggtagcccaactctggtgacaggtgtgctaaggatgctgtgagttggtcagtctgcatatttaccggagtcagaagtgtgcgagggggagggtattgctaactgcgctatcggtggaatgaatggtcgatcgatg

SEQ ID NO: 42914 - DNA, 549 bp, Glycine max
  Clone ID: PAT_MRT3847_138751C.1
cacgcgtccggccgccaaactgaacggtggtgacggcaacgtgattcccaccgcccgtcccaaactccacgtgtcactctctcaattcagcaaccccctccattctcgctccccccaaaagcttttcccttttcaccgctccaacatcggaagaagaagggaaaaacaaaaaaagaacaagacggattaatgtctcggcactgcgattgttgttgtggcggaatcccaccggggcttctactaatccgaggaaaacaatggaacctccaaacatatcgctacatggttctcctcaccaccttcatcgcttacgcctgctaccacgcgtcgagaaaacccaccggaatagtgaaaagcgtgttatgccccgaacacaaaggaacaaaccagggttggagcccattcaacggccacgatggaacgtcgaagctaggtgaaatcgacgtggcggtcttagcgtgctactcgatgggtatgtacgtggcaggtcacttaggagactccctcgaccttcgcttggtcctgacaaccggaatggtcggtagcggg

SEQ ID NO: 42915 - DNA, 326 bp, Glycine max
  Clone ID: PAT_MRT3847_138752C.1
cttgtattattttttactttgatattttgtatttttctgtttgttgtaagagctctaagtatttttaacctaaagagttggacacgccgatactgtatctttgaaaagccacgaactttctccagaacaccccgacaaaaacaatgggggagacaaagcagaagtcaaatgcccaccgccgagggcactgcaaacagcgggagaagacggaccctgggaacgaccaaaatctgcatcacaacgtggtacgccccctctagactggtgacacgaagggcaccgcacaaaaaaacggggcccccgcatttcaaaaggcccacccgatg

SEQ ID NO: 42916 - DNA, 407 bp, Glycine max
  Clone ID: PAT_MRT3847_138753C.1
ttcatgcgtgcggtggaatcgcttaagcataagggggttcgcccatggatttgaagggcaaagagctggggaaccattttgggttatgcgggttattggttacccaagtgtattaatctggaaagggacccatggtattaaaaatgacatgggatgtggagccaacttgatgacggttaatggcattagaggaatcatgatgacggaggccatcttctgctggcacgcctcggagttacagcttagatgagatagccgccagagctatggtcagttgacatgtttctgaactatttggaaggaaaaaacctcgcatgcttgctcagtccgattttattcgttgcaaatggcacaatgaaattcattccagggcgtgatcattgtgtaatctaatagatattcactgc

SEQ ID NO: 42917 - DNA, 289 bp, Glycine max
  Clone ID: PAT_MRT3847_138754C.1
ttcggatcttggcatgtttgattgctgtggaagctacccactgccgactgaattgaggatccttcctttttttctctctttgcatcctggtaaaatgtggtgttattgtcggatggtatacatgcccatgtcttatatggatggtaagaaatggaccggtcctatcacaccgttccttgctgcttatatagatcaactttttattaaaccttatgatgaaaattgtcggaagatagcacgtcatatatgtgcgaatgagtatctatactatacccatcattgcatacaa

SEQ ID NO: 42918 - DNA, 583 bp, Glycine max
  unsure (1)..(583): unsure at all n locations
  Clone ID: PAT_MRT3847_138755C.1
gccaaatacagatatgtatgccaattattattctctcactaacattaataacccaaacataatagggaatattacaattttccattctttaattcagtgtggccttagtgtttggaagttttgccattaatctatcaccactgaagcatttgaattccgcttcttttagtgttgcacgtgattctaactggctaacgacttacggactttctgagctttcaagtttgttatttgctacttgcatttatcgatcaagaagctttccactaatccggtatgcggcaactgtacaatccgcaaaagcaagcagcgaataacaaactaatataagaatcaaacgtaagtcattgtccaagtgtgaatcacatgctaaaattgaaaggtgcaaaatttcagatacccaacagagatagattaaaaccacatgacaaacttaagagatatcagcaaaacatgtaacccagatgctgcagggagagaaaaaaaacattaaggccccaaaaactaacanaattccttccataagacaggaattaacatccctgtgacaaacccactcttcaaattatataataaaaataac

SEQ ID NO: 42919 - DNA, 279 bp, Glycine max
  Clone ID: PAT_MRT3847_138756C.1
gaccgggaaatctttttctttttttaaagggagggcccccccatttgtaaaagctataaatgccccctttttgtcccttccctgttttcccctccacaaattctaaaaagtcaggggggaagaacgggggaaacccatctacatccaccttcttaaactgggggggaaaaaaactagggcaccatcttgggggggaaatgccacaaataaaaggggaccccgtacctccccctaaaaactcaagaccccgtatgttgggtggcccaaagaaaaaacaat

SEQ ID NO: 42920 - DNA, 425 bp, Glycine max
  Clone ID: PAT_MRT3847_138757C.1
aaaaacaaaacgggacccccacattacaggcgggtcgtttggcccgtttaaaaaattcaagatttggcccctccctcctttggttttcccccccccaaaaaaacaaggagacaaaaaacaggctcaaggccccttatgaaattttaaggctaatcttaaaccaaaaattggtcctaaacaaactaaaatcactaggcccagttttcactacttccattttttcacggggggccggccttgactttttcgatcaaccacccccattttaaaaaacatgaagccccttttggcccttgggggaaggggggaccatgaatgacccaatccaccccctcagggtttccatggggctggagggggggggggggtggaaaacattgggggaacagcaaaaaaaagggggtttttgtctataccggggggtt

SEQ ID NO: 42921 - DNA, 327 bp, Glycine max
  Clone ID: PAT_MRT3847_138758C.1
ctgatccatgatctgtctaggaggccctgaatgcgggggcggggattgatcgaatctcgagagctgcacaggccattagagcaggctacgaggttgcatccaatcaggaattgaaatataccgactcttgaacccaaaaaacagtaaatgctactggaagatagcacctgagagatggacacaccccctgtttacagcctctgtgatattacagattttggcttgacatacttaacagactcaatgaagatgatacatgacttaagcacgctctatttccctctatgaaatcgtttatcttactacctaatacatctgatcaacaaa

SEQ ID NO: 42922 - DNA, 341 bp, Glycine max
  Clone ID: PAT_MRT3847_138759C.1
agcgaatagatgtgtatggttcctcttactgaaatatttgctgtactctacagaaatctaaactgttgattcctccatcaactattatccactctacacactttactctctaaaatacaccttatagctttaattacctattttgtaatattctattcatattcgctagtaaaatttaaaataaaatagtagtccaagcggcaagaatataagtcaattattagtgtctcctgctacattaacagcctttgagttcagattttagacctcttttctttaggaggatgaggatcagaatgattttacagaaaagccataagattcaacaaattttttacttt

SEQ ID NO: 42923 - DNA, 148 bp, Glycine max
  unsure (1)..(148): unsure at all n locations
  Clone ID: PAT_MRT3847_13875C.1
ganactgtgaagagtgacanantgccgcaaganttggcattggntttggaggnncttcgccacctccacagcatcgncaaaaganctcgaacnctctcnctactcncctccganattcgcatcctcgaanagttatcgtcatcagagg

SEQ ID NO: 42924 - DNA, 235 bp, Glycine max
  Clone ID: PAT_MRT3847_138760C.1
cactcttctattttccaactgtacaatttcatttcagatagcttcttgactcgtttctgactccctctataggagaccgcgttcaatcctctgactctgctaccggcttcgctgattcatctccgccatcggctcaggactactctcgtcgcaccgtccagacgtcgctcccgattcggaggaacactctctctcgtattgaattgctgcatcaagtgatgtgcctaccatagca

SEQ ID NO: 42925 - DNA, 458 bp, Glycine max
  Clone ID: PAT_MRT3847_138761C.1
cgaatggtgaattctcaatggcagttattcaggcaaacaatttgttagaggatcaaagccaacttgaatccggccccttgagcttaactgagggaaatcctcaaggaacttttgttggtatatatgatgggcatggaggtccagaagctgcccggtttgtcaatgaccgtttattcaataacatcaagagtaagtttttcttctttcttcatcctgcaacacaaattgctatttctggaaataactttagaaattgagtgaattaccaataacccctcttttgtcttcacttcaccatttaaaaaccatttttttcacctttgcatccaaagttcacaccattcttaccttcctatgtagcaagagttttgtagctggttgatatgttttactgacttaatggttgatcttaatgcagagtttacttcagaaaataatggaatgtcagctgatgttat

SEQ ID NO: 42926 - DNA, 342 bp, Glycine max
  Clone ID: PAT_MRT3847_138762C.1
ttttgtttttttttttttttttttttttttttttttttttttttttccccaccaacccagttttttagaattatttaaatagctaaacaggggctcgtaatgataatttgatttccaacaacatacagaaggggaagaaaataaccccaaaaacagtcacgggcaaacttgtccatttccatgaaagggtttttcccccttgggacccaaaaacaattttaaagggcctaagggaaccgagatcacataaggccatacaaaataatccataatttttccacagttcatttgcgggaaatgttttataagtccaaccctgcaggaagagaaagagagcacttt

SEQ ID NO: 42927 - DNA, 310 bp, Glycine max
  Clone ID: PAT_MRT3847_138763C.1
aggagtgcagaatcttggaaacagagcaacgatgtgtcataggttaaattgcacaactgctgtatggtactgccatgaagtccgtgaaacaacaactttcatggatccattggtggttggtgattgaaccaaaactgacgcacttgctatttgccactcaaatacttctggaatgaatcatctaatgcttcatcaacttatgggagttgatcctgcaactaaccctgtttgccatctccttggaagcaaggccttattatgggtacccaattaatctgtggacactgcctatcagaccaacttcgttgct

SEQ ID NO: 42928 - DNA, 457 bp, Glycine max
  unsure (1)..(457): unsure at all n locations
  Clone ID: PAT_MRT3847_138764C.1
cggctcgaggaagcttttagtcacatggacttgcttgaaagcttgaacctctcaagaaatcatttaaaaggtgaaatccctgaaatattggcagagcttgatcgtcttagttccctagatctttctcagaatgacttgaagggaactattcctgagggctttgccaatctttccaacttggtgcatctcaacctttcattcaatcaacttgaaggtcatgtaccaaaaactggaatatttgcacacatcaatgcatctagtattgtgggaaaccgggatctttgtggagctaagttcctaccaccatgcagagagacaaaacattcgctgtccaagaagagcatatctattattgcttcacttggatctcttgctatgcttctacctttcccgattccagntctcaatcgaagcaccaaattctgcaattctaaagaaagagagtagtgtggatcat

SEQ ID NO: 42929 - DNA, 653 bp, Glycine max
  Clone ID: PAT_MRT3847_138765C.1
cgggtccgtacggctgcgagaagacgacagaagggggaagcaaaaaacaaagaaccctgcctagaaaaaaaaatggagtactctaatggattccctagaaaaagagatgtttctcttcaggaacttagcaaaaggcttgctgagtttgctgaagtaagaggatgggatcaatatcacagtcccagaaatcttcttttagctcttgtgggagaggtgggagagctttctgagatcttccagtggaaaggagaggttgcaaagggattgcccaattggagttctgatgataaggagcacttagaggaagagctttcagatgttttgctttatttagtgcgtcttgctgatgtttgtgggctagatcttggacaggctgctctgactaaaatagtgaagaatgctcagaaatacccagttactagtactaattaatcacaccagcaattccacttacaactagcaattaagctgttaatttctcagtctttttcttcatgtactagtatgctttaatttagtgctacctacccgaaaaaataattacatctatgtatcttctcttggttttagttttgaaaaaaaaaaaaaaaaaaaataattcaatccttaccgtgtaagaagatgaaaccttaatttaaagaaaaaaaatttaa

SEQ ID NO: 42930 - DNA, 342 bp, Glycine max
  Clone ID: PAT_MRT3847_138766C.1
cgacgaaacatatttatattctgctcatttccaaagtttggcggtcgttcatattgaaaaaccataatgtcctctattttctccaaacagtttccctctgtaatggacccgtttcaaagcatatctcttggacttctcccagtttatgccactttgatatcaaatctatgtggttgaaggttaaatatggttctaacaaatcataagaaactatagacggtgaaaactctgttctagaggggggcacctctcaattttacctgtttagcacttgtgtactttacaccgactcaattgttgaaacagccctgtttttttgatcctccagatccactttattct

SEQ ID NO: 42931 - DNA, 259 bp, Glycine max
  unsure (1)..(259): unsure at all n locations
  Clone ID: PAT_MRT3847_138767C.1
cttaaacaaaatggcaaaaaagcagatgctctctgatatactgaacgtaatttccttaatgttttggagtccaaattgcatgctgaaatgcttgattgacaccattctttctggagttgggtgttggaaagttgtttgtagctctaacttctgtttgaaatttgtcttcccctctaatttatgtggtcagagtgtgaactttttgtttttttgataagcaaagtttgaattaagtgcaaggngaagaatcatattacct

SEQ ID NO: 42932 - DNA, 499 bp, Glycine max
  Clone ID: PAT_MRT3847_138768C.1
gctagtattgagttgcctttctaatatttgatttatctttacattcacactttttggtaaaaactatttcatacttgttagggatagtgaaatacttttggagacaattagttgcatataaacatctttctctacatggtatggtcctaatagctttaccatggaaagataactcagttgcttccaaagttatatctaggggtaattttgtctaaattttattaaggcggatttccaactcctatgcttttagtgctttaattacaaaaattatatacaattgtgtatttctttgaatgtgaaatagtttgagccagccatgaagaggacaattgtcatcttaatactttttctgtatgtcatgataaaataatccccctttagtttgatgtaactatttatatccaactccgctgcatgctacattattttgtactcactattttaattaattcgaatatatcattgataagagttaacctactatagggtaaacagc

SEQ ID NO: 42933 - DNA, 571 bp, Glycine max
  Clone ID: PAT_MRT3847_138769C.1
ggcggctcgagctcattttcctcttgtgtaagaggaggtaacatttctgcgtgttagggacaagatgaagcagagcattcttccttcagtttttcttggaattttggcttgttggggtgttctcccggttactgcagaagaccgatatcagtacttcacatgggaaattactaatggaacaatttatcccctaggtgttcctcaacagggaattcttatcaatggtcaattcccgggccctacagttgaagccatcaccaatgacaatatcctcgtgaatgtcattaacaagctagacgaaaaattcctcattacatggagtggtatcaaacaaagaaggacatcatggcaagatggagttttaggaaccaactgtccaatccctcccaaaagcaactggacatacaagttccaagtaaaagatcaaattggaacttacacttatttcccatcaaccaaaatccataaagctgctggtggatttgggggattcaatgttgcccaaagatctgtgatatccatcccatatcctgctcctgatggagaattcaccctacttattggagattgg

SEQ ID NO: 42934 - DNA, 360 bp, Glycine max
  unsure (1)..(360): unsure at all n locations
  Clone ID: PAT_MRT3847_13876C.1
ggttcttcttcttttgttgttctgtgtttgtgtttgttttttctctcacctgaaaatgtcttgctgcggtggtaactgtggttgcggaagctcctgcaagtgcagcaacagctgcagaggctgcaacatgtacccacacttgatctacactaagtcaaccaccaccaagaccttggtcatagaaatgacacctattaaagctcaattcaaagatactaaaatggatatacccactaaaaacaatagctacaaatataaaccaaactactcctacaacccctacacttacaantaaaatattaaaaaagcaagcttcaagcagagatagcccttaattaaaaataataataaactattaat

SEQ ID NO: 42935 - DNA, 204 bp, Glycine max
  Clone ID: PAT_MRT3847_138770C.1
ccaatatcttgtacacgccccctttggtagttgccctttggaagttgccttatggtaaagaacacaatgaatccctgtcgtttataattttataatattttttgttctttaatattgggctgtagaactagtcgtcctgtccaaatacatgatgtagaaaatcgcctgtttagcatatgctgttgttaaattcccatcgttgtg

SEQ ID NO: 42936 - DNA, 704 bp, Glycine max
  Clone ID: PAT_MRT3847_138771C.1
ccacgcgtccgcagagacacggctgcctgtaaagccagaaaattggccagacaaaagcctcattgaagttgagcatagcaggagtgatgctttaaatggattatcagattctaagtctgccacaaatgccagggaagattccaatcagaagaataagaaatttggcactacaaaggatgactacctcaaagatgctggtgttgaacctggaataagaaaccatcaaaagtcaggcaccactttagacagtgaagttaatggcattagtacagagacaaggggctctggaaagacagaaaactggctggagaaaaacttccatgaagttgagcctatagttaagcaaatttgagcaggatttagaaataactacatggctgcaaaagagagagtcaatcaaactttagatataccaactgagatggaatcacttgggggtgttgaagatgatggagaacttgactggatgcaggatgatcatcttagagatattgtctttcgagtccgtgagaatgagctggctggacgggacccattttatttgatgaatgatgaagatagggaccattttttagaggtcttgagaaaaagtggagaaagagaataaaaaactttctgacatacatgaatggctcctttcaaatattgagaatcttgattacgggagcagatggcattaggtattatgaacccaccgggagaaa

SEQ ID NO: 42937 - DNA, 255 bp, Glycine max
  unsure (1)..(255): unsure at all n locations
  Clone ID: PAT_MRT3847_138772C.1
aaaggcgagacaaaacatagttttgtaagtaattttagttcaattttaatcaatgaacggtactaaacatgcttataaaactgaatttaagttttgtgtttattataattattgttgtaagcaggtggcaagtgatggttagttgaagacgattgttgacaccttctcatcctcctcttaagaagaagcaaaagaagaagaatagtctttcttgtgcctggtcattctagttatattgtaaaagnctntttcttc

SEQ ID NO: 42938 - DNA, 347 bp, Glycine max
  Clone ID: PAT_MRT3847_138773C.1
gggcgaacaaaggattaatggactttgtttttcttttatttaagcagtatttatttttactggtgaattagccatacagaacaaaagaaaactttttttttttttttcctcaggaaccgataataaactactattaattgcattggcacatgaaaccacaatttagcatagctaactgaaaatttcactatagctaggagggccaccattgcacaaaaaactgattacacatttcacacaacttcatttgataagataaccaacactttttggagccaaacttcaatttcaatacaaacaatgtgaacaattttaaatgatgcatgtagttgattaaaggttttttt

SEQ ID NO: 42939 - DNA, 1100 bp, Glycine max
  Clone ID: PAT_MRT3847_138774C.1
cggctcgagttcacacccaccattggatccaccaatctccaaccttcttctccactgttccgtttctctctccaacggtaactgcattgcccctttctctctctagagttctttcctatttcaatctgttgcatttgttttcatgttcattttttcctgtgtgattctgttgcattgcacgtggtcatgctaaaaatctgtttttgattggaattctgagggccccagaagctcatttgatctgggtttctcttgtttttgtgttgaaggagagtcttttgttttttgtggcgagtttgttgcacgtttaagaagcaatggcacgcaagaagatcagagagtatgactccaagagattgttgaaggagcactttaagagactctctggccaggacttgcccatcaagtccgcacaagttacagaatccaccgatttcaatgagctaacagagaaggaaccctggcttttatcttcaaaattggttgtgaaacctgacatgctatttggtaagcgtggcaaaagtggtttggttgccttgaatctggatttggcagaagttgattcttttgtgaaagagcgtcttggcaaagaggttgagatgggtggatgcaaaggacctataacaactttcattgttgaaccttttatccctcacaatgaggagttttaccttaacattgtctcagagagactagggaacagtataagcttttctgaatgtggagggattgaaattgaggagaattgggataaggtcaagactgtatttatgccaacaggagtgtctcttacatcagagagtattgccccacttgttgcaacacttcccttagagatcaagggagaaattgaggaatttctcaaggtgattttcactctatttcaagacctggattttactttcttggagatgaatcctttcactttggtcaatggaaagccttatcctctggacatgaaggggcgaacttgatgacactgctgctttcaagaacttcaagaaatggggaaacattgaatttccattgccatttggaagggttatgagtactacagaggctttcattcatggattagattgaaagacaagtgcatcttt

SEQ ID NO: 42940 - DNA, 837 bp, Glycine max
  Clone ID: PAT_MRT3847_138775C.1
gctactagtacctaactacgattcatctctctctcatacactctattgggctctctgtcccctaccactctttcaaaataatattcttttttatctcaagcggtggaacactcttctccaccatggtgaattgaagtgtttgagtttggcatcttctgatgctgcttcatttataattattgtcatcaagtttcagtctcattctggatcactgagctgattctcttaatgtcaagataaaaaaaacaaaagagaaggtagatgatgcagggaagcttgagaaatgcaaataaaagtggaaaagcctctagcagagaaagaaaattggctttgcagcaagatgtggataggttgaagaagaagcttaggcatgaagagaacattcatagagcattggagagggctttcaacagacccttgggagctttgcctcgtcttccgccttatctccctccctatatactagctcttctggctgaagtggcagttctagaagaggaaattgttaggcttgaagagcaggttgtgcatttcagacaggatttgtaccaggaagctgtctacatgtcatcttctatgaggaaattggaaaattcagtttcagctcctccaaacaagtcaaatccaacattagatagtcccaagttggataaattgaagtctcttacccaaacagctggtaattcaacagcaacatctgaaactaagcctaccacaacactcactgaggatagacaagggaaagagaatcaatcatgtactaattcttccaagagcaggcagcaatcatccaatcaaatgaacaaaacttccattaaaaacattgacagtcaatca

SEQ ID NO: 42941 - DNA, 436 bp, Glycine max
  Clone ID: PAT_MRT3847_138776C.1
tttgaaaaacagtttgtacagtaatagcccgagctcattatttttattattaaagtatctgaggagagtatcagctttctaattcacaaactctggcttcagtttcaatgagataaaaaaaaaggtatggcacagatcagtttatggtgttaaagaaggtgtattaagaaaaggaaaaaaaaaaaagagagactgtttcataatccatgattagtgattgaatctgaattccattgtttccccctttgttagcctctttgatttgatttgatatttggtcttgtattttattttgtttctttgatggattctaacttgttctgcattgaatgagaagggagatgatgcagggaagcttgagaaatgcaaataaaagtggaaaagcttctagcagagaaagaaaattggctttgcaacaagatgtggatagggtgaa

SEQ ID NO: 42942 - DNA, 542 bp, Glycine max
  Clone ID: PAT_MRT3847_138777C.1
ttattgttcgacttctttttttttttatgcttctttttttatatgttttttttgtttccccgaaaatacattataaaaatagcccacctctaataatgacgccccaaaagtttcagaaaaagataggcaaaccatattcccagataaaatgcaacaagatcttaaccctgaaaaaacaccattagaaaagacaaacaaggggcgggaaaaaaaacactttttcaaaaatcccagcccgcggaacaggaccctgctttaaatcccagggaaaaatccaacccctggggttgtaagggctggtcaacaatttgggcccgcgccttaaggggaccctccttctgcctctgggcaacttgacccaaaaaggactctactacatctgggaccggttcaaagggaggagctcaaggggaggataccaggtcggcataacccccactgtggtacccctaaaaaacaccccgaaaatgaaccggatggtgcggggcctttactttagcgacattgtcgggaacgggccaaccataattctctcgcaaaac

SEQ ID NO: 42943 - DNA, 224 bp, Glycine max
  Clone ID: PAT_MRT3847_138778C.1
ttctaccatgcatcatctccgctggtgacagctctaaatgagggtcgagatgtgatcatggatggtaccttatcatgggaaccatttgtggagcaaactattgctatcgcaagaaatgttcacaaacacaggtaccgaatgggggtatggtataaagtacctgaacatgggacagttactgagaattactgggagcaagtacatgatgcagaggatcatcaatc

SEQ ID NO: 42944 - DNA, 1510 bp, Glycine max
  unsure (1)..(1510): unsure at all n locations
  Clone ID: PAT_MRT3847_138779C.1
ttttgaaaaacagtttgtacagtaatagcccgagctcattatttttattattaaagtatctgaggagagtatcagctttctaattcacaaactctggcttcagtttcaatgagataaaaaaaaaggtatggcacagatcagnttatggtgntaaagctgcgcattaagataaggaaaaaaaaaaaagagagactgtttcataatccatgattagtgattgaatctgaattccattgtttccccctttgttagcctctttgatttgatttgatatttgttcttgtattttattttgtttctttgatggattctaacttgttctgcattgccagggccaggttggaattggaagctcttctatctatctctattttctattctctagtctttttctcacaacctgccatttctttctacttccattcaccataacgaaacgccaagctactagtaccttacacgattcatctctctctcatacactctatttttctctctgtcccctaccactctttcaaaataatattcttttttatctcaagcggtggaacactcttctccaccagtaccaccatccttcttcttcttcttctctccaccatatatagtatttgactatttgtaatattcatcatgttcattgtgcagtggtgaattgaagtgtttgagtttggcatcttctgatggtgctttatttataattattgtcatcaagtttcagactcattctggatcactgagttgattctcttaatgtcaagataaaaaaaataaaagagaaggtagatgatgcatggaagcttgagaaatgcaaataaaagtagaaaagcctctagcagagaaagaaaattggctttgcagcaagatgtggatacgttgaagaagaagctaaggcatgaagagaacattcatagagcattggagagggctttcaacagacctttgggagctttgcctcgtctattttgatgttgaaaactatagataccagcccttctggctgaagtggcagttttggaagaagaaattgtaagacttgaagagcaggttgtgcatttcagacaggatttgtaccaggaagctgtctacatgtcatcttctatgaggaaattggaaaattcagtttccgctcctcctaacaagtcaaatccaacaatggatagtcccaagttggataaattgaagtctcttacccaaacaactggtaattcaacagcaacatctgcaactaagcctaccacaacactccctgatgataatagacaagggaaagagaaccaatcctgtactaattcttccaagagcaggaagcaatccttcaaccaaacgaacaaaactccaattaaaaaaattaacaatcaatcactgcagaaaaagttggatcatccaaaaaggaagaaagaaccaaaggtgaaaaaccagcaagttgcagatgtaagaaatcatagtccacataaaaattcaccagaagctcagagtccaaatataatttcagaaaatattctaaagt

SEQ ID NO: 42945 - DNA, 132 bp, Glycine max
  unsure (1)..(132): unsure at all n locations
  Clone ID: PAT_MRT3847_13877C.1
tgcancgacagaacagaccatgaatacaaggaggccaatgcgctnggagtggataccgttccggtcctaggaggccctgttacatacctagtagctctccatgcctgcccagggagatgagaaaaccttttc

SEQ ID NO: 42946 - DNA, 346 bp, Glycine max
  Clone ID: PAT_MRT3847_138780C.1
ctgggtcgagcgctacagcgcaagggtcgtgtttctatgtttaaggtacagcgtgtgatttgagaagggtggactgggtgcttacgctggcccttatgtgtatctgacttactgtataacgcccatgaaacatgagcggacattagtgttgcacactatatgtcagcgaactgcgctgtgatatgagcgagtgagacagtgcagattgatgctacaggtatggccggcgtgtggttagctaacggtgcgataaaagcttgctttcatgatattgctgtgtcgagtctgattatgctcgagatggcgtaaatgcctttcggggtggacatggatacagctatgatgg

SEQ ID NO: 42947 - DNA, 1619 bp, Glycine max
  Clone ID: PAT_MRT3847_138781C.1
ccacgcgtccgcaaaacctgaaaacctaacagaagaaagtgcaccggaaagaaagcagaaagcagaaagcagcgatggaaatccactcagaggaggagaatggcgtagcgaacgagtcacaagcacttgagcagaaggagaagcgaaaggggaagcacgacaagcccaagccatgggacgacgacccaaacatcgaccactggaagatcgagaagttcgacccttcatggaacgacggcggcatgctcgaagtgagctccttctccactctctttcctcagtaccgcgaaaagtacctccaagaagcttggcccatggtcaaatccgctctcaaggaattcggcgttgcttgcgaactcaacctcgttgagggttctatgacagtttcaacaaccagaaagactagggatccctatattatcatcaaagccagggatcttatcaagcttctatcacgaagtcttcctgctcctcaggcgataaaaatacttgacgatgaaatgcaatgtgacatcattaaaatcagtggcatggttcgcaataaggagcgatttgtaaaaagaagacaacatcttgtgggtcccaattcttccaccttgaaggctcttgaaatactcactggctgctacattctcgtccagggaaacacagttgctgctatgggttcattcaaaggcttgaagcaagtcagaagaattgttgaagaatgcatgctgaataaaatgcatcctgtatacaacattaaggttcttatgatgaagaaggaacttgaaaaggacccagcacttgcccaggagaactgggacaggttccttccaaaattcaagaagaaaaatgttaagcaaaagaaggttaacactaaacagaagaaaccatacactcctttccctccacctcaacagcccagtaagattgatatacaattagagactggagaatactttttaagtaacaagaggaaatcagcaaagatatggcaagagaagcaggagaagcaggctgaaaaaactgctgaaaacaaaaggaaaagagaagaggcctttatcccacccaaggagcctgcaaacctggtggataaatctgaggatgctaacagtaatgtagctgacatggcaatgtccttaaagaaaaaaacaaagaagtttgggaagcgtaaatctgaagaaaatataaatgccgagacatatattataggatcatcagaacaagcatcgggaaagaaatccaagaagcaaaggtcttaaacataatcttcattttggagatgaaaaatgagcatgtgatgtctatgttaattcaatcaagatcttctgcatccaatgtctttgcagtaacagttttgacaccaatgtattttgaggcatagttgttcattccatttgtcatggagatgagtgcgtggcattgtgtatcttattgtacttgccaatagacagtaagtcagtatcatgtacactacctgttatttaagttttacatcttttccatttcaaaaacattgtccgacacatgttgatgctatatctgtagttttgacaatgagatttatttgttatattttttctagtcccaaaaataaaagggaaaaagaatcagaaacacatttattcgagtttgcc

SEQ ID NO: 42948 - DNA, 347 bp, Glycine max
  Clone ID: PAT_MRT3847_138782C.1
gcgtctctgaagtttctaagatgactttgtcgtgcattaaatgtacaggctctatcttcatagcatttggaaatttggctgatgaaaccatcaacatggaggcttttccccacaagctgctgcactttggagagatgcacgacaaagttggattgaaaattgtacataaggaatttcttacaggttgggcaactcaggggcgacctgcaccaactctgatggctgaggggtcgccatatttgcctgcaacggtgcatgatcattcagtgtctacaataccatgtgattttgtcatttgtggcaagctgacaaccataaacattatgagtgcatatggacgcaatcct

SEQ ID NO: 42949 - DNA, 332 bp, Glycine max
  Clone ID: PAT_MRT3847_138783C.1
gcgtgtcgtccttttttttttttttttttttttttttttggtaaatggtgcaaagtaaacaagacttgctaaaataatcgcaatgagtgataattacagcggcgggcttcaatacattaccatacagttatgcttctatgacctatcgggataacgatcccacttatgtatgacactcccacaattgcggcgctgatccaaacttcgggattggctgcaattcctaaaatatccaaaccctgagtcgcaatccaactaggagcatcgttaagtatgcactgtccattatccgtaaaaactggcgcatgattaggggcgtttgccctaggacc

SEQ ID NO: 42950 - DNA, 466 bp, Glycine max
  Clone ID: PAT_MRT3847_138784C.1
tttttcttttcttctttcttcttctttctttctttttttttcttttgggggggggttttataattataatctaattaaagaaagaacattacaaaggagaggggggttaatttgggggggtaaaaaaaaaaaaaaaacacaaaaaactgaaccttgggtaaaaaacgatgggtataactaccataaatttttggccaagaaaaagggggaacctacctaatcaaacagaaaaaagggaaaaattttttagggtctaaaaaaggacaggcattattatataagggggggggtagaaacaccaaaaagtaaattatttccacatgtttcatgccaaaggggaggccttctcctccattcaccaaatgagggcctccccttgaaccaaattaatgaacaagggtaaccaaaaaaaatttggagtactaaatgggggggggttcatttaggacttgaacccaagtaacca

SEQ ID NO: 42951 - DNA, 239 bp, Glycine max
  Clone ID: PAT_MRT3847_138785C.1
cttctacaagaccaccgaatcgtacttctactttaagactacagatcagtactattgcgagaatacgtcagaaatcgtgcggctgcaacattaccaccaatgtgtacaccttccatatgactacatacagttacatataccacaacactacaacaccttacactctatgaaacacttcaacaaatacctcactactcattagcataaattcaatccataaatcatacatcaattcctct

SEQ ID NO: 42952 - DNA, 531 bp, Glycine max
  unsure (1)..(531): unsure at all n locations
  Clone ID: PAT_MRT3847_138786C.1
ngagtccagctacctcacagtcatggcggactctctcatggaaaaaccagcttatgttctgatcgctgttggctcttcgttccgtgattcttgccaaccgctctgcgcgaatcatgcttggtggcctctcgcccctgactgagccatctttccattttgcgacacttcactatgttatgaggaccgggcggacgacttggagtcccgcttaacactccaggaagcgacacagcgcgttctaaacccttctgcactgtctttcacggcttgccggtcctgcttattaatggtgggaagaggctctttatggtgtctcaaactcggggcctgtatcacgttttgacaagaaggtgcgctgcgcccttagctgtgccgccgtgctcctctctgctgccggccgctgtgcctgttcggggcacaatatggggcaggtcgtgccggccggggctggatccttgtccattgtggatttcgctggcttgacgttttggagtcctagtgttattgtgctccctgaccctatgtgggggc

SEQ ID NO: 42953 - DNA, 259 bp, Glycine max
  Clone ID: PAT_MRT3847_138787C.1
cccgatcactttcaatacaaaccaactcacttcacttatctaatcttctaaacagcttcctagctaacgaatacgagcccttcactcacagacagagggttccattcatttaaccaaccctttatcattatctaactcacaacttctcttgctactactactaacacgatgctacattaaaaaaaaaaatcatcatctactatagtctcttctaagtagattaaaacatcatttggtctactcaattcataataaccac

SEQ ID NO: 42954 - DNA, 230 bp, Glycine max
  unsure (1)..(230): unsure at all n locations
  Clone ID: PAT_MRT3847_138788C.1
gnnncgcgnagcacgcgtacgtnagcgcggaattcngcncgaganaccttgntctatactacacagtacanacacnagangaannntggcttccatcctccactactttntagcccnnctcgctttctngcncngancttntctnctganccgacncagtcaccccnacaaaaccaatanaccntgttgtnctacccgtncaaaatgatggtgccacacagcanncggca

SEQ ID NO: 42955 - DNA, 248 bp, Glycine max
  Clone ID: PAT_MRT3847_138789C.1
cccacacattcacccacgcgtccgaccacgcttcctaataaaataacaaaaataaaaaaagggtacatacaataaaagaaataaactacactaaacaactaataattccactctctattatcaatcatctatgactattacatacctataaacatgctaaacataccatttttcctcactaataacttcatgctgcttactacatttcatctttctcaaacatgcacacaccttaatctccatcaatt

SEQ ID NO: 42956 - DNA, 606 bp, Glycine max
  Clone ID: PAT_MRT3847_13878C.1
ccactcgttcggtagacccttaatgttgcaggtcacaaaaaggaggaatttctttaggatgatctccatgctgacataccccggggagcgccgtggcgaacacaccaatccgcacactagtaagcctcatgttgaccaccaaattcgcgcgcactatggtgatttcgtttctctgactaataaggggatcatagacaaaggaaagacgaaatccatagagagggcgagagagagagaagattaaggcgcagacctcgatagtatggaccaataaagcctttgagacatgatcgtggacgtgacagcttaatcactgacaatggtgatgatgctgtcatgtccattctattggccatgcgcctatggtatcatatccttgatggctgtgttttaatccttgtctgtgtctctctcactctgtatcttgttcttgctattgtgtgagatctcctttatggactctggcttgagctcaacatggtgctctcctgctgtgggtacaccaagaggttttactttgtgctcagtactgtgtgcaccatggcgcctcgctttgtgttctgagcgtggtgctcacccttatgctcctactccttattgtgccct

SEQ ID NO: 42957 - DNA, 653 bp, Glycine max
  Clone ID: PAT_MRT3847_138790C.1
cacgcgtccgtgcttccgttcatttccgtttcgttttcctacttttttttctcgctcccgttttctccaattcttcctagcaacaatcccaatggaaagaggtgcttacagaggccgtggccgtaacggtaatggtggccgtaacagttacggtggtggtcgcggtagttacggtggtggccgtgacggtaacggtgaccataacagttacggtggtggccgcggtggtcgtagcagttacggtgatagaagttctccttctcaatcacagtggcaaccaaggtcaaacccttctttttcttctccaaaacctaacaattctcattctcaagttcaaacacaaactcaagctcatccagacattggatcttcgaagataccagagaagaaaatggacaccatcacacctgtgcgtaggcctgacaatgggggaacagttgcagtgcgaaagtgctatctccgtgtgaaccatttccctgtttccttcaatccacagagtataattatgcattataatgtggaagtgaaggccaaggctcctccactgaagaacaatcgtcctcccaagaagatttcgaagtacgacttgtcattgattcgggataagctgttttccgacaattcactggcagcttcagcgtatgatggtgaaa

SEQ ID NO: 42958 - DNA, 1456 bp, Glycine max
  Clone ID: PAT_MRT3847_138791C.1
gccactcggtgggcctatccccccggtctgccaccctctgtcattccctaccgtgcgactccttccggccctctctctcgcatccgcccagtctctggcatgtgcgcgttgcgctctcttgtgcgttggcactcctcggtcactttatggtgtgcaccgttgtggcttctgtctgcttgtctctccgccgtacttgtatcttggccatcatgcagcggacgttcttctcggccgcaattcatctgctgcctcaggtttggtgttgcaatctattgttgggttggggacttggaaatcttgaaatgctactaggggttgatttgtttgttgaaaggtcaaacctttatgcctcgttgcctttccgggcaggtttggtttttagtgaatatctactgagtggccaggcacctccagttaaagaggtcaatgatgagcgtccgctatttccagctgtgcccatattaaatgcaacttttgcaagcaaagcacaatcatttgctttatcatctgaagcaaaagatgcagctgcagaaattgaacatcgtctgcagcttggatccaagctcagtgaaattgtcaacagcaaggaagatgtgcttgccctctttgggctttataaaaatgaaggctacatcttgtcagagcacatgggaaaatactctgttgtgctcaaagaaaagtgttcacagctagatatgctcaaggcattgttccaggtcaattacctttattggctagaaaagaacgcaggaattgaaggaagaggaaccctcaatgattccaaacctggtgggaggctgcatatatctctggattatgtggaaagggaattcaaccatgtaaaaaatgatggagaattggtaggctgggtcacagatgggcttattgcaaggccattgccaaataggatttgcataggcgacactgcaccctcaaactcagtgagtagctgacatggccaaagactggtggctttcattcatgaccacttgcattacatagctgcatgaggaagctagttggactcaagatgtcttgggatcaagggcattggttggttctttgccatccattggtgagtagcacatcccacgctgcaaagcaaacaactcagtgaatggcaccaaaataaccacgaactagttgaatttgaagccatgtggcgacatggtgtgacaaaacccccggtctgccaccctttgtcattgtcaatgaatggactcctactgaccttgaatgttgaaacggtcaagtaactgggaaatacacacagcttttacttgagagattgcactcctcggataaattaagatgtgcatctaaatgtcaagcctttgcttgtttcacagccaaacttgtatctagtacatcatgcagctgacaaaaatctcgtacaaaatacattttcttccacaaatttgttgtttccaatccattatagattgtctttgccccc

SEQ ID NO: 42959 - DNA, 311 bp, Glycine max
  unsure (1)..(311): unsure at all n locations
  Clone ID: PAT_MRT3847_138792C.1
gcagaagaacaacaacgacgganccgggtgtttgccccagaaggcgaggagagcaggaacgcacacacacggcgacanaagaacccggcggggcaaaaggccaaagacacccaggcagcgacgcgacgacaaacccccacgagacacgcacacagccagcgacggcacaggacaaagggagaccccagacacaacggccaccacggagaggnacagccaacaagaggccgaccgcgccgcggagaaagcaagaaagcgcgcaacaacaccgaaaatgtatagacccccccacagaacggcgatacaaggga

SEQ ID NO: 42960 - DNA, 902 bp, Glycine max
  Clone ID: PAT_MRT3847_138793C.1
gaagatctggcgcaggtacttgttgatgaaggctttaccagcctggaagagattgcctacgtaccgttggaagaaatgctcaacatcgatggctttgacgaagacaccgtcaacgagcttcgcgctcgggccaaggatcgtttgttgactaaagccatcgctactgaggaaaagctggcagacgcccatccggccgaagacctgctctcgcttgagggtatggacaaggatttggcgatggaactggcggtgcgcggcgtaattacccgcgaagacctggccgagcagtctattgacgacctgctcgacatcgacggcattgacgatgatcgtgccggcaagttgatcatggccgcccgagcccattggttcgagtaattaggcgcggcctgaggagagaagtgcatgacgcaagtcacggtgaaacaactggccgatgaggtcaaaacaccggtagagcgcctgttgcagcagatgcgtgaggcaggtctgccacacaccgccgccgaggaacatgtgaccgacagtgagaagcaatcgctgctgactcacctgaaaagcagccacaaggctaaagtggaagagccgcgcaagattaccttgcagcgcaagaccaccagcaccctgcgtgttgccggtagcaaaagcatcagcgttgaagtacgcaagaagaaagtcttcgtacaacgcagcccggaagaaatcgaagccgagcacaaacacgagctggaagaacgtcgtgccgtagagaatgcggctcgtcaaaaggctgaagaagaagccaagcgtcgcgccgaagaagaagcgcgccgccagcctgctgctgctccgggtaacgctgcggtggtcgaagccgttgcccaggcacctgttgtcgctgccgagcctgtccgtgaagtcgc

SEQ ID NO: 42961 - DNA, 333 bp, Glycine max
  Clone ID: PAT_MRT3847_138794C.1
ctctcgcgttcgcccacgcgtacgcccacgcgtacgattggaagaaaggctgcttaatggataagattgtgatgtctgggaatgcagcacatcaaaaggagtgattgggcctcattggaacaagtatttttaacaaacagcaacagctcagagcattttgactcatgtaaggggacaaaatactgaccacattcctgggaattgaactttccacatataggtgtgtggtcccaattatggatatgaaatgtggcgttctgcgagggcaaatcaaacttgatggaatgtgaggtatcttattgacaataccaaacagtttacagttgttgatat

SEQ ID NO: 42962 - DNA, 523 bp, Glycine max
  Clone ID: PAT_MRT3847_138795C.1
attaaatcccacacaagtgggaatctttggcctgtaagcaaccttagctccaagcaattctgaaaactcttccttttcccaattcttcccttcaaaacttaaagaaacttcaattcctctccttatgagagttgtatttttcttgagaaaaaaaaggaccaaaaaaaatgccacagagaatggcagttacacatgcagaccttgaaccaagcagaagtaaaacagatttgagcagcaaaactggtgcctttcttatggttctcacaatcctaataggcctcttctgcttcatcctatgtctcatagcagaagccacacgttccgaggtgacatggatggacacaggtgggaaagaaaatggagcaaaatcagaatgtgtttatagtggaagtgggaaagtgccattgctatgtgctgcttctgcttttgttggacttgcatttgccatggtaatggaacatgcttacatgctgatagcagtgagtaaatcatcaccttctttgcttacctgggaccctgattc

SEQ ID NO: 42963 - DNA, 538 bp, Glycine max
  Clone ID: PAT_MRT3847_138796C.1
ataaaaaaaattagaaagggagggaaaaaaaaaaaacaaaaagaacacaaaaaaaaacaaacaaaaaaacccaaaaaaaaacaacacacaaaaaaaaacaaaaaaaaaaagaaaaaaaaaaaaaaaccaaaaaaaaaggggaaaaagccaaaaaaccccaaaagaccaacggaccccccgccccccccgacggaaaaaacgacccgggaagggcacgagaaaaaggaaacttaaagggcccggcgcttaggggaaccaggggggccccggaacagggggggggcccgggagccaaaaaagggggctgtaacgcggccttcaaaggggggggggtcccaagcccacctccggggggaaaaggtgaggacacatccttttcaacaaagggggggggaagggcccctaccggacgaacggggccgcttccctaacgactggggaaccaaagaacccaaggggccggcgggacaaacgaaccaggccgggatccggaggggccccggggcagggaaggggaaagggggccacccaagcccaa

SEQ ID NO: 42964 - DNA, 156 bp, Glycine max
  Clone ID: PAT_MRT3847_138797C.1
gaccaaatcccggaaaggcgtgccatcgggagagagagctttcaatgactactcggacggcgctcccgctctactctgctacattgctttgctcgcgatgataaacttctttcgttccctaatcttcaactatacccacatcattctcttcccctt

SEQ ID NO: 42965 - DNA, 250 bp, Glycine max
  Clone ID: PAT_MRT3847_138798C.1
aaaaagtccatgtccgatcatacccaaacttttaggcattacacctccattaatgggtgattctgccaaagcaatggtttatacaactgtctctgaataatttgatggccatccagcttcaattccttatctatccatgcgcactaatactatggatcgcactatcttgtgcagagatactaaaaatcctgtctcagcacaacctgaaacacctctccctgtaaataagttttcaccaacttctgcaaaa

SEQ ID NO: 42966 - DNA, 244 bp, Glycine max
  Clone ID: PAT_MRT3847_138799C.1
aattatgtgacaattgaaggaccattccatcgaatattttgaccacaagccaatgccttggtagatacactgctgtctgccagtaagcacgaagggacaaaaaataattggtccgcccggggcatagataagagaaggacatggggaatgcggctctaaatagagggcagaccattggtctgttgagacggagcctgtccaccgcaaaggaaacctcccgaagctcctggaaaggcccctttat

SEQ ID NO: 42967 - DNA, 409 bp, Glycine max
  Clone ID: PAT_MRT3847_13879C.1
ataatatgactactgccattttttttatttttgttttgggaccaaacctaatcttattccattttctaccgtttattctaccctacccagccgggccttggatttcccaacaaggccctaagaaaaaaatttttccttccctaaccctggttttacaaacccggtgcccgcccccattgggcggggttcacctttaaggggggttttaacccatttgccccctttttaagggggcggggttttcgcccaaaaaaaggattccccgtttccggggggggtttaatatttaaaaggctggaaaccgggcaaaccccccctttaaaaaaggggatttttccctttctttcaaaaaattattccaacattttccacctttaaaagctttggggaacaaggccctgggaatttt

SEQ ID NO: 42968 - DNA, 406 bp, Glycine max
  unsure (1)..(406): unsure at all n locations
  Clone ID: PAT_MRT3847_1387C.1
gggttttgatctgtttaccctctcaacttaccggtttgggctgccgtgtgctatggagagaagcaaatacatgaaatagctggtggcttactacaagtcaaaataggccacaggcctatccgcttagtgagtcgtgcactaacnagggaactttctttctgggggggggggggggacctatagggctacggattactcctaaggtcagttcaggacactaagagtcctacacattgtccactaaacatagcagggaaccaggggcctgcgctcttctgtaaatttaagcctgccacatgggcgtggttaaagccctgttgaagctgacgatccccatcactatctggcggaggtttaacatctgcacggaaggaaaaaccctgactttaccctccagatgcacctt

SEQ ID NO: 42969 - DNA, 456 bp, Glycine max
  Clone ID: PAT_MRT3847_138800C.1
tcgacccacgcgtccgcagaggtagaaggcggaggttcaaattgatgcgcgccggttcaagcgttttgcagaggagaagatgacacatgatcaggaggagcttctgtctttggaagatttgctctataagagagaacagataattcagtcacttacctgtgaagttcaggcttacaaacacaggttgatgagctttggtcttgggggggacgaggctgagggtgatcaatatgaacttccaacctatgaatatcctcctttgaagtgtaatgtgatgcatgatgctatggatgctgataatgatgacactgatatagagaaatatgtggtggatgaaaccccaagtgaccgtgtgtggaacttggaaaataggattggtaaaatggggaaaacctggactgacagtctgatggatgggggtgggacagggaaaaatgtttttgagaaagtgtttcg

SEQ ID NO: 42970 - DNA, 210 bp, Glycine max
  Clone ID: PAT_MRT3847_138801C.1
accaagcttcctattgatggacgattctattatattaatgcttaggatcaatcagtgcacgtcaacatttggtttgagaaatgtgtttcgcttaactaagtcatgattaatggaagatagctagcattgtattaaaacaacttataacaaacatagcaactgcgaaaactgtgacattacacaacttaaaaacctttcaggacatccccc

SEQ ID NO: 42971 - DNA, 488 bp, Glycine max
  Clone ID: PAT_MRT3847_138802C.1
gtgaagtaaaagctgctaacccaaattcttgtcagtggtaaccatgacagttggttccttcttcatcaggacctccagggttctcaactcctccaactttctgcttctctgcactctcagagaaaaggagaagtgaatttttgggaggcagaatgtgtcaagattgattattcgaacaaaaaggttttctgtcggtccaatattgacaacttggtgggaagtaacgaattttccttggactatgacttcttggttgtagcagtaggagcacaagtaaacacttttaacacccctggtgtcaaggagaactgtcattttctgaaggatgttgaggatgctcagaagattagactgtctgtgattgattgctttgagaaggctgttcttcctagtctatctgatgatgagcgaaggtcaaatcttcattttgtagttgttggaggaggtccaactggtgtggaatttgcagccgagctgcatgattatgt

SEQ ID NO: 42972 - DNA, 1075 bp, Glycine max
  unsure (1)..(1075): unsure at all n locations
  Clone ID: PAT_MRT3847_138803C.1
tgtacggctgcgagaagacgacagaaggggtgaagtaaaagctgctaacccaaattcttgtcagtggtaaccatgacagttggttccttcttcatcaggacctccagggttctcaactcctccaactttctgcttctctgcactctcagtggtggtggtgtagtggcatactcagaatcacaatcaggagctgaacgtcctagtattgaagctaatgagcctgccaaaaagaaagtggtggttcttggaacaggatgggctgctaccagtttccttaaggatctggatgcttcattatatgatgttcaagttgtttcacctcgtaactactttgcatttactcccttattacccagtgtcacttgtgggacagttgaagcacggagcattgtagagccggtccgaaacatcattaaaaagagaaaaggagaagtgaatttttgggaggcagaatgtgtcaagattgattattcgaacaaaaaggttttctgtcggtccaatattgacaacttggtgggaagtaacgaattttccttggactatgacttcttggttgtagcagtaggagcacaagtaaacacttttaacacccctggtgtcaaggagaactgtcattttctgaaggatgttgaggatgctcagaagattagactgtctgtgattgattgctttgagaaggctgttcttcctagtctatctgatgatgagcgaaggtcaaatcttcattttgtagttgttggaggaggtccaactggtgtggaatttgcagccgagctgcatgattatgtccaagaagatctaatcaaactatatccaactgttaaagataaagtgaaaataacattgattcaatctggagatcatatcttgaacatgtttgatgaaagaataagttcatttgcggagcaaaagtttacaagagatggggtagaagttcaaacaggatgccgggttgtcgctgttaatgacaaggatattacagtgaaggtgaaatcaacgggagatgtttgctcggtgccccatgggttgattgtttggtcaactggtatttcaactcttncagttataagggact

SEQ ID NO: 42973 - DNA, 143 bp, Glycine max
  unsure (1)..(143): unsure at all n locations
  Clone ID: PAT_MRT3847_138804C.1
gccattatttcagttcagattcattccctccaacatttgttgtnacttntacnacatttactatctcnctaaataatgtctttganctcttcctctntcagttgtnnaaacccatgttaacttcagancctganntgttgccc

SEQ ID NO: 42974 - DNA, 278 bp, Glycine max
  Clone ID: PAT_MRT3847_138805C.1
ttgctcgagcattaatacaatgctctcatcgattttcctcataaacctgctttctcgtgttgtaacacactcattactgatcatatttattcacacttcccgctgtccaatatggaatagctgataatcgacaggctcaagacccaaccttgatgggtcgcgctggacttcgttgtctgattgttaacgattctcaaaaaggttgttggtgtattcagatgggactacgtcaatttcatcctagcacaggataaactcaaaacgtacggatcttgggc

SEQ ID NO: 42975 - DNA, 288 bp, Glycine max
  Clone ID: PAT_MRT3847_138806C.1
tctcgagccgaatcggctcgagcgttttctagaaggtcttgcatgaacaaaacaccctcttcggctaaaaaacccagcaacaatggagtcataagatccgtgaggttttaccccgttagcgtaatcctaggtgaggattctgaaccgcaatctaatagtcatagtcataataagaaatgtaacaacatttatgagagtgaatctaatctcactgtgagaaagattactagaagttcttccataaaggagctgaagaagaacactgttcggggaaaagaaaatgcaacc

SEQ ID NO: 42976 - DNA, 339 bp, Glycine max
  Clone ID: PAT_MRT3847_138807C.1
cttggggccaaaaaaaaccacccttttcaaggggggaaaaatccaccccccctgccccgttaaattaaatcaaaaacgtaacccccccccagggggggggaaaaattctttccccccccaaacgggaaaagggtacccccccttacccccccccaaaacgggggggggtcaaatttccctcccaaacaaaaccccattgtttgccggataaaaagggggaaaacaatgggtggccgcaacagagggggaaaatttttttccccccctaatgacccgccaaatgccccaaaccaataaaaaacccccccgggcccaaatccgaggttccctccccggggc

SEQ ID NO: 42977 - DNA, 240 bp, Glycine max
  Clone ID: PAT_MRT3847_138808C.1
atggacgctcttgttcaggatactcatgcatatgctcttcatcaggatacatatccttgcccacgccgtggacggttgctgtatctctgtgcgattctagcgtgctgccatatgctgagccttatgtgagtccagttccttacgtgctgtcggtgctcttgcggttgcatgtcgtccttgttgctcgatctgctgttggtgctgattttcctgcgggtccggactacccttgcggacctt

SEQ ID NO: 42978 - DNA, 306 bp, Glycine max
  Clone ID: PAT_MRT3847_138809C.1
cccacgcgtccgcccacgcgtccgggcctgtcggcgctgccggaccagcgcagatccgacgggatgctcctgacgccgtgcgggacgccggcctacgtggcgccggaggttctgaagaagaaggggtacgatgggtcgaaggctgatatatggtcctgcggggtcatcctctttgctcttctttctggctatttgccctttcaaggtgagaatgtgatgagaatttacagcaagtctttcagagccgattatgcgttccccgaatggatttcccctggggctaaaaacttgatctccaatttactc

SEQ ID NO: 42979 - DNA, 423 bp, Glycine max
  Clone ID: PAT_MRT3847_13880C.1
aaaaaacccgggggcatttaaaatttttttagcctttttttaaaagaatcaaggcccccttttagtttgaccctttgggcaaagacttgggggggggtcccctcccttaaaaaaaaaagggggttaaattagttttttttaaaaaacccaacaaaaaaaatttttttccaaaaatttcctaggggcctcaaaaacctaaattggttaaggggcccgcaacattagaccccctttaaactccaaaaagggccctttaaatttaaaagtttcccgcccctttaaaaaccccggccccattaaagggccctcctactttttttcccatttaaagaaacaagacggtttttcccttgtttttttcccaaagaccgggggggacttttttttcagagaaacaaaccttggtccctcctcggggagaaa

SEQ ID NO: 42980 - DNA, 214 bp, Glycine max
  Clone ID: PAT_MRT3847_138810C.1
gaaggcttcgactgctacgcccgcatgctctctctgcttcgtcgcttactgtcactcggcggtctgacaatgtggatgcgtctcatgcagcgctagtcggaggaaccttcttcaggctaaaaatacatgtcctgtgcatttcgagattttaaactacatagttagcacaagctaatgcaaaggagcccagtacccacccaagcaatgatgtgct

SEQ ID NO: 42981 - DNA, 579 bp, Glycine max
  unsure (1)..(579): unsure at all n locations
  Clone ID: PAT_MRT3847_138811C.1
ttgcgtggtacatgtgtagcagtgccgcctgcttggggggggggggggggccaaaagtaacatccaagtttgtgattaaagggttgggatatgacatgaccttgtatacatcagcaagcgcacgaggttggagcgggagtagcaagaagtgatagctcaagggtaccggctgtggtagaggcatggcaagcaaaggctgtagtatatctaaatgtaagatttaaaaaaaagacactcactcactcatggaatttaaaaccaacctaatcctcctaatcaaaaggcatagtattaggataggataaataaggcacgcactaaagccaaggctgagtattaaccctacaagtaaaattagtggggtatgccgacgtgatgtccggcgaagggctgcgaacagtccatatgcctagtccgggctgctagtagtaggggggtacaaagagcaagtacaaagtgaaggcagctaactattttaatgcgttaaaaaggtgcccaattaaacacaataggtgatatccagaagagggtacagaagtgagtggcgctagtancaccaagggtttggttaccaattgc

SEQ ID NO: 42982 - DNA, 557 bp, Glycine max
  Clone ID: PAT_MRT3847_138812C.1
ccacgcgtccgcgcactctaaaacactaacagaaacaacggtttattcagttcaagaggaaaacaaatgtgaattgaaagcaaatattcaaatttaactcaaagaataaagaatagagacctaggaatgaactaagtttccaaatagaaagaagttccccagcaacagcgccaaaaacttggtcaagcctggcaagtgcaccggatcacgcaagtagtataaaacgataagaactgagtattgaactctcagggaacttgtgttacttggtaaagctatattcagtgaataggtgtctagaatgaaaagatatgtgtggactatgaacaggtatgtaaactaactattaaaaaggaaaatcacgtgagtaatgatgtgtaaagacaagtagacaacatgttggtcttcctagttggtgcctgatgttataaggatattctctacttaacaatgctcatgtgctctatggtgtctcctgaaatgctaaaccccgatccctggtgatagtctagcctaatcctaatcaaaactagtcaaaaaaaaaaaaaaagggcggc

SEQ ID NO: 42983 - DNA, 267 bp, Glycine max
  Clone ID: PAT_MRT3847_138813C.1
gtgaccgggcacacgcaccagttcaaggcatataagcacgagggaggcgtggtgatcaaccctggctctgccacggagacctacagcagcatcacttacgacgtgaacccaagctttgtgctgatggacatcgacgggctcgtgtggtggtgtacgtctacgagctgattgacggcgaggttcaggtcgacaaaatcgacttcaagaagactgcgacgatgcacggctagccctatccttccactccgtgattgagtgcaagacatg

SEQ ID NO: 42984 - DNA, 754 bp, Glycine max
  Clone ID: PAT_MRT3847_138814C.1
tggtgaatttttacaaattatggagcaagatctggatgcaagtgttaaggagtcttcaccattgcaacagggattcatttttcgattgcgtgtacagcagcatgttgatttaaagtttctctttttcagtcttgcgttcaacgtattttataggcggttgtgtcctagcatgtaggaaatttgtgaataaggctgagggtcaggctgaagcattgtttcttcaaaaagacaaggcattaaaagcgttgcacccagctaacttccattgtgtgtttgagtggaacaattctattgttgctaacttcctttggaccaacagaatgggtcattaattgaccatatagatatgaagctattaatattcaattggatgcccgatatgagtagtacagacgtaagtatctgaatatctaatgatttagtattgtttttggcaacttttgcaagctgtgctttcggagattgttcatttgtatactagattttgggtgaatgaaaatatgaaaaggggtgtcatctgaaaatctagttccttcgttcttgtgtatttcttctggtatactatctcttcacactctgcagagtgcttgatttttttttgccttgtggcagttaatataaagccacaggtgaatcaagtagcaagatgcttgccatgcaattcaatatactttatacacgtctaaggtattttggttgaatgaaaatatcaaaatgggtgtcatctgaaaatctagttccttcgttcttgtgt

SEQ ID NO: 42985 - DNA, 188 bp, Glycine max
  Clone ID: PAT_MRT3847_138815C.1
gctcaagacagatccttacttgaatgccaaactctcagatataataatcgggacttcggctgcaccaactgttctaccaccctacaactttacgaatgatgatgttgaattcaatttgattgatggtgctgcgacagctgataatcctgcgatggttcgcgccagtaaagtgatgccacacgaggagg

SEQ ID NO: 42986 - DNA, 448 bp, Glycine max
  Clone ID: PAT_MRT3847_138816C.1
cttgtgatgtttaagcttatgcagcatgtgctgatgttggcttgacatcaggtgacactgcaactacattgttggaatctggtttgcaaaaagacagtgggttaattgaggactgttttgtaaggaagtgttacgatgttcatagcgcaaatgagcacgcaagagaaagatttgttggctggaaatttttcctttgatattaaatctggctctagattggaaaaagtttcctctactaaggcacattttgttagtggaaaaaccttcaaatatgatataatgtggtgactgcgttcacatgaattcagaagatgatctatgttgagacgatcaagatagacccatgactattgatgccagattgagacaaagaatagatcctgaatgcaatgaggttcatgctgagatggaaacaaatttgtttaaattgattattgatgatgatgaa

SEQ ID NO: 42987 - DNA, 728 bp, Glycine max
  Clone ID: PAT_MRT3847_138817C.1
aataaaagaaagctaatagaaagtggtgatttaaaagataaagcaccatgcaagacactgaaaccagtcagggaggcatcgaggtcctatctcgatcttaatatgcctcttgaggaggttgaagagggcaacaattacaaggctcgagctcgagccgcaatatgaaagtgacgcctggttaaatgatttgtgtgatcaagttgatgaaaaagttgtttttaagcctttcaactttgattctattgctgagcaagtaattaaaagcattgacacgcaatttcaaaagatgttaggatcagagtttatacttgaaattgagtatgaggtcatgacacagatacttgcagctgcttggttatcagacaagaaaaaatctttggaagattgggttgaacatgttcttggaagaagctttggtgaagctcatcaaaagtaccactttgcacctgaatttgtgatgaaactggttaattgtgaaagattttttttggaagaacaatctcctggagtatgccttccagctagaattaacttgaactgaatttttgctcactatgtattttgtaattacttgtaaaatgtagcttgtaggatatagcatttggtagccactagcttttttcggctaatcaatcccacaattttttcttttgtggtgatcctatggtaaaagaatgtatcttcaccagttttcatgttaattctaatgtctttctgcttctgcattt

SEQ ID NO: 42988 - DNA, 265 bp, Glycine max
  Clone ID: PAT_MRT3847_138818C.1
tgggaactttgagctcatggagaagagactggagccagagaacttcagatccagcatgtgctaggctcctgtattcggcctctgcactgaatttagcaaccagagtttgctttttagaccatcacgacaccagattaggagcacaaaagatacgagtccctgaagtgggcctcctatcatcgatatcagaggcacaatctgcatcaccgaaagcattaatgctgagagggtgtatggtggtggcatgcaggtaggtgcgaccatg

SEQ ID NO: 42989 - DNA, 608 bp, Glycine max
  Clone ID: PAT_MRT3847_138819C.1
cgatctataacctggtctttagctctatgactgcatgggatggaggaaacatgtaagcgtgaaatattctaacggacacgattgtatatgctaggcccaataatacgaggtcaaaagggctaagatgctcaggtacatgctcgagatgaaagaccaggcatagcaatgcgacttgtttcaaggaatggactgcattccttcattcgcttccaggtaataacgctatacacttgatacaacgtatttattctgagcccctctaggaggcttcttctgatcctcatgaacaataaagccaaatgggccattgggatgaagaaactccgtgcactgtgttccaatgcttacctgagcaagtgtatttgaagcgcccttagcgcaaatagcgattttgtcctgcctacttttgacattcacaacaaggtccgatatttcatctgcgagatcaaactgttgttcaatcattgccaacatcgtatataaccacctggaatgagatcttcccccttggaagggcataggccactttcccccattagcgcagatcggatccttccagttgggctcaatcttgggcttgaagcaatgaaagtgcggccccacaccca

SEQ ID NO: 42990 - DNA, 491 bp, Glycine max
  Clone ID: PAT_MRT3847_13881C.1
aaaggacgggcttaaaaggggggggaggtttttatctgctgctgcttcaccctgtctgagggatgctgaactaaaccttcctgcataataatagggggggggggggaaggcattgggggccccataggttgaaagtattatttttgaccatgaccaggacccccataatcaaaaccataattggcagggccaccaaaattgggacccctggcctgaaaaggatggggaatctgggagtatgggacaaactgctgctgatgttggctcgaaaaaacttgaacaagttgaggggggcctgcagttgcacctctgtaaccattcttttcagttttaggcatgggaccatttctgatggggttgaaagaaccaggttgttaaaccaatgtaaaaggatttgggggagtttggggccggctaaaggcgatgttccctgcaaactcacccatattaccctgctgcacaggcaggttgaaagcctgcccctgtctccc

SEQ ID NO: 42991 - DNA, 548 bp, Glycine max
  unsure (1)..(548): unsure at all n locations
  Clone ID: PAT_MRT3847_138820C.1
ttcccggggggaccacgcgtccgaacgaccccacctctccaaaacggggagggggggcgggggctcctcggattcctctcattggggctcgtttcgggtccggggtcgtcgttttgtgccacattgggaccgtggagccctctccgctagggggaataatccgaggggtctgtggggggaacccgttttctangggttcttggggggtggaaggggggaaccngaggcgaatttctctctgcgattttattaaccgtgctacggtggggctnagctattatggggtangcgaatgtggcttcttcggttctttggtttgaaaaaaaaggggttcatggggagaggggggagcttgctttggtgtggggtgatatattggtggtggtggtggtggtttggtttgaggcggtgttcaaatgggtgtggggtcctttcttgggaagcgcctcttattgggtgggcgacttgaatgggtgatcatcaaaaaaccggtcctggggagagagacatcnagcaggcgattatatctcttaanaaggggcatatct

SEQ ID NO: 42992 - DNA, 885 bp, Glycine max
  Clone ID: PAT_MRT3847_138821C.1
ccgggcgtccgattttctgaatccctacatttcctcctccagccacgggcgcgtatcgacgacgatgctctcatccaaacctccgcgccggaaagttgttccggcgaacggcgatgactccgccgacaaactcgaccagctcctcctctcctctgccatctccaacaacgaggacctaggcccgttcatccgcaaggccttcacctccggcaagccggaaacgctccaccaccacctccgccacttcgcgcggtcgaaggagtcagagatcgaagaggtgtgcaaggctcactaccaggacttcatcctcgccgtcgacgacctccgatccctcctctccgacgtcgattcactcaagtccctccctccctctccacctccaactcgcgcctccagcacgtcgcgcgccctcttctctcctcgctcgatgccttcgtcgagacgcgcaacgtctccaagaacgtcaacctcgccatcgactccgtccgcacgtgcgtcaagctcatggaggtctgcacacgcgccaaccgccaccttgccgacgacaacttctacatggcgctcatgtgcctcgacccgatcgagcgcgagttcttgtaccaaacggcgtcgtccacgctgatgcggatgctggaaaagaagattcctgagattctgtcctacatcgagaggaaggtgaacaatgagttcggtgactggttggtggagatccgtgtctggagtcgctatttaggtcaattggcgataggtcaagcctaggcggctaggctcacagaagaagacctaagaattaagcagcgccgagcggacgaacagagtatgctcaccgtgagggactgtatttattcattggacgaagatgatgaagacagcatcatcggcggc

SEQ ID NO: 42993 - DNA, 318 bp, Glycine max
  Clone ID: PAT_MRT3847_138822C.1
ggtagctacatactttgcgagtagctgttcttctgcgtctgttttacaagtgttcgagatccagcatctgtagcaacggcagcagagtcggacaccaagcatcacgagacgatggaaggaagttattcacaaacgatgcagattgatccgcatcgggctcgatttccatgcaccgttgtgtggtcaccacatcctgtgatcacgtggatcattccttgcatcggtcacattggcatcagcatacacgatggcgtgatactggcttttgcacggcctaattttgtgtgtgtggacaaatttgcatttggagctgccaac

SEQ ID NO: 42994 - DNA, 628 bp, Glycine max
  Clone ID: PAT_MRT3847_138823C.1
tccggaatttcccggggtcgacccacgcgtccgggcgaactaattatatctgactctgtaacggccccccacttgcttctttttctgttacagaacgctacgtggatgacaccgacctattatatcttactggatacgatcacacgggacgtatctaatataccgtaatatgaaaaacatggatgtggagtggaggactttataagaaaccctatatgatgaatgggctaacaagggagacgaaccggtattggcagagactgtcaactactacaacaagcgtgcgactcttgtgttcaaggaatggccttctctgaacgaagacatcttgacagaaagggcggaacagaagcggacctaaagaaggttggcttacacacatgggagcagttaagtgtcaaagatccacatcttaacactccaacagcgctttcgtacttatgagccatgacagagaatctgttgagggagggatacagaattgtaggaatcattggaacaccaacggagcgatctgcttgtagaccacagaggcgaaagcaggacctttaagcttcctaatcgcatgtgctacgttgagtgataccttcacctctctagcgatcgagctagagggtgctcctatcta

SEQ ID NO: 42995 - DNA, 3320 bp, Glycine max
  Clone ID: PAT_MRT3847_138824C.1
aattcggctcgagggcaacttgtccaatcttgacaccttggacttgtcctctaacaacatgcttcctccttcgaagttgcacggtgactggacccggttgaacaagttgaaggtttttttcatgtttcagtccaacttggttggggagatcccacaaaccattggaaacatggtggctttggagagattagatctatcgcaaaacaatttgagtggaccaattcctagcggtttgttcatgctggagaatctgagcataatgtttctatctagaaacaatctttctggggaaatacctgatgtggttgaagcattgaatttgaccatcattgatctcacacggaatgttatctcaggaaaaataccagatggttttggaaagctccaaaagctaaccggtttggctttgtctatgaataacttgcaaggggagataccagcaagcataggacttcttccatctctggtagattttaaagtatttttcaacaatttatcaggtattctccctcctgattttggtcgctactcaaagcttgaaacatttttggttgcaaataatagttttagaggaaacctaccagagaacttatgctataatggtcaccttcttaacatctctgcctatataaattatctgagtggggagttgccacaatcacttgggaattgtagtagcctgatggaactgaaaatctatagcaatgagttttctggtagcattcctagtggtctttggactttaagcttgtcaaatttcatggtgagttataataagttcactggtgagcttcctgagagattgtccccaagtatttcgcgcttggagataagtcacaatcggttttttggtaggattccaactgatgtatcttcatggactaatgtggttgtttttatagcaagtgagaacaaccttaatgggagtgttccaaaaggtttaacatctcttcccaagctaacaactctattgcttgatcataaccagctcacagggccacttccatcagatatcatatcatggcaatcccttgtaactctaaatgtgagcgacaaaaaacttgctggacctagcacagcttgatatggtctgttccccgtcattggcgttctggacctgtcataaaatctatgctctggtgaagttccttctaaacttcccagaatcaccaatctcaatctatcctccaattatttgacagggagggttccaagtcaatttgaaaatcttgcttataacacaagctttttggacaattctggcctatgtgctgataccccagcactgaacctcaggttgtgtaattctagccctcaaaggcaaagcaaggactcatctttgtctcttgctttgattataagccttgtggcagtggcctgcttcctggctttgttgacatcactcttgatcatcagatttaacagaaaaagaaagcatggattggttaactcatggaagctcatttcctttgagaggctgagtttcactgaatcaaacatagtgtcatcactgacagaaaataatattattggcagtggcggatatggtgcagtataccgtgttgcagttgatggtttaggctatattgctgtgaagaagatttgggaaaacaagaagttagataaaaatcttgagagctcatttcacactgaagttaagatattgagcaacattcgccacagaaacattgtgaaattgatgtgctgtatctctaatgaggactctatgctccttgtctatgagtatgtggaaaaccgtagccttgacaggtggctgcaccggaagaataagtcatcagctgtgtcaggttcagtccatcatgttgtccttgattggccaaagagattgcatatagccattggagctgcacaaggtttgagctacatgcatcatgattgctcaccacctattgttcatcgagatgtgaaaacaagtaacattcttttggattctcaattcaatgcaaaagttgctgattttggtctggctaggatgttaatgaagccaggggaacttgccaccatgtcatctgtgatcggctcatttggctatatagctccaggtgaatgacttgccaaaatttttgtttccttcaaaataaatataggacaaaacttacatacgttacttttaagtactatttatgccaatattctctaaccaaaattgatgatttatcagtaatcattgttaattttagttaccaagatgatgaagtgctaattttgattggaaatcaacaacaattatacctttaattagtattgtatctaagatttgtccacgaatatgttgctaatgattagttgaattatgtctcattttcccttggtataactcataagtctaatatgaattgtttttgacatacttgaattgcagaatatgctcaaacaactcgagtcagtgaaaagattgatgtcttcagctttggagttatgctattggaactgacaactggtaaggaagctaattatggtgatgagcactcatctcttgcagagtgggcgtggcgacatcagcagttaggaagcaacatagaagagctgctagataaggatgtcatggaaaccagttacttggatggaatgtgtaaggttttcaaactcgggatcatgtgcaccgcaacacttccttctagtagaccttccatgaaggaggttctacgagtattgctttcttgtgaagattcattttctaaaggagagagtattattggccactatgatgatgttccccttcttaaaaattcaaaaagagagcataagttggatattgataatgatagctagctaggttggtatcatgttgaggttgtaaattgctgatttgtgtgtgactaaccaactgagcttccatggagattattgccaattctggaattgaagtcagtgaaacagccactggatagcagatttagaacatcagcgctatagaatgcatggaaagtgacaccaaatagaagtactttttggtatgtgagattaattaatcctcaggggtggtgattagttatcaggattccaattaatttctaaattgtagctactcttttgatgagtagtccttaatactttttttggatcacaatctcccaatggaaattgtgtgtcatatttaaagtttaactaattgtattcccaaggatgccatgttagtgcaaattttagcacattggattttaggatgggtaataggttctcagcaatttgaggcaatgaattttgtgttataaatgaaaagtgggttagttagttgtctcaggattgttgtatagaatagatttgattaaatgtagaggtatgttctctgttcctac

SEQ ID NO: 42996 - DNA, 545 bp, Glycine max
  Clone ID: PAT_MRT3847_138825C.1
atactgagcatcgtctagctatctcgatcgaactgtccaaggtccatgtcaccaggcgaccaattgaaccaacccaccaacctaacagccatgtgttggtaagcccagctgtgggtctttacatgcaggacttatgcagtaacttcgcgttccgcttcctagccggctgttaggtatgccttgtaacgttagcctgcctggttttattaccaacattaataagcataggattgctaggctgactaatccgccaacagctaacgtagctacacgccttattacggcctaacaccaacgggcacatgtgggttgattgcgttccattggcagcacgtataagccctaaaccaacgacaagattggtggaccaacccagccaggttggctggccaaggtcacggccactatccgggtcgcgattcgcactataataccgtattaccagatgatcagccatctgatgccattagcgccaactgcttgagcgggccggctatgcagctggggaacgcggcaaccactggtacaactgaacatgctagatt

SEQ ID NO: 42997 - DNA, 151 bp, Glycine max
  unsure (1)..(151): unsure at all n locations
  Clone ID: PAT_MRT3847_138826C.1
tttactagctagtagctagagagtagagaacatggagggcaaggttccggagagaagagttggtggtgaatctgacgaatgagagatccagatgtctaattnagattggtgnaaccgatgnctctgagtattctgagaacannaccagctg

SEQ ID NO: 42998 - DNA, 278 bp, Glycine max
  Clone ID: PAT_MRT3847_138827C.1
aaaaaaccaaccggggcgagaaaaaaaaattcgaaaaataatttccattttttttaataaaaaccaaacaaataccgttgttttttttaagtgcatgcggcgttactcatcttttacttaaactcagaacctttcatgcaacccatatctttcttagcatacccaccttgtccatattaacctctatacgtaacaacacacatcgatatcttcaaatcatttaaaccttatctaattattcctaatcaaaaccttaactctaaatatctatttttcta

SEQ ID NO: 42999 - DNA, 359 bp, Glycine max
  Clone ID: PAT_MRT3847_138828C.1
cacgatctattctcatctctcgactacttgccaggtctctatagaagcagctatcgactctctaatctcacagcttaacaacgcgggcccctacaatcaggaaaatgcacctggctttgcccatgacgtcagtcatgggacgcaatctcttgcgagtgtactcattaatatgctatataggataggacacttatacacaaggggccataatcactgccgcatcttcagagcttgtctgactaaaagcatatgattttgcactcagccactccaaattaacctcattatgtctcaccatactcaattctcaatgcagcgcttgttgtgcattgacatgaacctaaagacacgttcatttt

SEQ ID NO: 43000 - DNA, 332 bp, Glycine max
  unsure (1)..(332): unsure at all n locations
  Clone ID: PAT_MRT3847_138829C.1
cggcgctagagaacatatctgaaaagacgtccgtgnaccgcntgactcacctcactcgctcgattagcgaagagtaacactataaccgcacacagacatggatggactcactatgcgaagtatgatctctcgtctctttctcactcttagggtaactataactgacacctgctccctttatgggactgttgtacaagaccatgtatacattcgcggtcactaacctggcaccagggagccaccgaatacccggcgatccgagagagcctggagttcctgtccacaggatggaaggatcattcggagaagatcatctttgaccggatgatcag

SEQ ID NO: 43001 - DNA, 970 bp, Glycine max
  Clone ID: PAT_MRT3847_13882C.1
cagaatctggagaggacccttgtccatccattgctgctgttgtagcctcccagtacggctgcgagaagacgacagaagggatcatttaagaaggcaacaggacaaaaaccattgagaataatcttttacagggatggggtaagtgagggacagttctaccaggttttgctatatgagcttgatgccattcgcagggcttgtgcatccttggaacctagttaccaacctccagtaacatttgtagttgttcaaaaacggcatcacgctagactcttcgcaaacaatcatgacgacagaaatagcactgataagagtgggaatatcttacctggtactgtggtagattctaagatctgtcatccttccgaattcgacttctacttatgcagtcatgcgggaattcagggtacaagtagaccagcacactatcatgttctctgggacgagaacaatttcactgctgatgagattcagtctctgaccaataatttgtgctacacctatgcaagatgtacacgatcagtttctgtagtgcctcctgcgtactatgctcatttggcagcttacagagctcgattctacatggaacctaatgtccatgaaattgctaaatctcgaggtgcaaggtcaaaagatgagtcagttcggccactacctgctctgaaagagaaggtgaagaatgtaatgttttattgttgaatgagacaaaatagagagacatctaagtagagaaacagcagcatatgtaggaaaaggaaattaaattagcagagctcagaaagctcaatatgtacaacctaacgtgttcataattcataattctccgcatggaaaattttgacaaagtctaggttgtttttcagtatttctagtgcttagggaaggtaataacttatgtagaaattatttgtgtggttgacaaacaattttgacgacagaaatagcactgttaagagggggaatattttac

SEQ ID NO: 43002 - DNA, 251 bp, Glycine max
  Clone ID: PAT_MRT3847_138830C.1
gtgctttcgagcagtgactgtagtcttattcttcttctctaacaaaatggtcatcgtcgattccgattacgaaggtgccgccatcgaagccctcggttctctcttcaaggtcacccaagtcttcctctgggatgatggccttcaggtttcatcctcagctgaacgctggatattggatgaagctgatgacaatcacggctctgaccccgttcctgatttgattgaccttattacacccgaggatttggagc

SEQ ID NO: 43003 - DNA, 392 bp, Glycine max
  unsure (1)..(392): unsure at all n locations
  Clone ID: PAT_MRT3847_138831C.1
ctaangagcgtaatatggttctattgattngaggaaacctcacactacataaacttatcaaaatatttcatcccatttctcccttgtactaatggttggcattcctaaacttaatcacgtcatcactcattcctaactaaacattttattatatcactaaacaaataaaataaaaaacttttagcaccactactttatcgcattatccaactaaaacactcacataaacttcacatttcccctcttcactttctttactcaatcttatcatttagaccctctttttctgtaactgaaaccttcttactttcatcaaattcttctttttcttctacaaatacttccttatttttcttattaactaacccttttttttccttcttccttttttt

SEQ ID NO: 43004 - DNA, 252 bp, Glycine max
  Clone ID: PAT_MRT3847_138832C.1
tttatactgtcccatctcccttacttcaactccattactgttgtatcctcttcaacaacaatcatggggtttatttactatgggggtgcttaccaatcttctatacatataacttttcaaataaaatattacaatattcttaccaatcttataattccgtcctcacctacctttatcttctttaattcccttaaaacataatcttattcctatccttctcacaatttaattctacaaatccaatcaacaatt

SEQ ID NO: 43005 - DNA, 865 bp, Glycine max
  unsure (1)..(865): unsure at all n locations
  Clone ID: PAT_MRT3847_138833C.1
cccacgcgtggaatgcaagtgatagttgtagttgtacaacaagagaactggtggtgcaactgcaatgcaaggcatcggcggttgaattaatgaatcagttccatttgaatacgtaactagccagatattcccctgtataatcctctaattactaactaccaccaccaccaccactctcccacttcaaaattcatgtctccctcttccctccacgcgctcctcatcattctcttcctaggttccgcacacgcgctcaaggtccccttccgagtcaacgatgttctccccgttctcccccacggaatctcctggccgctcctcaacaacctccacagcgccgtcgacttgctcccttccttcgtcgccgccgtccctcccgataacgattccgttcagtggagagccgcatgcttttacgataatcaagcctccctcgaattcaccgcccccggccacgacgacgccgacggcttgggcggtgccgtgctccgtctcaagacagaagctgcacacagttggacctgcatggatctgtatgtatttgcaacgccttataggattacatgggattactatttctctgcgcgagaacatactttgaagtttgattcatgggaagatcctgcagagttggaatatgtaaagcggcatggggtttctgtgtttctcatgccatcggggatgctgggaacgctcctttctctggttgatgttttgcctctattctcgaacactgcatggggtcagaatgccaacttagatttcctanagaaacacatggngagctacatttgagaagcgcattcagccttggcgtgcaactgttgatcctgcagatgttcattctggagatttttagctggtc

SEQ ID NO: 43006 - DNA, 655 bp, Glycine max
  Clone ID: PAT_MRT3847_138834C.1
accacgcgtccggtccgtagtgaagtgttcccattatcatccggtgcattccacgtgtgtccgtgagtccccaccggcgccgtaaccactctccgccgtggcctccaccattaatggaccaaatcccctaaacatccttctcccaattccgaatccatggctcgctcttctctccacgcgctctccaccattctcttcctactacgcttgttgttatctccttccacacacgcccttaaactccccttccgagtcaacgatgttctccccgttctcccccacggaatctcctggcccctcctcaacaacctccacagcgccgtcgacttgctcccttccttcgtcggcgccgtcacgcccgacaacggttcccttcagtggaagggcgcctgcttttacgataatcaagcctccctcgagttcaccgcccccggcggcgccgtgctccatctcaagacagaagctgcacacagttggacctgcatggatctgtatgtttttgcaacaccttataggattacatgggactactatttctctgcgcgagaacatactttgcagtttgattcatgggaagagcctgcagagttggaatatgtaaagctgcatgggggttctgtgtttctcatgccatctgggatgctgggaacgctcc

SEQ ID NO: 43007 - DNA, 414 bp, Glycine max
  Clone ID: PAT_MRT3847_138835C.1
cttgagcttttatgcccagctcgaaagcatcacacccaacattgaatggccatgcgaaaacaggtgacactaaccagagccaatgacgtatcagattcaccggctacgtgatggaaagagctgcgtttcgaggaaagtggatcgaatacaggagggaagtgggatattcactctgatggctctatttcagaacgaagaatcaaggctggtccaccaacaggtatgtataccaaccgatcgtgctacagattagctgatggcgatggtagagctactggagagacgcagcactgaccctggattaccagtaacctatcggagcagagcaccgacggcttaactgataccacgggccatagagataccagtatgagaatatgaaactgcaacaggcgtgacagaactgactccaca

SEQ ID NO: 43008 - DNA, 179 bp, Glycine max
  Clone ID: PAT_MRT3847_138836C.1
ccaaaggacgggggtggcttttttaagcgcatcttccttttattcccaacgcgagaggagcgggttagtatggctgggacaaacatgcaagacaagagctggggcgcaacaggcaagaaaaggttcatgatattgccagaggggaaaggtgccttctggaaacactggaacacaaccca

SEQ ID NO: 43009 - DNA, 533 bp, Glycine max
  Clone ID: PAT_MRT3847_138837C.1
cccaaagagaatcaaatcaaaacagagtggaagaggcatggagtcagtgactacaaggctttccccaaaggtagttggaggggcaaactcccaacatggcatggagtggtgtaggcactttcagatgccactgcactatccaaggtacacccaagctgactatgaggcaatgccagagtggaggcttgactgtttgctcaaagagtatggcttaccaatctttggggatgttgaaaacaagagaaactttgccatgggtgcctttctatggatcaagtgagcttccaatgttcttaggcatattcttgccatggccctcttgaaatttggaacttgttatgtgtgatataagtgagagcttttaataatgattagtactatagttagttaatactatggtgtgggataataataagataaccaaaccttttaaacaaataattaaggatttgattttaagttagggtatatcaaataatatttgttggacgaaaataatccttaaatagatttcacccctttgttggtttttt

SEQ ID NO: 43010 - DNA, 363 bp, Glycine max
  Clone ID: PAT_MRT3847_138838C.1
ggacccagattcctaaatacgaatgattctcgtctcttcaaaaagctttgggctgttaccaggttgcaaaggacaaaaaacacggttccccctggcatgcaatttcaggctggaaaaaaaccgggaacaaattctcgccctacaggcttaaacgtaaaagcaatttaagaagaattcccaccccacccttttccttgggggcccttgcaatccttggccccaaatcatcccccttttttcccaggggccccgggattgccaaccctttcatttttccttggggattgacaatacccccgctttttctttcgaaaaacatgtgaaggccgacctttcggccccatgggtggggctggcaaacaa

SEQ ID NO: 43011 - DNA, 469 bp, Glycine max
  Clone ID: PAT_MRT3847_138839C.1
ggctcgagattaactttagtactttacatgttagcattattttatacctacatggttgagagtggtacaactttgtagcataaatcatcagtgtagctgccagttattagtcttctttcttgttgctaatcaatctttctcgatgctgagattgatgcaacatatacaaagccttccaaccagagcaatctttttagcacttagcagaccccccattaaaaaggtgcgtgctaggaggaataagagcaggcacaaagggaattgtattgggttggtttctgttatgctcgaattgaggtctgttgaacttgttaatagctgtactgtattaaaaagagatttcaaccaataagagagagagttcaatagagtatgtcagagggtgtgttgttagcatttcctgtattaacaattagttagttagctagagatcctaaactgaatcataagagatcactgggaaaaatga

SEQ ID NO: 43012 - DNA, 1189 bp, Glycine max
  Clone ID: PAT_MRT3847_13883C.1
tttttcaaactaaaattattttaagccaaggaaacaatacgaatacattatacacctattccttctacaaccgtctcatgcagcttgcttggccatctaacagttttatttaggaattgggacaaagttgcataggtacttttggtgctatttttcaatcagaaatggagtttcatctcaataatccgtgtaataaaagttttttgcattaaaaagataatcatggattactgaaataaaactcctgttttaataataagaaaataaaatacaccaaaaatccctacataacaacaactactacatctccttttattattcatgcaggaggcagaagaacagaatccggaaacgagtcagagccattattaggcgcacccttgatgtcaagaatggaagtaaccaaattataaatctgaacattctcaaaggagggtatcttcttccctcttgcaaacctaggaccatgtccaataaatatagtcctcattgagaaaaaggcgttgtcataaccatgtgcaccgccacattccttcttaccagttctgttctgctcaaccttaaaaccctcatccgccaaaccaattatgggcggaatccgatcactgtccgagtaatgaagcctctcaggcaaatcctccttcaaataaaccttcaatttggccccattctcaacttttcccgaattcaacccttcattcatcttagcaacaacatgtgccggatcaacagaaggaggaggacgaatagagagtattggagtaaaatactggacccaatctcgtggaatctggatccaaggagccaaatcatccaaaaagacaagctttttatcgcaggtaccaaccatgccatggtcaccgaccatgataaggtgaacatcctgaaaaacacctctttgttccaaaccctgaatgagtctccccacaatggcatcaatttccgcaacggcttgagtgatttgagaatcatcagggccaacctggtgaccctgatgatcagggtcttcaaaatagagcgtaataaaggaaggaacttgatgagagggtaaatcgaaatagctgagaacagtgtctactctgtcctgaaaggggacggattcgttgtagggctggcaaaaggctttagggcaagtccaggggcctttgggtacctcggagccgggccagaagtaggtggcggcggagag

SEQ ID NO: 43013 - DNA, 620 bp, Glycine max
  Clone ID: PAT_MRT3847_138840C.1
tactaaccctttgggattttagcaccatgagggttctcaacattattttggtgctctttgttcttcttaccatagtgcatgtaaaacaaaacatggctgctagggtcttgaatatggagaatatcccacttaggttgcaatctcttaataagggtcctgtccctccctcaggaccttctggttgcacatacatcccaggctctggcagcacgcattgtccggccaagaaaatgaatggcaccggccggcaacgctaagcaccactagctagggtggtgctgaaacaattcaacactgatgtatgatgccccctcaaacattgaagtcttttcaatttgctggttaaagttgatcgatcagagcaaattttgttgagggagaactcaaagaacctgtttgtgtgtaacaaatgatgattcgtagctagcaaggtctaatttttcttttcctcttgatgttatagattgttctttgttcattcttgatgttgaatatacaatataatataccattttgtttaaagataattgtattatactattcctagtttgttgtattgtaccacacaaagtatttactaaaaatataaaagagttagtttccgtacgtgtttttttttt

SEQ ID NO: 43014 - DNA, 286 bp, Glycine max
  unsure (1)..(286): unsure at all n locations
  Clone ID: PAT_MRT3847_138841C.1
cctcgtgccgaaattcngcacgaggcctcgtgccgcctcgtgccgcctcgtgccgaattcggcacgaggaaccaatcatctttagttcttcagtaatttattgtgggattctattctaagattttgagaatgtctagctgtgggtgtggaagcagctgcaactgtggcagcaactgcggttgcaacaagnactctttttttttttttttcgntgagaagacaaccacagagactcnaattttgtgtgttgggcctgcgaaggcccnaggggaggggggtgaanggc

SEQ ID NO: 43015 - DNA, 505 bp, Glycine max
  Clone ID: PAT_MRT3847_138842C.1
ccacgcgtccgtggtcgcgtgggcaattcgggagatactttgcacgagggccagtggaaagagatgattacgcgctagaacttgcaatgggagacgaatgagctgtgcctaagagaccttgccatctaaaatttgaataccatctcaaatttggacccatgtagttctgagtatgccggttatctttttgtggctccaaatctcactctcagccttctttccttcggctgttagcgtttagagtgacaaggacacttcctgagaggaggaataaagttctgctctgctctctattttccaggttgcccccttcccgcctttccttgttcggttgtcacttattagcctggtgcgtggctgcgtgcagttctcgtttctcctctaatagatggcacacgttatgaagtgtgtaaaggtgtcaaaatccaaaaacatccagcattcacaatctttgtcgtgatgaagtgtgtaaacttgtaaaaaattatccaaaatctttaccatg

SEQ ID NO: 43016 - DNA, 1103 bp, Glycine max
  Clone ID: PAT_MRT3847_138843C.1
ggacaacgttgcttgaatttgaaattttcgtttttttacgtcacgtgagtgtcaccgataaatcggaacaaaacaaacaaccttagcctgatgcctgagttctccgagcccgatcatgcatttcatcgtccatgtccatggatatgaagatgaacatgcttttctttctcgtcctttttgcttctgcaatttcctcttctcttgccaagggttccttgcaacaaacccttcttccttcagaagaattcaatgacggtagtaatgcaagcagtgcaaggcatttattagaggatgagtctcaggctcagacaagtgttgatttggcacaaggatttatgtccaatgatgaacttgaatgggccatccaagaatttggacaaagatgcagcaacatttccagggtatacagggattcttggaatgtatctattggaaagagtgtaaatggttttccattgtgggtgatagagatttctgacaagcctggagaagaagagactgaacctgcatttaagtatattggaaatgtgcacggtgatgaacctgtgggacgtgagctgcttatatttttggccaattatatatgtgataaccatttgaaggatcatttggcattcggctcgagggagaatgttcaccttcatttacttccatcaatgaatcctgatgggtttagtttaaaaaagcgtggtaatgctaataatattgatctgaatcgggattttcctgaccaggtatatatatatatatattttaatagtaatctgtataaagtatgttgataaagttggtttaaggttgtggaggatgctttattcttctgctggacatggcttaagaatttggaaaaaggatttgataccccattccattagcgtatagatattttgtgtttgggtgcctagcctacaatcagatctatggttacctaattcttgttgtactgcttgtattaggtcaccatagctttgcatagtatggtgctaggttgtatatataacagtaccacttgtactgtacttcatattatatataatactactatattttgctgaaaaaaaaaaagttggttgaaggtcattgttactatgaaatcaaattta

SEQ ID NO: 43017 - DNA, 940 bp, Glycine max
  Clone ID: PAT_MRT3847_138844C.1
tcctctagagcggccgctttttttttttttttttttttttttttttaaggaacatgtagtcgagtattattaattattttcttgcaaactaaaaaaactgactatatagcatgtaaaaatcaaccgagatcataaacacgtgatagttggaaagcatagaataataatttctggataagaaaggaacgtgataataatatttttcatctgtcccacaagttataatggtagggtgagtcaatagcagccatcttctgctgcaagttgaggtccttatagaaccttttaatgaactcctcagccgccacgtcaacttggttatcgtctccaccttcttcgtccttcaaaggaaagggcgagtctgtgattctgatcagttttctcccaattggactttttccgaacccgggtaacggagaagcctcaaccttgttattgttgagtatttcgagcactttctgtacggtcgaaacgtcgtcgtggtgggggaacttggtggtggtggtgcagcggtggtggtggtgacggtgcttattggtgctgcgcttgatgacgtggaagagcgcggggctgttgctgcagctgaactcgtagtcgcgcgggtaaacggcgtcgtcgttttgggagcggtggaggatagtgttggctatggcctttgtggctgccagcttgccacgtttgaacgacaagttcaagttgaagtcagcggcgagtttgctctttgatatgccctttctcaacatcaggaacacgatgcgtactatgttccatagcttccttgccactacttgcttcgggcttgggcttgggcttgggcttgcttccatttccattttttgaggaagtgtatgtactgatggtggtgactaattcgtgactgggacttttttgttgttatctatgggagagagaggatgaattggaattgtggcttggtgtc

SEQ ID NO: 43018 - DNA, 165 bp, Glycine max
  Clone ID: PAT_MRT3847_138845C.1
tatacactcatcagtcatcaccatggccaatctagttgtgtcccaatgttgtctgcttatcagtggctgctgcatcgctttcagttccagagagtattcgcagtaagacgagtgacaggatccaagtactcaatgccctcaaaccggataaccgtatagagtcag

SEQ ID NO: 43019 - DNA, 204 bp, Glycine max
  Clone ID: PAT_MRT3847_138846C.1
gccacccctggaagattcatttatcacttacaacaatgcaacacttccctctctagaaattcttttgatgatctcaacgacgcatattaaatgctttatatgacttttgaaccacacataagggatgtaatgaaaaatctttcaaagaagcatcaaacactgacttttactgcgactatgccatggtcgattgaatgaattatc

SEQ ID NO: 43020 - DNA, 405 bp, Glycine max
  Clone ID: PAT_MRT3847_138847C.1
aagaagaagagtgattcctctctcgcaagcaaatatcgaacaagagagaaaacgaaaatggacgatgaagttgttcagcgagtgttccatgaaggaggacgcgattacttccagcaaccgccttggacttcttgtctatcttcctcttccatcctgcaatctctccctctccatgggtcgggtgatcatggatattattcgttggataaatctatccccgaacgccgatagacaaaggatggccttgttacggatggcattgatggaccatgtggatctgggaatacacgcttaacataagaggtagcatctgggattggttgtacctgcatcccaaggaggaatgatgccgtatcagtatatgactggaacggttgctcttctatagatcctgatgccctgatc

SEQ ID NO: 43021 - DNA, 308 bp, Glycine max
  Clone ID: PAT_MRT3847_138848C.1
ctcaactcatatttccaacacgcagaacctacaatgtcgctcctattcaggcgctctcggggcacgtacgacgacaactacgacgtgcgacccgccgtttacgcctgctacggcttacaccttcgacaactgctcatcaatcttctacggtgtacatcagccagaagctcacgtggtccatgactccaactacaggtgctactccggtttctgagctccatcatgttcacataaccactaccatgactgcgttactaaccgaagctgctgccccgatcaccacacacgtcacaaccacccacggcgaa

SEQ ID NO: 43022 - DNA, 220 bp, Glycine max
  unsure (1)..(220): unsure at all n locations
  Clone ID: PAT_MRT3847_138849C.1
ancgtgccnaatcggctctacnanttttgataanccgngatcacaggttgtctcacctcaaaancggaaanaanagcaatcgtttacntgatttcaagantctctcantttcttcctactnctgtgtgtacgattttctnaanngnangaaaatcacttctctgtgcgggccacagacgtcgtgnnatcattngctntgtccncacnacatacnactnct

SEQ ID NO: 43023 - DNA, 1896 bp, Glycine max
  Clone ID: PAT_MRT3847_13884C.1
tttacgaattcaacctcgttacccggggatcctctagagtcgacctgcagtgagctcaaatatagtggtgtagcaatagaaacatttttgttttatgtttgcaatttctctttctttagtatgtaaacttgcatttatgaggtgcaagtctggtatttacttgtccttttgtatttttttatagtaattttattgttttcttggttatctttattatataatagttgaagtaaatgtaaatggatctatgcttccattgcaggcttggggtctatgttgtcaagtagtattacaagctcgacatcaatttcacttatgtccacaatggctacttcccttctctctgttaaaacattttcactttctgagcttgagaaagcaacagataagtttagttcaaagagagttctaggtgaaggaggatttggacgtgtttatagtgggacattggaagatggggctgaaattgcagttaagatgctaacaagggataatcatcagaatggagaccgtgaatttattgcagaggttgaaatgctaagccgtctgcatcaccgtaacctagtgaaactgattggtatatgcattgaagggcgcaggcgttgcttggtgtatgagcttgttcgcaatggcagtgttgagtcccatctgcatggtgacgacaagataaagggaatgctagattgggaagcaaggatgaagattgccctaggagctgcaagaggactggcctatcttcacgaggattccaatccccgtgttattcaccgtgacttcaaagctagcaatgtgttactagaagatgactttactcccaaagtttctgattttggcttggcaagagaagcaactgaaggaagtaatcatatttcaacgcgggtgatgggaacttttgggtatgttgccccagaatatgcgatgacaggccatttactcgtcaaaagtgatgtttatagttatggtgttgtgctgcttgaacttctcacaggcagaaagccagtggatatgtctcaacctcagggacaggagaatcttgtaacttgggcgcggccaatgttgacgagtagagaaggtgtagaacagctggtggatccatctttggctggaagttacaactttgatgacatggcaaaggttgctgctatcgcttcaatgtgtgttcactcagaggttacacagagaccttttatgggtgaagttgtgcaggctctcaagttaatatacaacgatacagatgagacttgtggagattattgtagtcagaaggattcctctgctcaggaatctgattttagaggtgaccttgccccttctgatagcagttggtggaatgcgggagggctaacccctcgaataacttacgggcaagcttcttccttcatcactatggaatacagttccggtccacttgaagaaatggagaacagacccttttcaacttcaagcttgattggggatgaaatatctttaccgattaggcatgggaatagatcagggcccttaagaacagtccgaaacaagctgtccttatatagatttacaggaagtcggagtgagcatggaggaccttcttccaagcccaattggaacgatggttactgggtttaagaggtttgggcctttttttttagtgtttttgaaatgtacagtttctaaagggatcagaactaatgattgagtgactgatttagcttaggcatctcaaatttctgcagttttcatgttatggttggagagatacaggacgttgacaaattttgaaatattgattcattatacaaggaggaagtgtaacttaaacagtattgtaaatgccttgaattgtatctcgtggcgtcattcccatttccatttccatttctatcagcaaggactagccaaaatgaactttatgac

SEQ ID NO: 43024 - DNA, 221 bp, Glycine max
  Clone ID: PAT_MRT3847_138850C.1
cttcatccatgggaggatttgagtgtcattaggtgcacaggtttatgtgaggtttactcattaatctggctactgtatcaattctcaaaagaaggtatataatgaatggttctaagaaatactcctatgaaggttgctaaacctaactccgatgaatcttggacggatccatttgattctaattctgacggaatggatgccaaaaagtatcattcctctag

SEQ ID NO: 43025 - DNA, 446 bp, Glycine max
  Clone ID: PAT_MRT3847_138851C.1
ggaagagaaaaaaccacaatgttggagaaaattaaaaatgcatcaagaaacaccaaagagacccacaaggctgtcataggatgaaatgaaaacaaagcacaccagaaccatgcatttacaaccaacaaaaaagccaagcctgaatcataaacaccaacgagcaccacccgcctatgccttccactcttcctactatgggacggagtgagaaccaagaagccactctagaagaagtccgaatatacccaacttccactgggcgcgctccgacatgatgagcaccttcaccatgctccaatgatgcaacaggtgggggtggaggaggagaagtagctgaggccccctctgaaccatgtgcccgggtaggccctccttaagcgaggcgaggaacccacaccttacctaagacagtgcggaatcaacaacctcaaggatctcaacaggga

SEQ ID NO: 43026 - DNA, 164 bp, Glycine max
  Clone ID: PAT_MRT3847_138852C.1
ctcaactccagtcaattgcatgcattgatccatggctagatacattcatattgtacttttggggaatagtgttcgtactggcgagcttggcacgtgcagacgcacagcgggcgttcttcgtgttcggggaatcccctggggatcatgggaacaacaactttttg

SEQ ID NO: 43027 - DNA, 382 bp, Glycine max
  Clone ID: PAT_MRT3847_138853C.1
ccagacctacagcgcattcatcgttgacgtttgggtcacacagcgcatgataggcgctgggatgaaccctctacgcgaaatgggcgtgcaggtgatatctccagaccgtgactcgtcttcagtgatcttgcgctgacacaaaacacctacgcccatcacctagtgcgtgccgatggtctagcgctcaggggaagtacgacgtgatgctcgaagttctcatcacacccggatattgcacggtcatcaagccagataatgacgcgcgatcatacggaatacatgctgaatggcttcgacgacaaccttaccatgcagacagctgcggacggcgtgcgcaccattcgtctggaaggctcgcgcaagatcatcatccaaatcatcg

SEQ ID NO: 43028 - DNA, 469 bp, Glycine max
  unsure (1)..(469): unsure at all n locations
  Clone ID: PAT_MRT3847_138854C.1
ctattctttcgtgcacctttttcaccggcccaacctattgcatgtatgaatgaatctcctaacccatctataatcaagttggatggcaattatgatgttacaggagatcagcttttactcttatacttaaagtaccaggtcaaagtttaaagtaacttaggacaaagcgtaagaaaaaactatataaaatgaatcaattgctgggtacattaaggcacttaccactggacctgctttaaggcatatgcaaggtacaggaatgtcggatcaacanggccgtccttggattacgcatagacactgcaagcataatcacccatgctttcacaaacaaaaagttggaaatttttaatcttaaagagcaggtattcagctgctccctagacgtgcttcttagacaactcctgtagctctgcatcgggcttgggagtcaaattcttgtttaacctcttgatgaagcgaacaaact

SEQ ID NO: 43029 - DNA, 264 bp, Glycine max
  Clone ID: PAT_MRT3847_138855C.1
gaaaaacagagaaagcgacagggcagagaaaaagaggttccaaagcagccaccataacagtgaatacacatagttacaaaacaagcataaggtaaaatttacctagaaaaaggtcttcgatctcgtggcataaacattaaacaaaagggtgttctatgttttaattattgcaattggggttaattgttttatagagatttccgcctgtttcaatccgtgtaccaaggtagccacttttttccttttcttttgtttttcctgtta

SEQ ID NO: 43030 - DNA, 288 bp, Glycine max
  Clone ID: PAT_MRT3847_138856C.1
aaaatgcaactcgaactcgatccgattcggctcgagaattactcaaaattgatcctaacccattcttcggatccaagtgtttcaaatcaaatttcatcgctagaccagtcctctagttgcccccaacgattcatcaacgcgccgatttttctctgcagaacaatatataattcaatttttcacgtcaatctcatcgttctcgcgcttttagagaagctgtggcgttcttggaatctgggatcgaagaaaacttctgtaatgggctgtgggcattattgaagttgtagt

SEQ ID NO: 43031 - DNA, 311 bp, Glycine max
  unsure (1)..(311): unsure at all n locations
  Clone ID: PAT_MRT3847_138857C.1
nacgtcgcangcacgcgtacgnaagcncggaattcggctcgaggttaaaancacagagnngncaacgatnacngannacgaagncatgggnntnaacncganaccaaggccagannagnaganctagnngcngccnanacaagannagtngcangnngccnnngaatcanngccacannaganacnnctnngaacntgtnatcaacccanaactcnncacngnatnngncaggagnangntaattgggnncagntgncgacaattttggcggagnnctaaagcnangagcagcgtatcaaaanggaganan

SEQ ID NO: 43032 - DNA, 573 bp, Glycine max
  unsure (1)..(573): unsure at all n locations
  Clone ID: PAT_MRT3847_138858C.1
tggattaatttatagggccatgggatttccaccagagtatttcactgttttatttgctattcctcgaatggctgggtacttggctcattggagagagtccttggatgatcctgatacaaagattttgagacctcaacaggtttacgttggggaatggttccgacattatacacaagtcaatgtaagaactacatcaagtgatgctgacaagcttggtgaggtggccatatcaaacgcctcaaagcggcggcttgccggatccggggtatagcttacaggctcaatttagttatatgagcaagatgaccaaaaggatgatatttctctgcataaataatgctactggtgtcacatccatcacctaccagaagaacgatgctggtgtgatttgttgagccattatgtgcaagtcacgtttcagtacttctattttaaattattcgttaattgtcacaatgaaatagtaaatagaaaagcttacatatctcatgggagcagtaacatgtacaattgattagcaaaacgtttgtattcaagaaataaacagagttttctgtgtaccagtaaaaanaa

SEQ ID NO: 43033 - DNA, 696 bp, Glycine max
  Clone ID: PAT_MRT3847_138859C.1
ccacgcgtccggagttttccttgctcattgaagaggatatggatgatgattggaatgtagatgaagaagaaaataaggagttggagaatattaaggtggtagaaaagccttcattctatttgagaaggagtagcagaggattaataggtcgtggaagtcagtagtggtgatcaagcttcttgaaagaaaaataggtcatagggctttggagactagattgaagtcaatatgtataaggaagatatcttgcatatgattgacattgggaatgactacttcctagtctacttctctcataaagaggatatgatgaaggcacaaattgaggggccatggcttatatatgaccattatttggttgttcgtgagtggatgccaaacttccatccttcaagtgaggctctagaaaaggttgttgtacgggtaaggttttttggcttacccattgagtgttatgactccaaaatttggaatgctataagggatcgtattgggagaacaatgagagtggaccaaaatactttaacacgggagagagggaaatatgaaaaacaaggggaggttctaccattagtaatcaaggagaggattacccgatggtccaagaaattgggaagtctcaattagatccccagaatagaaaaatggactttcaagaagcagggaggatcttcgtcattcctctaggtctcctga

SEQ ID NO: 43034 - DNA, 697 bp, Glycine max
  Clone ID: PAT_MRT3847_13885C.1
gaaaaactacggcaattcaaactaaaattattttaagccaaggaaacaatacgaatacattatacacctattccttctacaaccgtctcatgcagcttgcttggccatctaacagttttatttaggaattgggacaaagttgcataggtacttttggtgctatttttcaatcagaaatggagtttcatctcaataatccgtgtaataaaagttttttgcattaaaaaggtaatcatggattactaaaataaaactcccattctaattatatgaaaaaaaaatacaccaaaaatccctagacaactaaattttgtcccttttattcatgcaacaggcaggagaacagaatccggaaatgaggtagagccattattaggcgcacccttaatgtcaagaatggaagtaaccaaattataaatctcaacattctcaaaggagggtatcttcttccctctagcaaacctaggaccatgtccaataaatatagtcctcatggagaaaaacgcgttgtcataaccatgtgcaccgccacactccttctcccccgttcggttctgctcaaccttaaaaccctcatcagccaaaccaattatgggcggaatccgatcacttgccgaatagtgaagcctcctcggcaaatcttcctttaaataaaccctcaatttggccccattctcaactttccccgaattcaacc

SEQ ID NO: 43035 - DNA, 435 bp, Glycine max
  unsure (1)..(435): unsure at all n locations
  Clone ID: PAT_MRT3847_138860C.1
aaacttttgggaaccttttattataatttttgtggccangngnattataagaaaaatcacattaatgactctaccctgacttttgatacgccatctctgatgaccaccaccgtaattagctgagtgattcttcttcggtccctttttgctctatcagtgaaaaaggagggggtgccttgctgctgaggtctccattttgcgtaaagctaccttgcgagaggagattgcttaggatctgagctggggttagacccgaaatatataaagtttggcccctacgagcgcttctgggaggatggtgtagcaggaaaaaccccacaaaaaaggaagtaggcttatacacgttgaaggtatgtattcaaagcgagagacacctgcacatgatggggggctgaggggccccctatcacacatggaagtgcttcatcaaataat

SEQ ID NO: 43036 - DNA, 221 bp, Glycine max
  Clone ID: PAT_MRT3847_138861C.1
cacaattcaattttgagcacttaccaacaccacttccaatggcttcatatcatgaagaagaagtgaggctattgggcaagtgggccagcccatttaacaacagagtagaccttggtctcaagcttaagggggttccctacaaattctccggaggaggtctttgtaaccaagatggcgatcttctcaagtaacaacccggtcaaaaaaagggtccgggtttg

SEQ ID NO: 43037 - DNA, 481 bp, Glycine max
  Clone ID: PAT_MRT3847_138862C.1
cgacccacgcgtacgggcttctcctccccatctccgggtcggtggggttcggttcgggtccgggtcgattacagttataccttctgatcggtggatggtgggaaagcatggcggcgcccgatgttgagtaccactgattcgtaggagggctcgcctgggccaccgacgaccgttcactggaagccgccttctacacctacggcgagatcctcgaatgcaagatcatcaacgatcgggagacagggaggtcgggcggggacggcctcacgacttacttgagcgagcaggccatgcgcgacgccatcgacgggatgaacggaaaggagctcgacggccgcaacataaccgtcaacgacgcccacgcgagccgatccagaggcagaggcggaggcggctacaggcgctgggcggaggcacgaggctacggaggaggagggtaccgtggtggaggcggcggtggtggttaccggcagtggcgtga

SEQ ID NO: 43038 - DNA, 182 bp, Glycine max
  Clone ID: PAT_MRT3847_138863C.1
gaagcgcgagagccttcgttgttcaagatgagagctaagtggaagaagaagcgcatgaggagttgaacgagaacgccgaagatgagacaagatctaagtagtgcttgaacaggagtggaatgatgcttcactgtacactatcattatcgcagctagtactagcatgcagactcactatatac

SEQ ID NO: 43039 - DNA, 478 bp, Glycine max
  Clone ID: PAT_MRT3847_138864C.1
accgctgcgaaaagaccacagaagggggtggaagtgacgtaaccatgcgtcgtcagttgtatcattgatgaaggctcctgcgcatggtctccgaacatgaacgacgcaaatgtatcaaagcatatccagcatatggcgcagttcatccgacaggaagcttaggataaggccaacgagatctctgtatccgccgaacatgaattcaatataagagaatctgcaagtggtcgaacccaactggaacaagatcatgccataattccaacgcatagagcgccaagtatgaaattcgcaagaagactgagtactcgatgcagctaactgctcctcggatctaaagttcttcaagctcaatatgacgtgatcagttccatgacataagctgcatccaaggaactgatgaatgagagtcatcatcatcatgtgaatctactgagtcatcatcatcatgactacagacaccttctgaaagatctca

SEQ ID NO: 43040 - DNA, 816 bp, Glycine max
  unsure (1)..(816): unsure at all n locations
  Clone ID: PAT_MRT3847_138865C.1
agcgcctagtggagtagtgggcgggtgtggatgaagggaaggccattttttaattccaaaattcggcaataataagagcggcatgggagagaacatttttcaattttcatgactttctgaaggatggaaaatgaagcctcgtgtcggtggtgctcttgcagtgcacgcaccctcgtgtcaatattcgctgcaattcttctcctattccaaccaaattgcatcgctaagcaacagcaccaaccatgccctccttcatcctgcggcataattggcaacatatcgttcccatttcgcctcaaagacgacccaagccactgcggcgacacaaggtaccagttagattgcgtgaataacgcgacgctgttaaccttgttctcgggaaaataccatgtacaagatatcgattacaagagatacaaaatcaaggttagtgacgcgggtgcagtggaggactcaaattgtttcatccctcgcaatttcttatgggatggtaatttcaggcccacgggcctggtcggcccagatgattttggatcacagccgtttgttttggaccttgatttcaccagaattgggtacttcaactgcgccaatccagtcactggcgatcctagatatgttaaggtggacactactcacactagtcgatgtgcgacccaaggacaagggcatgtctatgctcttttggaccatcgtatcttgagtatcgtgtgaaggacatcacggnntgggtgcgatcttatggtggctaccttggcaaattggagtctttcggaggcggaaaagggggatttcacctacgatgagaatcataaa

SEQ ID NO: 43041 - DNA, 142 bp, Glycine max
  Clone ID: PAT_MRT3847_138866C.1
tgggaatgcagccccaatcgggctgttaatttcgtacaaaggttattactctctagagacctatatcgaacaagtgccgctatggagaagaggtgtggagagataatgtacagcttcacatgggagattatggggattactt

SEQ ID NO: 43042 - DNA, 564 bp, Glycine max
  Clone ID: PAT_MRT3847_138867C.1
aaagggaacttcttgatcatcaaccatccaaggattaaagacgaagggaacaaggacaccccatcagagtgaattacgaagaaaacacgcggattgtttaccgtacccagaataagatatccagagaaaggcaataatacacaagcctttttttttttattgccatttccccccccctaaaacccagtggaggaaagccgctccagggtggggctgattaagacaacctcgactcaaggccagagagtccaccaccgatgagaggcccggcccagtaaaaccagaggatggaccaggtacagctaacgacgagcaggcccaaaggtaacgggggggatcaggggcgctccagaaaaggccccacccaacaaaaggctaccgccgacagtgaaacccttggcgatgggagcaaaaatggccaaaacacccttcttggggacaaaggcagttgaggacaccgtgtacaccacaccgaaggtcatcacgatgctccaacaccaaggcgttgacaactgcaactccatgggaaagtccgactgctgcaacagagggggcggctacaaa

SEQ ID NO: 43043 - DNA, 575 bp, Glycine max
  unsure (1)..(575): unsure at all n locations
  Clone ID: PAT_MRT3847_138868C.1
cggaaattcggcttcgagcctcaaattagtatttggtttctgcgaaattgcaaaagcaaaacaacatccatcttcttctgcaaaataattctaaaaatccataatttgttgccgttcttccttcgtaaaatgtcagaactactctagcattcccaactctacaaacacatcatcacctttttgcttttttcttctttctcactaactcagacaactaccatggcctcaaaatccagacccaatctatctgaaaattccaacaaaggatcaattgcaactcctagagtcagtaaaactagcaaactagcatccaagccagaatctgagtcaccatcacctttgcaaaattcacggctttctgtggaacgatcaccacgatctgtgaattcaaagcccactgttgagcggaaatcaccaagaccctctgccaccccacctgataaacaaccccccagagctgcaaagggttccgagttacagaatcaattgaatcttgctcaacaagacctaaagaaagcanaagagcagcttattcaagctgagaatgagaagctaaaagcagtcgatgacttgaa

SEQ ID NO: 43044 - DNA, 2020 bp, Glycine max
  Clone ID: PAT_MRT3847_138869C.1
ggactgcttccgaacctgatagatcaacggtggaagaaatgtgtattggctccgaagctggcatggtggtcaaacatggaatcctaacctaggctaggttgcacagattcactgagtgcatgtcgcatgctgccctgtctctacaaaataagagataaaatatttatctttcgatctggcaatcgcagccctgatagccgtcagcacaggtctatggtatacacatgaaattcacgccttcctccaaattcttaggcttttcaaatcacttccactcccttctcgcaccctctttctctccgaccccaaagttctcatcttccttttccgccaccatgtccactctttccactcagaacgacaccgtcacccacaaaacgcagcaacctttgcagattgcaaagcgcttagagaaatttcagacaacaatcttcactcaaatgagcttgcttgccatcaaacatggggccataaaccttggtcaaggctttcccaactttgatggtccagaatttgtaaaggaagcagcgattcaggcaatcagggatgggaaaaatcagtatgcccggggttatggagttccagacctgaacattgccattgctgagagatttaagaaagatactggacttgtggtagaccctgaaaaggaaattactgtcacatctggatgcacagaagcaattgctgcaactatgataggattaataaatcctggtgatgaggttattatgtttgctcctttttatgattcttatgaggccactttgtccatggctggtgcaaaagtaaaaggcatcactttgcgccctccagattttgctgtccctcttgaagagttgaagtccaccatctcgaagaatacccgtgccattcttataaacactcctcacaaccctactggaaagatgttcactcgtgaggagctcaattgcattgcatctctttgcattgagaatgatgttctggttttcactgatgaagtttatgacaagttggcttttgatatggagcacatatcgatggcttctttgcctggaatgttcgaaaggacagtgacattgaactccttggggaagacattctccttaacaggatggaagattggttgggccatagcacccccacacttatcatggggagtgcgacaggcacacgctttcctcactttcgcaactgcccatccttttcagtgtgctgctgcagcggctctgagagcaccagactcttactatgtagagctgaagagggattatatggcaaagagagctattttgattgaaggattgaaggctgttggcttcaaggtattcccatccagtggaacctactttgtggttgtagatcacaccccttttggactggaaaatgatgttgcattttgtgaatatctagttaaggaagtgggagtggtggcaatccctaccagtgtgttttacttgaatccagaagagggaaagaatctagtcagatttactttctgcaaggatgaggaaactattaggtctgctgttgagaggatgaaagcaaagcttagaaaatgatctcgatgcattattaagtcattatatgtattggattgaagacatttacctttgtagaagctcaaatgtaggattctaataacttctggttcattgaattggatgccctacactctttagtcactacctactactactacttagctgccatgatatttgtacttccctggaatggatcatcttctgaagggtatatacaatgaccagaaatcatgtctaccagctagtaagtgatgccattcagatttgatttaacttttacatttatgggttgtatttcaatgaaccatgatcattatcttgctgtcttatccccttattgttaaacctcttcttcctttcgtttggatgcaaagaatcaatcatgaagcgggacatgacctctttcttaattatttcctctaagatttggaatgttatgaatcaataggcgggtagacctcctatgcacccctatcatacgacagcaattgatg

SEQ ID NO: 43045 - DNA, 442 bp, Glycine max
  Clone ID: PAT_MRT3847_13886C.1
tccggttcgttgtgagctattatctacggtatttttaggagtatatgaaattgcatgtgttctcaattgggggaatatttttgctccatggccaatccatagcacatgctaccaaatgttttctttttgaatgaaaacttgtttatcgaagcatcctactgccgaaaaatgcacacctattaaacttgctactgaagcacacaacattcttatcctttaaaaccattctctaatagtgcgatgaaccaacaatggactacattaattaccaacaattcatatcatactctaaaacagtatacctacaaactttcttttattcttctgaacaccaagttcattacaactacatatttatatttgacatatataacaccgtactttataatttccatacattaaaaacattttttttaattaaggaatttaatgaaaccttata

SEQ ID NO: 43046 - DNA, 503 bp, Glycine max
  Clone ID: PAT_MRT3847_138870C.1
ggctcgagcgcatagttaaggaagctctggatgttgtccacattagcaaaggagaccaggagaatgtatttgcaatgcttgctgcagtattatggttaggaaacatatcatttactgtggtagataatgaaaatcatgttcaagctttgaggatgaggggctgttgactgttgccaagttaattggctgtgaaattgaagacctgaagttgactttatcaactcgcaaaatgaaagttggtaatgatattattgtccagaagttgactctatctcaggctattgatgcaagagatgctttggcgaagtcaatatatgcttgtctgtttgattggttggttgaacaaataaacaaatccctcgcggttggcaaaagacgaactggcagatcaatcagcattctagatatttatggctttgagtcattcaataggaacagttttgagcagttctgcataaattatgcaaatgagagattacaacaacacttcaatcgtcatttat

SEQ ID NO: 43047 - DNA, 259 bp, Glycine max
  Clone ID: PAT_MRT3847_138871C.1
aaaaaaaaaaaaaaaaaaatctgtttaaaataccccaaaattttttacaaggggttttttttctttgaaaatacggctaaaaaaaattcccaataccctttgcaatttttttttaaaaaggggaacgctttgcttttacacctgggggaaattttggtttccccgtaagcattcagttgccccaatttttccggccattttgggaaaaaagcatccttgttttttttttttaaggcacagttcccccttttaagccaaa

SEQ ID NO: 43048 - DNA, 335 bp, Glycine max
  Clone ID: PAT_MRT3847_138872C.1
tcgtcggctgcgagaagaacaaaggggctgttcttggttaacaaatacaggggggattccaattcgaaacctattcatttatggaaccattggagtgtcgtcatggtccaaggcatgtagagcctgtggaatttagcccgcgtggaaatatgtcacggtgggagacaaggtccggcggataagaagccataggccggaaagaagctctcgtaggagggaggcgccgtcggtgaagggatgaagaagaagagaaacatgatgagcgtggtgacatacaagatctacatcttcaaggttctgaagcaggcccaccttgacattggtatcttaggcaa

SEQ ID NO: 43049 - DNA, 142 bp, Glycine max
  Clone ID: PAT_MRT3847_138873C.1
aaatattctggacttggccacccgtaatgttattgcgctgtttggtggaccttcttacaccgttgaattgggaagatgcgatggactagtttcgacagctccggatgtgaatgggaggcttacacagccaacgaacaattta

SEQ ID NO: 43050 - DNA, 214 bp, Glycine max
  Clone ID: PAT_MRT3847_138874C.1
gatttctggtgttggtgttgacggcattgggaacaagcttgagaactcaaaagatggacctccaaccttggagcaacccaagatgactctggagaagctcttgacgtatggcaacatgcttgaccaagaacaagacaatgtcaagagagtccaattggctgacaagtacttgaacgaagctgcactagtaaatgctaacgaggatgctattaac

SEQ ID NO: 43051 - DNA, 195 bp, Glycine max
  Clone ID: PAT_MRT3847_138875C.1
accagcgcatccgataatcgatggattcatttatactgacagcttgaaatgtgctgggggtgcaagatattccacatgtgctggggatctatgaactcactgccaattactcccacatttctagtttctatgctagaaggaacttgctgctctaatccatgatgctcactatctctacaaatgatgtctgcgaca

SEQ ID NO: 43052 - DNA, 119 bp, Glycine max
  Clone ID: PAT_MRT3847_138876C.1
cgacagcaacaaacgacagagattcttcctcaacacaatcgacacataaaaagcttcgcgattctaaaacgcagtgaacataaaggtaaagcgcactcggccttttacgacattgcatt

SEQ ID NO: 43053 - DNA, 208 bp, Glycine max
  Clone ID: PAT_MRT3847_138877C.1
aaaacaacaaaagggctcaattaagcaacactgccacttttacctggaaccgcactattaacacgtgtgcagggctcattaattacaattcactaaccttatactactattccaaaacaaccccatatccaccatctcatttttcacaaccaaatatttataccttccctaaatacaaaactcttacccattcacttcttcaaataca

SEQ ID NO: 43054 - DNA, 423 bp, Glycine max
  Clone ID: PAT_MRT3847_138878C.1
gacctccttctactttgttttaagcttagagagtttgattgaaatccccaatcaaaatccaaggtttttctgtttggggcttcaagttttccaagaggtctctcgtcaagtgtttctgaacttgttgagggaaaccatacatcccttagagaaaaaagacatgatcattattctctaccttcatacttgcatggatataattgtcaaatcacgagagaatgtcaaggttaactggatcattccacattatcatcaacaccccttctcgattcctaccattacctttgtagtcaatcacaaaagagtttttcagaccagcaatatccttcacacaattagtctcactataaggtttttttgtctccattaagaagactacattgggagcttccaaggtaaggagctttcacaaagctcaaacta

SEQ ID NO: 43055 - DNA, 197 bp, Glycine max
  Clone ID: PAT_MRT3847_138879C.1
aaccatgatcttgtatcctgaactttcatttctgccaaatattcctgttaatgctggtgaatgagttgattttgaatgtgtaggagatcaggaattagtaaattttgaaattaaatgcaactttgttggcttttacttgttgagccgtcaactttttctttgttggctttaactaattgcatggtgattttgactca

SEQ ID NO: 43056 - DNA, 421 bp, Glycine max
  Clone ID: PAT_MRT3847_13887C.1
aaaatataacaaccccttacatcggaaacttatttttgcttaactagaccgacaaatatctgaccgaaacatcattgaacctgcacatagcttgttggcgggggaaaaatatcactcccatactaaatccttttacaccctgctttggaaacaactttttacaagataatgtgacaaaaaccacctagttgggtgccctgatctgacttcttcttggaaatccatgaccttttgccaaatattatttcctaaattgccacttcaagaaactataggcctgttactccacctacggtgtgttacaattggagttaatttcaatcccaacgccccattattaacaaatgtgtgtacatgaacattggcataggccataaaaaaatggccaacacaggtattggcactctcaacacactatgcc

SEQ ID NO: 43057 - DNA, 388 bp, Glycine max
  Clone ID: PAT_MRT3847_138880C.1
aataaataaaaaaaattcactgtgcttattaaaaagttaataaaaatatattcaaattctactaaataaattaataataatatgtaaaaacaaggagtgtgtcagcctttgaagttgagatcatgcaatggctgatgcaactgtttcaacctttgttggacgccagaatgtcttctgaatgcaaagtaatccttctccatttttggaatatgtcaacctaatatcccattgtagagatttagccaagctctctatctcaccaatagtttcaacattgtctcttatgaccaaatatccttctggtctcaggatcctatcaacttctgcaatcactgctactttattgcacttttccttaagtgttgagaatataaagtcagcatggagc

SEQ ID NO: 43058 - DNA, 472 bp, Glycine max
  Clone ID: PAT_MRT3847_138881C.1
tccggaataatgcccggaggacacgactactaggcgcgccctcgtccttttttttttcaagtgaacacacatgatattaaaatccagagattgattacagagtttagtcactcacggctgagagtgaaaaactataagaacaaagaaacactaaaccattagaattactacatttttgcttactccgaataaaacacatcaatacaaactttatctaattcaattcaaatgagggtgacagggaagcaaaaaggatattaaaatatatgaattatcatagcagctttcactatcattgtgagggcctgaaattgtacttccatcaccttgcagtggcagaattgtttcggtgttgatcaatgccagtgacttgtttcacttatcttcttatcgaattttttttgttaattcagcttctagcatcatgttaggcctatcctccagtcaccagtaacagactaacatgtaattc

SEQ ID NO: 43059 - DNA, 264 bp, Glycine max
  Clone ID: PAT_MRT3847_138882C.1
ctattaaacgatacaacattctccccttttcgcggaccctttcaaaccccacagtccaccaaaaaattccaacaccccacctttatacaaaccacctatacctataaagactcctattataacttcccctaatcaaaagcatatctctttcctttattaaaacagtattcgatcacaatcccccacaatataccaacccaaaacattaaacttaaaaactttccttcccttataaaaaacccacctaacataaattcaattccc

SEQ ID NO: 43060 - DNA, 612 bp, Glycine max
  Clone ID: PAT_MRT3847_138883C.1
acgaggacaaatacaccatggggtgaaagagtatcttttcttttcaacccacactctgatctagtggccaaggctttgattggcagtccttaaatggatatgcttggacgttcttctatcaaagcaaatgcgtatatatagactaaaaagctatcaatttcggtgcatcatccgttacatggaaaccattttgctgctagttttaaatacagaaatgaacaccatcaatctgtttcagaattgatttatgactgttcgttgcaatatattaatcttcctcaatcttgttttctgcaggctataaaactctggtggaaaaacgtgcgttttgtccaacaccctagatataacattccctcatataaggatgaagctttgatgcgggacaataaactgcagtgttgtggttgtttagctgaagcaagtccccaaaaccggtggtttagatggagagatgccaagtggccatggtcatagaaacatgttaaggttactagttgcggcctttgaaaattgaaacattttacgattacctttatttctttaggattactcttttgttaattataacatgttgacaattattattactcattttaaagcttcaaaaaa

SEQ ID NO: 43061 - DNA, 385 bp, Glycine max
  Clone ID: PAT_MRT3847_138884C.1
gcaaatattcttctatatgtggaaatataaatctctgatggatctcgctgtgggggcactttgtgggaccgcggatgtacgggctcttttgtgattttcgcatacttaatgaaagaaaatacgctcttctttctcttctagagatagggtcaaccccggagatatatatgtgttttatttagactaccctagttacaccagattatcatctgtgcgcgtgacgataaccattatacctttattgcggcaactcggaaactcaatggactattttgaatatgcctttcagcacgatatggtacttactgtggaccccggatgtgtaatagatactcgtattttcatgcacatcagattcttacaatgggtgggggtatatttcaca

SEQ ID NO: 43062 - DNA, 211 bp, Glycine max
  Clone ID: PAT_MRT3847_138885C.1
tcgttcatacagaattatattttttatttttttctatgcactttgggtgcagaagctgaggaccctttacggcgactctgtatgaaaacagcatcattggtgacggaggaaaactatcagcttatattgacagaatttttgctgtgatagccctaaaaactccctccactggttttgttgccaccacatatgtgtacagacctatacaaag

SEQ ID NO: 43063 - DNA, 1078 bp, Glycine max
  unsure (1)..(1078): unsure at all n locations
  Clone ID: PAT_MRT3847_138886C.1
acaatacttatggtatttttgtataggctttaagacttctgtatgattgatggagttcaccaattgctaatgcaatatattagtgttactatattccagacattgtttatattttgagaaaataggctatgcactgacagtgtaaaatagttttacattgtcatccaatcacaacctaccatgtatggtaattttgtcgacttttatgataattatccctaaaagtcatatcaatggtgatctatgattggttaacattgtaaaattgttttacactgtcagtgcatgaccattaaactcttatattttaattgtttgaaactcttgtacagatacttcttagtggatggcttcgaatatgcaagtgccaacgaagagaacaagagatggtggaatatgatgttgttgaggaagtcatttatggcttggaatctggaattttgtttggtatgtcatctgtaatatcgaagatgggatttctattcctagagcaaggttttcccaagctgttggttcctatgtgcatcatgattagtgggtgttgtagtggcactggcttttactacctgacacgtggtctaaaacatgggcgggctattgtagtttctacatgtgccgctgtggcatcaattttgactggtgtacttgctgggatgcttgctttgggtgagcgactcccttcggccccaaaagctcgcttgttacttcttcttggatggtaataataaatgttatgctattatttctttgtgcatttacatcccttgctttataaagctgatctacgcagaaatgaactccactcttctatacttcattacatctgcaaatagttacatttcattttcgagcattttctgttctgcttctaatctttgatgcaactctttttctgatttggctgagtatatatatatatatatatatatatcaccaatgttatggtaattctcgaacaagatagacaccttcatgttcttgtgtcaggaatatgttaatcggacatattttgctgcaggctacttataattggtggcgtgattntacttgttggttctacacagctagtgagattctt

SEQ ID NO: 43064 - DNA, 694 bp, Glycine max
  unsure (1)..(694): unsure at all n locations
  Clone ID: PAT_MRT3847_138887C.1
accagatctcttggaagaaaatcttctttcccttaaacctcttcaaagaaaaattgacggcgcgaaatcaagtgcgtaagcgtaagcgacttcacctatcgtttttttttttggccgagttacttcacctttcgttttcacttcccaatttcttctctgtgaattttcgtgcctaaaaaaacacccaattctgcatccattccttccttcatactcctgcctctgattttgcaccttctccaattttctcagcgtcctcattcttgtaaaactgatttcagtggtagctgtttgtcttcagtgtggcaatgcagggtttccagagacacttgtgttttgcaacaagtgtcaggtatatgcactccatagcaggctaatagagagcacaagccggactgcagcagcatatattcactaaaatactgaaaatatgcaagacattggcaatggccatatatgttaagtcaaagcaacctccccaaagcaatgtaacaacactcataatgaagaaagtgcgtaatttggtgaacgatgaagaaagtgcatccaaactaccactaaattttcagtgaaaaaaattggggtaggactttgaagaaattttctatttgcaggcatttggtgctttggttagagtggaatgcttaagcttcgaanctgacatttatatcatcagaaccttctttagcacaag

SEQ ID NO: 43065 - DNA, 596 bp, Glycine max
  Clone ID: PAT_MRT3847_138888C.1
cttctaggacattttctattctagaaattcgtatcatattttaacactgctccttgatacaaatttcagtaactctaaatttggtctatggtaagttgaactttgttcttgatagtgccttcgtaagtacttgttcttcgatcttgtagtgcttgagctagatttgcttttgcttagtttctttgaagtttcttcaagtgtagctgggttgcaaatttcatatatgtccaccaatgattttactcatcttggagtagactctggtgaagaatcttgttgtagaggagacagaagcatacctgcttcttctgccacttcttgaactttttctgcttccccatccaagaaatattttcatcaacctcaacatctcgactgatgatgcgttttttgtttgtaagtcgtagaccctatagccttttgattgcatgttgtatcccatgaagatttctcttgtactcttgtcttgtagctcatgtctcttatgatgtatgtagcaaatagatccatatactcttagatgtttagccgatgaattttgtccgctccatgcttcaataggagtcttgtcttgaactgccttagtcggacatttg

SEQ ID NO: 43066 - DNA, 382 bp, Glycine max
  Clone ID: PAT_MRT3847_138889C.1
ttccttgaaggtttcccgtcatcactgtatgacgtcctccttctttggggggggggggggggggttgccaggcggttggagccagttagaagcgagcaggacagttagttggtatggggataggggagccataatgacaaaggctgctgctgtctacggcagagtaaagcgggcgaataatgaggaattccttggaatgcgacaattgagccagaaagagtggaaagaaataaaggtcacacaaccacataacaaaacccaaaattgtcaataagtacaaatcccacgcgattggcctgagtgataatagataccttaatgcttattggatgggttcccgtagatcacattagaatggggggagtggcacctttaacggaag

SEQ ID NO: 43067 - DNA, 218 bp, Glycine max
  Clone ID: PAT_MRT3847_13888C.1
tttcgttcattcccaggttgttatgacaccaggaatccgatttatttaccggttattaccacctcatctaatgatctacgcggaacctcgcatcctgacattatttatacatgcactaattcagctataataataactttttttacaaaaagaaaactatgattcccgtcatggcattaaacatattttacccttctgcaactagcccacataacatg

SEQ ID NO: 43068 - DNA, 254 bp, Glycine max
  unsure (1)..(254): unsure at all n locations
  Clone ID: PAT_MRT3847_138890C.1
ctacgatccaaatcgncgactcggttttaagttttatttgaattaganntcnagaagtgatttggattgttttctaataatcnatgnggactgaaaatcctggncgtccaacctncnctcctnccaagacctgtctcatcgccttttgcngctgcacaganagtganancgtctcgtcaaccggtccgnggctggatnagancctccttcttttggcnntaanccttctgctctctaccgcaagcgncaacggt

SEQ ID NO: 43069 - DNA, 414 bp, Glycine max
  Clone ID: PAT_MRT3847_138891C.1
gagtctaataatgaagtcattttatttatatatttatttttttcatcggcttacatactattaaataggtatgaaagctgtgattgttatggttaaactttatatttaacataaataacaaacacatacatggaacttaatgccacaagctccatgtgctgcgggtgatccaaaatgttgttggcaaagaagttcgcaaggattcttgaatatttcacaatgaactgacaagctttctaccacacaatttggtaccactgtcatttgcacttgttttccagaagcaatgaagacaacaagcacgaggatgggaaaataaaaagggattttcattttcttgatatgggaaataatcctatatagctttgctttctattgtgatagatcccccttctgtcgtctttcgcagccgta

SEQ ID NO: 43070 - DNA, 1105 bp, Glycine max
  unsure (1)..(1105): unsure at all n locations
  Clone ID: PAT_MRT3847_138892C.1
gcggcgtccgtccctattcgcacgaggcgttctacagtatctctgtcaaacctcggaagcagagacatcgacgtcgtcttttcggaatttaaaactcttccgcgatccattcaatcttaaacggagaagaacgttgattgctctgactcagccctgtttgcgggtacgggtaagggaagagcagcaatggggtttcagaagtcaccggcggcggcgcatactactcctccgccgcagaagaagcagcctcctcctccgtcgccgtccaccgcgaaatcctcgtctcacaagtcctcattctctcgctctttcggcgcttactttccgcgctcttccgcgcaggttcagcctcggccgccggacgtggcggagctgctccgcctggtggaggagctccgggagagcgagtcgcgcttgaagacggagctgctggagcacaagttgctgaaggagtccatcgccattgtccccgttctggagaacgagatcaccgcgagggaaaccgaaatcgaaaggagcagaagaagagcggaagaagcggaatcagagaacgagaggttgagaaaggaattgcaggaactgaaggtgaaagcagaagaagagaaatgagaaaacgcgagtcaaatctaggcgctggaaatgtgaatagcgaggtttaagaaattgcggaagggcccctgtagcagcgtcggcagtccgaggaactcgttgattgctctgactcgagcctgtctggtttagttataacacgcgcgccacgtgttccgaatcctccaccgaaaccttcgacttcttcgccgtcgagtggttcctccggcgaaacagagcgtaggattccgccgccgcctcctcctccgccgatgaaggccttaccgcctccgccaccgccacctccgaagaagcttgtgtcgaaggcggcggcgcctcctcctccaccgnctccgccgccgaaagccggtagagaattccggcgaaagtgcgcanagtgccagaggtggtggagttttaccactcgctgatgcggagggactcgcattcgcggcgggactctgcctccgccgcggaagtgctggccaacgcgaacgcttgtgacatgatcggcgaa

SEQ ID NO: 43071 - DNA, 405 bp, Glycine max
  Clone ID: PAT_MRT3847_138893C.1
gggggcccgcctggagtacccggcccgaaccacgcggccgttttttccgggccttttcaggcgctggcggcaaccctgctaggagggtaggagctgctggcatgtacaaccagcagagggccggggatgaccatgggaactcagggggagggccatatattggaggagccagtgccgccgggtaccatcaagagatgtagggagcaggtgctgataaggatgttggagcattgaagaggaacccagctaatggaggcaatgtcctgttaaaggggggttggtggaaagggcaaaaaaggattgtgggggcgacaacagttgtaagggtagcaatagttatagaaacaggggacggaatgcgctttgagcctctgcagattgaatggacgcacaagaaaaggaagc

SEQ ID NO: 43072 - DNA, 645 bp, Glycine max
  unsure (1)..(645): unsure at all n locations
  Clone ID: PAT_MRT3847_138894C.1
ggacgtggcagagctcctctggctggtgtaggatctccgggagagcgagtcgcgcctgaagacggagctgctggagcacaagctgctgaaggagtccatcgccattgttcccgttctggagaacgagatcacagcgagggaaagtgaaatcgaaaggagcagaagaagagcggaagaagcggaatcggagaacgagaggttgagaaaggaattgcaggaactgaaggtgaaagcggaagaagagaaaaatgagaacgagagaaaaatcaaagcgctggaagaggaaataatagagttcaagaaaacggcgtcgtttattggtagtaacagtagcagcaacagaacagaggcattggagagtcacgagcaagaagaagctacacagaagcttgtggaggtttcgtttaggtcgaatctgatgaggagtttgaagaaaaccgcgtcggatctcggaagcgggaatttgaaaagagaggtttcagaaatttctgaaaggccactgcactcgcggtgtaactccgaggaactcggtgattgctctgactcggttctgtctggttcggttaggtcacgcgcgccacgtgttccgaatcctccaccgaaaccttcgacttcttcgncgtcgagtggttcctccggcgaaac

SEQ ID NO: 43073 - DNA, 421 bp, Glycine max
  Clone ID: PAT_MRT3847_138895C.1
gacaacttcatttgttgacaatcatcagatgaatggtagtcagagaaaaaggcgaacaaacccaaatgaagcactggtcttgtccactgcacctgaggaccctcctacacattggcagcaggtgcagtatttattttttcaatttccagtttaaatatctggttctagttttttgttcaatgaatgtatatacaagtctgttctcaatgcttttcttaagcatacatgaaaataaaaatgtataagatgtctttgatctggttgcttatttgtattcaattcttaataactccatagttggatcccagctatatgcttgcgccacacttgcagcaaggatgttatcacctcaccaagtagcttgtggtgcaagattacattgaagcacagccacacacaccgaaaaaactaaatatgcttt

SEQ ID NO: 43074 - DNA, 382 bp, Glycine max
  Clone ID: PAT_MRT3847_138896C.1
acgagatttcatcatgtttctgcctgttcacgctgtgtaccgtaaggcctccaaagtcgatactactgtgcgagagagcttaggaaccagctcccatcatcattgtgatgcttgaactattcgaccctgctgaggcatccaccttgaacggactgataaacattgttgtgatgcaagagactgcgctgcctgcgatatgacgtcgtgcacgcatgagctccctggtgacctacaaaactatgaacactctaggatctatgactctattgtatgcctgacagtcataattgagagtgcctactacgttgctatgatacacatgtttggagtacagtccgtgaacactccattgtgaagattgctttccttgacgtgcatgcat

SEQ ID NO: 43075 - DNA, 496 bp, Glycine max
  unsure (1)..(496): unsure at all n locations
  Clone ID: PAT_MRT3847_138897C.1
cgaagaaaaacctgcgcctcacggtcaaggcttacttgaaatcggaggaaaagaaacgggataaggagcgctccgtaagcatcgccggaaagcccgaaactcccgtcactccaggtggcaccgctccggccgttgtacagtctatagaacacctcatcgatgctccggagcaggcaacgccaggcgccccaggagatactcaggaatcgaagggtcagccacaaggtgacgcagctcagccaagcgaggcgccccagggcgatggcttgcccatgcccgcggatgacgcgcaaccctagggcgaaattgcagccgaggctcttcagaaacgtgacccgaatggccaagaccctgctgcggacccaagcatcggcgacgtagatgctgagaacaagcaggatggaaaagatggccaaggaggagctcacgaaagtcaagacgcgcatggagaaggcgaaaagcagagtgaaaactggaatgcgggagcanatggagc

SEQ ID NO: 43076 - DNA, 1196 bp, Glycine max
  Clone ID: PAT_MRT3847_138898C.1
ggatagggtcaaattggactaagtttactgcccattctgagggagaatttcattcatcaatgtaaatctagagttcaacaatgctgcattgtgaacaagagaaaaaaaattccaaggtggtatcaaatctaattgcatcttgcagtgttttgtcagatctgtaacaattgtcaaaattaaacctccttcaagacgatgcatcactaggagttggaaacccagcatagcatctaagctacgactataaagctgcaaggaggctgtacttttctatgcagtgctgcggcatagcctctaaataaaatgactataatggtttgggatattatcattcagtcagagaagaggcaaagtatatctcatgtattaaagtcttcgattactcctatgatttcacagagataatagttgcggcagtaaatagtgcctcttttcccatagacaatatctccatatgctcatttgtgcttctcaaactatcaaaagcggagataaaagcctggcacaaatccacaagagcactgtttcccccttgtttgtcaccagcatttccttttgacaatattgacaagtgagcctgacaaccatgagccagaaggaattgaactacatctacaccaattttttttattaagctcttggtgccagttttatttgaaaagcacttcaaagccccaccaaatgttgcatcctcagtatgaccatttgacttgcgggtacgaacagaaggcttggttatgtatttccacagatactgcacaactatttctagcttccatttagattcactgaagatcttaagaaaaacagggacactatctttgttgtaagagagttcatccagaattatgtccatcaaaggtgttcttggactgtctcctcttgtagtgtgaccttcaatatctgctatcttccttgccatatcaaggtccataatcatcactagaagtttctccattgagacacatgtgtcctttaatactccatgtaaagcaagagatagtccagtatgacaatttttggataacttagattcagaactttcttgaagctcgggctgtttactgagttcactttgaagttgagatagttgacacagaattgccatgaaatacttcatcaagcttttgtaatttattttcctagatcccagtagcaggctgagcaaagactccctctgcatgctccagttcaag

SEQ ID NO: 43077 - DNA, 258 bp, Glycine max
  Clone ID: PAT_MRT3847_138899C.1
gacgtcacgtttgatattgcagagggatgttgagagcaccaccctcatttgattgcatagcgttattttacgtataaccatacatggcttcgactgccttgggaaacgagataccacaccgcactgtggcctacttgtatgtagacaacagaccccaaactgtcttcattgactctctcggcaccggcaataataccatcatctttgaggacgccggtggcttcactgctacatgcaaattgctgcacggtcctggct

SEQ ID NO: 43078 - DNA, 1839 bp, Glycine max
  Clone ID: PAT_MRT3847_13889C.1
ggtcaccaaattaagaagcaggtattctgtctcgttaagataaaagccaattatgttgaaggtaactttttatctaaacacacccttaatatagccaattacaagggcaggaccagtccacacttcaactccctaagcatccagttgtttgttacacgtgttgtcatcgtctccgttaatgttgacggtgatggctcagtagtgggttggactcagaggaagctcacaaaatatgaaactttcgaccattcataaaatagtcttaaatttataataattacatttttttgtcaaaaagaaaaaacctcagctatttctgcgttttccttgtaagctacgaatagtaactactggaaaaagagaaagttcttaacaagccctagtctcttaatgcataataagccggcaaaaagaaacccttccattacccccaaaaggacatattcgtttcctcaatgactccaatacacaatgaatattttatttcaaatttccaacatctcgatgttttatgaccaacatttgtaagagccgaaactccctcactaggagactcagtataaaaaccgtagcaaaaaaagcttgtccctcgtatgtgaatcaaagaaaaacttaccacctaacaagttttagattagataaccaatatgttttctgcacgctttatcctgactctggaactttcacttcccttagaacctttgcagcatcctcggggaacacaggatttatgtaacaaccagttccaagctcaaaacccgcaatcccaataagttgaggtattatctgtataaaccaatgattgtatgctaactccgaccctttagcatgaagtggactagtgtgaatcatatagttgaacggtggattgttcaactgcaaggccatcttcctgagcattagtttcaacaaacctccaagttcaactgccttttcagcatccaattcatggaagtgagcagtgtggtaccgaggaacaatccatatctcaaaaggaaaagtagcagcaaaaggaaccagtgaaaagaagttggtagatgaatcaatcaaaagatctttacattgaatttcacaaataaagcatttccctgtctgatcaaaatgatctttcatacttgtaagacgggcagaaacactaggtggaataactggcagggccatcatctgactgtgagaatgactcattgatgcaccagctgaagcaccatggtttttgaacacctgcacgtattggatggattcatggctcgcgagctgtcgagttctctcggtataagcgaggaaaactttcccaatttgtgaaggagacagatcggagagctgaaccgggtgaaccggggtttcaatcaccacgtcgtggaagccgaacccggtcaggaccgaacccgtcgtggaagccgaaccttggggttcggggagggtgcgggagagggcggggtagaggttctggatgacccggattttccaatccgggtcatgggtcgggacccggaagatctcgggcgcgcactcgtgctcgtggccgatgcagaaggggcattgctggttcgggttcgggtcggcgggggacttggacttaaagtccgagggtcgttttgcacgagcgggtgagaatatcacccagcggttccacacgatgtcttttctcacttctgggttgttcgggtttcctgaggaggatgaagccatcgtcttacgttgttaagtttgtctttgatcactgtacgctatttttcagttttcagtctcataataccttgtcttacttaccagctggataatctcttctccactctactgtctgcccctattctgttttttttttcttttccatttcct

SEQ ID NO: 43079 - DNA, 978 bp, Glycine max
  unsure (1)..(978): unsure at all n locations
  Clone ID: PAT_MRT3847_1388C.1
ccagacttcgaggttgttgataaaggggttgaggttcaagagacgaaagaattatatgacggagaagaatctgagaaatccatagaagtgaagtcagctacaagtgaggtcgtcaaggaaataatgcatgatcagttgcgcctgactagattaacagagcttgattcaattgccaagcagataaaggctctagagtccatcatggtagaagataacaagttcacaaaaggtgaggaagctgagtcactaagattggattctgatgaagaaaacgtgacaagggagtttcttcatatgcttgaggatcaaaaggccagaggtttcaaactcaaccaatctgaaacccccccattacaaattgcagaggcagaatctaaagtgtatctcccagatcttggcaagggcttggggtgtgtggttcaaacaaaggatggaggctacttgacatctatgaatcctttagataatgctgtggctagaaatgagactccaaagctagccatgcagatgtcaaagccttatgtgttggcatcaaatcagtccccaaatgggttagagttgtttcagaaattggctggcattggtcttgatgaactcagctgtcaagttttctccatgatgcccctagatgaactgataggtaaaactgctgaacagattgcctttgaaggcattgcttctgccatcatacaaggaagaaacaaagaaggagccagttctagtgctgcacgtatagtttctgccctcaaaggaatggcaaatgcaatgagttcaggaagacaagaacggatttcaacaggactttggaatgtggacgaaaccccatttacagcagagaatattctggccttcacaatgcagaagattgagttcatggcagtggaagggttgaaaatccaagctgacatgacagaggaagaagctccctttgatgtttctccacttagcactgaggaagggaacanagagaatgaacta

SEQ ID NO: 43080 - DNA, 201 bp, Glycine max
  unsure (1)..(201): unsure at all n locations
  Clone ID: PAT_MRT3847_138900C.1
caacanacnacagtgtantcaaacttgaaagtcaccttaatganacatggaanacataaaataaattaacatgncaaactggagaattcaanaccgncattcaaccccagattnctcattccngngcagncggcnngaacggacaaacttccgggancccatncncatatccgnaaaaangtnccccatccntntttcnng

SEQ ID NO: 43081 - DNA, 369 bp, Glycine max
  Clone ID: PAT_MRT3847_138901C.1
ttcatgcgtccggggacgcgggggctgctgatgtaggcgcaacgccagctcaggaggttgcaaaacatgatgccaatgaacgcctggaggctcacatgactgctggggacaagctgtagagtactactgccaatgaggatgcaagaacatgggaaccatctacaaagggttgaaggtgatctaaaacttgctactgatggcaagacatatgagggcactcctactccagtgtctaaaattggtgcacgggagaacaatggggttaaagtgccctataatggcacaggaggaaatcctggctcataacgcaagtgatcccaaaactagagaggtgagggaagaaagcaagccctaagctactgaaatgca

SEQ ID NO: 43082 - DNA, 150 bp, Glycine max
  Clone ID: PAT_MRT3847_138902C.1
tcggctcgagcttagcttctgtcagcttttttattattttgtattgaatgtgatgctttttactatcactaatgaaatttttggtaatcattcttacaccaaatgtctgccaattagaaatatccatcctgttattgatcaagttttggt

SEQ ID NO: 43083 - DNA, 392 bp, Glycine max
  unsure (1)..(392): unsure at all n locations
  Clone ID: PAT_MRT3847_138903C.1
acccacgcgtccatgcgagangacaaaaaaagggggaacaatttggtggagaaacctaaaaccattaggatgaaattgaaattgctggttttgttggttgcaaaatttttggcaccatatgagggccatggcgcaaactaccaaaatttccccctcaaaatgaaaactgggtttggtgggcaaaaaagcattgaggtggcatttgccatttggaggcttggcttgaaatcaaacaccgtattcaattggaaaactgttcctgcaccttgcggcaattcaaaagctgactactttcaaggaaaccattataatttagattccaaaacatttaaccaacaggctaatttcaatgctaaatccctcaaattcaccagcaaagatttctttgtctt

SEQ ID NO: 43084 - DNA, 567 bp, Glycine max
  unsure (1)..(567): unsure at all n locations
  Clone ID: PAT_MRT3847_138904C.1
aacatctcaaaaatatgatcagacgatacacaacgcaattaccatacagaataacagaattcttaggagtgctgatttatgaacacttaaacaatccaaatatataattgacccgcttcatttctccctatttttctcttcattacatcacatcactaatcatatcaacacctgtctctcttctctagtttcttgatgtctgtatagatattcctattcacgggcagtacaaaaaatgctgttgatgcaagtctcgagagagaggtatccatagaccgcctcccacttgtaagagcatctcagtctcttttgaacatgccgtaagttgttagcaactccacgaacaacaggaacacatttgcctagcatacagcatttcattctgccaaaccagtccatggcttataaagcataatttagcatttcataaaaaataaatggcaaccgtagttagatgtaaataatagaacagaaaccaatttgaaacctcagagactcggttatgaattataaatgccccatattgacatcacaccttacaaaatgtgancaacttgcaataattag

SEQ ID NO: 43085 - DNA, 337 bp, Glycine max
  Clone ID: PAT_MRT3847_138905C.1
ttttaaatcgagaaaacctaccaattctattgcattgaagctagaacaacgcctacaggcgtggagaataagagagataataggaccttttaccattcatggttaaaataacaattatggccattataaagaatggttaaaggagggcacaacacacctgtgctggctatgataaagtaacttaagacgtttaaaccttttatataaagacgagcaaaatgcttagggacgtgatatctttggagctacaatggcctatgctatgctgtgataacaccaacttgtttttgcaacaataccatgagtcaagcattctactctctctatgggggctata

SEQ ID NO: 43086 - DNA, 565 bp, Glycine max
  Clone ID: PAT_MRT3847_138906C.1
ttgccgaggggtttgccgtgctacatcgttgcagtaccgcctgcttggggggggggggggggggggggggaggggggggggggggggggggggggggggggggggggggggggggggctggaatgcaaaaggtaggtagcccggatgagggtgttaaggttaaataaaccagaaccatggtaagatgacaaagcaatgtaggaggcccccctacgataattctggttaaactaaaacggggaaatatgcggcccgtaagaattcacctactatggcgctagtataaaatactatccaaagtataagcgggagccccgggtaggtataggggatagagggaccgccacaagtatgcaaaggcctgaggtacgggtgaaacaacggacccttggaactgtgtaatgggcgaactactagataacgttagccacgaaggcagcctagtaagcctactggtacttccgacaaacgtggtaatagtaatgaggggccgtgtaggtggtggccacgttttaaacaagtggtgcagggtactaactttagcgccaccaactgtaggcagcgt

SEQ ID NO: 43087 - DNA, 279 bp, Glycine max
  Clone ID: PAT_MRT3847_138907C.1
ggtttattctatgttagttttgtaggggcgtttatttttttttttttttttttttgggggcagggaaaaaacaattttttttctttaatcaggggagaaaaaagatgttttggtttttaaccccccaattaatttttttcccccgaccacaaaagtcccaaaaaaatgggaatcacctgtattttatttacgggtgtgctttcccagggttatacaaaaaaaaaggctaaggctttaatggggagtatacggggggcatgaacctgggggcaaaaggga

SEQ ID NO: 43088 - DNA, 365 bp, Glycine max
  Clone ID: PAT_MRT3847_138908C.1
tccactcgtccgcactcttccatagattttgtgtacatgcgcagacactgtgcctatagtcgcggtatgatcaagtcatgtctgcgcctcagatgtccctccttactttaatgtgccaaaatctagtatcgagttcttttaattgccgaacctacatgcatatacgtttccttcctcaacagtatgcacttttcatgggttaccatttcatgccaagaagctctcctcctatgaatgcgttcagatatccatcactagcaattcaacatagtcaatcattgattgtaccattcattcatcgcatcagacctattttttgaacatctaatatagatcatgctcatagcatcctatccagttctttc

SEQ ID NO: 43089 - DNA, 120 bp, Glycine max
  Clone ID: PAT_MRT3847_138909C.1
ctcccgtttcgtatgacgatgactattcctataggggggggatcttggacagaaaatgctactctgatgaataagccaaatgctgatcggtcaatgtggacatatcaagagcgcaatctg

SEQ ID NO: 43090 - DNA, 283 bp, Glycine max
  Clone ID: PAT_MRT3847_13890C.1
gccagatgatggtgaaacggtaggcatggagaagtatctagatagctagatagagatgcgcattgtattagtttgcgtatctgcagctatagaagtattaatgttcgtcacattctttataacggtaaaaaaagcccctccatgggcaggtgtggacaccccagacaggctgggagaggaaaaaacaccccccacgggggggcgcggggggcccccgatctaaaggaccccaactgacatccgcgcgcccacgacgctataaatcatatatcccgcaacctaa

SEQ ID NO: 43091 - DNA, 207 bp, Glycine max
  Clone ID: PAT_MRT3847_138910C.1
ggggaaaaggaggcgaggtttatgtgaaggatggatctagaaagcgctcaaaggaactttgtggcagcatggaatgagtcccctgacggtggcaaccaccagtaacgagctagagaaggctgtatgaggaacagaggcttcatggaatggcaaaccaggggatgcacgtacatgtctcttgggggaaccagataattatgctaacaa

SEQ ID NO: 43092 - DNA, 177 bp, Glycine max
  Clone ID: PAT_MRT3847_138911C.1
aaccaccattttccacttgaaactaaggacagctgtcaccacccatagaaaaggagacttaaggacattcagacagcccaagaaaaccaattgagaaaatagagggtgtgagtgagattccaaaagcatttgctactgatgaaagcccccaagagagaataggctggtactagcaag

SEQ ID NO: 43093 - DNA, 148 bp, Glycine max
  unsure (1)..(148): unsure at all n locations
  Clone ID: PAT_MRT3847_138912C.1
agaacccttttgttcttttttttaagcacctacncnaactgtgtcttttgtacaggcgcgtatgggcttggttcacaaccaaaggctaaattcctgtgatggtgtgtcctttacctttatagccccgttacgcaatcattgactttat

SEQ ID NO: 43094 - DNA, 608 bp, Glycine max
  unsure (1)..(608): unsure at all n locations
  Clone ID: PAT_MRT3847_138913C.1
aaacattcatctcctatttgtgaaaacaaccagaaatactatcttccatctactgtccaaggcaatatcccttcatctgttaacttccaagcatctcccacaagatccaatgttgatacctctgtatcacctatctgtaagcttgattgttctatatttgaagataaagagctggtgtttatgtcaagggatgagattgatagatgttctccatcaagaaaagatggtattgatgtacttcgtgagagacacttgcgctactcttactgtgccttccttcaaaatcttgggatgtggctcaacttgcctcaaactaccattgggacagccatggttctgtgccaccggttttttgttcgacgatcacatgcttgccatgacagatttttgattgctactgctgccctttttcttgttggaaagtcagaggaaacaccgtgtcctttgaataatgtgttgcaagcatccagtgaaatcttacatgaacaagattttactttgctgtcctatctgcttcctgttggttggtttgaaaagtatcatgatcgagtgcttgaggcagagctgttgttgcttactactcntaaatttgaactcaatgtggagca

SEQ ID NO: 43095 - DNA, 872 bp, Glycine max
  Clone ID: PAT_MRT3847_138914C.1
gttagttaatcacaaaggggaggtgaagattactgattttggtgttagcgccatgctagcaagctcaatgggccaaagggatacatttgttggaacttacaattacatgtcgccagaaagaatcagtgggagtacttatgattatagcagtgacatctggagtttgggtatggtagtgcttgagtgtgccataggacggtttccttatatacagtccgaagatcagcaaagctggcctagtttttatgagcttctggcagcaattgtggaaagccccccaccttctgctccacccgatcagttctccccggagttctgttcatttgtgtcatcctgcatacaaaaggatcctcgggatagattaacatcattgaagcttctggatcatcctttcataaaaaagtttgaagataaagatctagatcttgggattttggcaggtagcttggaacctcctgtaaactttccgagataatttttacaacagagtgtaaaatttgtaccagacagccagaactcttggtgactgagcaggggaatttctcgtcagttatgccatattagatatgattttaccggtatccgtcctaagtttggtggctttattacagttttatgaacactgatatgtataatagttgtttcatgtttgtattaaaaaaggcttgaccaattcatttgatattattttctttagctatgaagcccagtctatgacatggatacatgacacaatcaccttacacaactactgtaaaaaaatataggacccgaccaccttttgtaaggtcttatctcacaattatatttattttcaaccgcaaggcttgaattcaaaattttaattaaaaaggttaaatttagtattattt

SEQ ID NO: 43096 - DNA, 949 bp, Glycine max
  Clone ID: PAT_MRT3847_138915C.1
aaacggctgcgaaagaacgacagaaggggacaaagaaaacattctatggtcgatgctgctgctttcatattagatgtaaaacataacaagtcttatttatacacatattctttcattgagccttctcttgctgttaatttctgcacgacgtgaaagcgaagaaaaatgaagaattctaagaaaacttgcgcgcggaagtaccacaaatcggaaaatccacgcttgcggtggacacctgaactccatgaatactttgttgaagttgtggaaggtcttggcggaaaaaacaaggcaaccccaaagagcattctgcatatgatgcatgtgaaaggactgaggatctctcacattaaaagccatcttcagatgtacaggaacatgaagggaggtacgattctcacatcaatgcaacaggaaatggaagaaaatgtgcatgttaaggatcatcacccaatctgctccaactgttcatcccaaagcataatcttcagatcacaaggaactaaatttaaattaaaggcatcaaaatatgatacggggattgtcaatcaagaaattcacccgctagaaaataaaggactttcgcagaccagtgaaactgattatgatctaaatcaggaacccgagtcaagtgcatgcttatttagtgaatcgtcaaatgaagaaaagagtaggacaatgaaatttcttgatctctcactctctttcggctcttcaccaattccaacaatggacggtgatcaagagagaatgcgtttttcttcaccaaatacagcagataatcatgttatcgattctaattctgtacaatctcatgggagcaattatataaatttagacctaacaatatgaatatgtatcatttctgtaaccacgtacgcaatatttatcatagatttagggttttggcaaagatttataaaattaaagctttaatgaattattctat

SEQ ID NO: 43097 - DNA, 2292 bp, Glycine max
  Clone ID: PAT_MRT3847_138916C.1
tttttcatccccttacttttctccaccgtggtctagcccctctttctcttcaccgctccagttctgagatggaaagagaagtaaaatagaaaatcacaaccattacttaaaaagataataatatgtttgacggtgtacatttttgtgggagacctaattgactctcctaccctaaccagagtcacctttcctcgttacttcttctatctgccctagtctctgttctcacatacatctgattagccttgttgtgttctctagccagcaccatacacgatcccttgtgtgtgtttctgaaacataatccaatttttctctgacttcgtctctgcaaatgcctttcatgatttcaacaacagcatatgaatgtctctaatttcaggatcattctttcataaaaaagtttgaagataaagatctagatcttgggattttgttagcagcaaaatcagtgaacaacgaagatgaagacaaagatgccattgaagcagctgaagctcgcggttcctgctcaggaaacccccatcacatctttcctgactgcaagcggaacattccatgatggagatctactcttgaatcagaaagggttgcgtcttatctctgaagaaaaagaatcacggccttcagatggtaaggaactggaatttgacttctcgctggatgaccttgagaccatcaaagtaattggaaaaggcagtggtgggtgtggtacaacttggtcgccataagtgggttggaagattgtttgctttaaaggttattcagatgaatatacaagaggatattcgaaaacagattgttcaggaactgaaaataaatcaagcgtcacagtgtccacatgttgtagtttgctatcactcattctatcataatggagtaatatctcttgtgttagaatacatggatcgtggttctctagcagatgtaatcaaacaagttaaaacaattctggaaccatatcttgctgtggtttgtaagcaggtattgcaaggccttgtttacctgcacaatgaaaggcatgtaatacacagggacattaaaccatccaatctgttagttaatcacaaaggggaggtgaagattactgattttggtgttagtgctatgctggcaagctcaatgggccaaagagatacatttgttggaacttacaattacatgtcgcgagaagaagacagtaggggtacttatgattatagcagtgacatctggagtttgggtatggtagtgcttgagtgtgccataggacggtttccttatatacagtctgaagatcagcaaagctggcctagtttttatgagcttctggcagcaattgtggaaagccccccaccttctgctccacccgatcagttctcccctgagttctgtacattcgtgtcatcctgcatccaaaaggatcctcgggatagattaacatcattggagctactggatcatcctttcataaaaaagtttgaagataaagatctagatcttgggattttggtaggtggcttggaacctcctgtaaactttccgagataatttttacaatagagtgtaaaatttgtactagacagccacaactcttggtgatggaacaaggaaatttcttgtcagttatgctatattagatatgattataccggtatcagtcctaagtttggtgactttattacagttttatgaaaactgatttgtataaaagttgtttcttgtttgtattaagaaaaacttaatcattttatttgacattattctcattaggcaaaaaataaaggatcctcgggcatagattaacatcattgaagcttctggatcatcctttcataaaaaagtttgaagataaagatctagatcttgggattttggcaggtagcttggaacctcctgtaaactttccgagataatttttacaacagagtgtaaaatttgtacctgacagccagaactcttggtgactgagcaggggaatttctcgtcagttatgccatattagatatgattttaccggtatccgtcctaagtttggtggctttattacagttttatgaacactgatatgtataatagttgtttcatgtttgtattaaaaaaggcttgaccaattcatttgatattattttctttagctatgaagcccagtctatgacatggatacatgacacaatcaccttacacaactactgtaaaaaaatataggacccgaccaccttttgtaaggtcttatctcacaattatatttattttcaaccgcaaaaattgaattcaaaattttaattaaaaaggttaaatttagtattattt

SEQ ID NO: 43098 - DNA, 650 bp, Glycine max
  Clone ID: PAT_MRT3847_138917C.1
taaagttttcaaagcaaccgcccagttatgtgtctttgataaccgcctggcaagtgcgtggatacaataggcaacatcagccctgggtcttgtagctgagatagctgaaaatatagctcttatatgtttttccttagccggacgttcaacatgatttgtggctctaactatagcaatgtccaattccttgtaatcactgttgaccttagccaacgagactgttgtggtgtccttaagggctccaagtgcttttctcagactcttctgtgtgccaccagacatcctctccctcactcaacgcaagtagagaagtggcttctcaggcacaaaagaaaaggcacgatctacggttagaacaggatttcgctgaagctgaagaagctgaattgaagagagagaaagagtgttgttgtactgttgaccttagccaacgagactgttgtggtgtccttaagggctccaagtgcttttctcagactcttctgtgtgccaccagacatcctctccctcactcaactacaaaattcaaaaacataagatcccatttccaactaatctgacatcaaacacagttctctttataaacatcttgtctattttattttatttttacaaaaagagagagaccaataatttatcaagtgtaagta

SEQ ID NO: 43099 - DNA, 501 bp, Glycine max
  Clone ID: PAT_MRT3847_138918C.1
tgaaaagtaggatcaacttcccttagagcacggtgaatgacaattaaagttttcaatgcaactgcccagttatgtgtctttgataaccgcctggcaagtgcgtggatgcaataggcaacatcagccctgggtcttgtagctgagatagctgaaaatatagctcttatatgtttttccttagctggacgttcaacatgatttgtggccctaactatagcaatgtccaattccttgtaatcactgttgaccttagccaacgagactgttgtagtatccttaagggctccaagtgcttttctcagactcttctgcgtgccaccagacatcttctccctcactcaaagaattttccagcaagcgaatcaaatcaaattgaagaagaagaaccgcaagtagagaagtggcttctcagacgcaaaagcacgatctacggttagaactcgatttcgctgaagctgaatcagagagagagagagagagtggagttgtgcggacgcgtgg

SEQ ID NO: 43100 - DNA, 877 bp, Glycine max
  Clone ID: PAT_MRT3847_138919C.1
gaaacttgacgtgttttcattgaacaaattgtataacaatcacataatgaatatagttcccaccatatacaggaaatagcaactgagaacaatatagtccaatatatcaagaacaaattttttgctaaagcgttgaagtagtctcaactaggggcaaatgaaactaagtggtttgaatcagagctcattatcaatttaccttgtacataaaaaatcatataatcaaaaccctccctctgtgctaattattcaaaaagaatttcactctagctaactatggcacacacccaacgtatgatacaagtctattctttcttaatgtttcccaatctcggaatcgaaagcttagagtaatcagagtatccatttcttttttaccttgagcttattaaggatttgttttccacaggaaatgcctagatgagacctgtatatggattgtatgattgaacaggcatacctgagccatagggatggacagcggcggctccataaggatttccaaaaggatttacagattgttgttgggggggcatcatcatttgttgttgttgttgatgttgaaacatgaaagtttgctgttggttggacatggcagccatctgaacagaaggtggagcggcaactgtattagaggcaaaaaacggatcgtgcattgtcggttgcatcatgtttccccctggtgctggctcccatggattatagctgacattttggttgtttcttctgagtgcatcatcgtataggctgtctagtgtaagcttgtccaaacctccagccagtttgctagctgcagtggcagtctcgtttgaactaggagcagtaacaagtgccaattcccatcctgtagttccatttgcttgatttgactcgagcc

SEQ ID NO: 43101 - DNA, 539 bp, Glycine max
  Clone ID: PAT_MRT3847_13891C.1
gtgagggcccaaagagccctttctttttcgctggacaatggtttttaaccaaagtttcacccccaaataaaacccaccccccaccttcccaattgtgggggcggcccgcaaaatacattcaaaagctttttaaaatttggggaccccacatgggcgtttaaaaccctgtccatcccattttttagagaaattttttgggccccatgcctttttaacaatcccctaaacgttgcttaggctttagcgaaccccagctcggaaagcttttggggagcctcaccctaatctccaaaaaaggcatttttggccgctggatttttatcaacgagagggcggcatccagggtcacactaaatacccttgtcaaaagggtttttaaggaaaccttctttttgaccactaaacaacttcgagaagtatgagttggcgaaaattagaggattaaaggttccaggacccttaaatccacaacgctccttgggtgccgccccaatagggggacccccaaattgagcagcgattttttgggcagtaagccc

SEQ ID NO: 43102 - DNA, 465 bp, Glycine max
  Clone ID: PAT_MRT3847_138920C.1
ggcggcaaaaataatcaaacattccttttccgtaaaaaaaataaaaaagtttttttgtcaagtcaaaaaaaatccgttcaacccccaataccaatcaagaggtccaggtttttttttaaaaacaaaaatccgggggcccctgggccattttagaatccaacctacccctacctttttggggggggggggcaacaaacccttttagttttgggggcggttacccaagtaaccctaatcaaaccggcccgggaaaaaatttgggtttttttctcccattttccctaaatttagggactttgtttttggaaatgggggcccccaaaaaaaaaatggaattttttggaaaaagcttccaacttcctttagtttcggcattagaagcacccccccaaaaggattaggaccatgtttcaaggactttggggggaacctcttcagatgggggggaactttttttaaggtaaa

SEQ ID NO: 43103 - DNA, 484 bp, Glycine max
  unsure (1)..(484): unsure at all n locations
  Clone ID: PAT_MRT3847_138921C.1
tacggctgcgagaagcgacagaagggctctagaatagatagtcaatctagagtccttagagcactcactgagacattaaattttattcctttaagcttaatgtttttacaagttaagtatttgggcatggagttgtttgcatgtaaaaagattaatatagtttgtatctcccaatgtatgagaattagtttatgttttatgtaccttggtgatcatgttttgtaaggcacataagtgtcaaaggctttgtataagttttgttcttatgacgtatgtgtaagttttagtttacatgcagttaattatggtattcttctattctaagttttcaaaatttagtaatataagcgtgcaaaaggtaaattctttgggctctaacattgttttgttagccaaatcaatagaacaactcagatcttatcttaggtcanaatgtgatccggttcactatttatgtgtgagcaaattttggcgattttaacca

SEQ ID NO: 43104 - DNA, 2322 bp, Glycine max
  Clone ID: PAT_MRT3847_138922C.1
gtgcgtggatacaataggaaacataagcgttgggttttgtagctgagatagctgaaaatatagctcttatatgtttttccttagccggacgttcaacatgatttgtggctctaactatagcaatgtccaattccttgtaatcactgttgactttagccaacgagactgttgtggtgtccttaagggctccaagtgcttaaaaaggatttcactgtaggtgaccagggctcacctccctcgtatgatacaagtagagaagtcttcatgtttcccaaacccagaatcgaaagttgagagtaatcagagtacccgtttcttttttaccttaagcttattaaggatttgttttccacaggaaatgcctagatgagacctgtatatggattgtatgattgaacaggcatacctgagccatagggatggacagcagtggctccataaggatttccaaaaggatttacagattgttgttggggagccatcatcatttgctgctgctgttgatacatgaaagcttgctgttggttggacatggaagccatctgaacagaaggtggagcggcaactgtatttgaggcaaaaaacggatcgtgcattgtcggttgcatcatgtttccacctggtgctggctcccatggattatagctgacattttggttgtttctcctgagggcatcatcgtataggctgtctagtgtaagcttgtccaaacctccagccagtttgctagctgttgtggcactctcatttgaactaggagcagtaacaagggccaattcccatcctgtagttccatttgcttgatttgaaacagcagaaggttgttgttcaacagcaacgggaacaatggctaaagccaatgcattcttctcttccaactctgcagcagctggaacaggatcctccaaattcaacagatcaggaggtggttgtactggtggtgcttccactttcacaggttcagaaggtggaggtggagggggtgagggtgagggtggacattcctcttccacttctgttgtctttttgtattcaatagccaaaacttctttgttctcaatagcctgatccttgcgaactattggtccctggggagcatctttgacatactcttccatggcttgcagaaatgaggaagggggctgctcaactttaataaacttctctccccgtccaatgtcaagattacggcatatttcataaaactctgacagtctctcagcctggtgcccaaccctcctgtatatatcaagagctttcagagcatcatggcgttgcatctcaaaaaacttatcaaccatattgactgttccatcactaatagcttgataaattttaatgctttctgaagcaaccattgagagtgctaactgaatgacaaagttatttacagctgccctgtgtggctggcaaccaataacccgattgagaagttgctgtaaagctggcaactgctctaacagttctgcagtatccaaatctttggtcctaggacggtctgcctcaatgtcatacttcaacacacggaaacattccagcctctcctccaaaaataaggcataagtgcggacccaggcagaataatcccatgcatttggactggaatcatctttaaaatgagccatgttgagcatatgacttctacttctcccataatttatgagttcttcatgaaatgtaggatccacttcccttagagcacggtgaataacaattaaagttttcaaagcaaccgcccagttatgtgtctttgataaccgcctggcaagtgcgtggatacaataggcaacatcagccctgggtcttgtagctgagatagctgaaaatatagctcttatatgtttttccttagccggacgttcaacatgatttgtggctctaactatagcaatgtccaattccttgtaatcactgttgaccttagccaacgagactgttgtggtgtccttaagggctccaagtgcttttctcagactcttctgtgtgccaccagacatcctctccctcactcaaagaattttccagcaagcgaatcgaataaaattgaagaagaagaagaagaagaagaaccgcaagtagagaagtggcttctcaggcacaaaagaaaaggcacgatctacggttagaacaggatttcgctgaagctgaagaagctgaattgaagagagagaaagagtgttgttgtttgccggagaacagagagagcaagaaaagaggagagacatttgagggccggtttgatgttttcaatgttgacaaagcagacgacgaaggcattgaacttccctactcgtgcaaggccggttcttgcgtttcctgtgt

SEQ ID NO: 43105 - DNA, 1751 bp, Glycine max
  Clone ID: PAT_MRT3847_138923C.1
ccgagaaactcgtgccatggggctgcacgtgaaaatgaattttggagcgaaaccccattacgtattgttgtgttgtgtggtgtgactggattcagatctgcgcctttctctgtgcgattagcgtgccctaggcctggccatgggagacgaagaagaggaggaggtgctcggttcgggtcaatcagcctccaacaacagcttgccacctcccgaccatagcacactccttcaaattgaaccatctcgcacatacatgctgatgatgctgtatacacacgcttctcttgcggccaagaagaaaaagagaggcggacaacgggctggtggacctgataagagtggaagatgtctccgctattttagtatgaaagtgtgtgagaaggtagaaagcaggggaaggagatcatacaatgaggtggcagctgagcttgctgcagaatgtaataataaatgtttccaacaagttctattgtatggaaatgtttctgaaaacagaaacatccaaactgagagaaaaaagaaactggtgagaattaacgtctttctttgtagttcaaattgtcacaaaaattctggtttggattcctcaaatttagtacatatacctagtttattttaaaaaaattcaatatggattgtggttatatttaggtagctgatgaacttgtggccgaatttgctgatccaatcaatggtgtttcaactcctgatcagcaacaatatgatgagaaaaacattcgtcgaagggtgtatgatgctctgaatgttctcatggcaatggatattatttctaaggacaaaaaggaaattcaatggaagggtctccctcgtactagtctaagcgatattgaagagctaaagtcagagcgtcttgggctcaggaatagaattgaaaagaaagcagcctatttgcaagagctggaggagcaatacataggtcttcagaaacttattcaacgaaatgagcaactatatagctcaggaaatgctcccaatggaggtgtatctttgccctttattctggtgcagacacggccccatgcaactgttgaagtggaaatatcagaagatatgcagcttgtgcattttgattatatttgcgctccctttgagatgcatgatgataactatgttctcaaggcaatgaaattttgtgagagatctcagaatgataatacaacagataattctacagatggcggtgaaggttctagcatatatgcacaggttcctacttcagtttcaaaccctccaaataggcctccttcatctccaccactccctggaatattaaaggcaagagttaagaacgagcattgatatgcaattttgtactgcatcgccttatttaagcatgtttgtatatttttgtaaagtaatttgtcagtaattaattgtccttcataatagttaatcagtacagccaattcactcagtaggttagaagcgaaccagtgtgcttgagtctatattcttctgggttgattttggcaaattctttgctaaccatatccattatttactaccttaagaccttaactgatttttttccccacattttctgtgtatttgcccttttgtacttataatagagaaattggtttgcaccagtccatagagatcatggaatgttatacatcagcgtaggattaattttggatttcacggatatatagtgtaaattattccgtcttatgtgtattatgaaaaggatggaacatgggatttttggttgatgaataatttctttt

SEQ ID NO: 43106 - DNA, 183 bp, Glycine max
  unsure (1)..(183): unsure at all n locations
  Clone ID: PAT_MRT3847_138924C.1
ggacctgaactgcttctttacatttatttttcttctggtgattccacaatgtgtcctaacnctcaatcctcttcctcttaattatactctattcatctttttcctcataacctcaaacacaaaacccaagcattgcaattcccaatctcacagaaacaccaggaattaataanacacataaca

SEQ ID NO: 43107 - DNA, 590 bp, Glycine max
  Clone ID: PAT_MRT3847_138925C.1
ccacgcgtccgtgaaattcgtggggctgggaatgcatggatatgcccagaggtatacagctgcctgttagaaaggctttttctcttttattgtttggttaagccattgttccgattttcttttacatattgtggaccttgaactatttggaagcattagcattgtcatgtatgatggaaccaccatatatacactcatttttttacctttacttttcggggtggaggggagaatcttttcatcaaaattttccattagttttctaagaatagtaatttaatcctcttcatcagctttaaaagtcttgtgtatgacacaaagaagtgataattactcatagaaaggtatgatgcatgtatcaggtacaattttttttttttttgatcagcaaaaggaatatatatatatatatatatataaaggagtgccagaggtgctaaagtacagaaataggaaagctcataccaatggtgcctgaaaacagactgaacatagtctgagaaggaaccaaactatggcttcaatttataaactacccctactgctattgtatttgttctgtcctctgctgctaaaggaaaccatatcta

SEQ ID NO: 43108 - DNA, 253 bp, Glycine max
  Clone ID: PAT_MRT3847_138926C.1
ggaagacgaaaagagagttgagagagagtgagagttagtgagagggagcagagggagcgaagagaagaaacaaagatggagactcctgcttcccaacaaggcgtcttgaagaagaaggagacaaggtgccgaaaacccaaaccaaaggacgtacacgggaagggtttgaaggaaggttggaaaacacagcatcatcaacaacatcatcatcagcagcagtaacatcaacaagatcaaccttcgttggacaaga

SEQ ID NO: 43109 - DNA, 393 bp, Glycine max
  Clone ID: PAT_MRT3847_138927C.1
catgttcgaaacgtaaaattgcttgttcgaacacatgattatatctcaagtagcataataatgtaatttaagttatactgaaagaaaatactgtaatttagaaacgaattttatacaaatgcactttaattgagtctgtttatctcgtagtatgagcctctcttgttgctagtaaaaggagaaaattcagatccatttaggtatacttatgagtccatgattgtagtttattcaaggggaactaaaccttcttgttttgtagcttccctttctcgtaatctcatctatatttttttggagatattttgtgtagagcccaaacaaaacttgggaggtattatacaatactttcgatgagtactgccggatggtcagatgaggaatgctctgtca

SEQ ID NO: 43110 - DNA, 1185 bp, Glycine max
  Clone ID: PAT_MRT3847_138928C.1
tctgtgttccttcattcttcactctaccaaccaaaaccctatcccttcccttttttacaatgctattatactcgtctttacttcttcgatcattcaatgttataagttcttaaccttcattgcagcccaatttctgtttacttttctctatctatttgtttggccttcttctttttactggtatttctttctcgaatggtcggatattagagaaacatgaacgaaacgtaaaattgcttgttcgaacacatgattatatctcaagtagtataataatgtaatttaggttatactgaaagaaaatcctgtaatttagaaacgaattttatacaaatgcactttaattgtgtctgtttatctcgtagtatgagcctctcttgttgctagtaaaaggagaaaattcagatccatttaggtatacttatgagtccatgattgtagtttattcaaggggaactaaaccttcttgttttgtagcttccctttctcgtaatctcatctatatttttttggtgatattttgtgttggattcagagtaggatgctaactctacagtgcgcagagaaaacaagaaagcactttagctaaacttcgtagagcccaaacaaaacttggggaggtattatacaatactttcgatgagtactgccggatggtcagatgaggaatgctctgtcatcggagaaaaggcagaaattgggtttctagattttgaggaagagaagtctgtttgcagttacattgataatgaaggggcaccgattattgtatctgtcccatttgcatttgtggatggcaagcctcaatctgtatctgtaggagatactgctgtggatttaataaccattaggaatactactgatgaacccgtggacctgtggagtgttcatatttttgcctctaatcctcaggacactttcactctttctctcacagaacctccgtcagcaaattcaaatgcagacgaagatcagagctgtttagaatctttcactttggaggacagggtgcttcagcctggtgagaacttaaaaatatggttgtcttgcaagacaaaagaaatggggatgtattcgtcagttgtgtattttgatgttggagatgaaaaaaatcgaaagggtggttttcctcttagttgaagacaaaatctccaagtctttggcttctaacaggccttattcaag

SEQ ID NO: 43111 - DNA, 130 bp, Glycine max
  Clone ID: PAT_MRT3847_138929C.1
actcttcaaacccaatccactccaatcccatgcaacatggacccctacaaggagctcaaccttatccctaacaaaaaacggcaccgtctcgcgccccaacaaaccctccgagagcccgcccgcatccgga

SEQ ID NO: 43112 - DNA, 434 bp, Glycine max
  Clone ID: PAT_MRT3847_13892C.1
cgttcccgaacctaaacccaacacgctaaaaccccgactcccaaaaatcagagagtacgcagcgccaccgcaccggaatctgttagttaatcgccgataactcttcatcgccgttccgataacaccacaagcctttgacgctgcgaatgagaaggttcgcgtggttcacgccgtatcggcgccatttactttcgtctctgacttcagaatccctcgtggataaaggagaatcaaccttcaccaaattctcgtcgtctcgccaatcgtttttgctcgctcgagctttggtcaattgcgggttcgtcacgaaaacggaggagtcccggattccgagagtaccgttaagatatcgttattttcatgccacagcattttcttggtgagctgaccgagaccattatcgaactcgtgggggggctggggatgccgggggg

SEQ ID NO: 43113 - DNA, 607 bp, Glycine max
  Clone ID: PAT_MRT3847_138930C.1
ggctcgaggcagaatgagtctcatggtattgttaatcaacttcctgagcaagggatccctgtcatgattacatggaactatggtggtaacaatgtggctgtggagggatcttgggataactggacatctaggtgagatttaacgactgcttttttggtaacagtagtactgaattgtatttgacatgaaaagttatcataactgcaaatgatctacaatgagattagtaccagtgaattctattacttgcaggaaggcattacagcgatctggcaaggatcactcaatccttatagtgcttgcaccagggatatatcattacaggttcattgttgatggtgaagagagatttactccagagctatccaatgtagctgatgagatgggacatgtgtgcaatcttcttgatgttgatgattatgtgccataaaaccctgatggtgtgttcgagtttgagcaccagcctccccgaatcagcttcggcagcatttcagctgggaagatttgcaaagagccgtggtccgtcttcgagctgatctactgtctaggatgggaatctgcatggttctcttaagcccaactgtgagctaatatgctcatgagaaaa

SEQ ID NO: 43114 - DNA, 799 bp, Glycine max
  Clone ID: PAT_MRT3847_138931C.1
aattcggctcgagggagaagacaggagtgttatcggcgaaggaggcattcgagaagcttgaaaaggtgggagaagggacatatgggatcttgcacagggacttgaagcctcacaatctcttgatggaccgaaaaaccatgatgcttaaaattgctgatcttggactcgctcgagcatttaccgtgccaattaagaaatatacacatgagatactaaccctgtggtatagagctcctgaagtcctcttgggtgctacccattactcaatggcggtggacatgtggtccgttggctgcatatttgccgaacttgtaaccaaacaagcactctttcctggtgattccgagctgcaacaactcctgcatatattcaggctattgggtactcccaatgaagatgtgtggccaggcgtgagtaaactaatgaactggcatgaatacccccaatggaactctcaaagtctgtcaacggctgttccaggtttggaggagcttggactcgatttgctatctcaaatgttggagtatgaaccttccaagaggatttctgcaaagaaagcaatggaacatgcttacttcgatgacctggacaagaggaatctttagaaagacacagattgattcaagatttggttgtagaaatttatgactaccaatttatttttatgcttctctcgagcgtgtatcgttttaggatgatggacttttgctgtttaacttttcatatttgaggactgatggagtgattgattgcgcttgggatttatttgccgaaactacatttgaaattaggattagta

SEQ ID NO: 43115 - DNA, 588 bp, Glycine max
  Clone ID: PAT_MRT3847_138932C.1
tcctctagagcggccgcttttttttttttttttttttttttttttttcgaccataaatcccaagggcaatcaatcactccatgattccacaaatatgaaaagttaaacagcaaaagtctattgtcttaaaacgatacacgctcaagagaagcatagatcaataatttgtctttctaaaaatgccccttgtccaggtcattgaagtaagcatgttccattgctttctttgcaaaaatcctcttggaaggctcatattccaacatttgggatagcaaatcaagtccaagctcatccaaacctggaacagccgttgacagacttttagggttccattgggggtattcatgccagtcctttagtttactcacccctggccacacctcttcatttggagtacctaatagcctgaatatatgcaggagttgttgcagctcggaatcaccagcaaagagagcttgtttggtgacaagttcggcaaatatgcagccaacggaccatatgtccactgccattgagtatgggtagcacccaagaggacttcaggagctctatacccacaggttaatatctcgggtgtatatttcttaa

SEQ ID NO: 43116 - DNA, 1708 bp, Glycine max
  Clone ID: PAT_MRT3847_138933C.1
ccacgcgtccgtacggctgcgagaagacgacagaagggggtagtagtagggggagcggcccgaagattacagcgggagaaagacgacagaagggttggagagagagagagaaatggagaagacaggagtgttatcggcgaaggaggcattcgagaagcttgaaaaggtgggagaagggacatatgggaaggtgtacagagcgaaagagaaggcgagagatggagaagccacgaggaggaggagtgttatcggcgaaggaggcattcgagaagcttgaaaaggtgggagaagggacatatgggaaggtgtacagagcaagagagaaggccacggggaagatcgtggctctgaagaagactcgtctccacgaggacgaagaaggtgtccctcccaccactctccgtgaggtttccattctgcgaatgctctctcgcgatccccatgtcgttaggttaatggatgtcaaacaaggtcagaacaaggaagggaagacagtgctctacttggtctttgagtacatggacaccgatctcaagaaattcattcgctctttccgtcaaactggacaaaccgttccaccccaaaccatcaaaagcttgatgtaccagctttgcaagggcgttgctttctgccacggtcatgggatcttgcacagggacttgaaacctcacaatctcttgatggacccaaaaaccatgatgcttaaaattgctgatcttggactcgctcgagcatttactgtgccgattaagaaatatacacatgagatactaaccctgtggtatagagctcctgaagtcctcttgggtgctacccattactcaatggcggtggacatttggtccgtaggctgcatatttgccgaacttgtaaccaaacaagcactctttcctggtgattccgagctgcaacaactcctgcatatattcaggctattgggtactcccaatgaagatgtgtggccaggcgtgagtaaactaatgaactggcatgaataccctcaatggaaccctcaaagtctgtcaacggctgttccaagtttggatgagcttggactggatttgctatctcaaatgttgaaatatgagccttccaagaggatttctgcaaagaaagcaatggaacatgcttactttgatgacttggacaagaggcacctttagaacgaataaattggtccaagatttggaagtagaattttatgactaccaatttactctatgcttctctcgagcgtgtatcctaatccgtttaaggagtggttgcccttgggatttatttcatagctgcttctatgttttttagtcattctaatggaaatatcgaggtgttttcgtgtcattctaaaaaagaaagaccaaggttgtacgtaaagaacaaagtcgccgctgttccaggtcacgcagtgcgtgtacttgatttgctatcccaaatgttggaatatgagccttccaagaggatttctgcaaagaaagcaatggaacatgcttacttcaatgacctggacaaggggcatctttagaaagacaaattattgatctatgcttctcttgagcgtgtatcgttttaagacaatagacttttgctgtttaccttttcatatttgtggactcatcgagtgattgattgcccttgggatttatggtcgaaaaaaaaaaaaaaaaaaaaaaaaaaaaaagcggccgctctagaggatccaagcttacgt

SEQ ID NO: 43117 - DNA, 618 bp, Glycine max
  Clone ID: PAT_MRT3847_138934C.1
ggctcgagtcccgtcctcccacagtgatttgagagagaaaataatactccaaatatatcgtcaaaatgcctgtgagaatccctcgtgatagcccaatgaagataattcctgatccaaatcgcaagacaggtccagatgacgcggttataatgcagaaaataatgggaaaattgagagaagcagatagcaacaacgacggtcgttacgacaaagatgagctgaagcatgctctcaagggtttaggtgccatcctccctgggtggagagccaaccgttgttttggaagggttgatgccaaccacgacggtgagattagtggcgctgaaattgaagctctccttcaatatctccgttctcatgggtatggaaaataatcatcacttatctgtgtgttgtctaatcatatagtactacaagaaattcgcgtagcgagggtcagttccgtcgctaatccctcgtgtgtgttgtgtaatgatatagtttgcgtgtgtttgtgtttatgtataccctgcatgcctatacaactaacgctgaagagggaggataaatcttcctgcgcatgttgtgctccctggatatgtaatgaagtctattaatataaaactgttttatattaaa

SEQ ID NO: 43118 - DNA, 1046 bp, Glycine max
  Clone ID: PAT_MRT3847_138935C.1
tttctgggttgtcccacgcgtccttacggctgcgagaagacgacagaagggggtagtagtagggggagcgggatttgaaattcaaaaaaacaaggaagccgttggagagagagagagaaatggagaagacaggagtgttatcggcgaaggaggcattcgagaagcttgaaaaggtgggagaagggacatatgggaaggtgtacagagcaagagagaaggcaactgggaagatcgtggctctgaagaagactcgtctccacgaggacgaagaaggtgtccctcccaccactctccgtgaggtttccattctgcgaatgctctctcgcgatccccatgtcgttaggttaatggatgtcaaacaaggtcagaacaaggaagggaagacagtgctctacttggtatttgagtacatggacaccgatctcaagaaattcatacgctctttccgtcaatctggggaaaccattcctccccatatcatcaaaagcttgatgtaccagctttgcaaggggattgtttcctgccatgatgaggcataaattacacacatctactcaaggggaactctttcccctacctttctcctctattctgctctgctgaaaactgaaaaggtttcctcatatagcttaaaataagtgtacttttttttgttttggtttactgaattggtaagtgacttcatgtcattttattttaaaaatatgcatgcatggggtcgaaagtgacttgaataatttcagggactagtatgtgatgtgtgtggtttcgcacaagttcaaagatatgtgctgtacctttatacatttgaagctgataatctgttgtttctttctccattttcagggatggatttctacaaattatagttcctaaagtttgagtatgactgagcaatattgatttgtagcacatatatgtatacgtatacctataccccgtgcatatagatggagaagaaatgggcattgttttgcatgggccatgtcatgccctacatatatttgtaatgtaatgagcagatgatgggttaattttgatttcat

SEQ ID NO: 43119 - DNA, 455 bp, Glycine max
  Clone ID: PAT_MRT3847_138936C.1
gcgctgtccgtctctctctttttctctctctatcacatagccgatcgccggagagcctcagcttgacggaactattctgttgggcatccgatcctgcattgatcacgattccagatgccagagcgctcggttcaattcgtaccaccgaatgctgcaagaggagccgggcggcgcaaaacttgtggtactcataggcttttgggggccaccgcgataagcgatgcatagggaaggcagttactggtgctgcaataagcaacggacccctttgctaccgaaattactaggccggggagcgcaagagagaatcagattactgttgcctctgaaccgcagagaggaatgatactcgcccagaattttgccgtcgacacatataagggctagcgagggagcgttgaaaatatcactctgttgataatggaggagataagactagtgctagaagtgcctcc

SEQ ID NO: 43120 - DNA, 505 bp, Glycine max
  Clone ID: PAT_MRT3847_138937C.1
acggaacgacagaagggggggatttgaaattcaaaaggcaggcaggcaagtgtccgttgctcaacgattcgatttgtgatttatttattatatttaaaaatgttgcaacggcctatataattgaattgaagagtgttatcggcgaagaaggactcaattgagagagagagatggagaagccggggaggaggaggagtgttatcggcgaaggaggcattcgagaagcttgaaaaggtcggagaagggacatatgggaaggtgtacagggcaagagagaaggccacggggaagatcgtggctctgaagaagactcgtcttcacgaggaccaagacggtgtccctcccaccacactttgtgaggtcttcattctgcgaatactctctcgcgatccccatgtcgttagcttaatggatgtgaaacaaggtcagaacaaggaagggaagacagtgttctacttggtgtttgagtacatggacaccgatctcaataaattcattcgctcct

SEQ ID NO: 43121 - DNA, 1226 bp, Glycine max
  unsure (1)..(1226): unsure at all n locations
  Clone ID: PAT_MRT3847_138938C.1
ctcacacttccagagcacagttgcagcgctttttttgtcttttctttggttctgttttgccgcattaacaaaatggcaatggcaatggcagcaattgcttcttctctcggcgtgggtctccgtcctctttctctgtcttctccctcctcagcactgttccagtcccgccactccttcactataacaaccacaacacccaagtgctgcctcgcaccaaaacaagactcacccctggaactggaactagtgaaatcaacacagaacacccaaatcatcttacactctttctctccattcccattgctctgcgccgctgctctcttacccggaagtgaagcggtaacatctgtgtttgggcctttcgttgagctcgtcaagtcgtggaatctcccagactggctcgtccattggggccaccctggcaacatggccgttgtgctctttgccatgggtggctacggtacctatctgggttttcgcattcgttattctgataatctggaggaaaaggctaaggccaaggatttgcatcccaagcttttagctggtatgtttttcttctttgctcttggagctactggtggaattacagctctactcacttcggataaacccatttttgagagtcctcacgctgttacaggagtcattggtcttgctttgttgacaatacaaactatactgcctacactctttgagggaaatcctggactaaggaatgttcatggtatcctgggtagtggtatcatgacactttttcttgttcattttgcccttggacttcaactaggcttcagttactaattacagcttccatttgaactcttgttatgttgaggttattgtattttagtcatggtgtacattctttcctgcactggttcttagctccaattctcaactctgattaccatgatgttatgttctcctctatcattttgtttttaaaagtagttcagattggttacttatccacacactattatgggaaaaaaaaaaaaaaaaaaaaaaaaaaaaaaaaaaaaaaaaaaaaaaaaaaaaaaaaaaaaaaaaaaaaaaaaaaaaaaaaaaaaaaaaaaaaaaaaaaaaaaaaaaaaaaaaaaaaaaaaaaaaaaaaaaaaaaaaaaaaaaaaaaaaaaaaannngggggggggccggttttaaaagaaaaaaattttagggggggggggtggaaagtaaaattttttttttgggggacccaaaaa

SEQ ID NO: 43122 - DNA, 280 bp, Glycine max
  Clone ID: PAT_MRT3847_138939C.1
cacccacccctctcacacacacacccacaagacacacccgagccatgttcacgtcggcgccgccgccggcctcggcgccgtcgtattcgttgcgctggtcgcgctggggcatctacggcgtcaagaagggctttgtcatctccgactgggccttcggctacgccatctccgtctaatgtcagatcggcggtgagcgctattggccgtcgagcaacgacatgccgttcgagcttgataagtgcgagcgcatactgcgcgcctttatcgacgatggctttcc

SEQ ID NO: 43123 - DNA, 381 bp, Glycine max
  Clone ID: PAT_MRT3847_13893C.1
tagcttactaatccggggcgcggccttcactatatcacgattttttttttttatggatgcacaaagctggtgtattaacacgggggctgtgacactgggtgctgctaaggctctgctcgtgaaccgggatatgcatgggccttggctgtgacacgttgagggtcattcagccctccttacgaactgggaccacactatatcatggctttgattgccctctgattctgccttgacaagaaaatactcctcctgtgtgtccgaggcccgatactacagctgagatagatgcttcttacactgcctgaacggtaggcggtctggcgggacccatttctattgaccactccgccaatgttggcgcgtgaatgagctctcggactc

SEQ ID NO: 43124 - DNA, 525 bp, Glycine max
  Clone ID: PAT_MRT3847_138940C.1
tcgctagaaacagagtgatgaaaatgaatgtccttgttttcttcgtggctacaattttggtagcatggcagtgccatgcgtacgatatgtaagctctccgaatgaacactgtctatggtgcccgaactcaggaggtgaaatgcgcacgttggaggcttgatgtggaagcacacatcatctttggctttgagaccatacctgaaaagtgcgttgaagcaacatatgaatacattcctggcgacacaatttctatcagactccaagacagttaccccacaagcatgctattatgccagagacctcgaaacacatgccacggacacatttgtgttgagaatagatggcaccgtactctattatatttcatactacaaaaaacatggatatggggcggagaaacataactaccccttgtatgatgaatgtgctaacatgggcaatgcaccgaccctgcccgtgactcttaacaattacaccatgctggtgactgttgccttcaagaatattttgttgacaagaataaca

SEQ ID NO: 43125 - DNA, 284 bp, Glycine max
  Clone ID: PAT_MRT3847_138941C.1
agacttcactgcacgcctcgctgagctcggaattcggctcgaggtgtatttatgtcctgtacgattgaaacgcccttcttgtacactcggttgatcgtcggcaaggtgacaggacaacttgacctttaccttccctttgtggtgcccatatatctctcccctgctagacctggttgaacgcgctgacaactgcgtgcttgtcaggaaaggtgctgatgatgccgctatgaccctgagcaggggtatgtatgcctgcgtgctgatacgctcttgatgctgagccc

SEQ ID NO: 43126 - DNA, 614 bp, Glycine max
  Clone ID: PAT_MRT3847_138942C.1
aaaactacaaaggcataaaaagtgggcagcaatattctgtccgaaactttttgtttgcacataacttattttgaaaattaattaattaatttctgtatttaaaattaaaatttaatttgatttgggttagattgggatcactttcctttctggacaaaatgtgagttttcaacctacggcccagcctctgattcatggatatatttttttctttttttggtagtacgtttcacctttaagatggctctcttgtaattaactaattttttgtatcaattttttttatcaattcttgtaattaactaattacttttacatattactccctctatagtaccataaagggtaggaaattagtgaatttctatcacttagtggacaaaagttagacaatgtctcagtttttttttttttattgaggggacaatgtcatagattggtatctatgttttgtggttaatcatttatttaatgttgttttccaatgaaaactgtggttttacctctataaatgtgccaacctttggagtatctgtaacccaacatttttttttttttttattggttattacgtcttaagtgattccacaccattacaaatcactcatttttac

SEQ ID NO: 43127 - DNA, 403 bp, Glycine max
  Clone ID: PAT_MRT3847_138943C.1
gttgatggtgatgttgatggtgatgatgtattgcagaagaaagaagggagaaacaggggtgtttactcaccactacgggtgttgagcaccttcagcctgcagattgtacatcttatatgaaaactagaaataacaagtttaaagttaattgcaagcccaatcaccccattaaaatgaaaagccacagctgttaaagagaaagcaggagaaacataaaaaaccacaccacagatcaggcatgacaaaacgcaagtattatcaaaggctcttcaggttgaatatttcacttaatctcgtaaatataaccacacaatatgatatatttaaacagcaccaacaccactctcgcaacttaactgttttggactccctatttctcccattgaaagagagtttccctatt

SEQ ID NO: 43128 - DNA, 313 bp, Glycine max
  Clone ID: PAT_MRT3847_138944C.1
tttgacaacacaacggaaagaggccatatgggaccattccagcttcaaaacgcttcgtttcacttccccgtcctcgcgttgcttggaaaccctaaccctatccacgtcattactcctttctccggcgacaccttcaccttcgcgccaactctcgcataccgaataaacctaatgaatctgagagatgaagacaaacatgacccgatctgagtggtgcgagccaaacacatcgatgctgtctcacgcgcatcttgaacgtcagattgagcatctcttggagtgcaagcctctgtcgaactatgagttgaaagct

SEQ ID NO: 43129 - DNA, 345 bp, Glycine max
  Clone ID: PAT_MRT3847_138945C.1
ttggatcctttagagggggcggccttttttttttttttttaatttaagacatcactggaccttaagctctattagagccatgaacttatagtgcctggaccttatggcagcattccaacattgacgggcacaacctaggacaaagctaacagcctttctatctaaagaggcatcgtccacaagagaaatgaaattccactaggttctcagtaaaataattcagggagacaaagaaagaggtcgagattcatactctgagagaggagcaaatctgtaacttctagccctttctgttggaaagagtcagggactagctgtgcatggaggggatccaagctccaatgg

SEQ ID NO: 43130 - DNA, 411 bp, Glycine max
  Clone ID: PAT_MRT3847_138946C.1
ctatctttcttttttggtagaaagctttttttttttagacggatccggatacacaagaaaatcccattatggggagcacaacaacaaaccccaaggtaggaactcaaaaaagggatttcgaaccaagacggacactaacccgcgaccaagttcgagaaataagcccccgcgtttgtgaacgttatattaaaacccgtaaacgcgccggtgggtccaccggaccaattccggagccgatcccgcgagcgaacaaacttaacctatagagaatggcaaaaaagccgggcctaaaaatgggcaaactaagccccggaaaaaaattgggatcatcacaaaaatccaaagataaaaaactcccaaactaaaaaaggaaaccctggggctcccccaaaggggcaccaaccaaacata

SEQ ID NO: 43131 - DNA, 460 bp, Glycine max
  Clone ID: PAT_MRT3847_138947C.1
ctgtgttggtagatccatttaagacaagacctctcggattaagcttgtctctctataggaaggttacaccttttcttgagcatttatatcctgcattcccaccattgcattaaataccttccattgcattttagaaagtctattccataatataaattcacattttagaacaaattttccgaaatgtaatgaaagatgcatgatgcaataatgggagtacaagatacaatagcccttttttttctaatgtataaaatcacatttgacacctagtttttccaaagtaaaagtataatatcaaaaaatgtctttattaaacttcgttcacaacaatggaaatgcaaacaagtactttgtcgttaaatagacttatcttagatcgcccttaaattcaagtgggcacccttaagttctagtcaagccgagatctcctctaatcttgtgggaatatggtaaaata

SEQ ID NO: 43132 - DNA, 226 bp, Glycine max
  Clone ID: PAT_MRT3847_138948C.1
caagtctagacttcagaacctcattcatcagtgaaatactgaaatgaataagtgctcctcagattctctgaagattttataatttaatttaattacattagttttaggctatcttgttttgcttcacctgaattagttttgcatctaattgaaattttctcattgattatgtgttcaaattcaaatgtgtgctcagagaattggttgtctatatcactgcgcatct

SEQ ID NO: 43133 - DNA, 1440 bp, Glycine max
  Clone ID: PAT_MRT3847_138949C.1
acggctgcgagaagacgacagaagggtacggctgcgagaagacgacagaagggtacggctgcgagaagacgacagaagggtcccacgcctcccctcacttgcgttattagggttctagttagacagtggcggggtagtgacattacagtgtgggcataaaattttcaaagtcgaagcgagaacttgccatttcgagggttttagggttagggttttctcaaattgcaagaacatgggtttcaacattcaaccctatgggattcagtccatgctcaaggaaggccataagcacctttctggcctcgatgaagcggttctcaagaacatcgacgcctgcaaacaactttccactatcactcgaacttccctcggtcccaatgggatgaataagatggttataaatcacttggacaagctttttgtcacgaacgatgctgggacgattgtgaatgaacttgaagttcagcatcctgctgccaaggttttggttttggctgggaaggctcaacaagaggagattggggatggagctaatttaactatttcatttgctggggagctcctgcagggtgccgaggaacttatcaggatgggtttgcatccgagcgagatcatcagtggatacactaaagcaatcaacaagactgttcaaatattggatgaactagttgaggatggttctgacaatatggatgttcgtgataaggaacaagttatttcaagaatgaaagcagccgttgccagcaagcaatttggtcaagaagatatcatatgttcgcttgttgctgatgcatgcatccaagtgtgccccaaaaaccctgcaaactttaatgtggacaacgttcgtgttgcaaagctcttgggagggggcttgcataacagtactgtagttcgaggattggttctgaaaagtgatgctgtcgggactataaagcaagcagaaaaggcgaaggttgctgtgtttgctagtggtgttgatacatctgcaactgagactaaaggaactgtcctcatacatacagctgagcagctagaaaattattcaaaatcagaagtgccagcattagtagacatgatatctagattgccatacttggaaatcgctgtgttaacggcgttttgaacgtcgttttcgtttgtgacatcgcaatggacataggaagcggattccaagtgtttgcaaagagagagacccaaatcgtcttgaatatcagctatcacaacgtgtgctccatgcttagagaagagtcttgcagtggcctcacctataccgctagcaccaccactgataagagccactttcccttcaagccttctatcaagaaccgagacagtagaaatacttgccatgagtgagcttttcaggatatataatatagccaacgagagatgttttagagtgttaaacgtaattgcttaattatgtgatcgcggctcgag

SEQ ID NO: 43134 - DNA, 169 bp, Glycine max
  Clone ID: PAT_MRT3847_13894C.1
aaaacaagaaaacggggttgaaagccatcattccttaactggggaaaatctaattttttttcccttctctttatttcggaggggattttaccaatttaccttctacccaccaaaaacagagggcctattttggatcaaaatcactgacattaaatttttcctgatccca

SEQ ID NO: 43135 - DNA, 392 bp, Glycine max
  unsure (1)..(392): unsure at all n locations
  Clone ID: PAT_MRT3847_138950C.1
acgagcggaatcaagaatctaagcatcttcaacatcagcttattggtaaaacggcgttagcattttctggttgagactaaagctatttgggctcctattttgaaatttcattatggctcattagacttgtcaaacacaggctcagccagccgcacatcccaatggtggagggatattttaagaattggcaactgccaatatcaaccaggctggctaactagcaccttctgcagaaagattggtgataggaaggatactttgttttggagacacagatgccttaacgagactcccttaatgcaatcacatgcaagactctntagcctagcaatggataaagacatatcagtccaaggtatgtcagcttggatgtagaacaatctgattcctgg

SEQ ID NO: 43136 - DNA, 323 bp, Glycine max
  Clone ID: PAT_MRT3847_138951C.1
gggggggggaccggccgggaatccccgtgtccacaccacggggtagaacccccgcgagaagaccacagagggggggggataaagagccgaaaacgccgggagacccccagagaaaaaaagagcgaccgtggaggacaaaagaggacaaacaaggcacagagcagccaggagaagcacaggggggaggaaagaaacgaagccacggaaaaagccaaagacgcctgggaaaacgggggacccaacgagcaggcgaaccatggcaggacgaaggacagacaggacaccgcggggaggcagaccaaaggagaccacaggagacgcag

SEQ ID NO: 43137 - DNA, 475 bp, Glycine max
  unsure (1)..(475): unsure at all n locations
  Clone ID: PAT_MRT3847_138952C.1
aataagtgcactgcctgctaactaagaagtagctcttgtaaacanctanatctatcttgcttaagtaaggggcacctgacatgctaacttaacagaatataatagcaaactgtttacatgagccaccaacaaattggttttcttgtccgtcaacactttacttggggaggggttgtccacactcactttcccgtacatgcattgtcagaagggagggagggggtgagctantcctacccctgacagatggaggtgcaccagcacatatctgataaaatatatgatatgatctttccccttcattgcattggactactctagactgttcacataccaaataaaattanngtcaactgatgtgacgagaacacatgtgtaacataaaactgttagaattgtcatataaaaccgnttatgtgtctccacctaaaagtttaagcttttgggatagatgatgcgtgaaaaaattaactct

SEQ ID NO: 43138 - DNA, 147 bp, Glycine max
  Clone ID: PAT_MRT3847_138953C.1
gtttctcgtccggggaagcgcgggcagccgctgggggctgttgacgagcaccgcgcggagaacgcggtacggaagggccatcggaggggcgcagggtgacatggaaagcatcgaacgcattcgaacggtcgaagagcgctgacgtga

SEQ ID NO: 43139 - DNA, 263 bp, Glycine max
  Clone ID: PAT_MRT3847_138954C.1
gggcctcaggttgacaagagacaacttgcaacgattctttcctaaatccagcaagtatagaaagaaagtgcagcccttttgacaaagggcagaataatgggcaacaacggttactacattgagcccacaattttcaccaatgtcaaagagtgacagcctatcctataagaagacacatttggaccttgtgatgcttctgatgaatttaagactagttaaaattcaatcaagattgccaaaaatagacagtaaggcctagcatc

SEQ ID NO: 43140 - DNA, 131 bp, Glycine max
  Clone ID: PAT_MRT3847_138955C.1
tcaggcgtgcgtacagatgtcgatggagcgccaattggtcaacctggggatcggtacacagctggttacttctaactctattttcaaattaatacttattaattgctagtgactactcttccgttattaat

SEQ ID NO: 43141 - DNA, 616 bp, Glycine max
  Clone ID: PAT_MRT3847_138956C.1
gttggaaaggttgaaagataaagctcttataactatctccgaggataattgtatatctatgcatgattgtttacaagaaatggcctgggagattgttcgtcgcgaagaccctgaaagtcgtagttggttgtgggatccaaatgatgacatttatgaagcattggaaaatgacaagtgtactgaggccattagaagcatacgaattcacttgccaacatttaagaagcataagttatgccgtcacatatttgcaaagatgagaagactacagtttttggaaacttctggggaatatagatataatttcgattgcttcgatcaacatgatattcttgctgaaggacttcaatttttggcaactgaactaaaatttctttgttggtactattaccctctaaaattgttgccagagaatttttctcccgagaaacttatattgaatatgccagggggcagaattgaaaaactttggcatggagttaagaatttggtgaatttaaaacaacttgacctcggttggtcccagatgttaaaagagctgccagatttatcaaaagccagaaatcttgaagtactgcttctggggagttgtctatgttgagtagtgtgcatccgt

SEQ ID NO: 43142 - DNA, 1423 bp, Glycine max
  Clone ID: PAT_MRT3847_138957C.1
tgtcatttaagggatgcagctgcacttgctcagttctgggattggctagagacagaaattactaaggataggatattaacagaagtagaagtttcagataaacttcttgagtttcgctcaaaacaagctggtttcctagatactagctttgacacaataagtggtactgtggtagactgacaatttattttaatattttccattgaattatgggtaaataaacatggaaagatactgccataatttttcacagaaatggtctaactgccaattattttagggaaaattaccaaaaacactccctgattcctactataaatatggaacctgaaggatcaccctctagtattcctatgtaacagaatatggttctggtccaaatggcgctatcatacactacaaaccagaaccagagaggtgtagttctgtggatgccaataaactgttcttattggatagtggtgctcaatatgttgatggcacaactgacataacacgcacagttcattttggcaagcctacagcaagagagaaggaatgctttacccgagttttgcagggccatatagctcttgatcagtcagtctttccagaaaatacccctggttttgtgctggatgcgtttgcccgatcctttctttggaaagttggacttgactacaggcatgggactggacacggtgtaggagctgcattaaatgttcatgaaggcccgcaaagtattagtcatcgttatggaaatttgacccctctagtgaagggcatgattgttagcaacgagcctggctattatgaagaccatgccttcggtattcggattgagaatctcctgtatgtaagaaatgctgagacaccaaatcgttttgggggtatcgaatacctaggatttgaaaaacttacatatgtacccattcagattaaattggttgatttgtctctgctatcggctgcagagattgattggctgaacaactatcactcactagtctgggaaaaggtttcaccgttgatggatggctctgctcgccaatggctttggaacaacactcggcctatcatccatgagaaaatttaatatttttcatgttaatgtgctatggtactcgaggttcacattttggcgtgctgcctcctcgtctattttgtctatactctagcttatctccataatttatataggagacgctgtgaaatgtgaataaaatagtgagttgggattacatgaatttgatcataggatctttggctgggcaaatgaacatttagccattagcacccttttaagtatgcttacttgtgatattcaatataatttttttttctttctttctttagttgatatcgatgaaagataaaacacctgttgtagacttgtagctcaacatcaggagattgaggattttctaattgcaagagacagtta

SEQ ID NO: 43143 - DNA, 251 bp, Glycine max
  Clone ID: PAT_MRT3847_138958C.1
ctcctttaagcacgtaatcttagataaaaccccaagattcatatatatgggggccaatatgcgcttgacagggttttagcttacttctgacaatacttcttggaaaaaaaacagttcgataaaacccttcacatgggcagcaagtcctcgatcgcgttcttcctttgcatttgaaagttgaaacatctaatcgctgaaacatggcacctatctgtctttttgtcgtatacaactaattaagaggcctatgg

SEQ ID NO: 43144 - DNA, 302 bp, Glycine max
  Clone ID: PAT_MRT3847_138959C.1
cgggacctgaaatacggctaaagtatttaaagtgagctcaaacacatgtcattgctccccagatgatgttcgatatggaatacttttcataaatgatgccctttcagtatggtcggttgaaaaatgtcctatcacaccaattgtatccggactacttccaaacttttcaattcccctcgaaatcatacacgtgtgggttgcctttacatctactatcacatttttcacctaacattggggcaatagattcaaatatctgcctggtaagccttttcctgaacttggagcttgatacacataaa

SEQ ID NO: 43145 - DNA, 387 bp, Glycine max
  unsure (1)..(387): unsure at all n locations
  Clone ID: PAT_MRT3847_13895C.1
gaccacgcgtccgnccancnnccccngcactaccttttctttctcnctccgnctctctctcggcccgctctttatcaattcacaaataaacaaaagcaccactgctagatagaagagagagaattaaggaaccagaaagataacatcaaaatcaataaacctaagatgctgctctgaaagagacctggttctgcaatgaagagaacaccaagcatgtccgaaatgaccttggatctgaacacagccgacgatgccagtcgctgcgccgaccaacaaagatcacgtgtagtgcccttctcagtagaagatcaaactacgaagatgttggcatcacccaaaatacttaaaagacattcttcagatttccgcgacacgcgacacttactt

SEQ ID NO: 43146 - DNA, 1803 bp, Glycine max
  unsure (1)..(1803): unsure at all n locations
  Clone ID: PAT_MRT3847_138960C.1
accgcccctaaatgatagatggatttttgattcacccgtccattctgatgtagaatccaagctgaggcagcttttaatcgagatgggaaataatgataaaatactcggaatccaggtatgtgcctacaaagatggagaggccattattgacactgctgcaggagtgcttggtaaatatgatccacgtccggttcagcctgatagcctttttcctgtgttctctgttacgaagggtatcacagcaggaatgatacattggctggttgacaatggacaactaaaccttgaagagaatgttgcaactatttggccagcatttcgatcaaatgggaaggatgtcattaaggttcatcatgtgcttaaccatacatctggtttgcacaatgcaatgggaggcatagctcaagaagaccctcttctgatgcttgattgggatggatgtttaaatcgcatttgtcagtcaatacctgagactgaaccaggcaaggagcagttttatcattatttatcatttggctggttgtgtggaggaatcattgagcatgcatctggcaagaaatttcaggagattcttgaagaagcaatagttcgcccccttcatattgaaggcgagttatatgtagggattccaccaggggtggaatcacgtcttgcggctctgactgtagatactgctgaattaagcaaaatctcagcactcgctaatcgtgctgaccttccctccaccttccaaccacaacaaattgctcaacttgcaaccactttacctgttgctttcaatacactgaatgttcgccgtgccatcataccagcagctaatggacatgtatctgcccgagcacttgcacgttattatgcagccctagctgatggtggcaagataccaccacctcattcttctgcttctaagccagtacttggtagccatccccatattcccaaattatcttcttcccagaaaccccccataaaaaaccggaaatgtattggacggaggacgcaagcaacttcaccttcagttagtacaactaacagttacgaaaaagtttctagtcacgaagattttgatgctaatgagggcagaaatacgaacagtgagagtagcagtggtggtgatgacagtagtagcagaattggtaataatctgagaacccatgttgctcgtaaggtctacaagaatcctaggattattgatgaattcttgggtacaggagagtacgagaatttagctttgccaggggaaagttttggcctagggtttaagaggtttagttctaaggatgggtcatccattgcctttggtcactcgggaatgggtggatccacgggtttttgtgatgtcaccaataacttctctgttgctgtgacactgaacaaaatgtcctttggaggtgtcactggaaaaattgtccaacttgtgtgttcagagttaaatattcctgttccagacgatttcttgagatttgcggttgagcaaagtggaccagatgagcaattatcaatggggaggcccattattaattgagggtggaaggttctttttaacccttttccaccatattttcatgtataattttgaattttacctaaagccttggtgattatatacgggaatctttggagcctttttctgtgctcttcttgcacttgggatatctttgcgatacttactatgtaattatgtaccctcgaagttgcaattttaatagtcaaatttatcaaattcaatagtttcttttnnnnnnnnnnnnnannnnnnannnnnnnnnnnncttnaggggtggcccggggccccagtcccct

SEQ ID NO: 43147 - DNA, 1219 bp, Glycine max
  Clone ID: PAT_MRT3847_138961C.1
gttgtttttgcattgatgtcaagagccaatcaaatagctctgtatttgttcagttgtcttaataaattctgcataatcacttgaaggtatgtgcctacaaagatggagaggccattattgacactgctgcaggagtgcttggtaaatatgatccacgtccggttcagcctgatagcctttttcctgtgttctctgttacgaagggtatcacagcaggaatgatacattggctggttgacaatggacaactaaaccttgaagagaatgttgcaactatttggccagcatttcgatcaaatgggaaggatgtcattaaggttcatcatgtgcttaaccatacatctggtttgcacaatgcaatgggaggcatagctcaagaagaccctcttctgatgcttgattgggatggatgtttaaatcgcatttgtcagtcaatacctgagactgaaccaggcaaggagcagttttatcattatttatcatttggctggttgtgtggaggaatcattgagcatgcatctggcaagaaatttcaggagattcttgaagaagcaatagttcgcccccttcatattgaaggcgagttatatgtaggggattccactgccagttggaatcacgtcttgctactctgactttccatgctgctggtttagtctacaacactgctctcactttgatgactgcttgggtacacacctgtacacgaatttagctttgccaggggaaggttttggcctagggtttaaaaggtttacgtcaaaggatgggtcatccattgcctttggtcactcgggaatgggtggctccacaggtttttgtgatgtcaccaataacttttctattgctgtgacactgaacaaaatgtcctttggaggtgtcacgggaaaaattgtccaacttgtgtgttcagagttaaatattcctgttccagacgatttcttgagatttgcggttgagcaaagtggacccgatgagcaattatctatggggaggcccattattaattgagggtgggaggttctttttagcccttttccaccatattttcacgtataatttttaattttacctaaagccatatacacgggaatcttttgagcctttttctgtgctcttcatgtacttaggacatatctttgcgatacatactgtgtaattatgtaccacccgcgaagttgcaattttaataatcaaatttatgagaacttaaagaaaa

SEQ ID NO: 43148 - DNA, 293 bp, Glycine max
  Clone ID: PAT_MRT3847_138962C.1
ggggaacaagggcttaacattgatatgcgccggatttgatacaccacgtaggaacgtgcatgtgtcttatgtgactggcccacgacacaaaatgcgaggttaccaagcaattctaatgctcttgtttgaaacatgcatataacttgacttgattacatatttataggagcgaacttttgctaaactgtttaaacaggtgaacgccctagtgagtgctcaacatgggaatgggaatcttaaaagccctgttaaaagcctttttggaggggggaaaatttgtacccagattttca

SEQ ID NO: 43149 - DNA, 571 bp, Glycine max
  Clone ID: PAT_MRT3847_138963C.1
acccggcaaggttcacacatacttctggtcacaagcttcttgaagtccaatttttgagaatccttcagcgctagtcttcccattttcaatggcgggaagtgatacaaatacacaatacaacagcaaatttatattttccaatgaaaagagttatgaagtaaaatgtttttttttctttctttctttttcccttagtttatcttttacaacactctcaagtcattgtaaatttgttaggaacattcactttgttttctgattgttgttgttgacctttttttgcctctacacatttcggaaatgaaaggaagcacagataaccacttataatataacatccactcggttgtacaacaattcacaattgaaatgaatatgttaaaaagacaaatcatattaaatcaggaaggattgattgcgttaaataaataacatattcaagaaaaccataaacattcaaaagtaaatcgcatattggaccagtaaaagtctacaggtgattcttaagaattacaatatgtaagatctcttaatctttgggctgggaaagttgttaagatgctttatactt

SEQ ID NO: 43150 - DNA, 1393 bp, Glycine max
  Clone ID: PAT_MRT3847_138964C.1
cccacgcttccgtgacgtaatattgatatttacagttgctttgtttcttacatttatgcacgcatgaaaaggttggtccaattgaaaaacctttagctttcaagaatgatggctgtcacatagttgcgaaaattcttacaactgtcatctattattaattattgtttgcatatgccaatcctactcatgcacatataatggtccaaattcttgatgtttatccagcaatttggtgcgtgattaatggttgacggtgtgtgttcccacaggaacattggaaaacttttatagttgaagatgatttcaagttcatagcaagtaatggactgaatgctgttagaattccaatcggctggtggatagcaggtgatccaactccgcccccaccatatgttggaggttccttgcatgcactagacaaagccttcttgtgggcacagaaatatggattgaaaatcatccttgatcttcatgctgcacccggttctcaaaatggttttgagcacagctcttcaagagatggttcacaagaatggggaaaaacagatgaaaacattcaacaaacagttcatgttatagacttcctaactgcaaggtatgcaaaatgccaaagcttttatgcagttgagctaataaatgagcctctctcacctggtgtgacactagagatcttgaacaagtattataaggctggctacgatgctgtgagcaagcactcccccacagcttttgtggtgttgtcaaataggataggaccctcaaagcccaaggaactctttcctcttgccaatggccttatgcgatctgtgattgatgttcactactacaacatctttcatgatgtatttgaaaacatgtctgcccaacaaaacattgatttcatctacaccaatcgatcatcacagttgaataatattacaacctccaatggccctcttacttttgttggcgaatgggttgctgaatggcaagtcaacggagctacaaaagaagattatcaaaggttcgccaaggctcaattagacgtttatgggcgagcaacatttgggtgggcttattgggctttcaaaaacgtcaacaatcactggagtttggagtggatggtcaagaatggttatatcaaactgtagaaaatttcttattgaggccaacacttcctctcactatcacccccctcccaaattatccctccataaaaattatgattatacttgagttaagttttagacccttcttacatttcaccccacaaaggaaggggggaggttgtagcttttattagaagaaattagaaacataaagtgtaatggaagtcttgcatcatcctcttctgttcttttgattttggagagcgggaaagggtgaagcaaacaattaaaaagtttttgtagtc

SEQ ID NO: 43151 - DNA, 241 bp, Glycine max
  Clone ID: PAT_MRT3847_138965C.1
cttgtactaacttattgaggcctgaattctctaaaattctcaattctaagtacgttagggtgactagcttgtttctgctcgagacgatatggctggtaaatgtcacgggcctggtatcggaatccagttgggaacgacttactctagcgtcggctgagttgaaacacgatcgtgttgaaattcatagcacacgatcagggtaacagtactaacccatcctacatgcgtttcaccgtcacag

SEQ ID NO: 43152 - DNA, 718 bp, Glycine max
  Clone ID: PAT_MRT3847_138966C.1
ccacgcgtccgatcgtcatcctcatctcaatcggttccctatgggatcgaatttcgcaacacaatttggggctttcttgaattccagttagggtttgcaacggttcttctctccgttccgttccgttctcgtttcgtcgcggaatcacaaaactgaaaacaatcaaacctggggagtgaaggttcggggttcgatcctcgctccttgtgctgttgcctcgttcggttctggcgctccgtcatggccgataacatggaaatcgatacaccctccgattcccaaccgctcaagcctcgcgatcgagtcgttcggaggcttgcccagtttggtgttcctgaggaacagctcgaccaacctggtttagttgcttttgttaaggataagagggcgttgatacctgagctggtgtctgtgatattgcctactgatgcggaagtggcggatgcatggcaagctaaattgtcttctaagaagacggcggtgggtgtgatcatgaagaagaggtttaacgagagcatggcgtggttgcagtggttgatatttgagggcgacccaggtggcgcactgagaaggctttccaagatgtctgatgggcagaggggtgtctgtgggtctgtttgggcaacagtgatattgcttacaggtgtaggacatgtgagcacgacccaacgtgcgcaatctgtgttccttgttttgagaatgggatcacagggccatg

SEQ ID NO: 43153 - DNA, 376 bp, Glycine max
  unsure (1)..(376): unsure at all n locations
  Clone ID: PAT_MRT3847_138967C.1
gctccgcccacgcncccccagctccatcataacaaaaccaagcnccggggggggaaaaacaaacttgcccgaccccaaaactcctcttccacaccgccgattcttcttctttacatctatgtccaaaacatccatttaccctcccttccctccccttcgtctaaaaaccctttatcatctttacgtcctcaaacttctccccgcaaccctgtctccttcctccattcactacttaattttcctcaacattagtttacgaatttgatattgtttaatatattattccatagactttccactctaggccataatctttattttctttacaatataaataaattttttaatatttaagacattcttaattttttttttt

SEQ ID NO: 43154 - DNA, 154 bp, Glycine max
  Clone ID: PAT_MRT3847_138968C.1
gttagtcttatggaccctggggtagctaccaacttcaacgagctgagaagcctgttgtggtagaagaaagctcatggcgtgccatgtgtaggcatgcacgtacggtcttggagggtgaccataaaattttgttaacaaattaatctggaaccct

SEQ ID NO: 43155 - DNA, 319 bp, Glycine max
  unsure (1)..(319): unsure at all n locations
  Clone ID: PAT_MRT3847_138969C.1
gggacnaaagaaggagncncngagcggnnanggagangggaagcagacaagaagnnnccaaaangncacggaanngggggagggncgaanccgcccaaaggaaggagaacacgggggaacnnncaaccccggaaaaccgggagaagggacaagcttttttttttctaggagggtcaaggaacaatcgaccccgatgttaggcaccccgccccggccgaaaaaagaggatgatccgcccaaagagaaagcctggaaaaantagggggtaaggatcaacttgggttgggaacccaagggtgaactggcgcaaggggctccc

SEQ ID NO: 43156 - DNA, 435 bp, Glycine max
  Clone ID: PAT_MRT3847_13896C.1
agatttctttgagacttggtgcagttttttggccgttgggggcttgttctgcccagaaccccccccataatgggccttacttttgggccaatattaaacccttggcccccatttttgggccccaaaaccatgaatttccctgggcctcccccccccttcttggggatttccttgccccaacccatttttgggtggtttccccaacattcttagggttggcccaaaataaaaacctcatcataacccttcccaaccctcccccaaaaaattggaccgtaattgtaaaagaaattggccaaccacctttgaacaaccgggccggttaaggaattcccagcttccctggcccaaaaatttgcccccaaccggggtatccgaagggcccccccccgggggggaattcttggggaacccccttcaaaggccttttttttt

SEQ ID NO: 43157 - DNA, 583 bp, Glycine max
  Clone ID: PAT_MRT3847_138970C.1
aagaacaatcaaattgcattatggataaattgggttcgggggcaggaggaattgtacatttccccgcaaaaaaaaaaaaacatgttcggggaaatctgagtaacaacataacaataagcagcaataaaattatttttacaggcctcacctatacaattcgaaagttctaagactccaagacgaatagtacaaaaattttgagcaaattcaaatctatttttttagggttactggagatttatagcccgcctcacagcacttttaacttgaatcttctgatgatggactatcaaagggatttgggccactatttacttttggggagtcaaaaccactcccctgattgtttacaaagctcttttcgggttgatcatttaatctgggggcggagttgaatgggctctcaatttctttagcatcaataggatctatcactagtttattgggtttctgctcctgattggttacagagctcttatctgcttgatcatttaatctggcgtgggagttgaatggcctctcaaattctttagcattggtaggatctatcactagtttattcaatttctgggcattttggggg

SEQ ID NO: 43158 - DNA, 395 bp, Glycine max
  Clone ID: PAT_MRT3847_138971C.1
gcgttccttaacacacactctgcctctatatgtctttctctttgggtcataatccttgaccatggattgtattcctctgcggggcggccaatcaaccaaccatcacactatacatattatgcaaatgtcgtatagttgtagtgttatgcatatgacatctacatccttatccttcacacccaactacattgactccaaccaacacctacccacatactatcctctattccacttttcccatagagacctctatcatctcatatcaactcataacgccctacatcttatccctcttctcaatcttctctgcgactacatactctggttcttctctgctaccacttctatacccaacaaccactcttcataaataaatcaagattacatggactatt

SEQ ID NO: 43159 - DNA, 245 bp, Glycine max
  Clone ID: PAT_MRT3847_138972C.1
agaaaaactcagcacaacacccctcccaaccctctttttctcttaatttctcatcatatcatatctattaatcttacacatatattaagacatagatataattttttcgtttattttcctgcatgggctgttaaataagattctcgacgtgtcacagtgggaacaaggcacaatcgggacatgaccgacgtggtgcgcgcttctgcgcgggtctccagggaaaggcacatgctgtcgcgtagatt

SEQ ID NO: 43160 - DNA, 642 bp, Glycine max
  Clone ID: PAT_MRT3847_138973C.1
cccaccgcgtcccgctagcaggccttacaccaattacccatgttttgttagacgagattggcttttcacctgatgatctacaggagcttgtgcattcattatcatatgtgtatcagaggagcacaactggccatttctgtcgttgctccaatatgctatgctcatctggctgcaactcagatgggtcaatttatgaaatttgaggacaaatctgagacatcttcaagtcatggtggttctggtatacctgctcctcccgtccctcagttgccaagattgcaggacaaagtttcgagctcaatgttcttttgttgaaggatctgtttctagggataggcgatgactgataacagtgctgtttataagaccttcataggatagtttttttgtggaaacagttgaactatgggcgccaatggtgtaggtaaggattattatacatgtaagcaggcattttgctcatgcctttacatgtgtttagtcttttactattttgaatattgttgcgaagtctttcgctattttgaagtttgttaaggtttatgtgattcctatggcgttcctattatgcactcttgatcattatctaatctagtggtttgcatgaatcaaaaaggtgaaatgggtattactgtttttgtt

SEQ ID NO: 43161 - DNA, 1358 bp, Glycine max
  Clone ID: PAT_MRT3847_138974C.1
cagagcagagagtagccatccgtgccgttatgcgaaaaccccaaacttcctttaatgagccctcaaataaaaaccacaattcatcctcttctctatcgataactgtaatggttacgatgattgattgagtagtagtgaaaaaaatttggaaaatttcttttgggattaaggtcttgagattttagaagacacgcttcatcgtgttggcttgcttgaaattagtccaagatttgaggttcaaaaagagtggaggaggtgttggaaggaagctgatattgtgaattttgtcgagtcttgacattgaccagagcaattcagagctggagtcaataaaggtcatcaatatatcactgccaaagtgaacaatatggcttcgcacaaagagctgcctagaactgcccaaattcaccttgtgagttcacaccaggaagtttatgaaccatgtgatgattcttttgcactggttgatgctcttctagccgaccgcaataacctgttggaacatcatccaacattgtgcatggagattggctgtggtagtggatatgtcattacttcccttgctcttattcttgggcaggaagtttgtggcatcaactacattgcaactgatatcaacccacatgcagtgagagtgacccatgagacattggaagcacatggggttggtgctgagttgatagtaacagatattgcatccggactagaggaccggctagcagggttggttgatgttatggttgtgaaccctccttacgtgcctacccctgaagatgaagtgggtgttgaaggtattacgtcatcttgggctggtggggagaacggccggagtgtaatcaataaaattttgcctgttgcagaccgtcttttgtcagaaaagggatggctatacatggtcaccctcacagaaaacaatccttctgagatatgccatcaaatgagaaagaaaggatatgcttctaagattgttgtccaaagatccacagaggaagaaagtctccatatcatcaagttctggcgggatttcgatactgaagcaaatgaaacagaccaatctgcttctgggttcataggcttgcttacacaaatccctctactttcatattggagaggcaccaatagcgacaataataagtgttgaacgaaaaagtaattgatttcctgatactgggatatctttcttatcttgaccacctgaatgttttgcttagccctgtcattcagaatgcttataaatataacaaccaattctttcctcattagctgggagctcagctatatggatcaattgacgccgttgaactttatgaaaaactcaatattcaataaaaaccacttatagaacggtattggtctgt

SEQ ID NO: 43162 - DNA, 3357 bp, Glycine max
  Clone ID: PAT_MRT3847_138975C.1
gttcgcagcctccgatcttgaaaccttctaaacacacgctcgcactttctcactccctcactccctccgttgacgtttttgttttctttttctctgtgttctgaagaagttttagggtttcgttttgtttctctcttcggccacttcaggctatggattcatttgagccagatggaaatgggaaggagtcactgccaccaccacctcctgttgttccctctgatattgtacctctcaaagcagaggaggtgctctgtacccctaccgagcataataagaaaaaggcttcccgacttccaatagccagatctggtctgggatcaaaaggaaataaaatacaattactaaccaatcacttcaaagttaatgttgctaaaaatgatgggcatttcttccattatagtgtggcttttacttatgaagatggacgccctgtagaaggtaagggtgtagggagaaagataatagatagggtgcaggagacatatcattctgacttaaatggtaaggactttgcatatgatggggagaaaagtctgtttactgttggctctcttcctcaaaacaagcttgagtttgaagttgttcttgaggatgtcacctctaacaggaataatggcaattgcagccctgatggtctaggggacaatgagagtgacagaaagaggatgcgacgtccttatcgttcgaagtcattcaaagtagagataagctttgctgcaaaaattccaatgcaggccattgccagtgccttacgcgggcaagagactgagaattttcaagaagccatcagagttcttgatatcattttgaggcagcatgctgctaagcaaggctgcttacttgtacgccaatcctttttccacaataatccaaataattttgctgatgtaggaggtggtgtcctaggctgtagaggattccactcaagctttagaactacacagagtggcctgtctcttaacatagatgtgtcaactacaatgataatttctcctgggcctgtggtggatttcttaatttccaatcaaaatgtgagagatccttttcaacttgactgggctaaggccaaaaggaccctaaaaaatctgaggattaaaactagcccatccaatcaagaattcaaaatttctgggctcagtgaactcccatgcagagagcagacttttactttgaaaggtaaaggtgggggggatggtgaagatggtaatgaggaaatcactgtatatgattattttgttaaggttcgtaagatagatctccgatactctgctgaccttccatgtatcaatgttggcaagcctaaacgaccaacatttttccccattgaggtttgttaaatggtatcgttgcaacgatatacaaaagctctggctacgcttcagagggctccattagtggagaagtcgaacgcaggttgagggtcggggtttgcaaatcttgtctgatgcactgagaacaagcaactatggtgctgaacctatgctccggaattgtggaatttctataagcactggctacactgaagtggatagaaagaggggcggctgttcacttctctgcacgttggcaatggtgagggcttgcaacgaggactgttgctaactttcatgaatgcttcagaaatttgtggaaccatcaaagatagaaagatgggctgttgctaacttttctgcacgctgtgatgtacgaggacttgtacgggacctcattagaattggagatatgaaaggaattactatagaacaaccatttgacgtgtttgatgagaatccacagtttaggcgtgccccccctatggttagagtggagaaaatgttcgagcatatccaatctaaacttcctggggctcctcagttccttctctgtttgcttcctgatcggaaaaattgtgatatttatggtccatggaaaaagaagaatcttgctgattttggaatcataaatcagtgtatgtgtcctttaagggtcaatgaccagtacctgactaatgttatgttgaagatcaatgccaagcttggtgggttgaattcattgttaggcgttgaacattctccttctcttcctgttgtttccaaagctcccaccctcattctgggaatggacgtgtcacatggctcacctgggcagactgacattccttcaattgctgcggtggtcagctctagacactggcctctgatatcaaagtatagggcatgtgttcgtacgcaatctgcaaagatggaaatgattgataatttgttcaagctagtatctgaaaaggaagatgaaggcatcataagggaacttttgcttgatttctatacaacttctgggaggagaaaaccggaaaatataatcatattcagggatggggttagtgagtcacaattcaatcaagttttgaatattgaactcgatcgaatcatcgaggcttgcaaatttctcgatgaaaattgggagcccaaatttgtggtgattgttgctcaaaagaaccaccacactagatttttccagcctggctctcctgacaatgttccacctggaactgtaattgataacaaaatttgtcatcccagaaattatgatttctacctatgtgcacatgctggaatgataggaactagtaggcctacacactatcatgttctgttagaccaggttggcttctcaccggatgatctacaggagcttgtccattcattatcatatgtgtatcagaggagcactactgccatttctgtcgttgctccaatatgctatgcgcacctggctgctactcagttgggtcagttcatgaaatttgaggacaaatctgaaacatcttcaagccatggtggattgagcggtgcaggtgctgttcccgtccctcagttgcctcccttgcaggagaatgtccgcaacacaatgttcttttgttgaggccttaatgctctgccctgtctcctcaagtggtgaaaatgctgtacataaaactatgtttctaatcttgcaagttatgcggacgaagtttatattgtggtagacttggtcttcttagccatatttagtctttctagcacaagccttttcaaatgttcggggaccttaccttactttttgtagcaagactctctttagcgcaacgtctttttgtagcaaggctgatttttgaagattgttaaggtttatgtgattccaaaaaaaaaaaaaaaaaaaaaaaaatttagagggtggtttgcaatattgtggcgaaagtctttcgaaattttgtaatacccgaaggtttttgtgattcctatggcgttcctattatgcactcttgatcattatctaatctagtggtttgcatgaatcaaaaaggtgaaatgggtattactgttttttaacaaaaac

SEQ ID NO: 43163 - DNA, 911 bp, Glycine max
  Clone ID: PAT_MRT3847_138976C.1
ctcccatgcagagagcagacttttactttgaaaggtaaaggtgggggggatggtgaagatggtaatgaggaaatcactgtatatgattattttgttaaggttcgtaagatagatctccgatactctgctgaccttccatgtatcaatgttggcaagcctaaacgaccaacatttttccccattgaggtttgtgaattggtatcattgcaacgatatacaaaagctctgtccacgcttcaaagggcttcattagtggagaagtcgaggcagaagccacaagagaggatgaaaattttgtctgatgcactgagaacaagcaactatggtgctgaacctatgctccggaattgtggaatttctataagcactggcttcactgaagtggagggccgggtgttgcctgcaccaaggttgaagtttggcaatggtgaggatctcaatcctaggaatgggagatggaatgtcagcagagtgaaatttgtggaaccatcaaagatagaaagatgggctgttgctaacttttctgcacgctgtgatgtacgaggacttgtacgggacctcattagaattggagatatgaaaggaattactatagaacaaccatttgacgtgtttgatgagaatccacagtttaggcgtgccccccctatggttagagtggagaaaatgttcgagcatatccaatctaaacttcctggggctcctcagttccttctctgtttgcttcctgatcggaaaaattgtgatatttatggtccatggaaaaggaagaatctgctgattttggaatcataaatcagtgtatgtgtcctttaaaggtcaatgaccagtacctgactaatgttatgttgaagatcaatgccaagcttgggtgggttgaattcattgttaggcgttgaacattctccttc

SEQ ID NO: 43164 - DNA, 409 bp, Glycine max
  Clone ID: PAT_MRT3847_138977C.1
cacctactcacacactggagctggaatagcaacaacaggaaccagaaaaagggaacgggaagtggctgaggttgacacccagacgaagaacaagaacataactactgatatcgaagtcgatacagatactaatctctatacaactatcactgtcaatgaacctgaacctggtctggaggcgatggctagcttcaaagttacagaccaaaggccagggaagggggaagtggaagactagcatgagtatgatggaataagcaccagtgctggggtgagagcgaaagcaaacgtcaacgtctatggcgttagaggaacaagagctcatgctcttggtgctgaggctgatgttgacaccaaaaccgaggaggtaacaaaaaccaatgctggagtgagcttcaccaaagacgac

SEQ ID NO: 43165 - DNA, 834 bp, Glycine max
  unsure (1)..(834): unsure at all n locations
  Clone ID: PAT_MRT3847_138978C.1
ggctcgagctcaagtcagattttggaatccacttatgatttttctgtaactgactccaattctttacttttccttttcaaacattcacctgaagtggcaaaggaattgaatattacttcagagttttcatttgaatctgcatcattgtctaaacacaatgattggatggcaatttttccactttcttttctcttctcaaatagtctcaagttccctgcgaaaaaggatgatattttgaaacagtatgaattctttccgaaattgtctgttcaaaatccatctttaaattccaaaaagggacccagaagagttcacttggagctttatttaggttccttgataaaggaccagtgatgcggtcctcaacatcactggtcctttatcaagttggtcatttgcagataatttgcttccaggaactgaaacctatggtgatggtccacaatcatatatatgtcgtcttagtggacctagcgatgggaattggaccttctggttagaggctaacaactctgaagcattacgagtggacctagcaattttagaccaaaagttggttgatccaataaagagattgaagaatctttttccagattgggttgatgttgttgcatattctagttttatgtctagctatatcttctaattcttaataaacaagtcttgtaaccaagatcaaatttctataggatagctgttaggattttatttcacattaaattcaacttataggtcaagtgtaatacaatcatgacatagtaatcgtgatcatctcccaaaggaataaaggaggaatttcatgtnnaaaaaaaaaaaaaaaaaaaaaaaaaaaaa

SEQ ID NO: 43166 - DNA, 630 bp, Glycine max
  unsure (1)..(630): unsure at all n locations
  Clone ID: PAT_MRT3847_138979C.1
aaagggatgatattttgaaacagtatgaattctttcccaaattgtctgttcanaatccatctttaaatcccgaaaagggacccagaagagttcacttggagctttatttaggttccttggaagaggtttgggttgcggttctcaacatcactggtcctttatcaagttggtcatttgcagataatttgcttccgggaaccgaaacctatggtggtggtccacaatcatatatatgccgtctcagtggacctagcgatggaaattggaccttctggttagaggctaacagctctgaagcattaagagtggacctagcggttttagaccaaaagttggttgatccagtaaagagattgaagaatctttttccagactgggttgatgttgttgcatattctagttttatgtctagctatatcttctaattctttatgtaaacgttcttagaagaaagagcaaacatggtatttatagatgcaaaaccaaaaccaaaatttgatactaaaaaaaaaaaaaaaaaaatacgtctttcctgaatttgacttttttggggggaaatttttttaggagaagctatccctattacaaggctgcagaaagccaaagtcatagggaatgcttatagtttat

SEQ ID NO: 43167 - DNA, 175 bp, Glycine max
  Clone ID: PAT_MRT3847_13897C.1
tttatgatataaaatttaaggggggaggaaatatcattccagtccaaggggcatacaaaattaatggactcaacaaccagttacataaatacttaagaggcatttggtaaggaagatgatttgagttttctggaaaattttgggttgagaatatttagtttctcctgtttagtat

SEQ ID NO: 43168 - DNA, 327 bp, Glycine max
  Clone ID: PAT_MRT3847_138980C.1
ctttttagattcctaaattgatccaagaagacactctttcctcgcgtgacttgagatgggatcaacacaccctgttcacaaagaacccttgaatgctcggagggggtacccgcctgaaggggcatatgctccgctgcctcccatgcctggggcaacaccatctatgtttactcattcggctgcgttcgaagaggaacttgtatttcatcatgcctggatgcggagactcctggcagacaacatgaggttgattgatgacccaatggcgttttaaccagacctaaaggccgtttaggaggagctttatcgaatgaatgttgccattgg

SEQ ID NO: 43169 - DNA, 374 bp, Glycine max
  unsure (1)..(374): unsure at all n locations
  Clone ID: PAT_MRT3847_138981C.1
aatcatccaaggcacaccaacaaaatcggatccgttttctataattccaaaagcatctgtgaaagtgagcgngctacaaatttttcgtccccctcccccggggnggttggnacccacgaaggaaggaaannccccaaaagcgacccgcccgggaggggggggagcaacgaccttttgatggcgtcgatatggacatcatccaaaccagaacccttacaagcgtggggtatctcggcaatggctatgaaaccacttccatctttgtcaaaataggagaaagcggacaccaggttttcctctctctccagcggattgaaggggactgcagcagccatgaatccaccatactcaattggaccactattaacaatatg

SEQ ID NO: 43170 - DNA, 232 bp, Glycine max
  Clone ID: PAT_MRT3847_138982C.1
cgccgggctctacattttagctggatttcactagggagtttcttcacttgtctatgtacatgtgcttcgttcttgtaatttttgggaactatgggattgccttagcagcgtatacgggagctttaagagacatttaagtgcttcaatgtccgtatagcatctataatgcgttatcgtacaatcactttaaatatgatcgatcgtgttccatttgcaaggcctcatgagctta

SEQ ID NO: 43171 - DNA, 452 bp, Glycine max
  Clone ID: PAT_MRT3847_138983C.1
aaaaagggaatcataattcttattcatcctatgtaaaaaaaaattcgtttaaacagataagggggtttaaaaaccaaaaataaaagagaaaccccttttcaagattaattttggttccaggccccaaaacttattaaatcgggaaaaacatccccaaatctgaggatttcgctgaaatctttttttttttggtaacttaaacgcgggcggaaacgggggaaacaacgggggcggaggcggcaggcccccggagaaaagaaaagaatccgggggcctgaaagttgtcctgggcaaaaaaaaacaaaacctccggcacccggaacgccccgggggggcaaacaacggggaccccaagcttgagaggggaaaccaaaacagatccaacgctggggaggaaaacaacaaaaaccgggaaggcggaaaggacccctagggtttcaaaatctgaaaaa

SEQ ID NO: 43172 - DNA, 715 bp, Glycine max
  Clone ID: PAT_MRT3847_138984C.1
aatatggaagaggattaatatagttattaattaaacatatttttggttcttgggattgatttaatacaattcatgttacattatcggaaagagaatgctaagctttgcaagaagcaaatatattactacattttgataagcatctgagaattatattattaggacgtggtttgtaagtagagaaaaattctggatcctgctcaagtgcttcaatgtagctctccaaaattgtgactatctcattaaaatgtggccttttatctgggttgcttgaccagcatctgttgatgagatggctaaatgcctttggacagtcacatggcaacggaggcctttcattcttgtgagtcacagcatatgctgcttgctctggtgtcatgttgtcaaatggcgtcaatcctgttaatagctcccatagaactatggcgaaactatagacatctactttcttggtgtgacgcttttctttgatcatttcaggtgccatccaacggtatgttccagtgaatccttttgcactgcctgtctgagattccaagcaagagatcccaaaatctgctacttttacgcacaaatcttcccccaacagcaggttttctgatttgagatccctgtgaagtataccctgagaatgaagatattgcattccccgtgctatgtctaaagctaatttcagaacaactttgtgagtaactgaatgtggcccttgcctcgt

SEQ ID NO: 43173 - DNA, 392 bp, Glycine max
  Clone ID: PAT_MRT3847_138985C.1
atataggggggtcgactgtttcatactagacgggggtcgacgttgaagcatgaaattgaagttaagaggaatggatacaggattgaatgagccaaacagtttaagaaaaaataaaaagaatcaatcgggtcagaacgggatttggtgaataactgaaaacgggatagaggggccaatgacttgctattagctacgagggtacacagagttgatatggaggtttggccaacactgagagactagagatcgacacttgatacggatgataaaggattgaagggggaaaaattagagaaagcaaatgtcaataaaatgagatgaagatggagaaccgttggaactcttagggattatgaacaagctgaatgcatggtaaacaatgggatatagag

SEQ ID NO: 43174 - DNA, 299 bp, Glycine max
  Clone ID: PAT_MRT3847_138986C.1
aacacgataaaaggcaaaacaaaacacccaaaacaacaataaaaacacacgcaaactaacaacacaacaaaaaacccccacgaaataaaaagcaacaaagccccccaatagcaaagaaaggaaacccattcaagaaaatcgaacccatcacataaaaacacagacgggtcaaccttcataccaacggacccttatcaaaaaggaactaaataactcaaagcacgaactaatcaatatctgacaacagctgctggccaaacttatcacgaaatactctccataaagagccccaaaaaccc

SEQ ID NO: 43175 - DNA, 312 bp, Glycine max
  Clone ID: PAT_MRT3847_138987C.1
tctttgcgcgggcaaacgcgaagggagacgactgaaggctcagacagagcatatctcactgatggcagaccacggtgagaacccttccgggcatctgacacaatcagggagcatagaggacagaatgactctgtggaggattccaagtcgaaagattaagtcttagacagcaggcaatctcagggagaacacacaaagacggacgctagagggaccgtgactaaagaggaacaagatggtcgtgtaacaccgctggacatggagatcagtgagccggggactcaggtaggcactgaacgtcctcttataacc

SEQ ID NO: 43176 - DNA, 1601 bp, Glycine max
  Clone ID: PAT_MRT3847_138988C.1
gagagtgcgcagagagcatggcaataataccacattaccacttccaccctcaccttgctgagcctaagcaaatagtgggtaaataaattccgaaagcgaaaaaataattaacaggttaatcgattaatcaatcaccaccgtgttcgttgaatttgatcattcagcgcacctctgcaagtcacatcaccatggcggccataacccgcctcgcgaagcgtcgcggcagcgttgctcctcccctgacgaaggaggtgcctgagctcctccgaagtcaaatcccacgcgccgccgcacgacgccgcgtccttccgcccgtttccgcggcgcgaagatccgagcaagcggtgcgtgcagtgggcgttcctcggctgccccggcgtcggaaaaggaacgtacgctagtcgcctgtccaacctcctcgtgcgtccctcacatcgccaccggcgatctcgttcgcgacgaactcgcctcctctgaccccctttcttcccagctatcagaaattgtaaaacaaggtcaattggtgtcagatgaaattattatacgtttattgtcaaagagacttgttgctggggaagctaaaggcgatctgggatttattcttgatggttttcctcgaacaattaagcaagcagaaatattggaaggggtaactgacattgacttggtaatcaatctgaagctccgagaagatgttctgcttgagaaatgccttggtaggagaattttgcaatcagtgtgggggtaattttaattgttgcctctattaacatcaaggtcgagaatgggagccctgaaattattatggctccacttcttcctcctgagaattgtatgtcaaagctcattactcgatcagatgatactgaatcagtggtcaaagaaaggcttcgaatatacaatgaaatgactcagcctgtggaggaattttaccgttctagaggaaaattattggagtttaacctgcctggaggaatcccggaatcttggcctaagttgctacatgctcttaatcttgatgattacgaggacaaacgatctgctgcagcataaagatataataatgtatcataacagtaagtatttcattctttgcgtgcttatattgcatgcttggcaattttgcaggacagagaaccaaagcaagggaacttctctgctagtattattttggaccaatgatgatatttgtaagtgttgtaatctgataagactggtagtgttgcgttttgttttcgtataatttggttatatgggaagggtttcctagcatataatgttattgtgaagagtgaataatatatcacagtattgctagaaagatagttggtcaggaatcaacgtcgataggattggtgcatcatcactattgttgtaaattaaatgtgaatgaacttattctattacatcaacacatcatcacatgctcgtgatttagggaaggcttttttactggagtaacttccaggaaaaaaattatttaatatgatgtttcatgttatttgaataagtcttttgatttcacaatactaatgaataactcctccttttctttgaaaaaaaaaaaaaaaaaaaaagggcggccgctcagaggatcaagc

SEQ ID NO: 43177 - DNA, 535 bp, Glycine max
  Clone ID: PAT_MRT3847_138989C.1
ggctcgagatcatggtggccgtaacccgcctcgcgaagcgcgcgtcaaccttctcaccccagatgaggaggtgcctgagctcctccgaagtcaaatcccacgcgccgccgcacgacgccgcgtccttccgcccgtttccgcggcgcgaagatctgagcaagcggtgcgtgcagtgggcgttcctcggctgccccggcgtcggaaaaggaacgtacgctagtcgcctgtccaacctcctcggcgtccctcacatcgccaccggcgatctcgttcgcgacgaactcgcctcctctgaccccctttcttcccaggttctcttcttcttcctcttcactttgaattaactagattaatttttgtaacgcaaatttggtcaaggttattgaaatttctgcgtacggcgcagcgcttagacagaaaaatgggatgataattattattttaaaaaatattaaaaagttgtcatctaatcacaaaccgttaccaaaagtgttcgtacaaatgttttgacacttgatcccttactaaggtctag

SEQ ID NO: 43178 - DNA, 264 bp, Glycine max
  Clone ID: PAT_MRT3847_13898C.1
aaaccaaccccaggaaaaaaaataaaaaaaaaaagggggggaaattctcacgtaccccacgggaaaaaattggtgggcagcattaaaaaaaaacaagaagccgaaaaattaatttttgcattaagggaaggggcccccactgcccacaaaaccagaaaaaagcttcgggggctccaaccccaaaatggcttcatttttgctaaatacagggagtttttcctaaagaagcaacaccctcactgttctgaaaagcccccctttttc

SEQ ID NO: 43179 - DNA, 700 bp, Glycine max
  unsure (1)..(700): unsure at all n locations
  Clone ID: PAT_MRT3847_138990C.1
tcgctgtcgttgatcattcagcgcaagtctgcaaatcccatcatcatggcggccataacccgcctcgcgaagcgcgcgttcgtcgtctcttccctggcgaggaggtgcctgagctcctccgtagtcaactgccacgcgccgccgcacgacgccacgtcgttccgcccgtttccgctgcgtgaagattcgagcaaacggtgcgtgcagtgggtgttcctcggctgccccggcgtcggaaaaggaacgtacgctagtcgcctctcgaacctcctcggcgtccctcacatcgccaccggcgatctcgttcgcgacgaactcacctcctctggccccctttcttcccagctatcagaaattgtaaaacaaggtcaattggtgtcagatgaaattattattagtttattgtcaaagagacttgttgccggggaagctaaaggcgatttgggatttattcttgatggttttcctcgaacaattaagcaagcagaaatattggaaggggtaactgacattgacttggtaatcaatctgaagcttcgagaagaagttctgcttgagaaatgccttggtaggagaatttgcaatcagtgtgggggaaattttaatgttgcttccatcaacatcaaggctgagaatgggagccctgngattattatggctccacttcttcctcctgagaattgtatatcaaagctcatta

SEQ ID NO: 43180 - DNA, 624 bp, Glycine max
  Clone ID: PAT_MRT3847_138991C.1
atttccgcaagtctgcaaatcccatcatcatggcggccataacccgcctcgcgaagcgcgcgttcgtcgtctcttccctggcgaggaggtgcctgagctcctccgtagtcaactgccacgcgccgccgcacgacgccacgtcgttccgcccgtttccgctgcgtgaagattcgagcaagcggtagcgtagcagtagggtagttcctcggctgccccggcgtcggaaaaggaacgtacgctagtcgcctctcgaacctcctcggcgtccctcacatcgccaccggcgatctcgttcgcgacgaactcacctcctctggccccctttcttcccaggttttgttgttcttcttcttcctcctcttttttcgttcactttgaattagctaggttaatttttttaacgcaaatttggtcaaggttattgaaatttctgtgtacggtgcagtgctaaaagaaaataggcagtataattattatttttaaaaaaattattaaatagttgtaacttgtaatctagtcacaaatccttgtgtatattaaggaagcttaacttagttggtggaacacaatacatattttagttgttatagactcccttatacgtgtatttgattcctagttttg

SEQ ID NO: 43181 - DNA, 733 bp, Glycine max
  unsure (1)..(733): unsure at all n locations
  Clone ID: PAT_MRT3847_138992C.1
aaaatataagtaccaaggattaaaaacaaaattattattttattagagactcaacgcaaaacaaaaatttattagagagcaaacgcaaaaattggatatttattaaggatcaaaaacatatttaagccttaaatgtataatacgtattcttcactttcactgcagtgcattggttttgttggtcctggactctgcctcattggcttagcaacagctaaaaaccccgcgattggttctgcttggcttactttagcttttggcctgaaatccttcagtcactctggttttcttgtgaaccttcaggagattgcaccacggtattctggtgttttacatggtatgcttttatcttgtggggattgtacatgttttgttgttccacagcgcatttaataagattagtagcacattgtcatctgtaaatacatttgaaatcaattggagcctgtattatgtttatctttatatgcgatgtgtggtaaaaggtaaattggtagctattatttttccatctagaattgggtaattcctttaactagtgtaggagttaattaaagaagttctcttgtgctatctaacctattgaaatataattgaccaaactatgccgtggatgtataaagcactttgtagtgcccttcatgaatgcaagatataccgattgaactatntacatttaatggacttttaatgctaggtagtggacttttaacatatatgggggaaaataggg

SEQ ID NO: 43182 - DNA, 1107 bp, Glycine max
  Clone ID: PAT_MRT3847_138993C.1
tcgaccccacgcgtccgaaaagatctgaagtgaactggttgatgtttctaatttcctgttgctaatagtaccatttttgtgaatgattttgacttccccttctacttggtttaaggacttgttttctgtcttgattgcagactcagcctgtggaggaattttaccgttcaagaggaaaattattggagtttaacctgcctggaggaatcccggagtcttggcctaagttgctacatgctcttaatcttgatgattatgaggacaaacgatctgctgcagcataacgatataataatgtatcataacagtaagtatttcattctttgcgtgcatatattgcatgcttggcaattttgcaggacagagagccaaagaaagggaacttccctgctagtattattttggaccaataatgatatttgtaagtgttgtaatctgataagaggataagactggtagtgttgcgttttcttttcatataatttggttatatgggaagggtttcccagcatataatgttattgtgaagagtgaataatatatcacagcattgctagatggatagttggtcaggaatcagcttcgataggactggtgcatcatcactgtactgttgtaaattaaatgtgaatgaacttattctatttaatcatcagagtcagcccgtggaggaattttaccgtagtaaagggaaacttcctccacttcttcctcctgcacactgtatgtcaaagctcattactcggtcagatgatactgaagcagtagtcaaagaaaggcttcgtatatacaatgaaaagagtcagcccgtggaggaattttaccgtagtaaagggaaactgttggagtttgacctgccaggaggtatcccagaatcttggcctaagttgctgcaagctcttaatcttgatgattatgaggagaagcaatctgttgcagcataagatatataagcatacaatacaaatgagtatttcattctttgcatgcatgcatgcttgacgattttgcaggaaatagaaccaaagaaggtttacttctctattggtattatttgggtaaataattatatcatgaggtgttggaatctgatataacttcttccct

SEQ ID NO: 43183 - DNA, 617 bp, Glycine max
  unsure (1)..(617): unsure at all n locations
  Clone ID: PAT_MRT3847_138994C.1
aaaactagttaatgtaaaaaaatccaacacctcaattacttgtcaatcacaattttgaaccgttgattaaaaataaatatacactatatgatggtgataaactgggcaccaccaattattatggttcaccatagaaggaagacaaagagatgtcctcaccatgcactataaaacaagacagaactaaaaagaaaaccactagttctatgcatattcagattttcacaaattagatttgatggctgactttgcagaaataacttccctcattacaccttcttgaaccactgatacaagtagctgcaagttgtcaaatgggaaaatcttaagacaaaactgaactaggaaaataggagaaactaatgctgaaaagagatatttcaggtatacagctaaaataagcgcttatttgataaaactattttatcacataaaaacatatatcataaagataccttgtttcaataggcttcacagtaaattaacccttacctctcccttctgattgaacatttggccagtgacatagccacgtgcattattngcagtaggactaaaagatctgtcgaacaatnngnacgtattaacaactttacatgatgaaaaaatcaaaaatt

SEQ ID NO: 43184 - DNA, 751 bp, Glycine max
  Clone ID: PAT_MRT3847_138995C.1
acttggcaatcacaattttgaaccggtgattaaaaataaatatacactatatgatggggataaactgggcaccaccaattatatggttcaccatagaaggaaaacaaaagagatgtcctcaccatgcactataaaacaagacagaactaaaaagaaaacccctagttctatgcatattcagattttcacaaattaaatttgatggctgactttgcagaaataacttccctcattacaccttcttgaaccactgatacaagtagctctcccttctgattgaacatttggccagtgacatagccacgtgcattattggcagtaggactaaagatcacaaatagtatccagtcatcagctcgtaaaggtctgtgaaaccacatggagtggtccagactcacagcacgtgccttcctgcccttcctacggttggggtttaaactcacttgaagaaagattagatctgaagtatatgctaccacacaccttcaacacaaaccagattcactgattgttagatataaaagcgttgataagcctttactgtttaagattttggaatagttggccttaacatggtactaaagccaccactatgaccaagaggtcattaattagacccttgcctctcccattgatctatgtaagagttgaatttcagcatagtaaaatggcccaatgcgttgtatcataaactttccaagctagttctttcttccgacataagttttccaaagaccacaaattttaacaa

SEQ ID NO: 43185 - DNA, 1731 bp, Glycine max
  Clone ID: PAT_MRT3847_138996C.1
gccctctccccgcggctctgtctcttcctgtgccgcatccggaacgggagcggcttcaagatagccccaactctgccatcaacagttatctttacgctccacgtccaatcccccccttgcatcactgtccttggctcatcgtcattggcgcttccttttcaggcttttcatcaccgcagctgcaatagttcttgtttcgtcgttagggataaactacggccaaatagagaacaatcttccttaacaagacgacgccgctgcgttgatgaactccatcggagcgacgaaggtgatgctctacgacgcagcacctcgcgttttgaaagtgttcgcgtacacccgatcggaattaccggcacgtttgggaaaccacttcttgtttagaaggggagatccgtaatatgcacaggattgcatcaatgacaccctcctaccgcacgtcccaggcacctaaaatgcagcagtagaaaggaggaacgaggttccgcctcgcccggccactgccatcacctctaacctcctcgcagccatgcagagcgtgcacgccgccctcatcaacctcggtctcgacaaataaatggctgctcaccactactcactccctggcccctctccattctccatagccgtcgtcggcacgagccttctcttcgggccccgctccgtgcctaactccgaccccgacctcccctgcctcgaccggtacctccgcccggggtcggcgcgctcttcctcagtcctctccccgtgtctctgtctcttcctgaaccgaatctaattggagagaggcttcagtctgccaccaacagaaatagttatcgtcaagtccacactccacattgtaacagatccatggatcatcgtcattggcgcttcttcattatgcttttcattaccgcagcagcaataggacttgtttcgtcgttagggataaactacggccaaatagcgaacaatcttccttcacaagacgacgccgttgcgttggtgaaatccatcggagcgacgaaggtgaagctctacgacgcagattgccacgcgttttgaaagcgttcgcgaacaccggagtggaattaatggtaggtctgggaaacgagtacttgtctagaatgaaagatccgaaacaagcacaggcatggatcaaagccaacctccaaccctacctcccagccaccaaaatcacctcaatcttcgtcgggaacgaggttctgaccttcaacgacacctccctaacctcgaacctcctcccagccatgcagagcgtgcacgccgcactcatcaacctcggtctcgacaaacaaataaccgtcaccactactcactcccttgccgttctccaaacctcctaccctccctcggcaggagccttccgtccggacctagctccgtgcctagctccaatcctgagcttccaagccaaaaccggatctccgttcttaatcaacgcgtacccctacttcgcatacaaggcgaatccgaagcaggttccgttggagtacgtgctcttccaacccaacgaggggatggtggacccctccagtaacctccactacgataacatgcttttcgcgcagatcgatgcggtgtattccgcgttggattccttgggctacgggaagtaccggttcacagtcccagggcggtctccgcgtgcccggcgcaagccgctcgagtcccagccgctgcgatgcgcggctttgccagatggctatgagctactctgtcctatgt

SEQ ID NO: 43186 - DNA, 355 bp, Glycine max
  Clone ID: PAT_MRT3847_138997C.1
cgtccgaactgcccgcttcctctagttaggataatatttgcacaacgaaaacgagtattaatgtaatgaacgggtagttgaatagggtctacgttcaattgtgcatcctcaattatcattctttcttcttcttttcttttatgcttaaaaaataagctttgtttgaaggtacgaacttcacttcctcactcaaccgagtccattcacaggtcctttggcaatggcaactcacagactcgctttgatcattcaaaacccttctaacgacgacgagtttttgctcgtgaagcagtcgcgtccttccaaattccacgatggagaatacgactctttcggcgattctgatctctgggac

SEQ ID NO: 43187 - DNA, 341 bp, Glycine max
  Clone ID: PAT_MRT3847_138998C.1
gtgggggtctgttgtcaaagtttgctataaaacgtgatgctggttgaaggcaacaaggcagcggacactgtttcttactgctggcatgggtcaccaggctagctttcctcaacttggtcgaaccttgcttcgccgcgctcaacgggtaagattaagagctgctgctgctcgatctgaatcccacatgaccagcgggtgtgcctgctgaagtaaaccatgatgatcttgctcgctgtcgggatgtgacagatgattattgtagggctcctcatgccagggatgctgctcaaaagcgtcccaagactagacactgtgttttgtcttgtgtggttctttatgat

SEQ ID NO: 43188 - DNA, 444 bp, Glycine max
  Clone ID: PAT_MRT3847_138999C.1
gcctcgcgtccgctttgatggaaattttccagtggattcttggttaccaatttttgtgaattggctttatcctgtaagtcaattaccttcagaagctgctgttgtaaatgttacatgtggtagtggacgtggtggattacccaccactgctaggattaggtctgcagtgaacattggctcctcaaatatcaacaaaagaattctgacagcacttgggaaaggtaagaaaattgtttttcttactagagttgatcctttgacagtcgctttactggctggtctttttggggttaagaacgaaattctgagttctaacgcctctgaccctatgctgacgcgacttcctgagaactgaaagagtctgacatatctggtcgatgagtgaccctttgcatttgtgaaccacgacgcatcttttatcacttaaataaaacgcattactat

SEQ ID NO: 43189 - DNA, 510 bp, Glycine max
  Clone ID: PAT_MRT3847_13899C.1
acggctgcgagaagacgacagaagggcactcccttcagtttaatcttttggcgttgattttgtccattgatctcgtgcttgcatctatttactgcttgtggacttgtttggtgacccaaagtcactctccttgccaacaggcttggtttcaatttcatttttttggatctcctaaaacattttgctgtttgaagcttcgaaatgttgtttagagaagtttgggacttgctaagtttgattgcttaccattaaatttccaacaggctaatgatcatgatcattccagacatctccagcatctctagtccgtctttgagttgtatgccatgcatgtctgatggagcccactatatttcttcttttttcaacttttatctaagggtttgtttgtaataagtttgaagcttagtaagcttcagcctaaggtactagaatactacagaaagatgagaattatactagtccctagagacagataaatgaggtctaaaggccaattgcctacacaca

SEQ ID NO: 43190 - DNA, 224 bp, Glycine max
  Clone ID: PAT_MRT3847_1389C.1
ttcggctgcgagattcgacagaaggggacacaagcaagaactagcacttgttcaccaattaagatttcaagagaaactgtttggaaaatgggttccaagagtttttcccttatcctctcccttaacctccttttcttttccatggttagctccagcagtagctatgaaccaccatcaccatccccctctatctcagcaacgctttcaccctttaactcactatt

SEQ ID NO: 43191 - DNA, 1413 bp, Glycine max
  Clone ID: PAT_MRT3847_138C.1
acacaacaccatcctcgtgctcctcgaagctccaaagcaacaacagcagaaacaagaagaagaaccttatatttctttgcaaaacctgcgatccgaggaagaaagcaacgatgtcgtcgccgggaagcgcagcagcaacggcgattctgaaggaagaggtggacatagtgatccctacgatacgtaacctggacttcttggacatgtggaggccattcttcgagggataccatttgataatagtgcaggacggtgatccttcgaaagttatcaaggttcctgaagggtttgattatgaactctataaccgcaacgacatcaaccgcgttcttggccccaaggcacactgcatctccttcaaagactctgcttgtcgctgtttcggattcttgttgtctaagaagaagtacatcttcaccattgatgatgactgcttcgttgcaaaagatccttctggcaaagaaattaatgccctggagcagcacctcaagaaccttctcagtccatcaaccccatttttcttcaacaccctctatgatccatacagagagggcgcagattttgtccgtggatacccatttagtctgcgtgaaggtgttcccacagctgcttctcatggcctctggctcaacattcctgattatgatgccccaactcagctggtcaagcctctagagagaaacaataggtatgtggatgctgttatgactatcccaaaggggaccctctttcccatgtgtggtatgaatttggcattcaaccgggaactaattggtcctgcaatgtactttggactcatgggtgatggtcaacctattggacgttatgatgacatgtgggctggttggtgcgtcaaggtgataagtgatcatctaggattgggggtgaagacaggattgccttacatctggcacagcaaagccagcaacccatttgtaaacctaaagaaggagtacaaaggaatttactggcaagaagagctgatcccatttttccaatctgtttctcttccaaaggaatgcacgactgctcagaaatgttacattgaactctccaagcaagtgaaggcaaaacttggcaaggttgatgagtatttcaacaagcttgcagatgctatggtgacatggattgaagcttgggatgaactaaacccatctgggccaaaatctgaagcattgcccaatggttcagcaaagtaaattcttcatacatgtggctctaaggagggcagaggatatgcctatagctatcattttacctttttcagtttttcttttcatagaacaataaaagttgagtgactccttaatattttttatattttgttcaggttggaatgtagcaatattatttaactttgaaatttgatagtgagattgttgcttttgggaaaggcttcccatgcattcgatt

SEQ ID NO: 43192 - DNA, 463 bp, Glycine max
  Clone ID: PAT_MRT3847_139000C.1
gttacataccttgacaaaaccagttttattaagggcggccgtccattctggagctagcttatggtgttagcccagatcactcatgagttactgtgctcattcgcagaccgatacggatccatgcgcttagtgctgcgcattgttgttttgtaccttaactaaagttatttactgactccatagtctcaagaggatagaagtttgtgcacccggggcgaaacagctgttgcccagaagccatgactattgtggtctagcattatgaacttcaactgtgttttattttttgaacacttagacttgcatgtgtgaaaacagacatgtgctagtctggcgcctgcttgattatcacttatagagtattaaagctcagaggccaactgtgcttcctaatgacgaaaaaccaccccactgagaactccgaactgaatctctctgaggtcagaagacagatgagctggga

SEQ ID NO: 43193 - DNA, 584 bp, Glycine max
  unsure (1)..(584): unsure at all n locations
  Clone ID: PAT_MRT3847_139001C.1
gaaaaaaaacaattttaaattgaaaatccaatctgttgcctttcttccttagagcaacttctgtaattggccatattaaagataaaaaaataaataaaaattaagagtttgggcatcaagatgaagaagatccaataatcaaaggtgaagatggaggaagggcacgtcggtttctactccttcccctgcgcagtccctcaggggaagaagatgatgaatttgaagcactaagtttctttgccttagtcgctaatgcttgtttctctccttcacattgcttttcttccatcttgtgatgcctaacttttgttgagttcaatgtcaccggaagaacacaattgcacataaatccaattcgagcaagacgattgacccaacttggaataggatttccggtgagtctaagacaagcatcgttacagaaatggttgcaattctttgtgatgagattgtaagcattacctctgtacttagcagcaagttcttccatcaccgccttaacctcaccgggtctcatatcggntnttccgatcagaatcgttttcctgaacgcgaaaccttcgcacctcttcggttctccttcg

SEQ ID NO: 43194 - DNA, 759 bp, Glycine max
  unsure (1)..(759): unsure at all n locations
  Clone ID: PAT_MRT3847_139002C.1
actttttaggatattgtttgcgtttgttagcctcttaggtacgaaaaatagaagatggaggatggaattactgctcagcaacagttagtgtcacctttcgaaaaggagatctttaaaaatctattgtatattggaacttgaaattgataatatagcttggataaatggattgtcctcaatacggctattgagatagattacatacacttcaagtggattattcatttatttgaccctttctttttctcttatgaatatgacatttgttctgcactttgctgctaaacaagacacacagtcgtgcaatgacattgacaaagcttgagatgcaagcacgggataaggaaaacgagtttctgataggggaattaatgaagcattgggcttgaatttagaattgggcttgaacttgaatcaagaattgggcttggacttgaagagggcaaactattttattctaaaaaattagatcttatcttaccttatctagatattatttagatttgatctcatctaaacattatttcatctagatcttatcttatcttatctagattttatttgattttattttatttatggacttggatttaaaacagatttgtaagctttggggctgaaaaaaaactatataacagcaccaaggttctagtctaggccctctctcttctctctcttcgctctcttctctctcccctattttcgtttttttagtttttctttgagacatnnnttttcgttttgcaattccagtagcaa

SEQ ID NO: 43195 - DNA, 257 bp, Glycine max
  Clone ID: PAT_MRT3847_139003C.1
ttgccaacagcgtgaccccaagcggtgtacagatacccataatcattaatccagccaacggcaactattgctggattgatcatgggtagtatcatccaagattgaagtattctaatttcatggattacctgtccttgagtcagaactgcattgtatgcgcttagtgaacggctaaattgatggggatcagtgtccatagtcatgtctgctcggatcatattcttcatggatttcaagtgcatgctctgtattcatga

SEQ ID NO: 43196 - DNA, 131 bp, Glycine max
  Clone ID: PAT_MRT3847_139004C.1
gactctattgtaagcgagtctacggtaataccagaagcacaggtagatatatgggcatgatgagaatgactgcacttacatggacctagctaaagattgacctgcatgctatagcttagagaatcagtaga

SEQ ID NO: 43197 - DNA, 382 bp, Glycine max
  Clone ID: PAT_MRT3847_139005C.1
gttttcttttttcttttattgttgtttggttcatatttatgaagggactgcacacacaaattgttttcaaaaaaaaacgggaggggcaaaacaccagcgggccgcgaccgaaaaccagggctacattccccatgcaagcgaagcggcttgggaaagaacccagttgctatcttgaacaatatgccaggcgaaaaatccggccgatccctgaagaattgcattcacaccccccgccgagatactcggagcgtcgggagagccaaaccaatcgggcccttcgaagcaatgatcggcaacaaacgcggaataggacacaacctgcgccgcaccattcttgaaatccgcggacttcactggcccaaggccctgcctggcccttgca

SEQ ID NO: 43198 - DNA, 670 bp, Glycine max
  Clone ID: PAT_MRT3847_139006C.1
atgagacttaaaagaaaccaagccgccatttgaaacaagagtcatttgagtgtgccaaataaatacatactttactattaatagctacttttacgataaatcataactgtttgagattaacctgaattgtaaaactttctatggcactactggttaatcatttacctaataccgagtgctgacattgcaactagtatccacccattagtttttctccagaaaaagttgcaagtcaattcccctttctttctgcacattgactgcatgactcatatctggcctatgattttccccatcactgacacacatggaaacttaattagtatgcaaacttaggcatatccaactaagaatactattactgagatgataatacatcacatatttgcaatggctagaacacaactattagataagggacagaaagatcgttttgcttacaaatttaaactaaaaaagagagaccttttgaacactaccatgttttcattgtaataacaatgtaactgaatataaataacaagaaactacatgatggtttatagatttcttaaaccaaaatcattagcagactttacattacctgcagaatctttacctgatgtgtcaactataaccattccaatgtctattttcttgcctgacatctttagtcatagatgatttctta

SEQ ID NO: 43199 - DNA, 129 bp, Glycine max
  Clone ID: PAT_MRT3847_139007C.1
tattcactctcaagcagtaagatataatcccaggtgagtatgacgatggaggggtaagagcaaatgtgtcgttaggagctgacattttcccagagagacagccgattgggacggcagctgagaaccgag

SEQ ID NO: 43200 - DNA, 158 bp, Glycine max
  Clone ID: PAT_MRT3847_139008C.1
gaagttcaccacaaaacaaccagtgtgagtttgtgtcagtattccattaatatatgcaattgacaataaatttccaatttgtttcgggcaacatttgatgcccacacctatcctttgaaatgttcccaaacaattctgtacacataatgcccaggagc

SEQ ID NO: 43201 - DNA, 1543 bp, Glycine max
  Clone ID: PAT_MRT3847_139009C.1
ggggactaggagataggtaaataatgttggttggaaatttaagtagaagtaccgattggacgggaggagcagtgacggaggtcaactcgctctaaccttttccttccgttcactcgccgccttgctcatcctcgccgtcacagtcacctcaaccgatcatgttctagacttctctctctcaggacagctggagatgattcaacaaagtatagcttctaaattttgtgagtatagtctgggcaattgtaaaatggacttgcctaatcgtgataaacaactgactgttgctgtgaagaagacagcattgagagatctgcaaaatgataataaaatcatggtgccaacctctgttggaagctcttcatttttcaaggataaggatcttggtactgattctagtagagtttctggcaccaagagacccttgtctgactacccattgaatcaccatctccaacaatctccaagcaataatgctgcaaatggacatcttgtgtatgtccgtagaaaatctgaagcagaattgagcaagggcactgcttttgaaaatccaagtattgatgcttattgttcacattctaggcagctttttgagcgagaggattgcttacgaccaaaatctcagacaaaggagtcacctcagttaaaggaacctaagttttcttgattcccagcatttgcaccttttcctatggcatcttcaatgaactcatctggaaagccttcagttcctatttctcttgggaaatctgccatgaagttagcaccagttgagtccaattatgtgacagcttcttctggccctactaccattggtaatccaaagggattaaaaaatttgcactgggaagagcgataccaacaattgcagatgtttttgaggaaattggaccaatcagatcaagaagaatatatccaaatgcttcgctccctgtcctcagttgaacttagcaagcatgctgttgagttagagaagagatcaattcagctttcattagaggaagctaaagaattacagcgtgttgctgttttaaatgtcttgggtaaatcagtgaagaacttcaaagcaccagcagatcatgacgaatgttcagacaagttgaaggcattatcatgatcttccccatttgggctgctgtaaatttcctcagacagtgaaaacattctgattgtttattgtgcttagtgtttatgctgattgttttataatctcttgtcaagttgactaagaaagtatctagcatctccttgttcacaaaaataaaaaaacggctatttattcccaaatgagcttcttaaacagtttggataaccacccacaccttgtgctcatccttgcattgcagttgcagattcagaaggtttaacattctctgttttcttaaaatgatgttaggcttagcgcttgaatgccagcgatatccacgttcagatcttgcgtaagtaaacaattattgcaaggggaattaaaaagttataggttaggttggctcatttcgatcgtagttttatttagtaaagagtttcttttggcaccaaatag

SEQ ID NO: 43202 - DNA, 191 bp, Glycine max
  unsure (1)..(191): unsure at all n locations
  Clone ID: PAT_MRT3847_13900C.1
ttgtgatagcacatggtcttcaagcctttctttaaccataattttaagtatgtaatgtgactatatgtgattgtgttagtntacagtagcaaggaaangaatagcaaccaaaaattagtggctgttgagggcatcctgtnagggaattgggaattgtgatcagcacatgatgagggtgcattgtgataacc

SEQ ID NO: 43203 - DNA, 580 bp, Glycine max
  Clone ID: PAT_MRT3847_139010C.1
aattacgatatctcttcttagaaaaaggttttctcaagagatctgggatgagtttttttttttgatcagggtgatatacaaaggaaacatgaaattgcttctcgtcaagaaggaaaaataagaatataatgactgacactgttgcctaacttgtcttcagctggggcattcatcctctaaacccactcccaacatgacatcatggacatccttcgtttctcccacaatggcaacaaactctgactggaaaaggactctctgctgactgccatgtactagactataatgaacttcgactgatacacctgctgtactaaaccacatgccgcattgcatgcttatgatgaatatatagaaccttccattaatatgtatctttatcaggaacataaacgtacttgttgatgtcgaaaccgtcaataactccaatgtctatagttttctatggaaaagcaggagttcatcaacattgttgaaaccgtctatcgtgaagccagaaaggcccgaggtcccccaatcgctcccaaagattactccaccacccaacttaactagtttgattcctacagccgtgtactca

SEQ ID NO: 43204 - DNA, 646 bp, Glycine max
  Clone ID: PAT_MRT3847_139011C.1
ccaaagggattaaaaattttgcactgggacgagcgataccaacaattgcagatgtttttgaggaaattggaccaatcagatcgagaggaatatatccaaatgcttcactccctgtcctcagttgaacttagcaaacatgctgttgagttagagaagagatcaattcagctttcattagaggaagctaaagaattgcagcgtgttgctgttttaaatgtcttgggtaaatcagtgaaaaacttcaaagcacccgcagattatgacgaatgttcagacaagttgaagacattatcatgatcttccccatttgggctgctgtaaatttcctcagacagagaaaacattttgattattgtgcttagtttactaagaaagtatctagcacctccttgttcacgaaaatcaaaaaacggcgattacagtttggataccttgtgctcatccttgcattgcagttgcagataatcagaagttaacattctctgttttcttaaaatgatgttaggcttagcgcttgaatgccagcgatatccacgttcagatcttgcgtaagtaaacaattattgcaaggggaattaaaaagttataggttaggttggaaaaaaaaaaaaaaaaaaaaaaaaaaaaaagcggccgctctagagga

SEQ ID NO: 43205 - DNA, 468 bp, Glycine max
  Clone ID: PAT_MRT3847_139012C.1
agagctattatttcatgcacgcctccggcggctcggaattcggctcgagatgggctctagctagcctctgtttctcgctagacacattcattgcccatccgccgggggtccctgactccacttgggagccttgagaccctgtgcccccctggaattggccaacctcaacctcaaatgcactgtttacattgacaacgactgcgccatgtgcaccgtctacattgacgtccacgtccactaatgcgccatttacattgccaacagccacgccaaatgcaccctttacattgccctccacaacccctgcttgtccctaaacattggctaccagaactacaaacgcacactcaacattgccaactactaatgcacctggaccctcaacattggcaagagcatcttccctctcttttagcaggcgctgaggacccagacgacaacgctgcatggctgcatctgcttccacct

SEQ ID NO: 43206 - DNA, 1775 bp, Glycine max
  Clone ID: PAT_MRT3847_139013C.1
aatgatagtaaatagtatctttcacatccagacagaatcaccaaagataagtacaatgacaattaaaaaatatagaaagaatttaaaataaataaataaataaaaatatataacacaaatgtcaatgtacttatctttggtgattctgtctggatgtgaatgatagtaaatagtatcttacttggaaatcaatttgtgttagagctgatccgaaggtgaagatattctccacctgggtgtctgctgtgtgctgttactgtagctcctattcaatctctcttagttcaaccttcctgttgcatggctacggttttggttgggaaagttattcggagttaaattcgttgttattagcatattgctgatttagcttagcgaatgaccttgggtgggagataggtcttctagattcgtctttcgtattaaggatttttctctgaaggctgtgatcttatggagcctgacaggttaaattccccaaccacatttgagatgccattggaggttatgggccatgagttgcagttttctcaggatcccaattccaagcacttagggactacagtatgggatgcatcacttgtgtttgccaagtttcttgaacggaattgcagaaagggaaggttttccccagctaaacttaaaggaaaacgtgtaattgaactaggagctggttgtggtgtttctggtattggcatggcttacctggggtgtgatgttatagtgacagaccaaaaggaggttttgccattgttacagagaaatgttgagcgtaatatttcacggatcatgcaaaagaatcctgattcatttggttcgatcaaggtggctgagcttcagtggggagatgagagtcacattaaggcagttggtcctccatttgactacatcattggcactgatgttgtttatgtagagcatctattggagcctctattacagacaatatcttgctttatctggaccaaggactacaattatgttggacaattcttgctttatctggaccaaggactacaactatgttggggtatgagatccgctccacgagtgtccatgagaagatgcttcagatgtggaaaagaaactttgacgtcaagactgttgcgaagtccaagatggatgaaacatttcaacatccaagtattcaactcttcattatgggatttaaacaatcagccgagtgcacagagaacccaggtcaggcaactgttgaaaaagttgatgtggaaactgttgtggaggatgaaagcagtgagggaaatgttgtagtagaaggatctggtctcgttgaagaaaatgtgggggatcacagtaagccaatctctcaaaatgcaaagcttagtgagtgggaagccagaaggtatggagcaatggctgctagggttttgaaagatgtaaaaatatcttgattttgagagttggtctgggagatatattgtcatagtaaatacatcatgatatattagccacatgttttttttcgtattggttttaacaatctttaaagagagaattatgcgtaggttacactttagtgagcttttaatgagcgttaaacctttttcttaatacaaatttcttgagcatggatttcagaacccctgacagattaagagctagatgtaacactggaacgaagttagaatcatattatcggttacaataaatgtttctgcatcaaatggcacattgtaagtccgtttgcttgtggtagtttttttttcccatgataacattgatgcaaagtatttactagttttattaatatctaa

SEQ ID NO: 43207 - DNA, 431 bp, Glycine max
  Clone ID: PAT_MRT3847_139014C.1
accaaaaaagacaaaagccaaaaattttttaaaaagggttttttggccccaaaacaaaatcatttttcaatcaaattaaataaataacccccttgttcatcattttttggggtccctagggatttacataagccagcatcaggaactttttttatcgcaccccttaccatacaaataaaaaaaatcccttaaaaggaaggaattgcgatcggaagttaatccccccccatgcccgtacaattagaaccaccctttgatcaataaaatttgaaaaaaaaaaaatgggaagccccaacttgagcaaaccccaagcaaaagaagatttaagaggatttggtttacttataggataagcttagggggcccattggaaatcacggggggctttccttgagcaaacattgaaaaacaagctgagtgaaatcggaagg

SEQ ID NO: 43208 - DNA, 229 bp, Glycine max
  Clone ID: PAT_MRT3847_139015C.1
tgggggtgatccaattcacatgctacgtgcttacatgttggagggtttaatagcaaggttggagtcttcaggtagcataatctacaatgccttgaaatgtgaacaaccaacacgcactgatctcatgacttacatgcacattctgtaccagatttgcccatattggaagtctgcttacacatctgctaatgctgtcattgcagaagcagtgctaaatgattctagaatt

SEQ ID NO: 43209 - DNA, 1040 bp, Glycine max
  Clone ID: PAT_MRT3847_139016C.1
ggctcgagatgtattcgagcataatttattgttctgtatacttcccacttgcagatcttctaaaaatagttgagagaacagttaggtcagaacatcaacgttcaccaaatagacccatatatcttgttggggaatctttaggagcatgccttgcgctggctgttgcagcacttaaccctgatattgatcttgtactaattttggcgaacccagctacatcattcaggaggtcaagcttgttacttctaacaccattattggaagcattgcctgatccactctctccgggcctgtctaacattctcaggtcgacaggaggtgaatctctgaggatggtgttggataatgtggtccaagggcttcctctacaaaatacagctggagagctagtgaaggattttactgctttctcattgtctctgcctgttcttgctgacatattaccaaaagaaacacttgtgtggaaactaaagatgcttaagtcagcttcggcttatgcccattcacgcctttatgctatcaaagctcagactttgatactttgcagtggaaatgatcagttactacctagtcaacaggaaggtgaaagactactgaagttactgcctaaatctaaatgccagcttcgtaaatttgatgacagtggacatttcctattcctggaagacagcattgacctggtaacaatcatcaaaggcacttcatactaccgccgtggcaagtatcatgactatgcatcagattttatacctccaacacttgatgaggccaaaaacataatagaatcaaacagtttgtttaaccttattgcaagtgctgtaatgctctcaactttggaggatgggacgcttgtaaaaggccttgctggaattccttcagaggggcctgttttgtttgttgggtaccacatgctactcggattagaaaaaattcccctggtttctcgaatttttttggaaaggaatatccttcttcgaggggtagcacatcccatgatgtttatgagatctaaaaatggaaggttaccagatttatcttct

SEQ ID NO: 43210 - DNA, 416 bp, Glycine max
  unsure (1)..(416): unsure at all n locations
  Clone ID: PAT_MRT3847_139017C.1
catgatataactactaatctatacataatcaatacatctttttttcttcaaattctaccaattatcaattcatgactctacttgttcatctagtggaactttattttcataataaattnnaacatactaattcatcttacctctttattgcttcaaacactaaaccaaccttataacttatatatgtacttttcttggctaaacaaatttcctcctttattttttttcataaaaaccaatactctttaatattttttgaaaatgtctatcaaaccttattttaacaaacgcacataaatttcatttcctcccacattcaaaaaaaaaacacaagcttctcctcctaacaatataatttttttctgcttacccttatacacattctttttttatgacacaccgaaattatttttttt

SEQ ID NO: 43211 - DNA, 383 bp, Glycine max
  Clone ID: PAT_MRT3847_139018C.1
accagttaaaaaggggaagttttattaaaaggtgatttccctcggggaggactgaaaagcccaagggcaatgaaaaacaattttttccatggaacaaatagaaaagaaaggtggcaaaagttttttaaagttggctttttattaatcaacacttgaaaaaaaaacgggttttattaaaatcgggttcgaaaattaaccccaaaataaaccctttttagctttatcggaagcatttgatttttgcttaggagcaaaaggaaagccctttggaacctttccaaaaaacattttttatattcttatccaatcggcagcaaagggtgggggcattaggggtttaagcttatcacccccataaaaaaaaggggggccccactttaatt

SEQ ID NO: 43212 - DNA, 367 bp, Glycine max
  Clone ID: PAT_MRT3847_139019C.1
gaaattccctagacctaccgatggacctggcgcgcccaacgcccatggcgaaactttgcaatacaacctgaaagcgaaaggtggcaggggattctaccgtgaacaatacagcgacccttggatgctactacagcttgcgcccgaccttagtatgactgtcggggatggttgcgagaacgccccttgggaaactgaggactccaatgcgctcacgctagagtacatcacatacgcaccgatctggccgtgcggcccacgacgggcgggacagggtcatgatggtgcgtggactccacaggagctcgtatgtgcaacacgattgcagcgtgcttttgtggctattgtgagggacaacccaaccgccgaa

SEQ ID NO: 43213 - DNA, 550 bp, Glycine max
  Clone ID: PAT_MRT3847_13901C.1
aaaaaaccaaaaccaaatttctaaaaaaaaaataaaccccgccttttaaaaaagcttgggggggaaaccaggtcccaagggaaaaaaaaaccgggtcccctggaaattcaattccaggctggaaaaaacccgggaacaaattcccccccccccggctaaaacaaaaaccccattaaacaaaaatccccccccaaacaaaagcagggggggccctggcaaccctgggccaaaaaaaaacccccttttttccagggggcccagggaaagcaaaccctttcttttccccttggggagggccaaaaccccccccttttttttcaaaaaacagggaaacccccccctttcggcccctggggtgggccgggaaaaaaaagacagggggaaaaccctttttcccaaaagggggttccccctttttgaggggggccaaccccatggccccaacccaagccggggggaaacgggcaaaccccccttggaccccttcccccgaaaagaggaagaggttccccccccccgtatggggggggcagtacaccgtccccccccc

SEQ ID NO: 43214 - DNA, 472 bp, Glycine max
  unsure (1)..(472): unsure at all n locations
  Clone ID: PAT_MRT3847_139020C.1
cttgttggtattgatcgtaagaagcgagagctcacaaattggctaacagaaaaggagggtccagtgaaggtggtggttggcccaggagggataggtaaaacggcaattgtgaagaatgtgtacaacatgcaagagcaggtaagccttcagaagaagggaacaagctatttcgagttttgtgcatggataaccatgtctgggcctcaagttgatgatcataatatgctgataataaggcagattatagaaaatatactcgagaaggaccccggtgcatcagctacattgcagaaggaaacaacagctatacactctcttataagaaaagtaagagaatacttaaaagataagaggtacctcattgtgtttgatgatgtgcatagttcaaaattttggaatgttatcaagcatgccctaactccanacagaagcaaaagcagtaaggttattatcactacacgagatgaaaatg

SEQ ID NO: 43215 - DNA, 522 bp, Glycine max
  Clone ID: PAT_MRT3847_139021C.1
tgtagattgatggtgaaggtaattggaagcttggattgatcgagcaatgagttcactaaagcagtgttgctgcatggactctgtataccatttgagatgttgacgagtctatcacacgctggctgtttgcgagcataaattaggtttgccaacaaagccaaaattgttgataataagttcgagcacacaaccattgcataatctctgcagtgtataggtgatcaagatgaatcatcaggaaagaagggcccttggagctaatttgttgccttcaaaaactcccatgctgttgtgtaagattttttcttatgttctttactcttgtgccacctgaactgctttcacctcatcccttggcgttgccttaattgttcccatgtggtcatgttgtatgactgaattactcgggcaataatacgaaacttacaatacaaaaaatctatttcttagttaaattttggagattgtgctagagtaggacctaagcattccattttcagttagatcttctggcatactaat

SEQ ID NO: 43216 - DNA, 2386 bp, Glycine max
  Clone ID: PAT_MRT3847_139022C.1
tgctgttccccaactccatggtaatacaagggtattgccattgagagcagctgccatgtgtaaagtattatgcatatacatggctgtttgtgcattatctccttgatgacttactatgacccaaacttcgagtggtctactatatatttcaggctcatttttcttatagggaccgcttcctttcaggtacccactgtacttgataaacaaggtgcacaattgcttgctgtcgcttttcttgttgtttcaagaacatgggtctcagatcgtattgcatcactaaatggtaccactgtgaagtttgttttggagcaggataaagcttcctttattcggttaattggtttaagtgttcttcaaagtgctgcatcttctttcattgctccttctataaggcacttgacagccaggctggccctggggtggcggattcgtttgacgcaacatctactaaaaaactacttaagaaacaatgcattctacaaggtctttcacatggcaaacaaaaatattgacgcagatcagaggataactcacgacttggagaagttaacagcggacttgtctggattggtaaccggaatgcacttggacatgtttgatgcttgttctttccttctattgattttgctaactgttgtttttgtcaaggttcacatggagaatgaagctattaacagaactgttactcctgattttggcgatttgataagccaagaacaacaacttgaaggaacctttaggttcatgcatgaaagactctgtactcatgctgaatctgttgctttctttggaggtggagctcgagaaaaagctgtgagcatcccatctgtatttaatatcttttctttaaggatggttgaatcaagattcagagagcttctctcccactctaaataccttttaaaaaagaagtggctgtttggtatactggatgattttatcacaaagcaactccctcataatgtgacttggttgctgagcttattatatgctatggaacataagggagaccgtgcttcaataagtactcagggtgagctagcacatgcattgaggttcttagcatctgtcgtttctcaaagctttttagcttttggcgacattcttgaattgcacagaaagtttgtagagctttctggtggtattaatcggatctttgagcttgaagagcttctggatgcagcacagtctggggactccatcaatagtagtattacatctccaatatggggttatcatggtaaagatgctatttccttttctaaggttgatattgtaacccctacccagaagatgttggccagggagttgacatgtgacattgagcttggtaaaagcctgcttgttactggtccaaatggaagtggaaaaagttccattttccgagttcttagaggactttggccaattgcaagtggaagactctctagaccatctgaggatgtggatcaagaggctggatcaggttgtggcatcttctatgttcctcagcggccttacacatgcttgggaacattgcgggatcaaattatatacccattgtctcgtgaagaggcacagtttcgagcactgaagatgcatggaaaaggtgaaaaacatcctgaccctagaaaaatgttggacacacacttgcaagttatcctagagaatgttcggttgaattatcttctagaaagagacaacaatggctgggatgcaaatctaaactgggaagacattctctctcttggagaacagcagagattaggcatggcacgcttgttcttccataagcctaaatttggtatcctggacgagtgtaccaatgccactagcgttgatgttgaagaacacctatatgggctagcgaacaaaatggggatcactgttgttacttcctcacaacgtcctgctttaataccatttcattccatggaattgcgtctgattgatggtgagggtaattgggaacttcgttcgatcaagcaatgactttcgcacctgcagattctcattgttactattttagatgttgctgagtctttgaacatactgaatgattgcaagcagatattaggcttgccatgatggtcattcctttatatttttttttcttcttttttcttttttcattttgggtttaccatattctccaagcttgctccgtcgacttgtggggacaaacaaacaaaaacagcatcgatagccaaaatgattgatagtaagttggagtgcacaaccttttcatgatctctgcagtatataatcaattatgtacagggttttcgcttctattattagttacttagatatttattcacattttgtaacaattggatgtaattattaatgttattttatcaataaaacggcacgaaacaggagtagcttttagagattaaaa

SEQ ID NO: 43217 - DNA, 686 bp, Glycine max
  unsure (1)..(686): unsure at all n locations
  Clone ID: PAT_MRT3847_139023C.1
caattaacttgcatcaataacatgttagcaatcagtagcgaaagtgtaagcacttgggactgtaaagacacgggatgctcaactttgtgagaaattattacatgctcccgatcatatatacggatgaatcactatataacatataactaccttttttaatttatgaaaaagacaaataaagtgtcataaaaattggtgagaatcacatttaaccgagcacacgataaggcaagagagagtgtgcacagcatggagcacatttgcaacaagtaaacaacaacgtactccaaattgacatcatgtagaagtacgagttttaagccaactgaacttcaatatcttcctccacgatctcggggttcttttatactcaaaaatttgttcaattagccctgcaaaatagaacttgtcctccccatattccactttcccgcacaacctcttaaacagatcacaaacttctttctccgtgtaattatccatgatcacaatccctcggttgcggaacaacttcacatcgttttcattgcagaccaaggctttcattaaaaaggcataagatgtgaacgggttggctatcattttggtgctgctccaatgctatcagattggaaaacagcatttctgtaaatgatgatnggggtgtgaaagaaggaacttcaagcaccccatttgcaattttatgt

SEQ ID NO: 43218 - DNA, 257 bp, Glycine max
  Clone ID: PAT_MRT3847_139024C.1
tgctgcgagaagacgacagaaggggaatacaacaagaggtcacatacacataccttcctctctctctttctgtctctctctgcattgcaccttcccttcttcttctccttcttgtctctgtcattcgtgagattctccacgtgtttttttctcttccattggattgtacagattcctagctacaacagccagatatcaatctctgtaaatctagttgatttgtggggtgttctgtgaatttttttaaaggactgtaa

SEQ ID NO: 43219 - DNA, 357 bp, Glycine max
  Clone ID: PAT_MRT3847_139025C.1
tgtttgggaaataatgaattaacaaaggattctttagagacaggaacacttggatataacaacaatcaacctatttttaaattcaatacaagatttataatgaacatgaatcatcctttatattcacatcaataatgaaataactcgtaacattgagtcctatttttatataaatactcttcggctatttatgaatctacactccatctgcatccttatgatacaatcttggtgtttaattatttcaataccagttctccattttgatcattatcatttttttatttcttgctccatgttatcattatatttagtattgtttacttttttatcaagtgcattttttattattttttt

SEQ ID NO: 43220 - DNA, 519 bp, Glycine max
  Clone ID: PAT_MRT3847_139026C.1
cctatatgggctagcgaacaaaatggggatcacagttgttacttcctcacaacgtcctgctctaataccatttcattccatggaattgcatctgattgatggtgagggtaattgggaacttcgttcgatcaagcaatgactttgcaggattctcattgttactattagatgttgccaagtcttgaacatacagaatgattgcaagcagattttaggcttgccatggtggccattcctttattttttttttctttttctttttcattttgggtttaccgtattctccaagcttcatttttttgctccgtcgacttgtgggggaaaacaaacaaaaacagcaccgatagccaaaatggttgatagtaagatctctgcagtatataatcaatttatgtacagggttttcgcttctattattagttagttagatatttattcacatattgtaacaattggatgtaattattaaatattattttatcaataaaacggcatgaaacaggaatagttcttagagaa

SEQ ID NO: 43221 - DNA, 5390 bp, Glycine max
  Clone ID: PAT_MRT3847_139027C.1
ctacggcataaaactaaagatctgcaccagctcttactggaacaaaggtccatcctatatacgttcccgacccgaataaacaccatctaaatctcgtaatatttgctaatatactgcccctgagagatatatatttacctggaaattttcacatttttaaaatgctaattgcacagtccccgatagcaagaggttaattatccaaaccgtattaataggtggatctagatgctgtataatataattgaaaaaactaaattcatcaatggcattataaattcttagtagcattacgtgttattttgaaagactacccttcaactgtagcagctaagttggaatgattaaagttctatagaatgagggaggaagattttttcaatcacatattgttgtataaatactggtagtttagcctcatatatgtcagcttgattttgagttgagatacaagaaataagagccgcaatcaaattccaaactaaacaatcatacaattcataggagataatgaaggattctacctgtcgaaattattaaacgaataaagcaagcaactatcactgaaggataggggccatgctacgatcgcttatgttcaaagatggtgaatttggttatttagctaaaatcgcgacagcggtgatacgaactgatctcatctaaacattagcttaattctgaggattaatatttagtggagctatacttagattcttatcaagatttttttgtacaatttcaaacaatgtactattgtcatcctttatgtcaagggttcattattcgtttaattatataacagggactttgagtttacttttcagttaaatatggacaaaccttcatgtttccttttactttcagaatttggttttttataaaatatcgcatgttgatcgtctgatatttaatcgagagcaaataattgccactgaattggcaaggttcggttcagagttgagtgagattgtacaggatgatctaacagcagttacttatggacttttatacacttggcggatgtgttcatatgctagcccaaaatatgtcttctggatattggcatatgtactgggagctgttgctgtaatcagaaacttctatagttcatttggtaaacttatgtctatagtgcagcaattggaaggagagtatcgacagcttctcgcacgattaaggactctcttggaaagcatagcattctatggttgagagaggaaagaagaagctcatattcaacagaagtttaaaaccttggttaggcacatgtataatgtgctacatgaccattggtggtttggcatgattcaggacttattattgaagtaccttggtgctactgttgctgttattttgatcattgatcctttcttttcttgtcatctaacccccgatagttcaacttgagggcgtgcagagatgttagacgatcttagatatgatactagtgtcatatttgccttctttcagtctctaggaactctttctatcagtgcgagggcacgcttgttctttcataagcccaaatttggtattcttgaagagtgcaccaatgcaactagtgttgatgttgaagaacacctatatgggcttgcaaaagatatgggaatcacggttgttacttcctcacaacgtcctgctttaataccatttcattccatggaactgcagctgattgatggatgaacgtactttgagggttgaatcaggatctaatcttttaattacaggtcctattgccagaggaaaaagctcccttttttgagttgtaggtgattttagcccatggtgatctggacatatagtgaaacctggaattggctctgatcttaataaggagattttctatgtgccgcaaaggccatacactgctgtaggaacacttcgagatcagttgatttatcctcttactgaagatcaagagattgaacttctcacagatcgtgggatggtggagctgttaaaaaatgttgaccttgaatacctgttggaccgttacccacctgaaaaggaggtaaactggggtgatgaactgtcattgggtgaacaacagagattgggcatggcaagacttttctatcataagcctaaatttgcaattctagatgagtgcacaagtgctgtcactaccgatatggaagaacggttttgtgctaaagttagggccatgggaacatcatgcattaccatatcacatcgtccagcattggttgcattccatgatgtggttttatccttagatggtgaaggaggatggagtgttcattataaaagggagggctcttctactgaaatggggattgatacgatgaaggcatcagaaaaaaaacgacagagtgatgcaaaggcagttcaacgtgcattttccatgagcaaaaaggattctgcattctcaagtccaaaggcacagtcatattttgcggaggtgatatcatcatctccatctatcaatcatacaatttcaccatctgctgttccccaactccatggtttgagtataaagaaaggatcaatagtagtggtagcagtgatgagggtgtttgtggggcaagggggtggcggttatggtagtgatggtagcggtggcggtcaattgaatggtgattgggctggtgacaacaatgccggtgatgatggtggaaagtggcatttagtggtttggcagcagtggccggtagttggtagaggtggtaatgacaactgtggtggctgtgatggcagattgcggcaaaaacaaggaaaacatttacgtaatgtgggggtgattaggaattgttatttagagggtaggggatttctatcaccagacatgcatgtctctaacaagcccttcatgtccttgaatgtagatgatgcatacaccaacactgatgttggaattagtgctcatttttcttatagggaccgcttcctttcaggtaccactgtgaagtttgttttggagcaggataaagcttcctttattcggttaattggtttaagtgttcttcaaagtgctgcatcttctttcattgctccttctataaggcacttgacagccaggctggccctggggtggcggattcgtttgacgcaacatctactaaaaaactacttaagaaacaatgcattctacaagaggcaagagcatgcatgggacattgatgccattgctgggtgggggtggggtagggtctttcacatggcaaacaaaaatattgacgcagatcagaggataactcacgacttggagaagttaacagcggacttgtctggattggtaaccggaatggtaaagccatctgtggatattttgtggttcacatggagaatgaagctattaacaggtcagaggggggttgccatactctatgcttacatgttacttggtctgggatttttaagaactgttactcctgattttggcgatttgataagccaagaacaacaacttgaaggaacctttaggttcatgcatgaaagactctgtactcatgctgaatctgttgctttctttggaggtggagctcgagaaaaagctatggtcgagtctagattcagagaacttctctcccactccaagtaccttttaaaaaagaagtggctgtttggaatcctggatgattttatcacaaagcaactccctcataatgtgacttggttgctgagcttattatatgctatggaacataagggagaccgtgcttcaataagtactcagggtgagctagcacatgcattgaggttcttagcatctgtcgtttctcaaagctttttagcttttggcgacattcttgaattgcacagaaagtttgtagagctttctggtggtattaatcggatctttgagcttgaagagcttctggatgcagcacagtctggggactccatcaatagtagtattacatctccaatatggggttatcatggtaaagatgctatttccttttctaaggttgatattgtaacccctacccagaagatgttggccagggagttgacatgtgacattgagcttggtaaaagcctgcttgttactggtccaaatggaagtggaaaaagttccattttccgagttcttagaggactttggccaattgcaagtggaagactctctagaccatctgaggatgtggatcaagaggctggatcaggttgtggcatcttctatgttcctcagcggccttacacatgcttgggaaccctgcgggatcaaattatataccccctgtctcgtgaagaggcacagtttaaagcactgaagatgtatggaaaaggtgaaaagcatgctgacactagaaatttgttggacacacggttaaaagttatcctagagagtgttcggttgaattatcttctagaaagggagggcagcaactgggatgcaaatctaaactgggaagacattctttctcttggagaacagcagagattagggatggcacgcttgttctttcataagcctaaatttggtatcctggacgagtgcaccaatgccactagtgttgatgttgaagaacacctatatgggcttgcaaaagatatgggaatcacggttgttacttcctcacaacgtcctgctttaataccatttcattccatggaactgcggctgattgatggtgaaggtaattggaagcttcgattgatcaagcagtgagttcactaaaacagtgttgctgcatggacttggtataccatttgagatgttgtcgagtctatcacaagctggctgtttgcgagcataaattaggtttgccaacaaaggtcaatcctatatgcttttattttaagttttccatattctccaagattcaatgtttactaggggactaacaaacagctgaaacagccaaaattgttgataataagttcgagcacacaaccattgcataatctctgcagtgtataggtggtgatcaatcatgtatagttttccccctttcttcttaggtagttgatattggttcatatgtttgtagtcattggatgtaatgattaatatttaaattgtttaatcaataaaacagcagaaaagaaaggctcttcgagctaatttgttgccttcaaaaactcccatgctgtcgtgtaagattttttcttttttttatgttctttactcttcttgtgccacctgaactgctgtcatcccttggcgttgccttcattgttcctatgtggccatgttgtattactgaattactcgggcaataatacgaaacttacaatacaaaaaatctatttcttagttaaattttggagattgtgctagagtaggacctaagcattccattttcagttagatcttctggcatactaatttgtgtttgtactttttgttggttaattagctatttgtaatttggagtacttgatggtttgtttaacatgtatttttgttttctttt

SEQ ID NO: 43222 - DNA, 301 bp, Glycine max
  Clone ID: PAT_MRT3847_139028C.1
gtgggttcctctcagcaatgtgtggccaggacctttcgagttttaaatccacaaaacccttttgtgctcaatacgaggctggggaaactgactctcccccagggcactccccgatgtgttaaaagacatcctcttcctatacggggaggggctcgtccaaagaatgcttttctgatgaacatgccaaatgctgtccttgaaaggtggagatattatgctcgagagcttgactttgagtccctacaatgacttggacctacattaaacgtgcagtttctctctgcataccatttggaaaatt

SEQ ID NO: 43223 - DNA, 504 bp, Glycine max
  Clone ID: PAT_MRT3847_139029C.1
ccacgcgtccgcacaaaaacacaaatacacttctctctatctatattgttggcgttcttcagcactttcttcttctttaaaagataggaccagccgacggtggcttggcttttgaaggaatcaaaaggcccacccactggacgcacaaccccccaacactggctttttctttttcactttctctttttttaaagaaaggaaaattgggggttttaatggttttgcccgcaattgggaaatgcgtttggggggggggggaaaaaaaaaaaagaaggaatttggatcttttgggtttggggtggggaaaggggtgtgaagggggtgatggtgaacaatgcaagcgtgaatctttttcttttgaaacaaagagggggtctcgatttggaataaaagaagaagaaaactttgtcagttcaagaaacagtgatgcacaccgggggaagactcggtgctggttcccaccacaggaacgagtttgggctcatcaatgccgatgagaatgga

SEQ ID NO: 43224 - DNA, 596 bp, Glycine max
  Clone ID: PAT_MRT3847_13902C.1
agtatcataagatttgcagtattaatatagttaaggtgggggcactacttggcatgtttctcctgacgtaagttcaactcacaagttatgtctgcagaaaaccattccagtaccgctaaagagaaatacttgtacaaaatagagtggaaaccttctataagctctattctctttactgtcaattaagtctccacactcttcaccccaacatttagctttggcatgaataatggatacgttgaacatgaagtgcctagaggctgttatttgatacaacatcctcaaagcgaacaaaccattgatcattagagaactgctgaggttgtagcctatccatttgtagaggggggaggttgtgtttgttttccctttttgaatcacaaattgtgcataatcaatggtctttgaagaagggacgaagatatttttactgggaggtgctgggagtagtgatgccaaaaccctggcaacctcatgcatggttggcctctcggaaggattttttttcgtgcaaagaagagcaagctgaaaggtcttcttaacatgggtcagatccatgcaggtaatagacacctcaggatccacagtctccatta

SEQ ID NO: 43225 - DNA, 439 bp, Glycine max
  Clone ID: PAT_MRT3847_139030C.1
tagtcattcggctccctcctatattcttatgcacacgcttttgtttttactcctctaatcattataaacacgggcggggcattttaactatttagccttacacttgcaataaacacatcaactttcacattctccaaagaagcacataatagatcgtagacaactcataaccaacatcttatgatatataacatagtggttgcctgagctacaacttccatgacgccaccaatccattgttcatcccagggagaaagatctaaccctaccttgttcctttcgaaaaaattgaatagactggactggatatcaagcccaacatttagatctagagcgaacaacaccttatcttgaacacgatgaacagccacagcgtgcaccaccaccacgtccacattgaccatgtcgacatttactttgattgcaaacggctactgtt

SEQ ID NO: 43226 - DNA, 729 bp, Glycine max
  unsure (1)..(729): unsure at all n locations
  Clone ID: PAT_MRT3847_139031C.1
gaattcgagctcggtacccggggatcctctagagtcgacctgcagaataggataaatggtagtgctaaggatatttcagcagggttacagattaatattcgtgggaattctgctgctggtgtggataggggtgtcaataaggacgtgaataagggaaatgaggcattggtgttcaagaagaagtttaaattcaaaagtccttctaataaggctacaaaaactcccaagggctttccagggaaccgagattggaacgaatctaaggtaaagaagaaggggttcagaaagtaaggaggcagctcaagattatggaagtgatgtttctgatcatgcacaaatgttacatgaagataaaccagtgaatcaacaggatgctgtgacgcagaagagtgtttctaatgttccttcggaagaaggaggaaaatttgttgatgacaagtccaaggcgacgcgagacagtataaatgggcagtttaaggaatnggattgtctgaaaaaaattcagcagccaacagagtcaaagttaagcaagcaaatactaaaactgataatgtggtggctgaaccttcgttatgtttttggtaagtgcaagaaagtctttntggttaacttgggtttcaattggataatgtctacccattactgcaccatttatgaatcttcaaaacctcattatccttaaaaacttgacaaaagccatgtcctgcattgcaggacacaaatatactg

SEQ ID NO: 43227 - DNA, 378 bp, Glycine max
  Clone ID: PAT_MRT3847_139032C.1
ttctcatcggcgaggatggaagaaatgatgatgagcatgtattgtggcactacaaggaaatcccgtgatgtatgactaactatttgaacagagcatatgtggatctttgagccttctataaaccttatcacactgggggcgcaagatgacttattatacagattctgacatatgtttcatgctagtaaaggtcgggagagaagagggtctacgttgcattatacatgcctctgatgatatgagttcttaatgggctaattggttgattactagatacgtagatatgctacgagcccatatagcggctcttatcttcatagcctgcgggctcacctgtggctatctttgatgggatgccccaaacaatgtactctgatg

SEQ ID NO: 43228 - DNA, 544 bp, Glycine max
  Clone ID: PAT_MRT3847_139033C.1
gtctccgctcaatcaaaacgaaacacctcaaaccttgttaaaatgtccaacaccggtattgccgtcgacaacgaatgcgtcaatgagttcaacgccttcaagttgagaaacactcaccgctacatcgtcttcaagattgaaaacgccaaggagatcaagattgaaaagaagggtgagaccaccgcctcgtacgacgagttcttgaagcaactcccggacaacgactgcagatacgccgtctacaacttcgaatacaaccaagctgacggtttcagaagcaaaatcgtcttcttcctctgggcccctgacactgctcccaccaagagcaagatgttgtacgccggtaccaaggacaccttgaagaagaacctccaaggtttgcaagtcgaaatgcaaggtactgacaagtctgaggtcgaccaatccgaagttcttgctaagtgccaatctctctccaaataagagagttttctgtgcgtgaaaaaactctttgctttgatcaaaccggcatggaatgattttagtaaaatgggttgttactttt

SEQ ID NO: 43229 - DNA, 457 bp, Glycine max
  Clone ID: PAT_MRT3847_139034C.1
cccacgccgtccgctttgttttttatgagcttacagctgacataagagctcccatgctttgttggtggccttgcttggaccaccgaccacgatgctctggataaagccttctataactcggcggaaacaggcgaatcaaacgtcatcaacgatcgtcaaactgagaaatacaaaaggtttggatttgtgaccttctgcacagagcaggcaatgagagacgcatttgaaggaatgaacagacatacacctcacatcgctgcaatataaccgtgaacgaagctcaatcccctggaaaaggtggccgctggcggacgaggcgactacgaacgaggcggtgcagattacggcggcggccgaggttacaaccgcggtgaaggacgatatggtggcggaagacgccgacgggaacgtggttataaccgcaacggtgctggaggaagatatggcggctatggcg

SEQ ID NO: 43230 - DNA, 504 bp, Glycine max
  Clone ID: PAT_MRT3847_139035C.1
aaaaaggaaaaccgggtttttttatttataaaaggttaaaaacccaaatttctggcttgggagctttataaacagggccccctaaaaaggctaaacaccggaaaactttttaaaaaattaagctatgaaaccctaaggagctaaataaactggaaaaaaaatttttctaccttaatggaaaatcttaattttggaatcttgaataccccgtccccttaaatatcaaaaggaaaggttttatacccataagggggctccccaggaggagaggatccctaagctttgacaatttggagggggggaaaaaaatcttttgacttgaggggggccctgcaagtggggcaaaaaaagggaaaaagtacccacttgtcaatgcaaaccacagggaaataggggttgccctttgaaaggaaccttatagggcccccatcaaaaaacccacccaagcaaatgacccccctcctaaaattaggggaaaaaaaaaaaaaggcccccccaaagggg

SEQ ID NO: 43231 - DNA, 696 bp, Glycine max
  Clone ID: PAT_MRT3847_139036C.1
aacctcttcacgaaacaacgcatccatagccaattgtctctaacaaaaaacaaaactagcttcttctctttctcactctctctctctctctctgcacttgttcaatcaacaatgtcaatggcttctccttcttcaagaaaccaaacgtcgtcgccgcgttcgtactcctcggcgttcgcgtccacgtccacgtccacgtcgtcgactagtttctctcccgtcagagtgcaggaacaccgtccgttgccgtcgaagagtgagaggaacaaaggcgcggtgtcgtcgtcgagcgagaagaggacgtgcatgtgttctccaacgaatcatcctggctcgttccgttgcgcgtatcacaaacagttagcggagaagcagaagcagcaaacgacgtcgttgagttgtcggaggctgaaccttcttagaccggcgatgaagaactcggtggtgagaatcggaggagtggaaggtgatcagattgtgaggagagcgttgacgaccactctcattaggccctcctctcatcacttgcgtcgccgcgaaacctttcagcccaggcccactcgcctctccctcatgtccaaagcccaagatcactgaacaataagcggaaaatacttcttgtaaaattctgtggataatctttcaagaaattgtttcttttttggaatgaaaataaaaattactgagttgtaagtg

SEQ ID NO: 43232 - DNA, 1613 bp, Glycine max
  Clone ID: PAT_MRT3847_139037C.1
tacggctgcgagaagacgacagaagattatggtaactgaaatctcgcaacgttatcactaatgttattgttgctgcgctacgtaagacacgagagaagagaagagaaaagctattgtgatttgtgagtgatatgagtatgtctattatgcatgcaatgtcaatcagaagcagcgctttcttttgctttcaaataaattgctccgattcaaagcaaggccgtggttttggagaaaacactaacagtaacaggattaagaccaacaaatctgacaagggattggtgtctcagcaaagcaagggatcagcaaataaacagtctcgccctctatcttctcaggcaccccgtttaagttcacaacttgacggcaaatctaggaacgattttttggatgttgactttgaggaacggctaaaagcagttagaaggtcagcacttgagcagaagaaggcagaggaggaaaaagaatttggagcaattgactatgatgcaccaattccttccgacaatacgacaattggcgttggtactaagattggagttggggtagctgttgcagtctttggtctggtttttgcttttggagattttcttccatcaggaagtgttagtcccactgaagacagtgctgtggtcaatagtaagttgtctgaggaggataaagctactcttcagagtaggctcaaggaatttgaagcaacattaagtaattcctcaagtgatgcaactgctcttgatggagctgcaataactttggctgaactaggggaatatgcaagtgctgcttctctacgcgatgatttggtgtccgaaaaaccaatgatgctgatgtttttcgtttgcctgttcatagttaagtatgaactcaaagattatgaagggagtgttgctgcatataaaagctcagcatctgagttcagaaaacttgagcaaaaattctgatagcaacccaacagactcacaaaagctggaaccagtccaagttgctgttcaattacttttggcctatccagagcatctgcatgtcagtggcaacccaacagactcacataagctcaatccagttcaagttgaattacttctagggaaagcctactcagattggggccatgtcagggatgctgtagctgtttatgatcagctcatatctactcaccctaatgattttcgtggatacttagctaagggaatcatcctaaaagaaaacaaaaatattggtgatgcagaaaggatgttcatacaagctaggttctttgcaccagataaagccaaagcccttgtggaccgttattcaagatgaaaatttgtattgacattaattatgagcgtatgctttgtaacgaaattataataaaccaattaactgggtgacataaaaagtccgatgatttctttggaattttaaagttatggccattagcaaaatacacaaaatagcatatagtagatttcaaagcataatgtttacggtatttggtttgttagattgttgccacaaagctcagaacccttgtggtgaccaggctattgaattaacttttccttacgcgacatataattgactactagaacaagttacaccaaaatgtaatggattcttacccctgaacacat

SEQ ID NO: 43233 - DNA, 357 bp, Glycine max
  Clone ID: PAT_MRT3847_139038C.1
aacctttgggctgatttatgctgcttgcatgcgtcgtcacaagatgatagacgcgcatcctcgtgagagaaatagaggggctctcgggacaagatcatagggggtcatggtcgtcagaagatcatacaagggcatcgtcgtcagaagatcatagaacggcatggtcgtcagacgatcatcgaaggccatcgtcgtcagaagatccatacaagggtgctctacaccccaaacctcaccaccacacccaccaagtaccccacccagaggacttaccaccctccatctgcccacctcacccaataccccccccaccgcgcccctcacacccaacccatcgcttaccccccatcatccacc

SEQ ID NO: 43234 - DNA, 247 bp, Glycine max
  Clone ID: PAT_MRT3847_139039C.1
caactgtatctccgtggcctctgtggaaaatatcgagttcaagaacaccgcaagatttcccaacaatgttgaggaccaccaggaccagattcctagcgtcatggatgcatggaaaatcttcatgagcgaaaaataccttctcaatgctgctggtgagacttacagctttactttggatgccaagggaacctgcagtttctactgttcgcctcaccaaggacctggtatggtgggaaaagtcaccgtt

SEQ ID NO: 43235 - DNA, 1274 bp, Glycine max
  Clone ID: PAT_MRT3847_13903C.1
accaggtagctgcttgtcatttgattgtaggagtactactctagatataggaaaagctggcataaatacggctgcgagaagacgacagaagggggggttgggttgggttgtcattgttggcatagcaacaagttgacactaatctaatcacctcctctgcctctctttgtattctacgatggacacgcgcggccacgatgaggaggagccaccgaaacctgtggttctgatcacaggatgttccacgggagggataggccacgcgcttgcacgcgccttcgctgagaagaagtgcagggtggtggccaccagcaggtcgcggtcgagcatggcggagctggaacacgaccaaaggttctttttggaagagttggatgttcagtccgatgagagcgtgcgtaaggtggttgatgctgttgtcgacaagtacggtcgcatcgacgtgctcgttaacaacgccggtgttcagtgtgtgggcccactcgccgaggctcctctctctgccatccaaaacactttcgacaccaatgtcttcggttccttgagaatggttcaggcggttgttcctcatatggcaactaagaaaaaggggaagattgtcaatattggtagtgttgctgccttggcctctggaccttggtcaggagcttatacagcttctaaagctgctcttcatgctttgacagatacattaagactggaacttggacattttggaattgatgttgtcaatattgtccccggagctatcaaatcaaacattggagattctgccatagccagctacaaccgcatgccagaatggaaattattcaagccttttgaagcagcaatccgagatagagcttatttttcgcagaagtccaaaacaacccctacagatgagtttgctataagcactgtagctgctgtccttaaggagaaaccacctgcatggttcacctatgggcattactctactgtcatggctatcatgtatcatttaccgatctctgttagagattttgttttgaagaaagcaatgaaaggctgagctatagttaggtggtgcatctatctttccacatggacaccttataaagcatttactttacctttagcaacagaagagatattttctatttagttccattttatcatattttagtgaacaaagtttttgaataaaacttgaccaaactgaggacatagtttcttgagaatgtgtctgaaactttcccattctttgaacatagaccagctatactttttttctgcatttgttagtttttcat

SEQ ID NO: 43236 - DNA, 188 bp, Glycine max
  Clone ID: PAT_MRT3847_139040C.1
ctcagctctcagtggggacttcattcccacacaagagatgtagtcgaagacccctccttccgagaccacaagctgttccctccagaacccagaggataatggagagtgtttcagtgagtggagaagttggtggtgctggtggcgcatactcatatgaagccttgaaaagattagaccagctatggtca

SEQ ID NO: 43237 - DNA, 259 bp, Glycine max
  Clone ID: PAT_MRT3847_139041C.1
cattctttttttttttttcttttttactattttttcaataatccttcccttttatggagccctggagaggtttaattaaatactcaacagcacaacaatatatattcctttttcactcctttacacctttggggggtaaagtaaattcatcccaacacgacccttattaaactcaatacttacaagtcttggcttaatacataccccttactcgtgaagctccatatatcactggaagactcttccccttttgtcccca

SEQ ID NO: 43238 - DNA, 162 bp, Glycine max
  Clone ID: PAT_MRT3847_139042C.1
gtaccaaggtcctgtcaccggacagtgcagtagaaaccctagttctatataacagaacaggtgcatagattaagatcgtagtgggaagccgaaagactgaaaggagtctataactaacatatgggaacttgaagtggacagcaatcccaaatagttagtagc

SEQ ID NO: 43239 - DNA, 487 bp, Glycine max
  Clone ID: PAT_MRT3847_139043C.1
gaacctttgggctgatttatgtgcttgtggtcgtgagaagatgatagaaggggatattgagctgtagaaaaagaaaaaagtgactacagcccggtcctggttccacttagcccagggccctggcctctcatttcactccctatgcactgaaattccaaacccatgactaggctcgagtaactcggccggcagaattcccggctccagcgagctaagccccacgctcgaaccagatgactaaaccttcatcgttcctgacttccccgtcgacgtaaacgtcgacgatctgggcgtcgggctaaaggagcacgcgtacacctgcgcatagtagtgaaacggcaggaaaagttcgataattgcctagggaccgaaaagggaacctagtcacaataagacatccaaagatgctaagaaagagcctcgccgtaacggaatagccgcctaggatttagaatcaggataggccaccttaaaaatttcccccccc

SEQ ID NO: 43240 - DNA, 705 bp, Glycine max
  unsure (1)..(705): unsure at all n locations
  Clone ID: PAT_MRT3847_139044C.1
ccacgcgtccgggcaaagttaaatgggctcttctggcaacagttaaaaaattgaccacacacaagacttatgagaaggtacagatcagcaccccacgcggaggccttacatcattgtagcagacaacatagctcttattatatctattagtgagtactacaacgaatcactccagataccatggaggggtgtatagatagcttgtgcaattgacatcttcttcactcttacaagcggcttaataaatgccactacaaatcaacaacccggtttagacatcataacagaatacataatagcttacatgtatacagatcgtactgtggataacatgtgcttgaaggtatactcgttacatngagcactggcatcaacgcacttaactctctttctgtcaagagcttctaaacatcgcaacacatatagtgaagattccaccaagaacaatggacatcgcacatgtggtgcgaacaatcttatcagcctatatatacacagtctcagtatggaggatgatgagaacaatccctcacctctgtgacactaccatgctggatcctgatagacgtctgacttgaccaagggacaatgtgttctatgaagcctcagatatatggnaatcttataggaccgcgcgtaactgtcagagacctcggagaatatgccaaagtgaactcgttctaacttggtggagctattgctccc

SEQ ID NO: 43241 - DNA, 255 bp, Glycine max
  Clone ID: PAT_MRT3847_139045C.1
ctataatcctgaaaatgcagttcgtagtatttttgttgcgcctttcagaggcggaatgcccattcgggtggttacatttccgaatagcattgtgcagatatgaaccaggcatgaatccaaggtttcatctattgagtaccactaccaatggtgattttgttcaaggagaagatctcggattggttaaagttaatgtagcatgtagctgcagttggcttgacatcatgttacactcgaactccattgtggcaatct

SEQ ID NO: 43242 - DNA, 261 bp, Glycine max
  Clone ID: PAT_MRT3847_139046C.1
gacatgtacaacttcttctctcctctcaaccctgtgagagcccatatggagattggcccagatggaacagtgacgggtgaagcagatgctgagcttgctacccagggagaagctgtggcggctatgtccaaagacagggccaatatgcagcacaggtatatagtacgtcttcttgcattcaaccacaggggccagcactggggcgtatagcagccaggtgatgcaaggcatgggggtgtctgctgcccaggccacttacag

SEQ ID NO: 43243 - DNA, 754 bp, Glycine max
  Clone ID: PAT_MRT3847_139047C.1
cccacgcgtccgaacacttagaaaaaaagttttcaaattacttgaagatgaataagtcatctaatttcttgaagaagatgaataagtttttaataaaatagtattattatctgtttattttcgtattacttattttcttctaaattcgctcttgcagtcttgtgtcgcgagtcgcaatcccattcgatcttgaagtctgcaaccgccggacaccgtcgatctacaaccgccggacgtcgacgtcgttgcggctctgtgttcgagcattcaatttcattggaagttcaaaaggacatgatttccatcaatacagcctccatattgggttgaaaattgagcaaattctgtttgagtgtacaaaaccagccttgttgggtttcagcattaaatacagcatctacattccttttatttcttctatcactcccaaattctggcatgggaaaagagaaactaagcttcaaagaagttcaccattctcatagtcccaaaactactctatggtggttctttcttgtagctacctgcataaaagttctccttttcccatcctatcgtagtacagattttgaagtgcaccgcaactggctggctttgactcactccctccctctttcccagtggtactttgatgagacaagtccatggactcttgattacccactcataggttatatagtatgaataataaatcacgtgatttcggtgattgtattgatgaattaccatccaattaataaagtttagcttttat

SEQ ID NO: 43244 - DNA, 476 bp, Glycine max
  Clone ID: PAT_MRT3847_139048C.1
agatcctataatgttttttattaaaactaaaaaaaatgaactcatgcatgctcaaagcctgggatacttagcttgacttacttttatacataagttatcatgctcttgaccaggcttcgtatacacctaacatagaaccacatgacacttatttttccccaaggtaagcgaagcatgcttactccacacatagtttcctttgattaatgaaccgaactattccaaattgcttgtaatataccttacaaaaaagagcctccacacacgggtacattttactctctacttaacagattgggagatcatctcgacgacctcccgggtcgaagaacctaccttagggtctccccgttccttgtccttgtactgaagcaggtcaaagtgcgccctaccagcctttattcgagccccaatttgagtgttaaaactccaataacgcttacgaaccatctcagcttgagaaccatactgaaata

SEQ ID NO: 43245 - DNA, 592 bp, Glycine max
  unsure (1)..(592): unsure at all n locations
  Clone ID: PAT_MRT3847_139049C.1
ggctcgaggtgacttgcagcaattcccaatggcttccgtttccaagctctcaacgccaaatccagttgcttccttatcagaagcgcttcgcccccgagattctcgcttcctcaccttcaaaccttcttccatcgcttttaatcacaaaactaacctatccgcttccctccgatccattcactcgctccctcttaaaacctcctttatgagaaagaagggcagagtccatggtatgataatctctgcagacctgttacagacctgcttcctcttatagcaagtggtgtcagaggcgtcactagcaaccctgcgatctttcagaaagctatctcatcatcgaatgcttacaatgatcagttcagggaacttgtgcaaacagggaaagacattgaaagtgcatattgggaacttgtagtgaaggatatccaagatgcttgcagactatttgaaccaatctatgatcaaacagatggtggtgatgggaatgtttctggtgaagtatctnctaggctcgctgatgacactgagggaaccatagaagctgcaaaatggcttcataaagtggtngatcgcccccatgtgatataagatt

SEQ ID NO: 43246 - DNA, 163 bp, Glycine max
  Clone ID: PAT_MRT3847_13904C.1
taagatcatccggatttacgacactggttgactctagtacgacgagcaccagcatatggttcacgaagcggtgtattaccaagccgaagctgaggagcacatgtcgacggtcgacctgaagaacgctttggagaaccatatgtacaacattatgaacaccatt

SEQ ID NO: 43247 - DNA, 1926 bp, Glycine max
  Clone ID: PAT_MRT3847_139050C.1
cctcctgcacccgcctcttatcggacccgaaactctatcatccgttcgtgacttacatggaaccacctacttggtgtcttgcaattcccaatggcctccattttcaagctctcaacgccatctccagctgcttccttatcagaagcgcttcgccccagagattctcgcttcctctccttcaatccttcttccaacgctattaattacaaaattaacctctccgcttccctccgatccattcactccctccctcttaaaacctccttgcggatcaaatgctcccaaacagatgggaatggaagtcctgcaaagaggacagtgcttcatgatctttatgagaaagaagggcagagtccatggtatgataatctctgcagacctgttacagaccttcttcctcttatagcaagtggtgtcagaggcgtcactagcaaccctgcgatttttcagaaagctatctcatcatcgaatgcttacaatgatcagttcagggaacttgtgcaagcagggaaagacattgaaagtgcatattgggaacttgtagtgaaggatatccaagatgcttgcaaattatttgaaccaatctatgatcaaacagatggtggtgatggctatgtttctgttgaagtatctcccaggctcgctgatgacactgagggaaccatagaagctgcaaaatggcttcataaagtggttgatcgccccaatgtgtatattaagattcctgctacagaggcatgtgtgccttcaattaaggaagttattgctaatgggataagtgtgaatgtgacgctgatattctctcttgcaagatatgaagctgtaatagatgcttacttggatggtcttgaggcatctgggttaaatgacctctctagagttacaagtgttgcctctttctttgtcagtagagtggacactctcattgacaaggcccttgagaaaattggcaccccagaggctcttaatctacgtgggaaggcagcagtagcccaagcagcattggcttaccagctctaccaaaggaaattttctggtccaaggtgggaagctctagttaaaaagggggccaagaagcaaaggctcctttgggcctcaaccagtgtaaagaaccctgcctattctgacaccttatatgttgctcctcttattggacccgacactgtatcaaccatgccagaccaagcccttcaagcatttattgatcatggtaccgtatccaggacaatagactcaaatgcatctgaagctgaaggaatatacaatgctctccagaaattgggtattgactggagctttgttggttcccagcttgaacttgaaggagtggactcgtttaagaagagctttgacagcctcctggattctctgcaagagaaggcaaactctcttaagttggtcagccattgaagtttgaacgtcatagttagtaatgcagtgctatgtatgaaggcatttatggattaataaaaggcagtggctgtgcattttgtgctgctgtaaatgtgctttatggagtcatttatttagacgatagtgatacaatataaatgggaaaaattgtccgcttcaagtaaagcgttttgttactttcccactattcaatggttgtgcgtttttattcgtgttgatgtcaattatgtttcaaagtcttacattttagttcgaatttttaattaaaattttgttgtaatcaataacacaactcatgcatgtttagctaataataaattgagggcagttcaccaagtcgcttcccttaggccagagacagcgaaaaccacacaaggtcgtaagggaaattgggatttgggaaagctatctcctttcagcaattgcttcctgcacctccagacttggttcttgcacccggatctagaatgtaatttacattccggattagtcattgctgaatgtaaaatttta

SEQ ID NO: 43248 - DNA, 217 bp, Glycine max
  Clone ID: PAT_MRT3847_139051C.1
actaagtgtttttttcttcactaagcccaagattcgcgcatgtgtttgtgccataggggcattgcatcctgcagaaaatggaagtgttgcgcccgcttcaaaaatatcattatactgcacttatctgtgctatagcgcactggctagagaaccaagagattatgagcgcaggggttttcacacacactcaaaaggtgtttccactggcacccttact

SEQ ID NO: 43249 - DNA, 747 bp, Glycine max
  unsure (1)..(747): unsure at all n locations
  Clone ID: PAT_MRT3847_139052C.1
agaagacgacagaagggaagaaaaagtaataaattaattataaagtagtaaaaaaaatacaaccgtataaaccgaaccaaacgcaccctacgcacctactccatcctccgcttcgtgacttgcagcaattcccaatggcttccgtttccaagctctcaacgccaaatccacttgcttccttatcagaagcgcttcgcccccgagattctcgcttcctcaccttcaaaccttcttccatcgcttttaatcacaaaactaacctatccgcttccctccgatccattcactcgctccctcttaaaacctccttacggatcaaatgctcccaaacagatgggaatggaagtcctgcaaagaggacagtgcttcatgatctttatgagaaagaagggcagagtccatggtatgataatctctgcagacctgttacagacctgcttcctcttatagcaagtggtgtcagaggcgtcactagcaaccctgcgatctttcagaaagctatctcatcatcgaatgcttacaatgatcagttcagggaacttgtgcaaacagggaaagacattgaaagtgcatattgggaacttgtagtgaaggatatccaagatgcttgcagactatttgaaccaatctatgatcaaacagatggtggtgatgggtatggttctggtgaagtatctcctaggctcgctgatgacactgagggaaccatagaagctgcaaaatggcttcataaagggggntgatcgc

SEQ ID NO: 43250 - DNA, 676 bp, Glycine max
  unsure (1)..(676): unsure at all n locations
  Clone ID: PAT_MRT3847_139053C.1
ttattttcaagctctcaacgccatctccagctgcttccttatcagaagcgcttcgccccagagattctcgcttcctctccttcaatccttcttccaacgctattaattacaaaattaacctctccgcttccctccgatccattcactccctccctcttaaaacctccttgcgcgatcgatcgccatcgtaactatcgaagtgtcttgttagggcgtgtttggtaggatgcgacccgagtataggaaagttggtagctgctacaagatcaaatgctcccaaacagatgggaatggaagtcctgcaaagaggacagtgcttcatgatctttatgagaaagaagggcagagtccatggtatgataatctctgcagacctgttacagaccttcttcctcttatagcaagtggtgtcagaggcgtcactagcaaccctgcgatttttcagaaagctatctcatcatcgaatgcttacaatgatcagttcagggaacttgtgcaagcagggaaagacattgaaagtgcatattgggaacttgtagtgaaggatatccaagatgcttgcaaattatttgaaccaatctatgatcaacagatggtggtgatggctatgtgtctggtgaagtatctcccaggctcgctgatgacactgagggaaccatagaagctgncaaatggc

SEQ ID NO: 43251 - DNA, 665 bp, Glycine max
  Clone ID: PAT_MRT3847_139054C.1
gctttttacattaccatctctttctcataatcaagatcaactgccacaaagaaacgtacatataaaacaagctagcaccctcttccactcattggtaaatggtggaactaagtgctgaaagccaagattataacatgaaggagatttagttgtcaggggttggaaagggcatccttgtgattcattggcttgaagactgtaatattactgtgaagttctttgacagagaccccttttgagtcatgaagcaaaaaacgccatcttcaccgaccactgcaagaagtgtcttgaagaagcaaggtcacaagtccctgcagagtcctcctccaccaccaccaccaccacgcctcagagcttcttctaaggctccaaagtcaccgccagaggttgtaaacagggaatccatttcatcaacgagagctgagtcagtgcctccagacttgaagaacgtttcaagggctaaaaggggtgtcgtggtgaacaagcctaagttgaatgaagaggttttggggtctcaaaaagctgaagagggtaagattgttattgttgctaggccacggcgaagggttggggattttggttcgaggaagagtgaagatgatgactctcatgcaaagaagaagaaggagttgttgcacgagaagcttgaggtgagtgagaatttg

SEQ ID NO: 43252 - DNA, 451 bp, Glycine max
  Clone ID: PAT_MRT3847_139055C.1
tttaatcaagaacatttacattatggcaacgttatcttaacatttcctttttttaaattaaacagttataattgtgataaaatattaaattaaacacacataacaaattgaggttatttaaccattagtatatatgctagacatatccagtgagaatgttgttagtaagaacaataaatctaaatcttataaccatacatacaaagtcaatatttttattttaaagaaaaagtgaatattttaatgtcacatgatcatttaaaaaataatttgcgtttttcaatcttttatcatttttaactcaagataccaacatgtcatccgaatgaaactaaattctaatccctaaaaatgtactactgaaactttttttgccctatatgcaattttcattagatatctgcaatttttaggttcactatctacaatacaattagaaaaattgagtagc

SEQ ID NO: 43253 - DNA, 1132 bp, Glycine max
  Clone ID: PAT_MRT3847_139056C.1
agtggacactctcattgacaaggcccttgagaaaattggcaccccagaggctcttaatctacgtgggaaggtaactgtttattgttttccaaactaatttctattcttggctttggatttattacactttcaaatgtcaaatatgctcttcggattgcatattgaattttacaggcagcagtagcccaagcagcattggcttaccagctctaccaaaggaaattttctggtccaaggtgggaagctctagttaaaaagggggccaagaagcaaaggctcctttgggcctcaaccagtgtaaagaaccctgcctattctgacaccttatatgttgctcctcttattggacccgacactgtatcaaccatgccagaccaagcccttcaagcatttattgatcatggtaccgtatccaggacaatagactcaaatgcatctgaagctgaaggaatatacaatgctctccagaaattgggtattgactggagctttgttggttcccagcttgaacttgaaggagtggactcgtttaagaagagctttgacagcctcctggattctctgcaagagaaggcaaactctcttaagttggtcagccactgaagtttgaacgtcatggttagtaatgcagtgctgtgtatgatggcatctatggattaataaaaggcagcggctgtgcattttgtgctgctgcaaatgtgcttcatggagtcatttatttagacgatagtgatacaatgtaaatgggaaaaattgtccgcttcaagtcaagcgttttgttttttccccactatacaatggttgtgcgtttatgtttaaaagtcttacattttagttcgaatttttaattaaaattttgttgtgatcaataacacaactcatgcatgtttaactaataataaattgagggcagttccccaagtcgcttcccttaggccacagacagcgaaaaccccccaaggtcgtaagggaaattgggatttgggaaagctatctcctttcagcaattgcttcctgcacctccagacttggttcttgcacccggatctagaatgtaatttacattccggattagtcattgctgaatgtaaaattttacattttggattacattctgaatgagggtttctgg

SEQ ID NO: 43254 - DNA, 400 bp, Glycine max
  Clone ID: PAT_MRT3847_139057C.1
attggatggtccaaaccatgatcttcctcgtgtcaatcttttgtctatgaaagtaaaagcatagctaaaatgttgagtacattaaaaaaaatatatagtcaactaaattaactaatattgagtttaaaactatctggaccttattttgaatacggcagatagagtagggcggttctttttttatgatttaaagtttgtttcaaactaagatggttacgtgaaactataaaatttatgaatgctttttcattaaaaacaaaatttaaattttgcaaattgatttctctattgctcatttcccgctattacgttgcgacgattgacgattctctatttttatttattcacttatttatttattattatggcaaacagccttggatttttatattgagcttac

SEQ ID NO: 43255 - DNA, 220 bp, Glycine max
  Clone ID: PAT_MRT3847_139058C.1
acgagaaaaacattatcaggctgacttcctataagaagattgtaattgtcccctattcccttgtgaagttattggttggtgcttaaaattagaccctgctcctgtttgtatgtaccaaatcccatacttacacaagtcttaatcattttaatatgttattttgattacgtattgtggcatacagacactttgggtgtgggcatgtatggttaatggttca

SEQ ID NO: 43256 - DNA, 484 bp, Glycine max
  Clone ID: PAT_MRT3847_139059C.1
tttttcctgaactttctttttgctgcaatgcttacatggtcattgcctcttcgtataccagcatactcaatgctgggattttctttactctattacattttagcgttaattgttgcaatgtctggatatagtgttgcatggggtggttcagctaaaatgtcaggcctattgtttgtgtttggaggggccacaagcttagtgctacttcttagcatcataatcatagttgtgctctatgctgcatggtgctcctctcctaatgaagttggaggagaactaacagagaaacactcctctgagtgtatcattaagttccaggacaactgtaatcacgcacttgaatgtaaggtagaatctggcaaaatattgttggtacttgtcaacgggggacatgaacataggattatgtttaataagcaaccgattatgaatgaaaatacttacggtgttctgcttgaatggtttttatacatttttacttaaa

SEQ ID NO: 43257 - DNA, 895 bp, Glycine max
  Clone ID: PAT_MRT3847_13905C.1
tatggtacaagtggtagaatgcacgagagccaaactaatcagtatgaatggtaaccctgtaaataagagctctcaaaatctgaattttcactttccttttggtagtctgcagctacatccacactttccttcatagtctttttccaccttgattttctgagccagtggtcaaccagcatcacactgagaccaatgaagattgtgcccagagagcccccacctactgctagtagcacaacggatagccattgcatctctggactatgtggcaagatcacccatgtgcctgcaacatagccagttgccataaatgccacagccacccacatgaccttgtgagtgattgtcaatagtcttatctgtggctttcttctgaatggaatgatactaacaagcacaatgactatggatagagaggtgaatagtgctatgttgttgcttattgcaaagaccttgaaggctgttgttttgcccaccattgacttgcctcccattggtccttcttggtacacaccaccagggggattaatgccagcagcaaaagtcacagtagcaatcaaaacagcaactattgtaatggtgttcctggcattcagtattgcctctttatgcatctcatagtgcttattcctccggctctgagtatagtaaagttgatttagattttcagcttttgttttattctgttgcttgtgtttccctaaattttcttggggagcagtaatatgatttataggttgtatcctcaattctctcactcacttgaggctgggaaggtgatctagagttggtgcttctgccaagttgtggtggacttgtacaatcataagcaaccatttcattttgatttggcaattccactggattagttgtatacctccatgacattgaaagg

SEQ ID NO: 43258 - DNA, 324 bp, Glycine max
  unsure (1)..(324): unsure at all n locations
  Clone ID: PAT_MRT3847_139060C.1
ttcttcttctgctcgctttcctnagggggggcttgggttctcggttcctttcccttccttcttctttcagttctctccctttttcttcgtgttacagggaccttccgtgggtcgggtgcacagccgcggtaagggtatatcctcttctgctttgccctacaaaaggacaccttctagctggctcaagatctcttctcatgatgtcgaagataatatctgcgagtttgcgaataaaggtttggccccgtttcatattggtgtcattcttcgagattctcactggtttgctcatggcaatcgcggttctggcggcaatattccttc

SEQ ID NO: 43259 - DNA, 178 bp, Glycine max
  unsure (1)..(178): unsure at all n locations
  Clone ID: PAT_MRT3847_139061C.1
gctgagaaaacaggtttaaatcacctctgaatttctgctatggcntcaaccagatcagtctttcttcttctntcattcaatngtgttctcantgctaaccttgtcantcgctcaatcncccggccaacgggtctaacgaaggtacaccattangggcgagtgaagntcccagtgtggg

SEQ ID NO: 43260 - DNA, 1323 bp, Glycine max
  Clone ID: PAT_MRT3847_139062C.1
atggttgaaactcagttttctgttaaatttaaaagcattagatcagtcaatggccctgaatttgccccgaacaatttctatggttccaaaggcattctccatcaaacttcttgtgtggagacaccccaacaaaatggggttgtagagagaaaacatcaacatcttcttgttgtggctagagctttactttttcatgacaatttacctattcttttttggacacaagctatctcacaggttgttcatataataaacaaattgccaacaaaatttctgaatcagaaatccccacataaagttctgttcaaatgcatccgatccatcactaccctaaaggtttttggttgtttatgttatgcctcaacactcaaggctaaccagaaaaagtttgatgctagagcaagaaagtgtgtttatttaggtgttagatcaagtgtcaaaggtcatttactttttgatctcaaaataagagaacttcttgtttctagggatgatcttactcctttacctcctaataaaaagccaattggctgcaagtgggttttcaaaatcaagttcaaagctgatggatccattgacaagcacaaggctagattagtagccaagggatttacccaaactgctggtttagactacattgaaacttttaatcctgttgtaaaaatgactatagtcagatttgtgttatcattggctgcttctcagggttggcatctccatcaacttgatgttaatactgcttttttgcatggtgatttaaatgagaaggtatatatgaagattccacctggcttgatagttaataatctagctctggtttgcaagttgcaaaggtctttgtatggcttaaaacaagccaacatacaatggaatgccaagcttacttctaccttacttgattatggattccaacaatccaaggcagattattctcttttcactaaaaggaggcttgtggggcgattattgtatcttactcacacaaggcccgatatttgctatgctattggaaaattgagccagtatttaaaatctccaacaaacattcacatgcaagttgcacaccatattttgaaatatctcaaaggcactgctggcagaggcctgtcatcctcgaaagctgaatatcgggctcttgctcaagcatcttgtgaagcacaatggttattgtttttactaaaggatcttcatattgagcaacctaaaccagttgttctctattgtgataatcaagctaccctgcacatagccgcaaatcctattttccatgaacgaaccaaacatattgaaatcgattgtcatgtggtaagagacaaggtttaa

SEQ ID NO: 43261 - DNA, 410 bp, Glycine max
  Clone ID: PAT_MRT3847_139063C.1
caaaaaaaggggggcggggcccccctttggaaaacatatccccccaacccttaggaattccacaattggaacccggacataatgggccaaaaaaattccccaaaactaatttttccaattttaactataaaaaaaagggaaaaagcctttcccggggtttttccaaaaaaattatccaagcccccctttcctaaaggcctacatattttggggataaaaattcagttccaatccttaagggaaaaccaaaaaaggaagcattggggacggggcccgccaaaaaaaaaggaaaaaaatcccccccataaggttactttggagggggttttttcctaaacggggccataaaaaaaaacaaaaggggggaagaccccctccaaaaggtaagggagccggttaagccccaaacc

SEQ ID NO: 43262 - DNA, 318 bp, Glycine max
  Clone ID: PAT_MRT3847_139064C.1
ttatgttctccttataactcctatatgacaccctaacttactgctatataaaaggtttactgactatcttaaaactaacccatacaaatgttaatcttaatcaacttcacttaattttgggatgcaatgcaaatatctactactagtcttgacatatttatatatcatgtaatagacactcagatttacacagctattgaatctttcttcttgctttcacttttcatggctctacttcatgcgtcatcatttctcctcaactgatgctaatgactgatgccaggctagtctttactgaatcataattgcataaagcaa

SEQ ID NO: 43263 - DNA, 137 bp, Glycine max
  Clone ID: PAT_MRT3847_139065C.1
tcggttagcgtgatatcgaattcctgcagcccctcgtatgttggtgtggaattgcgagcgggtagcacttgcacactggaaagagctgtgaccatgtttacactgaagctgtgatacgacttggtatagggtaagct

SEQ ID NO: 43264 - DNA, 157 bp, Glycine max
  Clone ID: PAT_MRT3847_139066C.1
gtggaattgctcgagagataactgtttatatgtatcaacaattaagagcgtgttggtataggatcatggctgtttgcaaataaatgttctaggatatttgtgaggtgagatggtgtatgtgtggcatatatgaattgatataatttgtttaatggct

SEQ ID NO: 43265 - DNA, 233 bp, Glycine max
  Clone ID: PAT_MRT3847_139067C.1
accgcccacgctttcgtactctatactcttacttttcttttctctgtctaaaggctcccctgggggcacattaaacaatggtgagtgctgtgtccgttcttggcaccattaagggtgtcactacaactatttatttcttttaggacgtaagttgttcgaccatcctatacttttttttttcctcctttttaaattttttttcttgtttttgatgtcctttataataatttttt

SEQ ID NO: 43266 - DNA, 323 bp, Glycine max
  Clone ID: PAT_MRT3847_139068C.1
aagactcgggggttatttttgattttgcaaattacacaatcacagccggacattacacgtgagctgggccttttccaacttaaaagcagaggataacattggcccatgacgcaacacatgccccacctaataatcataattttacatttttacatacaaaataccaagacttttaatttaaatttaaaaaaaaaagataaaccgatccttttgttgaaatgaaaccttgttttgattttttttgaacatgacggtttgattgaatcacttggacttgaagggaatggccctgattaccacctggtggtaaagtgctgcaagtg

SEQ ID NO: 43267 - DNA, 463 bp, Glycine max
  Clone ID: PAT_MRT3847_139069C.1
gacaaaaataaatagaatatactaagaataatgaaagaatgagaaaatagttgtctttataagtccaaaaaagtaaatacaagagaaatgggattgaattgtattttgtaaataattttcacaaatctttctttcaatcgtgttatgggcaagacattcagtttgccactttgcccagcttcaatcaagtcacttcatgcccaagcaccgttccaactttcgatcaaacatcaaaaatcacaaacttgttaacatctaaaccatcaatgagtacaaagtcagtatctgtccgttgaacgcctccttgcagtaaaatattgtacgatccaatgtcaaaatatgtctaccatcatgttcctctctgctttattctctcaatcttttgctatctcttcccttgccatgtattgatgcaatttcttccctttttccagaagaagtatagagttcattgcatttggag

SEQ ID NO: 43268 - DNA, 1551 bp, Glycine max
  Clone ID: PAT_MRT3847_13906C.1
tttttttaaaataggcggcggcgagacgacgacgggtcggcggccctctcccttgccgtgcccgtaactatattccctttgcccggcaaagcacggttaaatttaactacaaaatgtattgacaaaccaaaacaccagccaatccagttactaaacccttttgattgcgaaacgtggaaagtattaaggagatagaaagggaggaaatgaaacagaaaatggtcactagctatgtcagcaagaaaacctcatgtttatgcttgtcaattcagcaaaaatcagctccatgatttccaggctttgttaactttcttagcaagatatctggtagcatttaccccaccaacagccagaaagcctgatatggcctgccttgcacttgaaaccattactctttgcctcagaattctctgcaagcaattcgcagctgcttctcttgtgctaactttagtatcaggtatgactctaccagtttcccttatttcttctttcatgctgatctggcttctgattgatgaaggaagagcagaaactagagaacaagcaactgataagtcacaatcctgagagacatgtatttgattcttggcagttgatgaaagtctcaataacttcttagcctcatattcttcgagaaatggcttatacattaagtggaatagatcaaactgcccagtaacaatctttttcacatttccataccacatcctacttaagtagcaaccaaggaataccttgcttttatcctcagcaaataacatgcgtatatcacctgtgtatgaaagactacatactttggcatatagatctgcctctgtgaattctgatggaagcaggagaagagcagctgacactgcagctctcaagttaacagaattggtgctgctgacatctaaattatcgacaacaatatgaactggtttctgtaaccggccacacaagtagaatttctcccaatactgtacgtcttgaagtaagtcatgcattcgaacaaccccatacttgaacagctttccattccaagtaacaaaagggttgaaatgcactcccacaccaattctatcagcaactccagtaatcaggctctcgccaccaaggtgcaccatccatgacgcatagtgatgcttgttcaatttcagattcttgattgaagccagtgctagaagaataaaatgaaaaaaacgaaaatcatcagtggggcggtcaaataataataccagaatggagaaaaggaacaacaagcaaaaataaatcatgggtacgaaacaaaagaagaccttgtcgtggttattatccattatgactattccttaaaatcagcaaatgaatttttacattgggcattgaggttcacagtgttgtcatcaaaactttagtaatggtagcttgaaaaggaggaaagagtagagaaactcatggggagtttcattgaacagtttaagttcgttgagttagaaacagagcatatgagtaagctagtaagaaaaacgggtacgcatggcccaaaggttaatcttgcccgatctgtttagctcctccctccctcgtctc

SEQ ID NO: 43269 - DNA, 194 bp, Glycine max
  Clone ID: PAT_MRT3847_139070C.1
aaaaatctgatttgcctaccattacacccattgaatagtcccacccttgccgttcgattatgcatgcctcctcctaatatggtattttagattttctcatattcatattttcttccgagaaactttgagctcacggctcatgctctatcaaaacccctatcgacgatcatcttttttagtcacacccacaataa

SEQ ID NO: 43270 - DNA, 242 bp, Glycine max
  Clone ID: PAT_MRT3847_139071C.1
acatatactaattttccaattactagtaaaaaatccagaaagaaggcccggcatatcccagttcaatgcgatggcaaacataagcgtttttccacagacttgccccaccaatcccaagtatcctgcctgttattgtggcccaaaccgtttccggaccccaaggtttacttcaaacttgtctgttgcctgccttcagggatagcatcttacccgattggtggggagaggcgaattaggggtaa

SEQ ID NO: 43271 - DNA, 304 bp, Glycine max
  Clone ID: PAT_MRT3847_139072C.1
aattcggctcgagcgagtggggcgccatgaggagaagacatttgagttagagaggatgaggcctcagagtgagatggaaagagacgagggtgaaacacgacatcggggacgcatgaaagacactaccccattatacccttgcacccttctggaaggatccacattctgaatgagcctacacctttgatggagcatctacaggtgcctgttgcccgatgcgaggatgtgctgagggggccaaggctatggctctatcagctgatggcagactaaacgtgaggatttctaggtatggtcgaacatg

SEQ ID NO: 43272 - DNA, 333 bp, Glycine max
  Clone ID: PAT_MRT3847_139073C.1
ctcgagccgaatcggcctcgatttgtattctgccataagagaggaaaaaagttgactatgataaagggcgagagaaggctgacttggcgcctcaacaaaaccagctcctgaacttgcttgcatactctctctatgctttctatacaaagacctggaacttgatatatcatattttatcatatatagaataagtttaagccactacggtagcccacctgcgttgcatattcagattcctatcatcttgactctatgatgactagaccattaggacaagattacatatggcatggaagaaaatccagcactcgatagactaaaactatcatgact

SEQ ID NO: 43273 - DNA, 485 bp, Glycine max
  Clone ID: PAT_MRT3847_139074C.1
aaaatgtagatgaacttgcaatcaaacatagatttgagataatttgctgtgtatttaactatttatgtggcataaggctcctagtttgcagctctgaatcacatttgtgagttgaaagatagctatcatttggtcctttcttgttttagctgggtattggctgcttacgttacgggtgatgaattctcgtttaatgttgcgagtttatagtgtgaagctgtggttttgtaaaatgccaacgttgtgtatggtatgtttgatttcaggcattggcaacaccaagagaaatattactaaacaaggtcccctttccactacctgttcctgagatattaaatctggataagatccaggctttgactacagataccgttgtttcagaaaatggtaagtttctttatttgatcataaggtcatttttttttctcgagacattatagaactgtgtctcttatgtcccacattttttgtttgatgaaatttgc

SEQ ID NO: 43274 - DNA, 689 bp, Glycine max
  Clone ID: PAT_MRT3847_139075C.1
atgataaaatattaatttaatatgttggactaaaaaaataaattgtcaaaattcatagacaaaaaaagtatttttaaatttcaggacaaaatacccccaaattcagagctaaagcaataattaacgcttaaatcttttacaacattttgagtcagccaaaaaagaatctcaatgtgcaaaagagctagaaggtgtctcaattgcatgaggggttggagtggaaccttctgatctcgactcagtgggtgatctattttcagtgtttattactctaccaatttcttcaaccattctcaccacctcaccaatttgtggcctctgatctggtactctcacaacacatgccatcccaatttgtagcatctcaaccatttcctcttctatatttggataccttagtaaatccacatcaaacacctctgcagtccactcctctctgaccacagaattcacccacctaaccaagtggacaacttcatctcctcccttggcatgtaagggagacctccctgttagaagctcgagcagcagcaccccgaagctgtagacatcggacgccggaatggcttttcgagtgtcggttgcttccggtgcacggtatcctgttgccctcaatgctggattcatcaatgccgcaagaccgatgtcggatagacaaccgtaccctttggagttgaggaagatgtttg

SEQ ID NO: 43275 - DNA, 270 bp, Glycine max
  unsure (1)..(270): unsure at all n locations
  Clone ID: PAT_MRT3847_139076C.1
ggacattttaaattgatctatagccaancagcgnncgggcnctgtttcttttagacccacccttgctcttctcttcccttgcaacttcaactcaacaacccttcccttctcaaactcattcttgcctttctttttgctcatactgtgatatttattgctacttacttatgattcctatccaatcatccatggccgaggaaccccaaaaaccagcctccgatgaagaagtggcgcctgctcctgcggacacaccaccaactacccaatttg

SEQ ID NO: 43276 - DNA, 1877 bp, Glycine max
  Clone ID: PAT_MRT3847_139077C.1
ggctcgagtttgtttctactgctgatcctgagaaagaacctcctcttgtcactgcaaacaccatcttgtctattttagctgctgattacccagttgagaagctttcttgttatgtttctgatgatggaggtgcacttctaacttttgaggcaatggccgaagctgccagctttgctaacatgtgggttcccttctgtcgtaaacatgatatagagcccaggaatcctgaatcatacttcaacttaaaaagagacccttacaaaaacaaagtgaagcctgattttgtcaaggatcgtagacgggtaaagcgtgagtatgatgaattcaaggttaggatcaatagtctgcctgaatctatccgccgccggtcagatgcctatcatgcaagagaggaaatcaaggccatgaaagttcagagacaaaacagggaagatgatcctttagaaactgtgaagattccaaaagcaacatggatggctgatggaactcattggccaggaacttggttgagtcctacatctgagcattctaaggggctccatgccggcataattcacgtgatgttgaaacctccgagcgatgaacctcttttaggaagttctgatgatacaaggctcattgacctgactgatattgatatccgtcttccccttcttgtttatgtttctcgagagaagcgcccaggctatgatcacaacaaaaaagccggggccatgaatgcattggttcgagcctcagctataatgtctaatggcccttttatactcaatcttgactgtgatcactatatctacaactcaaaggcaatgagggaaggcatgtgctttatgatggatcgtggaggtgaccgcctttgttatgtccagttcccccagaggtttgaaggaattgatccctctgatagatatgctaaccataatactgttttctttgatgtcaatatgcgagcccttgatggactccaaggaccagtctatgtgggaactgggtgccttttcagacgggttgcactttatggttttgacccaccacgttctaaagagcaccacacaggttgctgtaattgttgctttggtcgtcagaagaagcatgcatcactggcaagcaccccagaagagaaccgttcactgaggatgggtgattctgatgatgaggaaatgaatctatcgttgtttcctaagaagtttggaaactctactttcctcattgactcaattccagtggcagagttccaaggtcgtccgctagctgatcaccctgctgtgaaaaatggacgtccacctggtgctctcaccataccccgcgatcttcttgatgcatcaactgtcgcagaagccatcagtgtcatctcctgttggtacgaggacaagactgagtggggaaatcgtgttggatggatctatggatctgtgacagaggatgtggtcactggatataggatgcacaataggggatggaaatcagtttactgcgtgaccaagcgtgatgccttccgtggaactgctcccatcaatctcactgacaggctgcatcaggtccttccctgagaagtttggaaactctactttccctactgactcaattctgcgctgcgggcttccccaagaatgacaattcttcaaagaattgcatacctaagtacgtccatctacccctctcaccatagccccctaacttcttactgcatcaaccgtgcactaactctcctctctcatctcctgttggtatgaggacaagactgagtggggaaatcgcgttggatggatctatggatctgtgacagaggatgtgctcactgggtaattaatgcatctggcattgagctggaagaatggggagaatgagcagtttggctgattggagggacagtgccatct

SEQ ID NO: 43277 - DNA, 251 bp, Glycine max
  Clone ID: PAT_MRT3847_139078C.1
gtagcatccgcctccgaagttttggtcaaaatcgatcctaacgccttggacattctctcatatcaccaccttcgtcgctcgtgccacggggggggacaagtgcatcctacggctatggtccttgattccctgttccacactccagtttgggtacggtcttgccggtattagtattctccgtcaggaacactctaccctctcacaacatcaatttccacggtgcctagccctgtaccaccaattgtttggcc

SEQ ID NO: 43278 - DNA, 700 bp, Glycine max
  Clone ID: PAT_MRT3847_139079C.1
gaacttataaggatttatcaaagagacttatgattttttttataattttttcttaaaatttatttcaatccatttcacagaaaagtttgttgcatgatctctttttagtttattttaaggcagtatttagaaaacttttataaaaagtatttagagttataaaaatgaattataatttctatttttctttcatctcaagttcaatttttcaatccaagtgaattgaacattgttttaggaagatatcaagatactaacaaatattttcaagatattaataaatcaactttttttttttttaactgaagtattattaacaaatgttactcggtatcacgtcttcaccaattgtggcataaatccatcaagtatatgatcccacaacggatttaagttttctgtattggaatggctatgaactaaacttgccagcaattggaaggtataaactatccctatattaaaaaagaaaaggcttgattgttttataaagccgattccattgtgtaggattgatttatttgtaacgaggtatcgacataattacttttattaggtcatatttttataactattattattttaaaacagggttatagttatattatggacgtaaaagcaaagagactttatttcaaaacctcatcacatgacattcattcgccgcattagtaaattgacggattgagcagtcccagct

SEQ ID NO: 43279 - DNA, 263 bp, Glycine max
  Clone ID: PAT_MRT3847_13907C.1
tttatgtgtccgcccacgcgtccgcccacgcggccgctcagtgttccggtaccttcgattttccttactcgcttgcaaattgcatatctcgctggctttctcagccaagcattgctcccttttgcgtttccagtggcccctgctgttaactgacctattttgcctcctgcgagtccctttgtgtacagattaaggctcggtggggttaggctaggatagggtctcggtgaggcgagagaaagagagcgagtatgaggttgagg

SEQ ID NO: 43280 - DNA, 319 bp, Glycine max
  Clone ID: PAT_MRT3847_139080C.1
tgattgatgttcatcccacgatgtgtcaatatcgggaaggatgcatgaagaacgggatgggcaaatgctgccctctgtattcgcatcctgaaagagagtatggatggagaattaactctaactctgaagccgtaataacataactgaagatgcctacaacatctgccgcgcgacctggtatgacgactgaaaaagtctcacactgagatgcacttactacttcgaataaaagaatgattcatgcaatatggacttattgactgcaactaagattgtgcatgatagttcacagtggcttttacaacctgcaattaatgtc

SEQ ID NO: 43281 - DNA, 308 bp, Glycine max
  Clone ID: PAT_MRT3847_139081C.1
aaaaaaaaataaaaaaaaaaaaaaaaacttacttaaactacttaataatgataaattgaaaatataattatatacaataaagatcttgcaaactatgaaaataaaccaatgggggcgcccgttctaaagaatccaaatttaataacccgtgattggaaaagcatactttttttataggtccacctaaatacatttcattggccggggtttaaaaacagaaggattggaaaaacctgtggggtaaccaaaataaatggcttgtgaaaaaatccccttttagaaagttgatgtaaaagcaaaaaggcccg

SEQ ID NO: 43282 - DNA, 252 bp, Glycine max
  unsure (1)..(252): unsure at all n locations
  Clone ID: PAT_MRT3847_139082C.1
cacgtatggcctcgtagtaggtgccgttttgggagggaacgttgatccactgcgttttgataaccgtgcaaaaacggcatgaaatttgaaatgaaacgagtggaatgcgagccgagcaatgtacatgtactcttcaatttcattttcaacctctgttctcataaaccctagaaaaattcaaactcttgggattccatcaacaacgatgagagangnatgcaaaaaatgcacctttgtgaaccccccttctca

SEQ ID NO: 43283 - DNA, 488 bp, Glycine max
  unsure (1)..(488): unsure at all n locations
  Clone ID: PAT_MRT3847_139083C.1
acctttgggctgatttatgtgcttgcatggtcgtgagagatgatagaagggggactagaacccctcgtagcccgacttagtcttttgagaaaccgagtttgatattatatgaaagatattagaccaccccccgcaatcctacacaatttcccgcccgcaagtcatcgtcccacgtcgccatcgcagacgcgctcccaaggagagaagagccctatcgcccaagcgggatggccactactaatacaacctccctccccggagcccgctcgtcgccgtcgtcgtcgttgctccacccggataagaaatanacagaaaccgatataaccggcgcccgcacacccccgacaggaggaagtggtaacaatacgacacactacgcgtcgcaaaccccctccaaaccaaactctaagccagagagtagnaccccgagcctcgattactacgcctacccgagatcgccgacggcgatagacgtaagcgccgaaaaa

SEQ ID NO: 43284 - DNA, 324 bp, Glycine max
  Clone ID: PAT_MRT3847_139084C.1
ttcgatctatagctaccaatgtaccagagtcctgtcaccaactatacaccacccaaaaagcaattctgggttgaaaacatcatcgttagccgctgtcgggacgagcataacactgatacaaacgtagataacaatttctagacattcgatcagaaccaatcaggtgataagcacggcaactgcgaagccacacgaatggtggttcgctatcacaaattgcgccgcccgttaggatctctgcaattcgcggtctagtaatcactgctattgatagatttgtaatagcaacgaatgtctgttccaggtggaggcacatacctttgc

SEQ ID NO: 43285 - DNA, 606 bp, Glycine max
  Clone ID: PAT_MRT3847_139085C.1
tgtttatgagtaaaagatgcagtccatgaatttgcaccccttgacgtccttctcaaaagcccccaggcccaggtttgtgccgaggacattgccatctgggtcaagaaatatatttcgcttcgaggtcatgaattctcttattgagcagtatttaagatgatggttcagtgagaaaatcttttcctcatctttgaaatcatctttaggtcattcttttacatgatttgttttggtggtttacaaggtcctgctgtccttcttgttgattggttccacgttccctccacctgtcagttcttgttgtaagatagagttgtttgagagcggattagttgagctagagagagattcattcacctccatgcacactgcatttggaagcccctgttccatttttttcttgtgtattttgatgtaatatttctcatgatatatttgttgatctattcttttagcattagggtcatcgatcatgcagtctccaatctattctgctctctgcaacttttggagtagtggagttcatagttaattaattttgtacaagagaccacttcgttgtgcttcgtatcattaagatttcagattaaataaacaatttcccat

SEQ ID NO: 43286 - DNA, 1812 bp, Glycine max
  Clone ID: PAT_MRT3847_139086C.1
gtttaggagtgggtgtgccttacggctcctggtggtaggtgagttgggacttgtggcggcgagattgctgctgctccaaacgttacaggagagaaagccttctttgccgtgaattcggatcgagatcaatgggttcagcggagaaagagccactgttaacagcggagggaactcgatcaaactcaaagcacgagtcctcctcccatgggcaacttgagagaattctctccgacgacaccctacccttcctcaaccgtgtgggacccgccacctggatcgagttgaagctcctcttcttcctcgccgcccctgccgtcatcgtctacctcatcaactacctcatgtccatgtccacccaaatcttctccggccacctcggcaacctcgaactcgccgccgcctccctcggcaacaccggcatccaaatgttcgcctacggcctcatgttgggtatggggagtgccgtggagacgctatgcggacaagcattcggagctcaaaagtacgggatgttaggagtctacatgcagcggtcaacgattcttctctcactagccggcgtagtgttgaccgtgatatacgtattcagcgaaccgatgctaatattcctcggggaatcaccgagaatcgcgtcggcggcagcactctttgtgtacgggttgatcccacagatattcgcatacgcggcgaacttcccgatccagaagtttctccaagcgcagagcatagtggcaccgagcgcgtacatatcagcggcgacgctggtggtccacctggggatgagttgggtggcggtgtacgagattgggttggggctgttgggggcgtcgctggtgctgagcctgtcgtggtggataatggtgattggacagtacgtgtacatagtgaagagcgagaggtgcaggcgcacgtggcaggggttcacgtgggaggcgtttagcggtttgtatgggttcttcaagctctccgctgcgtccgcggtcatgctgtgcctggagacatggtactttcagattctggttttgctcgcggggcttctccctaatcctgagttggctcttgattccctttctatctgcaccacaatttctggatgggtgttcatgatctctgttggattcaatgcagctgcaagcgtgagggtgagcaacgaactaggagcaagaagtccaaaatcagcatcgttttcggtggttgtggtgacagtgatttctttcataatatcagtaattgcagcacccacgcgtccgcccacgcgtccggtcattagctatgccttcacagggggtgaagaggttgctgctgcagtttcagatctttgtccactccttgccctttctcttgtcctcaatggcattcaacccgtcttatctggggtggctgttggatgtggatggcaagctttcgtagcttatgtaaacgtgggttgttattatggagttggcataccattgggcgcggttctcggcttttattttcaatttggtgccaagggaatatggctgggaatgctaggtggcaccgttatgcaaacaattattctactgtgggtcacatttagaacggattggactaaggaggtagaggaagcagccaagaggctgaccaaatgggaggacaagaaggaaccactactaaattgaagaacaacttgtttatgtaggagagcaagagagacataatattctctttattattattttttattgaaaccaatttataaggactaattctagagattcaacaaggtagtttaacacttcgttgttccattatgaggtagggaattaaaaattaaaactgccaaggatt

SEQ ID NO: 43287 - DNA, 133 bp, Glycine max
  Clone ID: PAT_MRT3847_139087C.1
tattaggagaagagaaagggagagctgttacgtgtgtcgagatgataagagagtcgctgcttatcaaagttgacgctagttgaggcagcagggtgccatatgtgcgcgacagtgcaatgagaggtgctggatg

SEQ ID NO: 43288 - DNA, 518 bp, Glycine max
  Clone ID: PAT_MRT3847_139088C.1
gtttcaagtaaaaattaagatctacccttcatacacaagattcagccaacgaagggtgcttttaattactctgacagattttattgcatgtcttccgaattcaattcaatcatttatcttggcatgcagtatatgcgtgtggaattaacttgtggtctattgttgagcgtggctcccatacatagaccatgcatactccccacaaaaatatgttgaaaagaactatggggatccatgccagtacctacctggtacctagttttcttcattatatagctattatgattggcgatgaatttttcaatatatttaattttgtatttatatatttttttctctatcaacacttgaaaaatatcaaatttactgggtattacaaaagtatttaccgtgtttaacttatattttcttgtttcttattatgtagggaatgaagtgagcactgatggaaaggttttaaatgaagagttagcaaaacctaatctacaaggacatgatgaagaagcaaagtttaaagg

SEQ ID NO: 43289 - DNA, 331 bp, Glycine max
  Clone ID: PAT_MRT3847_139089C.1
aagagtaaaagcagagattcataattgagattagccgaactttatccagaagcgtccaatttccaaacttttaaaaaaaaaaaaaagaaggctccatgggcttaacacacccatcaaaaggtcaaaaaacttgaacttggtgaaagggaagacttggccactttattttaaggatggtgggttaacacaaaacacctgaggggacgaaaaccattaccggccttatacagaaggttgtagggacacaaaaataggttataattatgccgaattaaggggtatttatgcttgaagcttggtctcccaacaccttacttggaagggcaggggt

SEQ ID NO: 43290 - DNA, 1114 bp, Glycine max
  unsure (1)..(1114): unsure at all n locations
  Clone ID: PAT_MRT3847_13908C.1
aattcggctcgagtacggctgcgagaagacgacagaagggtgtcccaatccaaatcctagctcgtacacatccccatactcggataaggcaggcacccctgcttcatacagaccagaaaagaaaactttatattatatcagaatttaaaagacattaacattttcataccacatcctacttaagtagcagccaaggaataccttgtttttatcctcagcanataacgtgcgtatgtcacctgtgtatgaaagactacatactttggcatatagatctacctgctaggatgtggttgaatcatttcaattgttccacctctcaaagtaaacaatttagtaagaaagaagtatacctctgtgaattctgatggaagcaggagaagagcagctgacactgcagctctcaagttaacagaattggtgctgctgacatctaaaattatcgacaacaatatgaactggtttctgtaaccggccacacaagtagaatttctcccaatactgtacgtcttgaagtaagtcatgcattcgaacaacccccatacttgaacagctgcataaatttgcttatagagacgaggaaccatgaaaaaagtaatctttccattccaagtaacaaaagggttgaaatgcactcccacaccaattctatcagcaactccagtaatcaggctctcgccaccaaggtgcaccatccatgacgcatagtgatgcttgttcaatttcagattctcagaatgccactgttttggatcagatacgccaagaatataatctgtcatgattgtcttgtcgtggttggatggatgaagagatgatccatagacgcatgcaaattcaacagggggaagaacctgaaggaaactgcgaaatgtggcattatccattatgactattacttcaaatccgcaattgaatttttacattgggcattgaggttcacagtgttgtcatcaaaactttagtaatggtagcttgaaaaggaggaaagagtagagaaactcatggggagtttcattgaacagtttaagttcgttgagttagaaacagagcatatgagtaagctagtaagaaaaacgggtacgcatggcccaaaggttaatcttgcccgatc

SEQ ID NO: 43291 - DNA, 441 bp, Glycine max
  Clone ID: PAT_MRT3847_139090C.1
gacccacgcgtccgcccacgcgtccggaacgacagccacgtggcggagatcgcgaactacgcggtgagcgagtacgacaagcgttctggggcaaagctgacgctggtcaaggtatcaaagggcgagactcaggtcgtggccggcaccaactaccgcctggtcctcaaggtcaagaatggatccaccacgaccagttaccaagccaccgtgctggagaagccttggctccatttcaggaatctcacttccttcaaaccccttcgttcttagatccatactttctctctctctctttctctgttatcaaccacacattctcatgtgtgtcttgtcctgcttttctcaataaaattggggttatgtgctaatcaagctagtattgtaatagttattgtatgtttgattatggattcttctattctcgctctcgggtttttctgg

SEQ ID NO: 43292 - DNA, 311 bp, Glycine max
  Clone ID: PAT_MRT3847_139091C.1
gttaaggagggctagtttgcccatgaaagctcgagaattggctttttaaaccaacatggaaaattgtagcatgtttttcattatcttgatcgcattggagatactctttgcatgcatctgaggttgtagattctacttatccgcatataatgtccaaagattgcaaccgttacattttagccgcacacattatccatgtagatattctttgcatagatattgagatttaaagaatagttaattttttcacttgattgatttattataaatgcaggtgaatattctgcttcaaggtagaatatctgggtgat

SEQ ID NO: 43293 - DNA, 474 bp, Glycine max
  Clone ID: PAT_MRT3847_139092C.1
ccccttacccgtggctgtgcttacttttgcgagggcataggaacactgccaaaattttggtgaatctcttcataggaccccacttgacgaccttcttatagggcggtgattgtcggccaacctcttaagagagtcttcaatgggtcttatgacggtggatcacccaccccatttgctcatcgacttgggtaagaggtgctcatgggcttctcagactccctctcgggcttgcacttcaaccacccttctggggtgcatcttggaggacatgcccaactatgagcctactctccaatgtgacgagtctctggagcccacttgtcaaatctccccttctaggttcgctgagggatgcgtcagagagatgactaactggacaggcttgggagaaggagctttgagctcctcttgttgacgggcatcactggacaaaggctgggccaccggagatcctgagtgcctggttccctaaga

SEQ ID NO: 43294 - DNA, 3160 bp, Glycine max
  Clone ID: PAT_MRT3847_139093C.1
ggctcgaggaatgctgattctccaaaggcacctggctgccaggatcttggcaatatgggaaatacaaattcgtctggtcagaagcctgctctgcatggcgacatctcagagtctaagaaattgacaagtgacttgagagcaccttctgcaagtgctgttggagttgcacattcaaatgaaaagcttagaactgtgagttattctacgaagaaccaaaacggatttactctcccaaggatcttagatgaaagctcaggcagagaaggcaacaactgtgataacaataaggttaaaagggctagtaagggtgtcaaatctatcagtgttgaagtttctgggaaaggaaatgattttattaaagaagatgagccaattagtttattgcctcaaaagaggataaatgaagcttcttttactaaattaaaatcgagaaagaagacttgtgtcccgtcagcaaatggtaaatctcaaggattaaaagtgacatctcaggttgatgagccacctgaagtcgatgactatttttctataggcaaagatggtataaataactcaaacacttgcttagttttgaaaccttcaggctctacctccaactcactggcatttgatgagcttttttcaagaaatgcaaacccagaatctgttcagtgtgataatgtctgtcagaattcaccaaaaacggctgttcagagcttaagtgaatctaaaattaatggcaagcctgatatcacagattctggaatgcaacaagttgatggggatgaagcagagcaacataatgtcactagaaatctagattgttcttctctgggaaacaaaaagtcatgtaatgtggaatctgctggttgtactaaattggatttaatcactgaagaaagtaataaactggttagaaactcaccccgaaagaagtcggttgccaagagaagtttgggttctaaacctaaattaggtgccactgctaaacagaaaaaatcactttccctgactaaaacttccctgcaaggtgaaggtgtaacttgttccagtggaagcaaagagattgcaacttgtgatgcgaagatgcatcagggatgtcccaaaatctttgatgttaataaaacaacagagcaagaaattgttggtaaaaatgcagaagatgctggtgacagaactgagtttttggacgatgaaaccgaggctccagatgacaaatgtgaatatgagttaggaatggcccttgatgaagacttggttcatctttcaaaaaagccatatacagcaaaagaagagaagtcagaagcaatctgccctgcaacaaaatgtgaagaggcaatgcctcctaagaaaggcacaaataaaactgaaaaacagaaaacatcttcactgccagtaaagcatcaagcaagaaaaggttctgcgggtaaagtcaaggccacagttagtaaatatgctgaagatgatggtgacagaactgagcttgtgaacgatgaaattgaggccccagatgacaaatgtgaatacgagttacgaatggcactcaatgaagaatctcatctttccaaaaagtcagatacagcaacagaagagaagtcggaagtaatttgccctgcaacaaaatgtgaagagacaatgcctcctaagaaaggcacaaaaaaaactgaaaaacagaagccatcttcactggtagtaaagaatcaagcaagaaaatgtcctgctggtaatgccaaggcaacagttgccaaggaattatcgaaatctaatatggcagtatcaggggagaagattcctaatgagactgggcatgagccagagatagaaaccatggaagaaatgtcccttcctgatgataaaagtgacgagtcagctgttcaaagaaataagtcagagaatttttctgaagagaaggagaataagccaattgatggagagcagggcagaagcaatggtaatccaactattaaatctagtgtaaggccagcaaagatcaagtctaagaaatcggggctcaatccatctataacagaatctaacacgagagtaaaaactgaagccgcatgttttatattaagtgggcatcgtctacagagaaaagagtttcaacaagtaatcaagcgtttaaaaggaagggtttgccgggattctcaccagtggtcatatcaggcaacacacttcatagctccagaccccatacgcaggacagagaaattttttgctgctgctgcatcaggaaggtggattcttaaaactgatttcctaactgccagtagccaggcaggaaaattgttggcagaggagccttatgagtggcaccagaatggtctcagtgaggatggcacaatcaatatggaggctccgagaaagtggcggttgttgaaagaaagaacaggtcatggagccttctatggaatgcgtattgttgtgtacggcgattgcattgctccacctttggatactctgaaacgtgtcatcaaagctggagatggaacaatattagcaacttctcctccttatacccgcttccttggtaccggaatcgactatgctgtagttagccctggcatgccacgtgttgacacgtgggtccaagagttcttaaaacatgagataccttgtgttgtagcggactacttggttgagtatgtttgcaagcccgggttctcccttgagagacatgtattatatggcagtcatgcttgggcagagaaatcatttgataaacttaaaagcaaggcagaagagattgttgaagaactcgttgctcctgaagattcccgtgatgatgatataatttgcaaagtatgtggatcccgggatagaggagatgtaatgctgatttgtggtgatgaaagtggttccgtcgggtgtggaatcggtacccatatcgattgctgcgatcctccactaacagctgtccctgaggaggattggttttgcccaaagtgcagtagcacccgaaactgctcaaacaaacccagtaaaaggaaaaagactgtcttatcttcatccaagtgtacgtaatatcatattccctcccccttttgagtcagtcatcgtttcatttagggaacatacctgaattgtgccaacattatccctggtccctagattaaagttgtaataataataataataattttgtacaatccttagtaattaacaaaataatgctgatttc

SEQ ID NO: 43295 - DNA, 511 bp, Glycine max
  Clone ID: PAT_MRT3847_139094C.1
tatacacctatggtgcacaaggcgcacaaagtcggaaggttttaaatagggggtcggggaacccggctcaccgccacggacatagctgaagtgtgaacagaatgcctatgtctataagcggaggaggtggggccaaggatgctccagtcatgaatctgccatctgctgccctttgaatgtgcctatattatgatggagatcactttttggaaggaactgagacgactgatgcctacattaaaagtgcaggatatgactgcatagcagatgtatattagggtgatgacaccatcaatcttgaggctatatccgacaagatgatgcactcagcagagactcaggaaaaagttggctggaatttgagacacgaggaatttatcacacatggcacagcacaggtgcgacctggaccagctctgtgctgtggtgcatgcacatcatagactgctaggagacatgaaagcacagtgtatactataccaggagacatcgagattggaggataggtgac

SEQ ID NO: 43296 - DNA, 563 bp, Glycine max
  Clone ID: PAT_MRT3847_139095C.1
tccacgcgtgcagacacgcctgacggggagggttcactcacatttacgcggcttggagaataggctcactgatacggagtcgggataagactgctaccggatccagactcgggacaagactagagaaggcggccgaacggaagttggtgtaccagaccactaaaaagagaggagggtgtctagatgcaatgttactggcacgaggatgcaagggattacacacttgataccggctgattacaagaagtctatattggctcgtaaccaaaggaccgactgccgaacctactggaggtgcccaattaagaggagctgctagagataggattattcccgctttgctggttgaagagcaaaacattgcgaaaaaggccttgaaaatccatgaggcaaatgaatagcaagcgtgaaagagctctgctgctgagcgattcatgagtgcaaaaaatgtgttatcgctaaaattggcgctataaattgtcggttgtgaatggcgcgaactatgaatgtgaaacttaatcttaaatgtattttatgatttctgtgctctttgagcgcttatt

SEQ ID NO: 43297 - DNA, 1155 bp, Glycine max
  Clone ID: PAT_MRT3847_139096C.1
cccagtccgaaccctctctccctctccctctcttcctctccctctcttccaaccattccgaatgcgaacaagttgttgttgttgaacggtatggtatatagtgtgtaggctgggggtccttttgctgtttttttgaacgtcctgaattgcatgctgggagtcacaccggggcccgttacttatgccttggctggcccaattcctgttaagataagtgtctactggtcaatgaacatgaatccctataacctgggattgtctggccctgggagtccatcctactatagttcttatgcggcaaatggtcatttgccgagaatggagattgatagtggctgagtgggaatatccttcgacaatttaccacttgtggaagagcctgctacaacagattctccacctagaagagatggagtcacgaacatgcagaccatccctgaagaatgcagtccaaagcttcatgagtctaatcgtcgtagccaggtcatatggcaagacaacatagcttctgataagattgctgtcgaaaaaatactggatccaggagtagcagctaggacttatagcaagacaattttctaagatgatattaagatttttgagaccctactgtacaaatttggtaaagttgtgaatagaagcaatggtgtttcaagataacttatttatctgcttacatacagaaaatataaattagatatttaattaacgaggaaaacttcgggtaaaaggtgtgtaatatgacagagtgcatacagaagaggcgagaaatgtccgaaattgccatgcagccatgtctatcatggtgaatgcatcaccaagtggcttagcattaacaagaaatgtcctgtttgcaacactgaggtttttggcgaggaatcaacgcattagcatcaaggtggcaaaagaggatcctttttgctctattaatttttgcttctcatccaactcaccctctccctcccattctcttttttaagttttaattttttacacgtaggtaggtgtagtatgaagaactatggcagctctcacacaatatatgttttgtttactagaaacaacctattggagtcgcatcttcttgtggttaatgtgtgattttgtgtgtattcatgcaatatatattctcttagcttttgtgccaaaaaaaaa

SEQ ID NO: 43298 - DNA, 183 bp, Glycine max
  Clone ID: PAT_MRT3847_139097C.1
ctcataacaaggcttccggatccgatcagcataatagcgatcggcttgtagccgccaaggagcagttgcaagagaactgtacggaagaagctttccgtcactgaggaaaaacgccagcacccgcacatactcatgatcatgcgcttcttcaaacagctgggtgtcaaagacgaggatttgcat

SEQ ID NO: 43299 - DNA, 383 bp, Glycine max
  Clone ID: PAT_MRT3847_139098C.1
gcggaagacgacaacaggggagggggacaattaaaggaaatgtggggaaaactccccagaagcggctgcggtcaccgtcttggttacttgacgatgtcgttgctctccgatcttatcaaccttaacctctccgacatcaccgattaagtgatcgccgagtacatatgggtaggtggatctggcatggatatgaggagcaaagcaaggacactctcaggaccacatgaagaccctccgaagctttccaagaggaactatgatggatgcagcactggtcaagctcctgggcaatagagcgaatcgaacttatatccacaagcaattgtcaaggaggcatccatgaggggtagacaatatcctggctatgtgtgatgcttacactt

SEQ ID NO: 43300 - DNA, 567 bp, Glycine max
  Clone ID: PAT_MRT3847_139099C.1
agagagagaagaaaaataaaaaataaaaataaaaagacactcagaaacacatcaatggcgcttcgaaaactgttatcgaagcgtttcttcgaccgtatcaaaacgaggtcgtttgaacgcagcgtggtgtcatctccaactatgcaacaacaagtcatcacgcctccgagcatgccgggagcgagttcggcagatggaggatttctcttgcggtttttcctcctccggcgagcggtgtaccactccggtccggcacggttcccagatttcctgtctctccccgtcggagagaagctccgggagaaactcaaaggcatcaacaacatagccggcataggagactgttgcgttgctctcgctccggcacctatggccagcgatgcggtgtttggaagtggaatgtctgtcagccatgcgaggaagattttgagggtgccacaaatggagaaggtgaaagcaaagctgagaaacgtttcagagagttcggttccgtattcagagtgtctgcgaatctgcgttgagacgtgtgagaatcatgaacaaagggctgagtacgcgaagatcttg

SEQ ID NO: 43301 - DNA, 652 bp, Glycine max
  Clone ID: PAT_MRT3847_13909C.1
ccacgcgtccgcaatactaaagttttgatgacaacactgtgaacctcaatgcccaatgtaaaaattcacttgctgatttcaagcaatagtcataatggataatgcaacatttcgaagttttcttcaggttcttccccctgttgaatttgcatgcgtctatggatcatctcttcatccatccaaccacgacaagacaaccatgacagattatattcttggcgtgtctgatccaaagcagtggcattctgagaatctgaaattgaacaagcatcactatgcgtcatggatggtgcaccttggtggcgagagcctgattactggagttgctgatagaattggtgtgggagtgcatttcaacccttttgttacttggaatggaaaggtattgatagcttataactcactcggtggtgtggtgtgtgaataagacccttaatttagttttagcaaactcaccttccagaacattttatttagaatggtgggatattttttagtttccataacatgtttttttgctgatttgttaaatcaagattatatttttcatggttcctcgtctcttaagcaaatttatgcagctgttcaagtatggggttatacaaatgcatgacttacttcaagatgttcagtattgggagaaattctactt

SEQ ID NO: 43302 - DNA, 1260 bp, Glycine max
  Clone ID: PAT_MRT3847_1390C.1
tttttatgtcctttgagtgtgagaaagaatatcatgttggatgtttgaaggatcataacatggagaacctagaggaattgcctgtaggaaattggttctgtagtggaaattgcagtcaaattcatactgctctgatggatctggtggcttctaaggagaaggatgtcccagatccccttctaaatttgattaaaaagaagcatgaagagaaaagtttagacattggagctggtcttgatgttaaatggagggttataaactggaagttagattccgattctgttgaaactaggaaattgctttcaaaagctgttgccattttccatgagaggtttgatcctatagttgattcaacatctggccgtgatttcattccaaccatgttgtttggaaggaacattcgtggtcaggattttagtggaatatactgtgcagttcttactgtcaatggggatatcgtgtctgctggagtatttcgtgtctttgggtcagaaatagctgagcttccattggttgcgacaactgctgatcatcaaggacagggttattttcagtgcctgttttcttgtattgagacgctacttggatctttaaatgtgaaaaaccttgtcctaccagctgccgatgaagctgagtcaatatggactggtaaatttgggtttacaaagctaccccaagatgagataaacaaatataagaaattttatcgcatgatgatatttcaagggacctcagtgttacagaagcctgttcctgaaacactctgagctactttctagctggagtttgtgtaaagtttttttgtaggccccttatgcaatagactattttcttggttgttttgatgggttgcagagcacaggcggtttagtattgtacagggatctggcttttattggtgtacagaaaaactgacaaccacctctagctgttatttgttttcttagcaaaggaatgaaaagggggatagagttgaaaatagagcaaaagctaggacaaggggattttgtgaaactagccaaaattttggttaatgttataattcatttattattggccaaattgtttttaacctcctggttatagtgtagcgattttccttttccttgcattatttatcgtttaatcaatgtatttctcggtatcattagtgcaaattctcgcggttgctttacgacttactcaagtgagagataaaaaaaaaaaaaaaaaaaaaaaaaaaaaaaaaaaaaaaaaaaaaaaaaaaaaaaaaaaaaaaaa

SEQ ID NO: 43303 - DNA, 377 bp, Glycine max
  Clone ID: PAT_MRT3847_139100C.1
aatacaggtaagacctgaaacacaacatgcacaaatcaactcaatataccaaaccaagcaaaatgaccgatcacaaaactgaataagccactgtaacaatacggatatctttcggagactcccgaatacctatacacatgcgtggaccaaaggcgtaaacgggcttacactggactgacctaccgaaaatgcccgggatacacgaagtgaaacgcactatgctcagcatatgtttaaaccttactgtagcaccagggagtttaaaccaccaaacctaccatctggctgacccggatcttacacagcggatcccactatgcgggagtcaacagcctaagacaccggcaccttgacaaattgtcgaagcgcaaccagat

SEQ ID NO: 43304 - DNA, 245 bp, Glycine max
  Clone ID: PAT_MRT3847_139101C.1
ccaatgggactgggttatttgaaacatcatatagattttttgaagcaaagattcaatacaatttctttgttttcaatcatcccgaaagagaaaaaacaaagcctggatcagcctttaatttaataattaataaggaagcttatttcaggacccccttccttatacaaaagtttatgattccaactgatgaaaaagctcctttcctgacccccagggacattccctggaactctttttcctttcct

SEQ ID NO: 43305 - DNA, 915 bp, Glycine max
  unsure (1)..(915): unsure at all n locations
  Clone ID: PAT_MRT3847_139102C.1
gaatcccgctcgagctaaatagagtggtaaactctaaactcagaatagcatcagagtttctctgagatttgctttaattcaggtttgaaaacaaactattacgcagaaaaagaaaaactcatatgggaatgactcttattgagttttttgtttcttctctttgatacattcacgatgttgaggaatactatctgatttgcttcaattgttattggtgagcattgaccctcttctcaaaatcttctctttatttctttctttccttcccgagaacttgagttcctagaaaaaaaaacaaatattgagagagaaagagagtgatggcaccaaatactgagaagtctagtaacaacgacttcaccttgttgcaagttcatgattcggattctcccatgtttccagagaagcagaaagccacaagccgcaagcagtttacttggtttcttctccttaaactccacagagttctgacatgtttgtcatggttgaccaattgtctcaaagccacttttgctttggtcaagaagcgcgtttcattggctgacatgagcgatgagggccctaagagtagaggaaagttgtacaggttcatcaaaatctttcttgctctctcaattggaggcttggccatagagatcattgctcatttcaacaaatggaacttgcacaacatgattcagccttgggaggttcagggtctgctgcaatggtgctatgtggcttggctctccttcagggaagactacgttgctccattagtcttgatggtttcaaagttctgcattgtcctcttcttgattcagtccttggggatcgccttgntctctgccttggatgcttctggatcaagtacaagaagttgaagccaacctttgaggcagatgcatgtgatgntgaggacccttcaacttccca

SEQ ID NO: 43306 - DNA, 441 bp, Glycine max
  Clone ID: PAT_MRT3847_139103C.1
ctgtgatgacatcaacacagcagcactaagcttgggaggtattaacaacaacaaggggaggttgctaattgagttgttgtgtgtaaatgctatttacgcgagaagcttgcaaaagcgcggacaaaacagttatggcgatgaggctgacaccaaaacggttagtttccgatggagcaactgacactaccggaggcaaaatgagcctctgaaccatcttttaaaggataacgctgtgcccacttctgaggcagaagcgcctgttcctgcaccagcggagcaacccgcggcggaacaaccggtgccagcgccggcggccgagcccgcgaaacagcaagcgtccggtttccgactaaagcgcaaccaaaacagctatggccatgaagccaagctcttggtgtggtgttcccaaagaggcgcatcatctggcggagaggctgccgc

SEQ ID NO: 43307 - DNA, 609 bp, Glycine max
  Clone ID: PAT_MRT3847_139104C.1
cgtccggaattccccggtcgacccacgcgtccggcattttccactttttctttttacttacctcttatcctaagtctccttctttcccattttctttctcatactaaaacctttttcattttggccaatttttctctgccatttttcatttccccttttttttttgttttggttctgttctgaaaagggtttgtttctcttttcagaatttcgtcggattatttggggaagtttctatctttgtcttgttctgttctgtagtgtgttttcagtttttaagttttgagcttcactaacttcagcatactcctttgagtaaatgagtaacatgaagttggagttgcatgttggaatttttgtcacctgcatggtgattctctctgggactttctgtgttggagatactgacatggttgatgttgcagcaataaatagtctttatgtttctctggggtcaccaccacttcaagggtggaaacccgtgggaggagatccatgtttggaactgtggcaaggtgtggcttgtgtcttctccaacataactgcaatacaccttggaggcatgaatttgggtggacagctgggcagcaatttgaatttcccatcagt

SEQ ID NO: 43308 - DNA, 980 bp, Glycine max
  Clone ID: PAT_MRT3847_139105C.1
ctcgagccgaatgggaactgtttataatttcattttgactctctctctctctctgattgcttccttttcccttttattttgctctcttctctgcacaacaattccttctcattccagatattccaaccatcgaccgatctcaattctcaaccttaacctctcagaatgtcttacgcttatctcttcaaatacatcatcatcggtgacaccggagttgggaagtcttgtcttctacttcaattcacagacaagcgctttcagcccgtccatgacttgaccatcggtgttgaatttggtgccaggatgatcacaattgataacaagccaatcaagttgcaaatatgggatacggctggtcaagaatcattcagatctattacaaggtcttattatagaggggctgcaggtgcactgcttgtttatgatataaccaggagggagacatttaatcacttggctagctggttggaagatgcaagacagcatgcaaatgcaaatatgactattatgctgattggcaacaagtgtgatcttgctcatagaagggccgtaagcacggaggaaggcgagcaatttgcaaaggagcatgggttgatctttatggaggcctctgcaaaaactgctcatgttggcattcataaaaacagttgtcagctggaggttgctgcagttgaagagaacctatcagaacctatctgcatcaatgtagtcctttatgtcttctctgctcttattttgggtttggatatgaagatatatatgttctacgtccattcataaaatcagataattgtataatgttttctttttaatcttgactttgtttctttgaaaaaaaaaaaaaaaaaaaaaaaaagaaaaaaaaaaaaaaaaaaaaaaaaaaatggaagaaaaattacaaataatagtaaaaacagggggggccccctttagaggacccaagttaccttccccgtgcttccaaggtaatagcttttttt

SEQ ID NO: 43309 - DNA, 280 bp, Glycine max
  Clone ID: PAT_MRT3847_139106C.1
gtagataactagaaacagtgtgatgtaaatggaaggtccttgttttcttcgttgcgtcaattttggtagcatggcaatgccatgcgtacgatatgttccctctccgaatgaacactggctatggtgccccgactcccggagggaaaatgcccaagttgaaggttggctgtggaagaccacacaatttttggctttgaaaccattcctgaaaagggcgttgaaccaccaaaggattacatccatggcgaccattttaaatcagattccaaaacagttaacc

SEQ ID NO: 43310 - DNA, 549 bp, Glycine max
  Clone ID: PAT_MRT3847_139107C.1
catatacccctaaggcgtatattgcttccgcaatatggacattaacacttgtcttctctgcagaaaatatggctaaacctgaagtattcttctacatgaccatatttgtcttatctgctagacgtatcttgatggagctctatgtcgatataactcccctcaccgacgataacgtccgagtgctttgcaccgatgataaggtcgtagggcaggaacgaagagttgctcgagtacaggcttcgatcttccacctgtgttggatcccgagcttgatgtgtaatggcggtgactacaccgtcggagatggatccggcgacgagcagatttatgaggacaggtttgtcttctataacttcgtgaagaaaactccggtgcctatgtactcatccatgttgaacgacgtgcaacggaaccaacggatctctgagagttcctttgcaaggtagaagactgagagattggatggatgaaatgtagcgtgcgagaaggtaatcgaaagattgaacgctgctgatgatttcctgaaggaggtatacatttccagcttat

SEQ ID NO: 43311 - DNA, 364 bp, Glycine max
  Clone ID: PAT_MRT3847_139108C.1
atcaaattactgaattaaagtttatgtttttttcaataattgtattaaactgagtgcactttaaagaaggaatccaagcataattttcaacataaatggttaaaggacaaaattggttccaatttacctgaacaaaattaattgcccttgggttgagataaataataatccattttccggggtgggtggtaaaggcctcgtgtatttgacacatgacgggaacacacagatgtaaaaaaaccccagagaattgaagggaaattacagtcgccggtgtgacttgcctcatatctaggaaacctcccttattcccttggcctgttctttcttttttttttcccttttcaaacgacccatttccccc

SEQ ID NO: 43312 - DNA, 260 bp, Glycine max
  Clone ID: PAT_MRT3847_139109C.1
caaaaagggggcttaagcgtagggggcacaaataaacattgcaatcccaaattcaacaaaattttgtacacaaactaatcccaattcccaattgttgagtcaaaatacactcaacacaatcagttttttgtcttcatagggatgcaataaacttggtgatgagatccacctttttagcattataaccaggcccttccatttggaaagggcccaccccatcgaataaaggggtttctacacctcctgctgaaaaattaaaa

SEQ ID NO: 43313 - DNA, 330 bp, Glycine max
  Clone ID: PAT_MRT3847_13910C.1
cccactcgtaccactatctgtctaacattaattatcaacagcgccacgtgagcagccggacggcaaaacctgaggccctgctcgggttatacacagggagcgccttcctcttcgcacgcatgattgccggattccgccaaagcctatttctatacaactgtgccgaccactgaactgacgaccacggagacagcgactccgacgccacccagtgcgcgtactcgcgcgcggtgctaatgctcgacatggtacggaacctcatcttagtggatgccaccagcggcgtcctgctatacacgcttctagagcggacagcgacgcccctaaggc

SEQ ID NO: 43314 - DNA, 1375 bp, Glycine max
  Clone ID: PAT_MRT3847_139110C.1
aaatatttatatgtacgtatatacatacatacacacagagacatggagaacaataatcatcatgccatggctgcaggtgctagtagtgattcaaacactagtgatcacaccaccccaatatcttcttcttgtgttaatgataacaacaacaataagttatacaaaggggtgagaaagcgaaagtgggggaaatgggtttctgaaatcaggcttcccaatagccgtgaacgaatatggctagggtcttatgactctcctgaaaaggcagcacgagccttcgatgctgccctttactgtctacgtggccgccatgccaatttcaatttccccaacacaccttgcaacatggacactgctaccaatgctcctcctaaccaatctcttaccccaccagagattcaagaggttgctgctaagttcgcaaatcaggtgtccccgctactacaaaaacctcaagaacaacctcaacctcaacgtagtagtgatggtggtggcggtggtgctaattcttcatcgtttggatcaaagttgttatgtaaatcagacagcatagcagagagtagtactactagtactactactaattgtacccccaccaccactgcctcgtcatgttctgctactatgtacgaatgtgatggaacggagcaagtggaccgtggggacatgatggattggacattcttgaacgtctttgatttctccaatgaggtggtgcttcctgctgttggatccgactataatgatctctataattctgagctacacaagatgcactcagattcaggtgagttattgtattctactccttttgagggttacgaacaattaattgaagctgatcatgatgatgatgatcctttttctcaccaatcattcctttggaattggaacttttgatcatcatatcatcactcgctactgcatgtgctgctagaatatgatgactactagttaaaattacttgccccagcctaaatatataataaagcatccttgatcttttgcatatatgatatgtatatgggggtggctccaagtatataacaataacaagggcaagacaagacacaggctatgtcagaccatatatatattccttaccataattaagtatatgcctagctatatggctagctagtgacctcggtttttctagtgctatctattccatagattagcacaggctaccaactatatagtatcgatcgatagatgttgtcttactatatgtttccccttggcaataaaatatttgtactttataggttgttttatgtatactggttcaagtatatatttatacctaagtatatatatattgatctgtgacatgtatcccttctcctttccgtatttctctgtaaaattaaat

SEQ ID NO: 43315 - DNA, 575 bp, Glycine max
  Clone ID: PAT_MRT3847_139111C.1
aagcaaacagaagcattgtaagataccacaacaatgaatgttcaacatgcactatcctgaataagtagaaatgaaattctcagtagcagcttgtgcaaagaaataaaaaaggactaatgtgcaagcctcccacctagtgaggtctagggagggtagatgtacggtcttacttctccaacttatgcaagaaaattattcctaaaaataagagcaatgctactaacataattaatggagggttacaacacgttattttgtatccttaaaaccaaagaaattattgggacgcccttagataaaatactagatttatatatacactgacatagatattacaaatcaatcataatttgcttcaagtttattacatagaacaaactactaatagtcatatttcaaaccaattaacacgtaaacctttgaaccaaaacctgacagaacaaccacaaatttgagattctaaatgatgtatgtcaaatggaccaccagtaatttggtttctgaataggaattaaatgaattatgctgcatttaagatgtagatgtgccatcaaactacaaccccagttcggctg

SEQ ID NO: 43316 - DNA, 266 bp, Glycine max
  Clone ID: PAT_MRT3847_139112C.1
cggctcgaggttactggacacttgatgcaattgattatagaattgctaggttgttggataacgccacttcgggtaaagtaccgtacaaattatcaggaataactttaaatccagggagagcttacagatacgggaaatcaatgctattaatgaattatagcggggagatacaatttctcaagtgggatgaggatgaccggcaatgggataaacgctggtcaaggcctgctgacaagtgcgacatatataactgttgcgggagcttc

SEQ ID NO: 43317 - DNA, 757 bp, Glycine max
  Clone ID: PAT_MRT3847_139113C.1
gacctagcgtccgggctttttgagggaacccagaagtgtatgcccctgttatgcgcttccagttccatgattgctttgtcaacgtacgtactagtaatttgattttatttagtatctttaatttaattttacttttactcttttgtgaaggggtgtgatggttctatgttgcttgatgatacaccaacgatgctgggggagaaattggcccattacttataaattcgctgagatcgtatgaagttgtcgatcaagtgaaggaagcgctcccccccgactgccccggagtggtttcctgtgctgacatcataattatggcatctagagatactgtctctctggttccttccttccttcaatttcttttcttctcaccctaaattgcactctctctatctccaccactaaataatttctaaattagctattttaatttaatcatacttagaaaatacatgacaactttatcatacattttaagtacaatattaagtaaatttacactgttataaaggttaataaatttgtcttacaaacgcgtaagtagaagaaagtactgctataaaaaaaaccttttatattattaatatattttaattaaattatttgtttaaacttaataatactgtgcaacatatataaaaataaaataatttttttatatgaagcttggaatgcaaaaggacagtagcaataggctagtcaccccaactattttgacacccctagactaccactcagcacctcgaataacatt

SEQ ID NO: 43318 - DNA, 195 bp, Glycine max
  Clone ID: PAT_MRT3847_139114C.1
tttgatggtattgatggaatgatcgatatgcacatcgaatacagttttttttgatataaacttgagaggttgggatggatttaaaggtcctgttaatgtgggtcctggatgtgtcttcaaataggacagctttaatattggtttatgaaaccctccttcttaaaacccccaaaccaccaaaaaaggcccgggggt

SEQ ID NO: 43319 - DNA, 571 bp, Glycine max
  Clone ID: PAT_MRT3847_139115C.1
ggcgggccgcgttgccgttgttcgtcctgtcttcaacgtctcaaactgagatcaacctgccattcatcactgctgatgcatctggtgcaaagcatctggacataacattgagggaggagaggtttgaggctttgcttaatcactttttctagtgaacgaatgcaccagaactgagattattgatctatgctaggatctccatgaagtacgttgatgaggttcttctggttggaaggatgactcgagttcctaaagtccaagaggtggtttcagagatctttggaaagtctcctagcagaggagtaatgcctggcgtctgaacatcacattgactagatctaagtttgaggctttggtaaaccacttgattgaaaggacaaaggcaccgggtaagagctggttgaaagatgctaacatatctatcaaggaaggtggtgaggtttttcttggtgggagaaagacccgtggggctaaaatcccccccggggtttaggcctcttgggaagagtccttagcaaggattaaatcccggggggcaagcgccttggagaccctcttaaaggggggttcc

SEQ ID NO: 43320 - DNA, 362 bp, Glycine max
  unsure (1)..(362): unsure at all n locations
  Clone ID: PAT_MRT3847_139116C.1
tcggacgcgtgggatatatttgaaatgataaaataagatgaaagaaattaatcttaattatacagtgatttgtgattacagttgtttcacttaattctaatgttgagaataaatgatttcaagttaattatatatttgggttggtaaagataagattttttttatttagtaatttttgaattaaataaatattaacttttaactcctaaattctgtactaaatgagaaattatattttgacatgattaaaacccaactttaaaatttcaggnggtccaaaaataataattctttttattgataanatgttaattttattagaatattagtgaaaaaaaagaaaaagtttgatttacaatctc

SEQ ID NO: 43321 - DNA, 219 bp, Glycine max
  Clone ID: PAT_MRT3847_139117C.1
cttcgtcgtttgcgttaaggaatctctcaactctgctcaaaagctgcttcttgcgtttttgatcagcgatcatgtggtcctttttttttgttgttctgtcccacttttttctcaaaccactctggtgttttgtcgttatagaaaacaaaccacctttctcctttttttcgggggggatccgcccacacccaaaattaataatatagaaactctctattt

SEQ ID NO: 43322 - DNA, 246 bp, Glycine max
  Clone ID: PAT_MRT3847_139118C.1
aattccgctgcgagagctcgagaaaggacagaaacagactcaatatctagaaagcatttctttagtacccacatcgagaaacttttgcaaaatttttggatccatccgtggaccctaaacctccaatccaaccaccttaaccttacactcacatatacacatatcttaacgcctatcaaccctcctatttcttcaattttcattctcaaatatctcaataactttcataaatacccaccaacttct

SEQ ID NO: 43323 - DNA, 256 bp, Glycine max
  Clone ID: PAT_MRT3847_139119C.1
cagacgcagcggacgagctcacattcggctgcctatctgctgctggatccaacggtatgtctagctgcgaaactaactgtcagataccagaccacatgagatcgctcagcgcaactctacacgagctcaaaattggcacagtcaagtctggtgctcgtgtcaaggcggcggaggactaccttttggcaaatccgcattaatactgatcgaattcgatcatcagtattcagtgatctgcaaagactcttgtcttata

SEQ ID NO: 43324 - DNA, 163 bp, Glycine max
  Clone ID: PAT_MRT3847_13911C.1
agacaacgaacaagaagtagatgacgtacaattctctgatgacaaacacttttccctacatggaaagataacgcattatgaaaatctctactgccgtctctctagttgttgtgttcgtcctcatgattccatggctgaagaatcatgcaaggggcacccatga

SEQ ID NO: 43325 - DNA, 430 bp, Glycine max
  Clone ID: PAT_MRT3847_139120C.1
cctcgtgccgaattcggcacgaggcggcacgaggcctcctctcaagcggatagtttggtgaagatcaaccatgctgaaaggagcaggtaacagagccttagtgaaaagatcagctgcttgatctttagaagaaaatatgaggcaactgcatgaggccggaatagcacctctcctgctcaatgtgacagctagttgtgaataacacccgtattcagattcagcattactagtgaagttacttaattttttgtgtaaattatagtagttgtgagattggtaaatcttagaaaaaaatttacagcttaatagaattgtatggtagcttggttggttatgcaattagggcatgttaagctacctcttatttttgagaagtaatcgtttttttatcagtagccatctcaaaaaagtgacaaaaactgattgttta

SEQ ID NO: 43326 - DNA, 159 bp, Glycine max
  unsure (1)..(159): unsure at all n locations
  Clone ID: PAT_MRT3847_139121C.1
cttncatntncanactnaaacctttcntnatccttanatctcgnctctaccaaaannatgccgtttagctctgnagantaacggangagttacgatcggacggtcctccttcgttactgcntcgcgntntgcgatcgtnattttccggaggatnaattc

SEQ ID NO: 43327 - DNA, 278 bp, Glycine max
  Clone ID: PAT_MRT3847_139122C.1
caaaacctctctcaagatggccacattcacgcccttagctgtgcttcgcacaccgttcagacactgcgctacgttgctcctatgcttgcttcgttctatctgtctatcgcttcccgttctgctgcattcaacgatcagggccctggtgtttgctggcccctgccccctcatcaccccaactgtgagagaggatatggcaaaggaatacgagcaagctattgaagaactccagaaattgttgagggagaagagtgaactcaaagccacagctgctgaga

SEQ ID NO: 43328 - DNA, 423 bp, Glycine max
  Clone ID: PAT_MRT3847_139123C.1
cactatgacttaacctacacacgaacgtgagacataggatcctgaatagcggccgaccaaaaattaagtatttatcatgttattaaaaaataaatgaagttaacattcagcataactataacaatattacaaaattaaaggtttatataatgtcaacaaaaggaagaaagacctgcttaaataaagcatatcttttaaaatatatcgttccgagaattatctggcatcataaaaatactctcagcttgacaagagaccatttttttgtaaaagaaaataacaaaaataaacttgcgggcactacaagataaatacatcgatcctaggaaaaaaattaaagccttaaacatgaccccacaaatacaccccggaaaaaaaaaagcaacccccccggggccccaaaaaggaccctccacccaagaa

SEQ ID NO: 43329 - DNA, 419 bp, Glycine max
  Clone ID: PAT_MRT3847_139124C.1
aggttttcgaaattgtatctcgaaattttgaaagcattgaggaaaatgaaaagataaggtagtagtttttgtaattattattgactaaaaatgaaatattaagccaaccactcatgtttcatgtgtgcagaaattgaaatgaatctacatgtgaaaaattagttgttgagtgtttgggtctgacaacttgggagtatcttgtcccatgttttatgatgcatttatcattcagtgttgtactacttgtaattcacatccttgattctatttcatcctaaaactttggtttttaactctggaatgatgttgtgtgatccatcccgtgatccatgtagccgatctcatttagtgagataagcctttattgttgttgttgatgatcctatttcatcagacagccattgatttatgaatttatc

SEQ ID NO: 43330 - DNA, 265 bp, Glycine max
  unsure (1)..(265): unsure at all n locations
  Clone ID: PAT_MRT3847_139125C.1
gcgatcggaatccagaccgggggaagagacacacaggcgcgggaaaaggaacaagacgacaacgcccccacacagggaggcagagaaagggcaaaagacgaaagacgcccacgacgaaaaaaagacagacacacgcaagacgcgccgcacaaagagacaccccaaggaggagaacaccgcggaccgaaggaagcaaccaaaagcgagcgaggcgcagnaaaaagaaaagggacaagcccagcggacaagacggaaacaacccaga

SEQ ID NO: 43331 - DNA, 1543 bp, Glycine max
  Clone ID: PAT_MRT3847_139126C.1
ggctgctctggggggagctggttttggctggcgcgctcaggtcactctccccctgcccgccgccgcgtttctgagcacgctggttccctctggtcgtcacttcgggcagctcttccatgctctcccggtgctgcttgttgcgctcttcagcccgggcatcccgccgttggccgggatcccctatcccttcctctgccccctttctgactccatgcttcctgctgactatgccgtctccaagggtgtttcagcacatgtctcggtggacatcaggtatgttgccaatgtctttgatgccaaccatgatactctagtgtgggcactgcagaagaatggtttcggaaacatgcctataattgtgggagaagttgggtggcctacagatggagacagaaacgcaaaccttcaatacgcgcaacgcttcaaccaaggcttcatgtcgcgctacattgccggaaaagggacaccaatgaggcctggtcctatggatgcttacttgtttagtctcatagatgaagatttcaaaagcattcagccgggtaattttgaaagacattgggggttgttttactatgatggacaacccaagtacatgcttaacataggatcaagagccaatggcttagtagctgctactggggtggcatatctacccaaaaagtggtgcattttgaaaacctcagcaaacctcaatagtgatcaagtggcaccaagtgtgtcttatgcttgtcaaaatgcagattgcacaagtcttggatatcaaacttcatgtggtggtttagatgctcgtggtaatctttcttatgcattcaatagttacttccaagtgaatgaccagattgacagtgcatgcaaattccccggtctttctgttgtcactgacaaagatccttcaactggagattgcaagttcaaaatcatgattcagacagattctgctggtctacatgggaatgggagaatttggtctctcagaatagtactctttgtacttttgtttttcactcttatgtgacctttaaagattttagatttatttttggagaatgtcaacagtgcctgatttttcatattcatcatgtgggttagagctaatatatgtaaagcttgttgaagatcacagaaacttctttgcagtgttcaatagttgacaatattggcttttaagtgacttttggtcaagtgaatgaccagattgacagtgcatgcaaattccctggcctttctgttgtcactgacaaagatccttcaactggagattgcaagttcaaaatcatgattcagacagattctgctggtctacatgggaatgggagaatttggtctctcagaatagtactctttgtacttttgtttttcactcttatgtgacatttaaagattttagattttagatttatttttggagagtgtcaacaagtgcctcatttttcatattcatcatgtgggtcggagctaatatttgtaaagcttgttgaagatcacagaaacttctttgctgtgatcaatagttgacaatatttgctttaaaagacctttggtt

SEQ ID NO: 43332 - DNA, 320 bp, Glycine max
  Clone ID: PAT_MRT3847_139127C.1
gccggggcaacccatgtgggcaatgtttttttttattcccaaaaaatttcttccaaaccaaattttattcagtttggtggaaaaaaaaactttttctttttggtgtccccttccccggtaaaaccaacctgggaaaagggaatttaaagttttgaacaacgaccccctgcccttaaaaactcagcccaattttcgggggcggtaggctagcacctttgggaccaaaaaaaggttttttggcaaaatttgggttcaaaaagaagtacccctttttttatttttttttccaagattctcccccgaataggggcctgggtttt

SEQ ID NO: 43333 - DNA, 528 bp, Glycine max
  Clone ID: PAT_MRT3847_139128C.1
ttaattacatgtataaccaccaactaacttgtggggcagcccaagtgtcttgctagttaaacctaaatgtactttacatttatgtcaatctctaaaaaaatgcatatagtgccaaattacataatccttgtcacagcataaatcaacaattaaaaaaatgttacattgattagcaccttgtaacgtccatctcaaacacaccaatagggtcacaaaaccaaatcattcattctcgattttctaatctctcttcccatatattccaatgaaatagataaaaacaataaccccattggtaagattgcttatattttttattttaccttcccagcacatgtttgaaattagcaaaaaggttgtgacttaattatgtcataagggtcatccaaagctagttgagatattgtccgattttgatttagcaatctgaagttgttgtacaacctgggcttaggatttctaatgataacccatctccttactggaaagctcactgctggtcgttaaattcttggcttgacattattg

SEQ ID NO: 43334 - DNA, 249 bp, Glycine max
  Clone ID: PAT_MRT3847_139129C.1
gggattattattaaactcatatacagacaaaaaatttcaacaaaaaaaaaataccatattccaaccgctttgccatctatgaacacattatcatacccgatcaaattcaatgcagaaattccatattaagatgcgggggcgacggaaatttgatttgccatcgcagcaggaggccggttgtattatttatcctcccatggtgtgtagatcgtggcatgatcttgaacgggagattcaggaccctgtaac

SEQ ID NO: 43335 - DNA, 181 bp, Glycine max
  Clone ID: PAT_MRT3847_13912C.1
cttaaactacaaattagggattaataattcatattaatctaatacattccgatcgatttatcaaatagatatctatatgcttaacccaaaaataatcttattgtaaactttaccaaagaaactaataataatccttaggactttcatatctctaaattaaggtctaattctacattaaaag

SEQ ID NO: 43336 - DNA, 402 bp, Glycine max
  Clone ID: PAT_MRT3847_139130C.1
cccgctcctacaacagcaccgaaagggctacacaacggtaccgctgccatactactacagaagggtacggccgcgaggatacaacctaacgttaccgttgctacaacatcacagctcggtatggctgccatataactacatatcggtaccgctgctataagacgatcgaatggtacagctgccatgaacattacataactgttatcgctgcgaaactactcacacttgcgactccagacctcccacctaaccacgctttccccgcatcgcccttcctgcctcttgagcggcttgatgcttatatgccatgccacctgtatcagaacatctaccttctgtcacctaatctctattcactggctgtcgtttaacattgccatcactgtaacaaccgtgcctttc

SEQ ID NO: 43337 - DNA, 627 bp, Glycine max
  Clone ID: PAT_MRT3847_139131C.1
atcgaaacctgcatggttacaaaattaaattttccaccttctactgcactccgagtaacaactcgcactatttatgttgcggtgacaatgttaattggcatatgtgttccgttctttggctctcttcttggatttcttggaggctttgcgtttgccccgacatcatattttttgccctgtatcatatggcttaagcttaaaaagcccaagaaatttggcttgtcttggacaattaactggatctgcattattcttggggtagtgttgatgatattatctccaattggtgctctaaggaatatcatactatcggccaagaactacaagttcttctcgtagactattgatgcaatcattgatttcccaactgttttaaaagttagatgggtgaaactaaataacaagaaagcatttacatacatgctttatgcatagaatatagataatagatagcttcataggatttgtagaagtgatagacacacaactagccttgcacaaaattgaagcaactatcttgctcactatgtagaatgtagatcattattggagacacggttgaacgagtataccggttgtaaccgtaatgaagtagtgaatatagtattgcttttatgattttgtagt

SEQ ID NO: 43338 - DNA, 616 bp, Glycine max
  Clone ID: PAT_MRT3847_139132C.1
ccacgcgtccgcggcctgctttgctcaagccagttctgatgatgcttgttggacttccatccaaattttacagggtgcattacctatgggttttgattgcactgggggacgatatttgattaggcagagtgaaatcttagaatgatttcagcagggatgctctgcctgcaaccataaatgaaatagcagcttcaattttctttggcaagggtcccatggaggcacttaaattcttcgatgtattgcaaccctttttgatggaaagcttatttgcggaagggtttagtgttagcctggaagagttttcaatatccagggcaatcaaaaggataataagaagaagcattggaaaggcttcttctctgctgtatcagctgaggtccttatacaatgagctggtggcgcagcaactggagaagcacattcaagatgttgaacttcctatcattaattttgctctaaagtcgactaaattaggagatttaattgattcgaagagtaaatctactattgataaggttgttcagcaggttgggttcttagggcagcaactttttgataggggaagattctactcaaagggattggtagatgatgtggcatcacattttcatgc

SEQ ID NO: 43339 - DNA, 521 bp, Glycine max
  Clone ID: PAT_MRT3847_139133C.1
gaaaatgtaaattatattaaatcgaaaatgatccaacaataaacaggacatatccgcagctagaaaaaaataaaagtctccttaatacaaaaaagcctaaatcaagatgctaaaacaaatacaccaagtacgtttgtctatatatacaagaagcatgtttactcccttaatcgtccgcggacgcgtgggccgctagagacctcagaatatatcctggtattgcagcctaccctcctcctcctccacaagacaacaacaacaacaacaacaacctcgacgaaatcgaaacagctaacaacatcaacaagcgtctcaagccatctccagttgaatcagcagactccgcgtctgagcccacgcgcaaatagctgctcgtggcttcgtaggaagccggcgtgcgtctggtccacactctcctggcgtgcgcggaggccgtccagcaggagaatctgaagctggccgacgcgctcgtcaagcacgtgggcatactcgcgggttctcaagccggcaccatgaggaag

SEQ ID NO: 43340 - DNA, 321 bp, Glycine max
  Clone ID: PAT_MRT3847_139134C.1
cgacttggtaaaatgcctaactcattcaatatcatagtaataatttaggaacatcactttgggtgtgcatcactatgcatttacgtaattcagattatgggtaacaggctgcctactgagcacggttggtgaggaaaaaggcttgtgacggaaacgtggggcaacaattgccacccttgaatttatcattacctacgatctcccagcagcggctatatgaaaactttggagacccttgaggcttttactctgataacttgcaatgggggaagtccggcttttagcttaacagctcagttcaaaaccctcggggccttatct

SEQ ID NO: 43341 - DNA, 379 bp, Glycine max
  Clone ID: PAT_MRT3847_139135C.1
cttttttttttttttttttttttttttttttttttttttttttttttttttttttttttttttttttttttttttttttttaaaaaaccaagctagagggggactttaatgaaaaactttcgaaggggtgccccatgaagggttttacccttttgtccccccaaagaaatggctttttcaattttttccccctcaacctatttttttgggccctaaattggaccagtccttgctggtttaaaggaaaaaattctaaaaaggccggggtttattaggtgggtaaaaaaaaatttaccttcagccccccagggttcaaccctgccttggaaaaaaaccaatcaatgttgggtcctcccaagggggatgggttttaatcccc

SEQ ID NO: 43342 - DNA, 316 bp, Glycine max
  unsure (1)..(316): unsure at all n locations
  Clone ID: PAT_MRT3847_139136C.1
cctgcacccggaataacancgagacggaccgcatatgagcctctccaaacaggacttattgctattgggtcggggatccccataggacgtggccaacgagaattaattattggagacagacaaacgggtaaaacagcagtatccacagatactattttcaatcaacagggacaaaacgtaatttgtgcttatgtagctattgggcaaaaagcatcttttgtggctcaagtggtgaataccctacaagaaaaaggggcaataggaataaactatttgggttagctgaaaacagcggtttcttcagcttcattacaat

SEQ ID NO: 43343 - DNA, 883 bp, Glycine max
  Clone ID: PAT_MRT3847_139137C.1
cttggctgcggctggaagagacgtggttgctaacatatgggatatccgtgctagtaggcagatgcataaactttcaggacatacacactcgagccgaatcggctcgagggttggtgacactgtgattactggtagtgatgattggacggcaagaatatggtctgtttcccgaggaacaatggatgctgtcttagcttgccatgctgggccaatattatgtgttgagtattcttctttagacagaggaataattacagggtccactgatggcctgctacgtttttgggaaaatgatgatggaggtatacgctgtgcaaaaaatgtaacaattcacaatgctgccatattatctatcaatgctggggagcactggttaggcattggagcagctgataattctttgtcgctctttcaccggccccaagaaagacttggtggtttttctggcactgggtccaagatggctggttggcagctttacagaacaccacagaaaacagttgctatggtaaggtgtgttgcttcagacttggaaaggaaaaggatatgcagcggtggtcgcaacgggcttataaggctgtgggatgcaactattaatatttgagttcaatcgttaaatgcattttcacgtttgtaaattgtaacaattttaaaggtgaaagacaaggtacttaatgaagaggaggggttatctccattattttttgtttattttccttatagtatataaaaatgtgcaaagatatgtctgatgagtccaacttgcgaacacttgtaattttgtggttagaggtttctgtattctgaatgtacatactgctacgaagaacaaattttattagtgtggatagattaagttataatgtctaccattgaagtctcc

SEQ ID NO: 43344 - DNA, 274 bp, Glycine max
  unsure (1)..(274): unsure at all n locations
  Clone ID: PAT_MRT3847_139138C.1
tttttnnttttttttttnccgaaaataaaataaaaaatatttcccattattggttgtggttcatanatgacagaagagaataacttaaaaaagaaaaatgtcccactaaatggaaaaacaccacaaatgaaagtgcaaaccgctccccctttcatgaaagaaactttaatctacacttatccacaatcttggaaacataattgaaaaggtcaaaaaaaactttctaatacaaaaccaaaagcattttccattatttaactttccatattaaacc

SEQ ID NO: 43345 - DNA, 547 bp, Glycine max
  Clone ID: PAT_MRT3847_139139C.1
cgcccttggttggggtgtttttttttttttattttttttttttttttttttttttttttgaggagaggtggattttattatctgcctcacaatctgggtgcaaaccataacattgccttcctcgctgaaaatcccaaaggcattttaaaactgcccttgcaggggggaagttggggcccatttgtaatatacgacaatgttggggacatttttaaccgcaacctggcgcaccaacgcattgtgaaaaaaaaaaagaaaaagcaaatcccccaaacgaaaaaggacctttactgcgtgctaccatgtttaaacctcccccaaactcattgtaagcgccctggtcctataacaaggtgcaactggctctatgatgcccgcgcccctatcccagattagggtattcctttacagcctcacctggggcatggttaggcaagctccaaaaaataaacccaagctgcaaaagccctctcaccctttaggggaattcaccccctggagttggccctttttataccaaggggggtggggaggggggaaacaaaac

SEQ ID NO: 43346 - DNA, 391 bp, Glycine max
  Clone ID: PAT_MRT3847_13913C.1
cttgtttgaggcatttgttcactttaatattttgccatgtcttttcttgtcacattagccggctatttgacaattgccatttttctccagaaactctttcgctctctgtacaatgtggttttcccctatttgttcgctgaccctcagaatatcaaggtgctcgagggtgccgagtgggcagtggccaccggctgcactgacggcattggcaaggcgtacgcgctcgagttggccaagaaaaacttcaacgtggtgctcatctcacgctccatggacaaactgaacgcagtggcggaggaaatcaaacagaaatatgccaatgtggaagtgaagtgcatctcatttgacttcaccaacgcatatctgatggactacgagcagacaattttct

SEQ ID NO: 43347 - DNA, 277 bp, Glycine max
  unsure (1)..(277): unsure at all n locations
  Clone ID: PAT_MRT3847_139140C.1
gnnggtgncggtgcattggaccncgangcgnggtggggtggcagttgaagaggatgagaggagaagttttntggaggtggaagaggttggtttgatgggtttgaaggagaaaagaaatgggttgtttgggccagaagatttttatgcancgtgatatagtgtgggccaaagctgggagaaaggaacctttttggcnagccattggtatngntcctatgactcangcncccgagttagntcgcggncttgtatagccgatgcagcttgtgtaatgttt

SEQ ID NO: 43348 - DNA, 454 bp, Glycine max
  Clone ID: PAT_MRT3847_139141C.1
ctcgagccgaatcggctcgagctactactaactcttgtttatcttagtgtgtcatcacactgtggacgggtgtgtgtcaaaacaaaccaacgattttgaaggtttgagacagcaacatgatgatgttgcggttagtctatgctcttatcttggggtttgtggctttgaattgcttgcaagtgtttgaagaatccaatgctcaacgcataccgcgagatgaagttcaagtttcgttcttggtcacgttgatgcagaacagaatctccagatttcacaatattaagaaattttcctgcaccactctcatgatcaatatgttaaaattgtaattgttgaaatattgaattagtgctatactagaagttgggcattaaaaaaaatgaaatctttaccaaaacgatgcatgcctgcacattgaaaagcttgaattttctaatagatcaaaaggagacaa

SEQ ID NO: 43349 - DNA, 619 bp, Glycine max
  Clone ID: PAT_MRT3847_139142C.1
aattaaaattttacttaattataagaatgaaatctgctagttttttacaaaactaatattatatatatatatatgccgacctatcaagcttataaggctttttaataagcctaagcctgacctatttaatttaataggcttttaaaaaaagcctgagcctaaccttttaattaaataggccaggccagaccaagctttatgtaggccaggtcgtaggcccctgtaggctggcctagcctattctcacccctactcttacagaagacccatcatagcaatggcacaagaatatcatgacttcttcgtccggggagaaatgatatacatcaaaaaatttcaaccagtgttctcatgcaccaaacatgttcctcccactcattagttgttccctaaatcattggtgttactctttagtaacccacctacggcctttaatctggtagcccccaaaacttgctcactactggtctctcctccaccctctgcacttgtgtatccagatttccggcggtgcttcttcccccttgacatcccactatcgctgacactcccattcaagagggggtcatcgattccccggatcactctccttgcaggtgatgatgtggcaatgcaacta

SEQ ID NO: 43350 - DNA, 376 bp, Glycine max
  unsure (1)..(376): unsure at all n locations
  Clone ID: PAT_MRT3847_139143C.1
gtacgngnacgcacactcnagcncncggntcggcncgttgcttgtncttcnnattcnaccccncanccngtntggggtggatacgtngggccgggggaaanatggngntttgncgccccangggcaacntncnccgnaangtngtttaagangcnatgacgctncnctatccngannccnccggannacncagcctgggtgancntaagaagtggcccattccnccctcgcgatnatggngcaaaattgnctcgtattctgttaccaatgtnggggggnatgatttttgtttgcagtaggatgctccgtccnnttngaaaattttccncaanacntggactttcttcgcntaagaantntanaanntggtaanagg

SEQ ID NO: 43351 - DNA, 341 bp, Glycine max
  unsure (1)..(341): unsure at all n locations
  Clone ID: PAT_MRT3847_139144C.1
cttattattgttcttgattttacttttgtaggattttgggttttccatgacccctggggagcggaactatgatgcaaggggttttgctgaatctttttttgaccaaactgaaattaaaatatgcggggggtcaaaatatactgttttgtgacactcccaaggcattgccttatgatgcttggggatncgcccgggaaaaaagatcaccatcatataaaaactcctgggaaaaaaggggtttaaagtctttggggggcaagtgctctgtttttacaacccttaaaccactacaaaaaaggggttaaaacgttcttaggtggaagtttgttgttctcccctgg

SEQ ID NO: 43352 - DNA, 189 bp, Glycine max
  Clone ID: PAT_MRT3847_139145C.1
ttcgaggaatcggctcgagtcaagattgctatttatattggtagatatgcgtaggggtattatgattgataaatgataactaattgtgatttgtaattggttttagccttaactgattggcagattactattattaagtattaagaaattgtatctgtttgattcttaaatataacggataggatattt

SEQ ID NO: 43353 - DNA, 514 bp, Glycine max
  Clone ID: PAT_MRT3847_139146C.1
gtgtgttgaagaaaccagatcaattacgggtcatttgagtcaatcttttttgtaaatcaaaatttacactagactcccgtaactttcacctgactttattctactttaatgccttccacaaacattttccaccatagtcttagttatgtatgcctgaagattaatgcattggttttgtatgttaaccaatgcattggttttgtatgttaaccaatgcattggaaggagatgttttacactatcatccttagcaacattttctcttatttggggcttaagtcccaatgttgaaaaaaccctaccttaaatccacgagtcacctaaacaaaaattgatggctcataatggtatacaacaccctttcacaatgttattcaaaattgtgcaccctctttgcagagatgagtgtattttgtagaagcattgctatggtcattggaccaactcctccaggaactggtgtaacagcagaggcaattcttatggcttcttcataacaaacatctcccaccag

SEQ ID NO: 43354 - DNA, 597 bp, Glycine max
  Clone ID: PAT_MRT3847_139147C.1
ccacgcgtccgacggctgcgagaagacgacagaaggggcttctctttctttgtcacaaacacaacacagcacccttgacacactgcacagtgcctcctttctagtttctactatctgcttcttcttcttcaattagggttttccccttctccgagatcagcgccaacatcatgaacatgaatatcttcaagaagaaaacctcacccaaaggttcaccccttttccctctttttctctccaaaattttccacattgttttttttttatcaattttttctgtttaaccttccatgtttatcctaaagcttaggatttgcgctttgaatgagaagtttgttttgtctctgaaaagggaaactcgtttctttagtgtttgcttgctggggaaaatttgggtaggaaaaagattgggaacttcggatcggagaaacgttggaattgggtagctgtgtgctagattggatctagaatttgtttagaagaaacatattgctctttagaattcttagaaattatgggttttatgctgcttagatatgtggaattggtttctttcgttgggcaatatggcattgtatggctcgatgaaaatgggaa

SEQ ID NO: 43355 - DNA, 1375 bp, Glycine max
  Clone ID: PAT_MRT3847_139148C.1
aaatacttttcttcttgtcactgacacagttgaatcccattgatgatcgtcccatgtctttaatttgatcccaaaactagaaatttcttctagcaaatgatccctctctctttttcttaattttccccagattcctctgtttggcaacgcatttgaaagctatgaagacgagcttaaatgaaaaaccagtttcccacaaatctaagtaaatggcttgtgtcatttttatacaactctcaaatggattatgaacctccattcctcgagacctacaagacccttgttctaaaaaagtttgatgattcaaagaatgaggtctcctctttggtggagagatcgtgtgaactaccagtgatcgatcttggcaatttaaatggcgagagagacaaatgcatgaaagaaattgcagaagctgctagtaaatggggttttttccaagtcgttaatcatgggatttcacaggagctgctgaaaagccttgaatttgaacaaaagaaattgttctatcaaccttttttgaataagtctgaaaaatttaatttttctagtttatctgccaaaacttacaggtgggggaatccatatgctaccaatctgagacaattgtcatggtcagaagcctttcatttttatgcctcagatatctcatggatggaccaacaccaaagtctgagatcaagccttgaatcttttgcaacaagaatgttcccccttgctgaaagcttggcagaagtactagcctacaaattgaatacgaaatccaactatttccgtgaaaattgcttgccaaagagttcgtacattcgactgaatagatatcctccatgccctatatcgtcaaaggtgcatggcctgttgcctcacagtgatacaagttttcttaccatcgtacatcaggaccaggttgggggattgcaattgatgaaagatggaaaatgggttggtgtcaaacctaacccacaagctctagttgttaatattggtgacttctttcaggcattcagcaatggtgtttataaaagcataaaacaccgagtggttgctgccgagaaagtagagaggttttctatggcttttttttattgcccctccgaagatgcacttatagaaagccacatcaagccagctacgtacaggaaattcacttcgagggagtttagacaacagactgagaaagatgtcaagcaaacaggggataaagaggggctctctagatttcttctgtagaagtatatatatacctatatctgtgtaaacttaaagtaatcatatctgtcttattttgtaacattttcttttgtgtgtactcttgttttgtaacatagctcatgagtttttgagttaaataaattaatattttaaatattattttatc

SEQ ID NO: 43356 - DNA, 326 bp, Glycine max
  Clone ID: PAT_MRT3847_139149C.1
ctcacttttgatggcaaggaatagaagatggtcaaacattgcttgaaaacattattcatagtgaagttacctttcatggtgtcaataaaattcatcttgcggggttctcgaaatcccttttacaatttgttctcagttaccttaaccaaatgtacattgttcaacttaatccttcttctttaaggatctgagcaaactgaatccggtgagtaaattctacacttgcatcccgaattcattcaatacatggggatctatctggaaagactggaagggctttcaaggatgagattcacaaataaattgcgaaatggcacgagacccct

SEQ ID NO: 43357 - DNA, 417 bp, Glycine max
  unsure (1)..(417): unsure at all n locations
  Clone ID: PAT_MRT3847_13914C.1
gacggaaacaatggggatataatcgncncgcgangacggggaagctccattatagaacctgccggaccctcaacancancaagagacaatttaaactcctaaaggttctatgttggaccttaaaattcctcaatctaaaattgcactcaccaagaacacagttggaggaaccaatctgcgtagcgatctattggcaaactttttgacagagggcaattgtagagcaagtgatgattcgcagcgcactcatcgtattaaaggaatgattaaaatgggggccacagatgcaattcctgagaatacagagatagcattgccctgtgctatgaaaagctaatataaggggcgcgccagctttgatatttacaccatctgctctcaagactgggaattaaggaaatcctggctgcacaaaac

SEQ ID NO: 43358 - DNA, 232 bp, Glycine max
  Clone ID: PAT_MRT3847_139150C.1
cgatctactgactcttgtgcgcacgcgggagtccaccattcaatatcgaacgggtacatgctcattaaccagataaggctctagtgagactcattataaatagtcgtgatcatgactatatatgccacctgcgcgatttagacatatcatcgctgtatccttcagcatacgaaccatgtgcgtcaagatgatcttatgaggagcctccttagtgaaacatctcacattagtt

SEQ ID NO: 43359 - DNA, 562 bp, Glycine max
  Clone ID: PAT_MRT3847_139151C.1
agaggcaaaagaaaggctggacaattgctagagcgtatgagcaggctagttgagcaacagcaggaagttccaacacaaactgaaactcaagctcagaacgaggataccgaaccacctttgattactaaccccgatgattcctaagatgtcttgttataccttgttttcattttgtctttttgttcttttaaaagtgttgaaagaagcatctgtttggaggaaagggtggaagatcaccttcctactccataagttatttgtttgtttgtgtgatattcagagatgcaatgcaaaaacttgtgaaagtgggcaagaagaaatcgaatcaaatgggcaagcctgacgtggaaaaatgtataattgtaacatgtactatattctaatcatcctcagattttaatgaagagatgttttgtttattcgtaccgcatcagatgatgttagagatgttataacagtataaagtcaatcatttgtcttttttaacctagaaatttatcctttcgaaaatgttagttcgcgacgtcatattagagttattatgatcaagtgatttgaagtt

SEQ ID NO: 43360 - DNA, 1757 bp, Glycine max
  Clone ID: PAT_MRT3847_139153C.1
ctttcacttgtacttgacgagaaaacacgtaacatgcatatcttaaggccgtgtctggcaacccaatcacactctctcaaaacaccaatcccaaaccacagcaccctacaaacacaccccctaaaaagcaggttcctttctatattcccacgtggcccacacccttttgccctttatgctattccgtttcccaaataatatctcacgaagccgagaacagccaaacagagtgctacttgaaaaattgttctcaccgtgtgtgtgttgtgtgtgtgtgtgagagagagagagagagagagagagaaagagagagagagagaggttaggctatggctgatgagagcgtcgttgagtccccagtgaagaggcagagagatgatggtgaagaaaatggtgtctctgtttccatggacgcggagggtggcaaagaccctcttagtaacggtttatcatctgtgattcctgggtggttctctgaaatcagtgcaatgtggcctggagaggctcactccttgaaggtggaaaagattttgtttcaaggaaagtcagaataccaaaatgtcatggtcttccagtcatcaacatatggcaaggttcttgttttggatggagtaattcagctaacagaaagggatgaatgtgcctaccaagaaatgatcactcatcttcctctttgctctattccaaaccctaaaaaggttttggttatcggtggaggtgatggaggggtcatacgagaagtagcacgccattcttcagttgaaaagatagacatttgtgaaattgacaagatggttgttgatgtctccaaacaatacttccctgatgtagctgttgggtatgatgatcctcgtgtgacacttcatattggtgatggagttgcatttttgaaggaagttccagaaggaacttatgatgctgttatagtggattcatccgaccctattggtcctgctcaggagctttttgaaaagcccttctttgcgtcagttgcaaaggctctttgtcccggtggagttgtgtgtactcacgcacaaagcatttggcttcatatggatattattgaggacattgtggccaattgtcgccagatttttaaaggctctgtcaactatgcttggactactgttcctacatacccaagtgggatgattggttttatgctttgctcaactgagggaccacctgttgatttcaagcatccagttaatcccatagatgaaaatgagagtcagaagtcagtaagaccactgaaattttacaactctgagattcatacagcagctttctgtttgccgtcatttgcaaagaggaagattagttctaaagcaaattaaaaagattttcagaacctttgaaggagctcaagtggctgttgtagaagtccaacattcatccttgctgtattggtccatctatcaatgagccttggaataagtcagattaaatttggcattgaatagttaagtttatttctggaaatgagttttaggtgataaaggtataattgatggattcagttgtcagtgactttcctcataaacacatttaaaaatgtggaactatgaatatctgtttaggaaaattttgtttaatgcaaattgttgtttcttgtgtgttttgaaaaaaaaaaaaaaaaaaaaaaaactcgagactagttctctctctctctcgaaaaatggtggatttgttaacaagaaagaggaatctccgaatcggtgagaactatgtgcaaaagttactatgcaaaaacagta

SEQ ID NO: 43361 - DNA, 462 bp, Glycine max
  Clone ID: PAT_MRT3847_139154C.1
ggctcgaggttctattttgtgaatgtaaccatagtggatagagccgctattctgcacattccatggacaggaccttattgttgattctgaataggagctgaattatggaaagcattatgtgtgactcttattcaatggatgggggaaatacacaatggttacaggcatcctttgtgaggaactcacaatgcccaacctcatggacatatatgatatgcccagggatatcgctgcctctgaggtgactgcatagaaagctgtactaagctgggacgatgacagaacgaaccatgagatcgagactacctgctgctgcttcacaggatgatagacgtgacggatcccatgcacgcatctatgaaccatggcctgccctagatgacacgcctgcagatgagcctgctactgggatcttacatggacttggctctgacatgcatgtgcaagctcagaggactcgtg

SEQ ID NO: 43362 - DNA, 576 bp, Glycine max
  Clone ID: PAT_MRT3847_139155C.1
ttggggggggggggggggggcaatgcaagattttgataaaaaccagagaagagagcactaagaaaaacaagatagcttggttaccagctaaaactggggaccgaataacatttgaggggtgaacctgctgtggaatacaccatctgataaatgacaagaaactgatacaaagcggaatggaccaattagagtgcctttaaggaggagatggcgtatttgtgaaatatacgaatagcagccaatgagctgcaaatgccaagtatggcgactgagcacaataacaatgatagcctgactggggtgacgaaccggtggagtaaaatttaatcaaagaataagcaaagaaacacgcagtgagcgactttctagtaaaaagctagaagtgggcagggtgaaaatagcaaattctgtaagatggggaactacggggtggcgggcctgtaaacatagatggcagtacgcaggttggcagccaaacaacatgtaccaatgtcggtggtacgggccagctagctagtgcaggcagctgttcgccactaaggagtattggcctggctgtggtaccagcaacggacg

SEQ ID NO: 43363 - DNA, 398 bp, Glycine max
  Clone ID: PAT_MRT3847_139156C.1
ccaagtcatccaatcgcaaactctgacacacttaaacccaaaaccagcgggtaccgttcatggcacactggcatgagcatctctaacaaccgtgactatccgcacgctatcttatcctacacccgtatatgattacactacgcagctctcacgaacaacatctccttcattcaatagctcaatcactatcaccgtgccatcactacacaccagccgactgacctcgtctaacacgtgagaggcgccacataaagatcaccaagctcagtgtataaatcgatggactcacgctcgaagagaccaataacctcgacgacttgattgagtacaagctacgcgtctccgtagcgtgcatagcccctgtggcagtctgcatagatgccgtaagtacttaagct

SEQ ID NO: 43364 - DNA, 2137 bp, Glycine max
  Clone ID: PAT_MRT3847_139157C.1
aacgaatggattttatacgccccttcatcctcatctccaaggagcagcctcttcaaaggccatgactgaaaagatagaacgcatggaactagaagcagagtttaaggataagcaactagtggagcttcaagaactctacaactcccagcaacttttgactgatgaattgagtgttaaacttgaaaaaactgagaaaagtctagaagaaactgagcagtcattgtttgatcttgaggaaaggcacaaacaagcaaatgcaacaatcaaggaaaaggaatttttgatatcaaatctcctaaaatctgagaaagcacttgtggagcgtgcaattgaactgcgagcagaactcgagaatgctgcatcagatgtgtcaaacctcttttctaaaattgagcggaaggataaaattgaagaaggaaacagaatacttatccagaaattccagtctcagttagctcaacaacttgaagtgttgcacaagacagtttcggcttcagtaatgcatcaagagcagcaactgaaggaatggaggacgatgtgcagtcttttgtatcaacgaaagcagaggctactgaagatcttagacaacgggttggaaagttgaaaaacatgtatggttctggtatcaaagctctggatgatttagctgaggagcttaaagtaaataaccagttaacttatgatgacttgaaatctgaagtagccaagcattcatctgccttggaggatctttttaaaggaatcgccttagaagctgattcattactaaatgatcttcaaagtagtctccacaagcaagaagccaatttaacagcttaggcgcaccaacaacccgagccgcagttcggctcgagggagactacacgggcagtatctaaaataacagtgaactttttttgagacaatcgacaggcatgcatcgagtctgaccgaaattgtggaagaagcacaattggtcaatgatcagaaattgtgtgaacttgagaagaagtttgaggagtgtactgcctatgaagaaaaacaactactggagaaagtggcagaaatgctagcaagttcaaatgctagaaagaaacaattggttcaaatagcagtcaatgatcttcgagaaagtgcaaattgtagaaccagtaaactgcggcaagaagcattaaccatgcaggaatctacttcttctgtcaaggctgaatggagagttcacatggaaaaaacagaattcaactatcatgaggatacttccgctgtagaatctgggaagaaagaccttgtagaggctcttcaaatctgcctcaacaaggcaaaagtaggttcacaacaatggagaaaagctcaagaatctttgcttagtttggagaagagaaatgctgcttctgtggatactattgttcggggaggaatggaagctaatcaagctctacgtgcccgattctcaagtgctgtatcaactacacttgaagatgcaggaatagcaaacaaggatattaactcatccattgatcattcgttgcaacttgatcatgaagcttgtgggaatctgaactctatgatcatcccgtgctgtggtgatttgagagaactgaagggtggtcatttccacagtattgtggagataactgaaaattcagggaaatgtcttctcaacgaatacatggtcgacgaaccatcttgttcaacaccaagaaagagactcttcaatttaccttgtgtttcatccatagaagaactaagaaccccatcatttgaggaattgttgaagtcattctgggatgcaagatctccgaaacaagcaaatggagatgttaaacacatcggggcatatgaagccgctcaatcagtgagagattccagagtccctctcactgctattaattaactagagacagtcaaaattctgtaaatagcgtattttttcagatgtaattccaaaaaatgatatattcatttatttttattttttttggaaatagagggaaaaaagggctaatctttatgggaaggaggaatatgtaaaaggttacccttttctacagtaacctatattattgatgtcatctgagattggtacgtactacatattatatgattttgggagtgtttttttattaataaaattagggtattctaaactaaaaaaaaa

SEQ ID NO: 43365 - DNA, 282 bp, Glycine max
  Clone ID: PAT_MRT3847_139158C.1
aaccaaaaaagagcgggctttcacccttttttaatcccaattcacaaaattttttataaaaaaaccttcaaaattaacatggggcaacttcaccatctacattttttaatttattccctttgccaattttaccctcgtcaacctattttttataaaactaattccttcctttaatactggccatttccccctcacccctaccatttgttggtccaacttacaaccttccccaaattattccacctttttccaacatccaaacttttttcacaaaaacccccc

SEQ ID NO: 43366 - DNA, 314 bp, Glycine max
  Clone ID: PAT_MRT3847_139159C.1
ggggatcaatcaccaaatacacatcaagtcctgctctctgagtactctcccacagacaagatttttggactttaaaatttaatcaaattcatttcacaaaggagttaagttaactctcccttgaccacattgtttggttaggcttgtttctcatggagcatcatcagcagcaacaattattgtcacacttgtgaggtgagttttgtgaggagtggcactctaaaggtggttaattctgaactcccatgattagtaatgtgccatattttttggaagagagaggggataaacaaaaaaaaaaaaaaaataaaaaa

SEQ ID NO: 43367 - DNA, 409 bp, Glycine max
  Clone ID: PAT_MRT3847_13915C.1
ggctcgagttttgcttgcagattctcttactccagctattaatactgaaacactctctccctcgccaaaaaggtgcttgctttgtcattgtctctcacttggggtgttctgttttccttcactgaactgaaaaaaaaacactgaagggaaaaacggcttgaacttgagaatggagcatgtgggacggcgaggaattgccggaggtattgctcacttttggaagggtggtttaagatccaactgggtcttatgcttttgtgcttttgtttccctagaaaatccttatggggaacatttatgtcgcacattaggtggtggcggagactggcgattagctttttgccatgctggctgcaaagagatacatatgatgctactacctatgatgtgtatgagtgtactctgagac

SEQ ID NO: 43368 - DNA, 1679 bp, Glycine max
  Clone ID: PAT_MRT3847_139160C.1
gagccctgatgatccttgctaaattatataagctcggaataacgcttgtgctctgtagtatcaaacatacatacagcaaagtggagagtctttacagataaagcgagagaattttttctacagggaaaactagatgaagctgaaaaactcttcctttctgctatagaagaagctaaagaaggtttcggcgagaaagatccgcatgttgcttctgcatgcaacaatctggcagaattgtacagggtcaaaaaggcatttgacaaagcagaaccattgtatttggaagctatcaacatattagaggaatcttttggtcctgatgatgtacgggttggggtcgctgttcacaaccttgggcagttttaccttggacagcggaagttggaagaagctcgtgttagctatgagcgtgctttgaagataaaaaggcgtgttctggggtatggccattcagaatgttcagatacaatgtatcatctaggagtggtcctgtatcttcaaggaaaagaaagggatgctgaggcctttattaaggactctataaggatgctagaggtggggaaggggagtcttttatatgcattagaagactacgatacctctcacagatatatatgaattcacaacgatttgctgaagctgagttggtccagagaaagatcctgcatgttatggaattgtcaaagggatggaattccttggacactgttattgcagctgaatctttggctctgaccctgcaagcatctggcaatacaaaagattcaaaagagcttcttgaaagatgtcttaatgtccggaaggacttacttcccagtgaccatattcagataggtgcaaacttacttcatctagcaagagtggcaatgcttgattgcagtcaacataaaaagttggatgtttctagagctaaagctgagcttgatatggcaaagaatcatttgcataattccataaggatttcatgtcaatgtttagagaaggtattgaaacaaaaggataagttaaagaaattcagtaagcctggagattctagaaaggaaggccaagtagcactggccatattgttgcaatcactcaatacattgtcatcagtggagttagataagcaagaattgcaggagattcaggaaaaagatattaaccttgaggctcgggaggcacttcttcaatgcatttctgcttacaaggagtttgtacataagaggtcaattgctgatacccctgaaataaagaaagaatatctttcatgtttaaagcgcgctcaaaatttgtttggtcataaagttgatgaagagctaagcaatcaaaatgatttccgatagctgtatcaaacaccttgactggatttccccccctatggaggggtgtttacttgaagggatatttttgttgataaagaaaataatttaaaagggaaattcttgctcagaagaaataaatgaaccaagcttgataactaaagtcaattgccactggccatggcatcaaaattattgttaaaccatacttcgtgtggttattaattacattaccttgatattggattgttgtatgctcagtattattctttgatgtcacttcaattgttactattttttttttgtagttaattgttactaattccccctaatcttgttcaagaaataatgttttaccgtgctaaaaaaaaacaaaaa

SEQ ID NO: 43369 - DNA, 227 bp, Glycine max
  Clone ID: PAT_MRT3847_139161C.1
gtcagtgcaaacaagatcagaagcctcctcgtgatttttttatctgagaaaaagtgttttgggttttctgctctttggggatttcagtttttgagttgtgtgtgtgtagtttctgttcccttcttctttatttatttatttgttttctcgttggcaactcaaaggtacagcaaccaccatatatcaggtagtattatcagtgtgtgactcctaaggaatttgcagat

SEQ ID NO: 43370 - DNA, 308 bp, Glycine max
  Clone ID: PAT_MRT3847_139162C.1
gtgagatgagaggatgctcatgtgctcaaatacatcctagcactcgctattaccttgctagggtggcgacaatgtcaactactgctatgaagaggctgataagagactatacgaggctggaacaagacccggctgcttggatcagcggtgccacccaggataacaacataatgctgcggtacgctgttatatacagtcacgatgatactctatgggatggaggcacgactcatgagacacttcaatttactgatgactaatacaatctaccaccgactgtacgatgcgtgtctaacaagtacatccaa

SEQ ID NO: 43371 - DNA, 455 bp, Glycine max
  Clone ID: PAT_MRT3847_139163C.1
ctgtagtgcatgttctttatcaggagtacaaagagctggaagaaaaatacctgatggaagtttgatccctaaacctaagaactggggaggatatagactaacaccacaacttttcgagttttgacaaggacagaaatctcgcttgcatgactggtggttgctaccccgtttgtgataggtttcttgttttcattttcttttaatggatgaagccaaacaatatgcacataatattcttgtctacattaatttttactttatttactcccccctcccaattgagttactcaaataggtttgaggtttatattcaaaatcaacacttacaagcttttgctgcatctttcttccctcattagtcatccaaacacagcctatattgaacattgggattgcttaaaatttggatatacttattcttgatgggcaattttgatttggaactctataaataa

SEQ ID NO: 43372 - DNA, 316 bp, Glycine max
  Clone ID: PAT_MRT3847_139164C.1
ggaaattggaaagggattttattttgaaaagtatcccttttatttaaagacatgcttatgacttatactagatttacccaaactaccacttgctaaaaaaaaaatccttagtggtattatttttgttagtatttgttttcagtctgcatataaatccactgcagatcatgaacatggaagaactgagagctccaagcggcctgtccattcttctcctggtctcaaggtgattgattttttaactgctgcaccatcaacacatagcatctgtttgtactcttcatcccctaaatctactatggacttggattttttt

SEQ ID NO: 43373 - DNA, 396 bp, Glycine max
  Clone ID: PAT_MRT3847_139165C.1
acaccgaaggggaggctaaaggagattacagggaaagtgggaaacaggagcttatcccaatgggaatgggccaaattggataccattcaccatagatatcaaaggctgaaattaaaccaattgattgtacatctgacgcgaaaacacattaggcttacctagaaaagctaatgacgtatcgattcaatgtacaaatatgtagaactgagtaacattttagaccttgatactcacacaaatgacgtaacatccatcttaagtgatacaattcaattgctaaaggaccttacttctgaagtcattcaacttatacatgaatatgctactctaaattaagaatcttaggagttggcttactagaaacattaactcagagaatactaggcttgtattaaa

SEQ ID NO: 43374 - DNA, 328 bp, Glycine max
  Clone ID: PAT_MRT3847_139166C.1
cccacgcgtccgaaaaaaaagtaaaatagcaaacaaagaaagatatagacataatctaagaaggggtcaaatacaagaactgagtggtcttttaagtcagacaatcgaagcaaattgatcattaatcccattgatgtggacactctcgtcaaccggaccaaaggaggtcagtcacctgcacttctgggcttacaccgcagtcaacagccactacatcttcccggttgttctaaaacatgtcaagtggtgggatgttgttaaggaagccagaagtggcttaaaaccgtggatatcccatggttggggtctgaggggtcattaaaccttt

SEQ ID NO: 43375 - DNA, 339 bp, Glycine max
  unsure (1)..(339): unsure at all n locations
  Clone ID: PAT_MRT3847_139167C.1
aaaccaccaaatcctacngctactacatgacattctgtatttttttggccaaatgggttccatcttttcacccttaaccactatcttcctcctactcctactcgtactttgatgtggctaggcacctgaccctttttcttgtgaccctaataacaccgccacaaaaaacttaccattttgcatggcttccttggcaacatttacaatggtcaatgacctcattggaatgttgacactgcaataaaaatttaacttgctatttaacaatttcctctcaattccactccttgttatcaaaagatattatttattctcgtaaacactacataatgtcttaaa

SEQ ID NO: 43376 - DNA, 461 bp, Glycine max
  Clone ID: PAT_MRT3847_139168C.1
tgtaagcgcttctaatgtccgcaccaccacctctctcccctcctcctcctcctcctccctccgcctccgacaaaaccgtcgagaaggcaaccgcggacgccgcgctggtcgaaaaatccgtcaacacgatccgcttcctcgccatcgacgccgtcgagaaggcgaattcgggtcacccggggctccccatgggatgcgctccgatgggtcacgtgctatatgatgaaaccatgaagtataaccctaagaaccctttctggttcaaccgcgatcgcttcgttctctccgctgggcacgggtgcatgcttcagtacgcgcttctgcacctcgctgggttcgatagcgtcaaggaagaggatttgagggaatttcgccaatgggggagcagaactccgggacaccctgagaattttgagactccgggaattgaagttacaacaggtcctcttggtcaggggatt

SEQ ID NO: 43377 - DNA, 623 bp, Glycine max
  unsure (1)..(623): unsure at all n locations
  Clone ID: PAT_MRT3847_139169C.1
attcccgggtgcgacccacgcgtccggatagcttctataaacgtgtgaaggggcgggggtgggattttataggggaaacattaccttcagaaagggggagtaattgtgcaagtttaactgagactgtgatggggctaatcaagaaaagtgcttgtgttgtgcttgtgtttctttgtgctgcctgtctatccactgctcgcttgggccgtaaaggggcttcanttaatgatattccagatataaaggggagtgttgcgactagtgtgacaaagagtactatgggtgcgatcgatgaagacaacttgaacagaccaagtgagaagcgagttatgagcaaatgtgggaaggggatctctgctcccagtgtggaagccaaaaggagtaatgcaagaagctgtttgtgtgatgaggtgaatgaggagccggtggctttcactgctgattatcgtgnaccagtgcaccatccacctaagaataataaatgaactcttaaaattaagttcatctcctcttaattatatggaagatatatgggggtgtgtttggttngttatcttatcctttatatatggggggttaaattaattactatatatatggggttggggcactgaaattataat

SEQ ID NO: 43378 - DNA, 1077 bp, Glycine max
  Clone ID: PAT_MRT3847_13916C.1
gaagaactgaagaaaatgattggtgcagtcacttatattgagtgcagctccaaaacacagcaggtaaataccttaacttcattggattcaactattttgagccatattttgaagtgaatccaagctgtatattgagatgaagttaaagaaaacattgtctctaaagtttaatttatatgtattagtgtaaaattgtttattcaataagaatctaccatgttgtcacatcatattgcaaaagtatgatgtggtaatatggtgaagaacaataatatacaaacacccacttattttaaactctatcaattcttttatttttttttatctttcttcctattacatcataaatcctataatacttgtatttttctcttgttttttttttcctctctaattgttttatagcataatggatgttcatgaaacatttttctattgtgaagagtctggtgaattcttattcaaaatctgtgtaaaatagttttacactcacggtgcatatagattacacttttgtttctctgtattccatttaatcatgcaagttagaaaccgatgatctctgaatccaaattgggaagtaaagtacattgaagagattgttagaattctctctttgttttgtttgcagaatgtgaagacagtttttgatgctgcaataaaggttgcattgaggccaccaaagccaaagaagaaaccacgcaagaaaaagacctgtcctttcctctgatatttcattattcagttatctttcaccccaaatcatttatagagcagaagtcaagtccaatgctttttagtttttgtgatctatatatataaagagcctgtgggtttttggataatatctgtgaagaactttagattcctcttgaattgtaaacgatggcaaatgagcttaagtgttacattgttcaattaattattttattttgcagtgtctagctgaggctctgtatttcaatacttttagtacaaaaagaggtctccaatttgaaattgaaaatcccttctgcaattcttgattttctgattctagtttctaccttgttgctttcgtttgggtttggtcaaatc

SEQ ID NO: 43379 - DNA, 554 bp, Glycine max
  Clone ID: PAT_MRT3847_139170C.1
ttcatattaaagctttatgatctgagaatctgaatttatatccaactctgataattttgagtgtttgatgctcaaaatagtatgataaacactagctcaagaatatggaccatgttggaaagaaactttgtttcttggatggcatgtcaatggttttgtttatctatggctattcaatatttagtcttactcttacctccacttaccacctgaactttcacaaatagcttagttggtaccatgtcaaaataatgtttgtcctgcatagtgtattttaatcactttgagcttctttggctgcctggcctaaacgtagtattgagctcctcaagcataataatagatgtttgagcagacatttgttgagggaagttttgcaatattgccgtcactataatatttaaattataaacatatattttggggggtaatttcatattcaaaactatttttatctagctctaggaattattatgcaaggactgcaaggatgccatgtgttgtttaaaactccctgttttctattgaatcattttaaaatcatgctgttgtgt

SEQ ID NO: 43380 - DNA, 201 bp, Glycine max
  unsure (1)..(201): unsure at all n locations
  Clone ID: PAT_MRT3847_139171C.1
ggatggcgacatgtgggcgcagaaggcgacgctgtccggaagcgcttactcttgggcatttatttccagcttaacttcagtgattggaaatttcgcaacactctctgtcaatcaggctgacttctcgcgttactcacgcgtgagcgtcaagtggcagatcatctacgtcnccttcttaccgcttgtgttcacgttcatcgc

SEQ ID NO: 43381 - DNA, 447 bp, Glycine max
  unsure (1)..(447): unsure at all n locations
  Clone ID: PAT_MRT3847_139172C.1
cggaaatcccggggcggcccacacccttccgttatttttccttaaaaggatgggttcctaatggccttccaatccgtttaagttttatcaatgttatatgaataaagggatggttttttccaccaaaaccaaaaaatggaaatttttaattttttggtttggtaatagatggccggattcggttggctttaagaaaaaaggaaaaaattgaaggaaggggaaaggcccaccctagatcttattaaaggactcccaagttttcagtcggaaggggaggttaaaaacctaggttgaaaaaaaaaaggattcgccctttcgggttttcaaattttatggaaaaattattggaggtggggccttagattcgaattagatttggggtttatatcgtgggttttggaatggngattggttggttattggattcttttttatttcaggcaatta

SEQ ID NO: 43382 - DNA, 250 bp, Glycine max
  Clone ID: PAT_MRT3847_139173C.1
aggaacccgatcaggtattatttttccattgcatcgacacatatccaaaggagcatggacattctgaaggcgggagcaggattgccaagtctctgactgcccagcaaaaggattaaaggctgcacttctattgtcacaaatgtctcctgacctaataggcgagaaaatggaagatgagaggttctatgatgctgctgatgagattttatctcttcagagcggcaatggcggcttccctgcttgggagcct

SEQ ID NO: 43383 - DNA, 487 bp, Glycine max
  Clone ID: PAT_MRT3847_139174C.1
attcggctcgagatcggagacatgcaacggccatttgcatcctccgaagaagaccgcatccaaactctgagattttgaattaaaggtgccgccgggatggaacagttccggcatataggagaggtggttgggagtctgaaagcgcttatggttttgcgcgatgaaatccaaataaaccaacgacaatgctgtttgatcctggacatcttcggtttggcgatggagacgatcgcggaggagataaggcagaacctgaagctggaggagcgtaacacgaaatggaaggctctggaatttccgctgcgtgagctatgcagggttttgaaggagggagagctttacataaggcagtgtttggattccaaggactggttggggaaagccctcaccctttctcacaacagagaatgcgtcgaattccacatccacaatcttctctgttatttccccgccgtcatcgaggccattgagaacgctggacttgtgt

SEQ ID NO: 43384 - DNA, 581 bp, Glycine max
  unsure (1)..(581): unsure at all n locations
  Clone ID: PAT_MRT3847_139175C.1
ggctcgagtttggttgttatatacataaaattttatttgttgtttgagttttgatttgaactatattttttttccaatgcttaagcacggttggtttcacaatgcaaatgattactaagtattcaattcttttaggatcggtgaatggtaatgatatcaatgtccgagtcttctgaaatctgaattaatagaatttagttgtggtctttatgatattaataaacctgctatgcgcttttatatatgcaccttagatatacatgctgctgaattgaattctaacttggaaagtatccgagtgataactgacatcttgcatcgttacaattatgcttattgttgagttcttagagccattaggaacactggaaaaaaaaacccagtgagccaacctcatttgaaggcttgttataattattcatcacccaaacttgttttctcttttaaacaagaaaatagattgcatgacaggtttattgcttttgatgcggtttgatgattgattggttagatttagaccattattgaaagactttctttcataatctcttactttaactaactaccacagcanaatgaat

SEQ ID NO: 43385 - DNA, 447 bp, Glycine max
  Clone ID: PAT_MRT3847_139176C.1
tacggctgcgagaagacgacagaagggcataactatggtggtatttcttagacatcttcagcacatcaaattcaggtgatttcaccactggaattgcgaaaggaagaaaggccagtctaagaggctcctgtagttgataagtcaaatgttttccctcgtactaaattactgggccttatatttcccattttttccaaggctattaagccctataggattcctcgttctctttataattataatgctctgacttttccactggaagtgttctttctctgccaccatttttgtttatagtatataccaatacatgcaaaacttgcatctctctttgaagtgcattattctcaaacatgacatatgtaaaactagtatatcttttttctaattaagtacatactttgatttttatctaagatgtctaaattcacacttacatgtttttaa

SEQ ID NO: 43386 - DNA, 1247 bp, Glycine max
  Clone ID: PAT_MRT3847_139177C.1
acgaactaatagcttgttggttgtctccataggagggcttgtggtcaatgtcattggcttgatattctttcatgaggagcatcatcatgctcatggccatgtattatctggatcatcatgctcccattcgcacacacacacggagtcgcatagtcaccacacccaccatcatcatgatcatgatcatgatcatgatcatctgcatagccatggtcacgaaacaacaatccatggaagcaatcaagaatatatatcagtttcaagtgattgccgagacgattcatgccctggtgatcatggccatcatcataatcataaccactgtagtcatgagaggaagcatcatggtgagtgggctgatcatgaagacaaacacagcattccgagctttaagcatcatgatgctgccgcccactgccatgaccatggtgaacatcatgatcaaactgggcactcttgtcatgaagatgctccacttgttcgtaaagagcatgaccatcgccatattgatcacaatatggaagggatatttttgcatgttcttgctgacaccatggggagtgttggtgttgttatatctaccctgttgattaagtacaagggatggcttattgctgatcctgcctgctcaatttttatttctattttaattgtatcttctgtgatacctttgctaaaaaattcagcagaagttttgctccaaagagtgccaagggcgcatgagcatgagctgaaggatgccttaattaatgtttcgaagataaggggtgtttatggcattcaaaagtttcattcctggaacttcacaaacacagatgtagttggtacgatgcatcttcacgtgtcaacagatacagacaagacatccgccaagtcgcaggttttgcatctgttacgtaatgctggaatcaaggatgtaaccttgcaggtggaatgtgttggataatttctttcaaaatagtttcatctatgactgttgttgctagtgaaggttgtccagagattactgacatacactgattggaacagaaattcaaatttccttgttattgtcatacagaatgcttcataatattaccacatcaatatttgtctgttttaatttgtgaaggatgatgattttttgttttggacctgtttgtcaggatcccacaaatagcaaagttgtaacttgtttaggatacagtaatgtaaagacacaagcatagcttgtagattaataacttaaacaacttttaatgttacgc

SEQ ID NO: 43387 - DNA, 130 bp, Glycine max
  Clone ID: PAT_MRT3847_139178C.1
cttgaagttattcaagagctatacattgctaatcgatacaactaggaagctcgacaacctgggatgtaagtccgtaccgattcctgcatgcgtaccatctttccctatagggagtcgaattacagcttgg

SEQ ID NO: 43388 - DNA, 782 bp, Glycine max
  Clone ID: PAT_MRT3847_139179C.1
ccaaaaccgaaattaacaaaactcatttttccaatggggtgtgccagtttttccttcctccttaaaattattccttccccctttcaatccctttgaccctttctgcatttcagatctaagaccataagacaacacaacccatttaggttcatcactctctacagaacaaggaactccaattgggtaccactagattataaagatttcatttttattattcttcttattattaaatatttaagggtgggggcgagagaaggagaagaatggggttagttgaggtccaagaaaacgggaacggtaatggagatggaatctctgagattccgttggggaccaaaacaaaatacatcaagatgacctctgatccagttgaggaagatgaagttttgcaaagcaggaagtatgagaccaagaaatatatctttgcatgtgccgtttttgcttctctcaattccgtgcttctcggctattgatgtgggtgttatgagtggagcaattatattcattcaggaggatctgaagataagtgaggttcagcaagaagtactagttggaattttgagcataatatcactgttgggtagtttagctggtggaaagacatctgatgcgattggccgaaaatggacaattggtttggcagcagttatcttccaaacaggtggagctgttatggctcttgctccatccttcaaagtgttgatgataggcagactcatggctggggtgggtataggttttggtgtcatgattgcacccgtctatattgctgaaatttc

SEQ ID NO: 43389 - DNA, 666 bp, Glycine max
  Clone ID: PAT_MRT3847_13917C.1
acagaggcaagtaaatattttataccttcacgttaccagaaacagtacaagattcccataaaaacaaatagatcagctagaaaagtaacctgttatacatcttaaagcatactgttttctttaatacatgccacagaggaatcagaggtataaaatattaaaagtgaacaactacaaaggcattaagaggctctctcttcactttcgtggtctctgcagtgactcaaggacaaaaacattatgttaggtgcttgacaaacacttcaatgcagttcaactaatcataatataatatcaataatcaatgaagaggggttatatctttttctcaataactcaatccatcaatatataatgatctttctaaaccactgttcatcaactcccatatcatcagcgcgtcaccaaatcatatgataagaaaaggttttactgctgtcaaccattcatatgataagaaaagggttttactgctgccaaccatactgttggttgcggttaccacccatcatgtttgatccacgcccagctgccgatccaccataaggagcaccttgaggataatttggagctccaactccatagcccgtttccacccccaccacgaggaccacccactgggcccaccgggcataccacttgacccataaagggcccccccccctt

SEQ ID NO: 43390 - DNA, 618 bp, Glycine max
  unsure (1)..(618): unsure at all n locations
  Clone ID: PAT_MRT3847_139180C.1
ggagacggctttttttgctcaccctcaaaatacgtttctttgagtccaaagcgcgcactgtggaaattcttaacacatcgtttggccaaaaccgaaattaacaaaaactcatttttccaatggagtgccagtttttccttcctccttaaaattgttccttcccccattcaatccctttctgcatttcagatctaagaccataattgggttcctcgctctctaaagaacaagggactccaatttgggtactgtactagtttataaagatttcatttttattataaaatatttaagggtgggggctagagaaggagaggaatggggttagttggggtccaagaaaacgggaacggtaatggagatggaatctctgagattccgttggggactaaaacaaaatacattaagatgacctctgatccagttgaggaagatgaagaagttctgcagagcagaaagtacgagaccaaaaaatatatctttgcatgtgccgtttttgcttctctcaattccgtgcttctcggctatgatgtgggtgttatgagtggagcaattatattcattcaggaggatctgaagataactgaggttcagcangatgtactagttggaattttg

SEQ ID NO: 43391 - DNA, 126 bp, Glycine max
  Clone ID: PAT_MRT3847_139181C.1
ctctttccttgggtcgaacataacgtaaatcaagcgtttctacgctgtgcacacaactatgaggagtacccagctatctgaggctgagaaataataggaggcagattgaggtaaaacataatgtcc

SEQ ID NO: 43392 - DNA, 1016 bp, Glycine max
  Clone ID: PAT_MRT3847_139182C.1
tcgaattagctctttcttcattgaaccaatgtgtaaatggatgggtgcaaaattagtatgggcactgagcaattttatcgtctttgtttgcatggctagcactgctatcattagtcttatttccataagagattattctggagggatagaacacgtaattggagcaaatgaagcaatcaagattgcttccttggttgtgtttgttcttcttggttttcctcttgcgattacctatagtgttcccttcgctgttacagcagagttgactgctgattcaggaggtggccaaggattggctataggagttcttaatcttgcaattgttattcctcagatgattatatcccttggttctggtccttgggatgctctctttggcggtggcaatattcctgcatttgttttggcttctttgtgcgcccttgctggtggtgtcattgcaactctcaaactgcctgatctctctagtagttcattccagtcaacaggatttcatattggctagccattggaagatctaacctgataatattttaacctgtacatggtcctttgaaatcgggagtacacccaaaatatggagagccggcacggtgattgcgtgttgtgttgcttttcaaccctcagaaggcgcatgccatattcaaattcattcatttttccccccacgttgtgggtgtctgtattttatataatgtaactgactgcacacagtagaagaaaaagcttaggtgcatatagtaacacggctttgtaatctgctattccctcatgcgttgtttggacgacaagtgaaatatagagggaacaaaaaataagagatagaggggatggaaatgaaaaatagaaaaatatgttgtttagatgaatagcaataaaaggtttttttttggttcatttggatgaattactgttttaggcactgaatttcaggtatatatttttgtagtccctgaaatttaaaaatatttttttttagtctttgaattttgaatattgtattttttgtccctgcc

SEQ ID NO: 43393 - DNA, 334 bp, Glycine max
  Clone ID: PAT_MRT3847_139183C.1
cccacgggcctttggtatataatcccaatacccagggagcacgaactacctacttccgttcattccaaataatctgggatggatgggtctacgatgcattcctccatacccacaacaaaaaccttttattggaatggaaaaccatacacacgctccttttttccccaataactattatccaagcaaacccttctgcaattgaaccatccacctcctatacactcactatacggtgagccacagctctattctgataggttcacatatcacaatacatacattacttggccattactcgctccctttgacttatatgcactctaccgccctaaag

SEQ ID NO: 43394 - DNA, 384 bp, Glycine max
  Clone ID: PAT_MRT3847_139184C.1
gacacactaatactaaagagggaacattagcaacatttaaaatgactttttttatttaaacgtgctcactaaaatcatagaaacattagctgccacagggtttggcacttaactccactgaaatgcatggaaactagatatcttcacacattaatctcttggatgtttaaacaaactgtggctgctccctacacaaaaggggtcttcctggcagggagggatccaatggtccatgggacccaaaaagcacttcaagctaactatatactatcttctcgcgtcaccgccttattcgctgggagctggtcctttggatccgtaaagacatcagacaaggttgtcttgtgagaatggaacacatgaccagtattccgtgtggctgat

SEQ ID NO: 43395 - DNA, 397 bp, Glycine max
  Clone ID: PAT_MRT3847_139185C.1
ggaaaattggaaagcctttggttcatttcccccattttttattggaaattgggggtcccgagcaggttccaaagttggggaaccccccccccccacccaaaaaaaacaaagatcccgaagatcccggggttctaagcaataaacaagttagacccccttcctgttgatttaaatttgcaacaatttaccttttttttttttttttggggctaaagaaaaccctgcccgggggggccatgacccctaagtaattttcccattgaattaggagcggggaacaaaggggttggaaactttaaaaacatcaataaccccagcaatggaacccggtgcggctaattttgtaattacaaagcttgccacactaagcatttggtggcctatccattttatgccc

SEQ ID NO: 43396 - DNA, 421 bp, Glycine max
  Clone ID: PAT_MRT3847_139186C.1
atgttttcttatgtgagtatgagtatgacatccattggcacagcttcaaacgtcttgctgacattgacaatgaaacagagaatggtgaagagtctgacagtgatgaagactggaatgttggcaaggaatcagactccgatacagatgaagatgttgaatatgaagaagaaaatattaaaaatgcacaatctcagccatcaagaagccatcacttagctgcaaatctgtacaagggacggttctttggacttcaaaagataggcacaaaaacgattccacagcatgtaagatctcacaaacagactgatcttgagagagcaaaggctacactgttgttggcgtcactgccaaaatctttaccttgtagaaataaagaaatggaggagataactacattcatcaaaggtgctattctaatgat

SEQ ID NO: 43397 - DNA, 202 bp, Glycine max
  Clone ID: PAT_MRT3847_139187C.1
ttacctccacgcaatctatcctatcaccttttaaatcttacacttcacaaatcattcattcggctcaacaataatgatatgtgattctcactatattaacctacattctttatcaaccactattaccctttcatcctatcacatctatctacacaaccttttacactttctatacccttattcacctacgttacccttcatt

SEQ ID NO: 43398 - DNA, 143 bp, Glycine max
  Clone ID: PAT_MRT3847_139188C.1
taggggctcgagctttaatgaggccgcgcagcggggtataatgccttcatctgtgcagcagccaatgcagtatgccaatggtacccccccttgacctactgtgtcttctggtgtgcctgagttgccggggcctgcgctggctg

SEQ ID NO: 43399 - DNA, 994 bp, Glycine max
  Clone ID: PAT_MRT3847_139189C.1
ggaaaccatcaaccacaatcctcatcacatcctaacccactctcaccaccataacagtgatgatgatgatgatgatgaagcccatggcacatcacaaccccagcatcatagaagaagaagaaagtacaaaaggccaggtctgatattcctcccaactaaagagatcataagagacacatacaggcttgccaccattgcaagagacttaggtctggacttgtaccctacaccatcactctctcacatcatcttctccaacccatcatcatccaaaccctcatcactttccatctcatttcggctcgctctccaaagcgacgctgttcccattcccttcccttccctctccgcaaccccactggcccacctccgctgcttcctcacgctctccccacgcgccttcaagatcgtccttttcaactccgaccaccaccccgacgacgcctccggaacctccggcaacgccaacaactgggactgcggctctttctctctccactctagggccgtcggcgttcgggttgacaccatggaggagttttgccggattctcgccggaaaaggttggagcttttacaaaaccaagaaagccccatcttccgatcagcgccacggcggcgcgttttacctcttcagaagggtggacgtgaaccgggttcgggtcggtggcgtcggagctccggaggatggggcatgtagggtgagggagttgaggttgccgcacttggattttggaaatgctccgttgaggattttgcagtatattttgttgatgactgatgatatcttctgtttggcatgaaattggtaaaatgttttatcagtttctgcattttatttttttagattttaatttttatgagtttcttgtagttattattataaaagtcagccatctatcatacatggcaattttcgtggttggatgattgcaagtgtaattagtactactacattctaattaacccatttttttttaaaagtaaccccaaaa

SEQ ID NO: 43400 - DNA, 691 bp, Glycine max
  unsure (1)..(691): unsure at all n locations
  Clone ID: PAT_MRT3847_13918C.1
cattgtggagatattggcgacattttaatctagtggatgcggtcccgaacccatcaaaagagcagntagtagatgttgttcgtaggcatttcatgtcgcagcacatggcaggctcgagggtgattgtgggatttgtccaagctgcaaagaggcttaagactgtctgcaaatgagatggaatgatgcgagaaaatgatattttgaaaagtaaaattgtctatgctaacaaagataatgtatgtaatatccacttcccttcgtattatgtaacatattttatcggtgatttttaactttctgatatagtagtaggttagtagtttgaggatttagaggttcttactcttttgtagccacccagttgtgtagatatatatgtgacaattgcaactggatcatcagggaagtcatcacggctttcttttcaacttgattcaatgtattgctgacctgggatctgggaagtgggttttcagagacctcaatgtatatatttttagtttctcccaactttgatgaactctcgtcttgtgttgctccggtggagtagttggtcgctgccaccatcttcaagtggctggaatggtggtttgtctttctcaacttaaaatacagttcatacttcaaaagactattgcgctaacgccagcgtgcgttccaaaaataaaatcactttaccattgtggtcaat

SEQ ID NO: 43401 - DNA, 446 bp, Glycine max
  Clone ID: PAT_MRT3847_139190C.1
ggatcattttatccaagatttctgcatttctagctagatttacactcacttcagaattttgaggattgttggtttcttttgtgtgcatctctgctaataaagggaatcctgttagaagaggagaacaagcatttaacgaaaaaggtgagaaaacattttaaactttttaacatgagattcactactgtttctctttcatttatgatcaatgtgtaaaaaacataattgatgaaaatataataattaatattatcttaaattttttaattagaaataaaaaattacaagcagacaattaacaaaaaacttttctgtaaaaaaaacaaaaaacttggaaagggtgataaaaaatgtcttggcatgggtttgtttaaaaaatgagaatgtcttgatttattttcctttcatttactacgttaaattaataattaatcagctagcggaga

SEQ ID NO: 43402 - DNA, 159 bp, Glycine max
  Clone ID: PAT_MRT3847_139191C.1
aattcggctcgagaagacaaatagactgacatgaaccataagaataaaaaagataattttggtagggatgcaccacattgggagaggggatgtctccgtacgaactacattaactgcttggaccggtcaaattgtagtcctagttttcattttgggtgt

SEQ ID NO: 43403 - DNA, 482 bp, Glycine max
  Clone ID: PAT_MRT3847_139192C.1
acaattggcttttgatactttgaatatcccaaaccaattgagcgatgttgatgaatttacaagacaaactccccaataaagagagccttcacttcttctcttcagtggttacccaaagaccataccttaacataccacgagatagaataaaaaatatttacacagactcgcatttgccaaaagaaatctgcattgcccaatattaataataatattagttgaccagctgcgagacccacccagcatgcggaacaccactttcttgacccgaacccgtcccctgcccttgcaaagaagtgtgcttgctcattttctcaaacatgttagaccttataccgcttgatgactccagcctatcaataactggttcctcctcacaacatctgatcccaaaaatcggagcaggcacccatgaccgaaccggttggtgagtgggcgttgctggaagactgcgccacccgggtaggggcaccggtcctatc

SEQ ID NO: 43404 - DNA, 427 bp, Glycine max
  Clone ID: PAT_MRT3847_139193C.1
ctttttgcttaaactgcttgctctttttgccgtttttattgaatttctgggggctggggaaactaatcctatggctgcgccaactccacaagaacgggatgactaataacctttatgttgttaaacgaactaacacgccagtgaactcccatattccatttcatgcactgaattccacattttcacaaaatccggggattgcctgtggaactgaaaaagctggcataaaagtcttaccagcaaaataaaaatcttgacaaattcccaaaagaataccaaaacctgccgactgggttgggattgcccctccggaaactccaatgccatgtaatttgatttgcccactcaaaatctctctttttaaagcctttattaggaccacctgcctcttttgggaaaaccaattcccagaaatgtggttctgatt

SEQ ID NO: 43405 - DNA, 455 bp, Glycine max
  Clone ID: PAT_MRT3847_139194C.1
ggcacacaaacaaacgctgggcgcttcttcatttatttacttacaatcacagggttaagcaaaaaactcggtactatttattagcagcaaaagaaaacaaataagaaaggaaatgaagaactttaaatttgtgtcgcgtgagggggggtgggttaaagatgagaagaggataatcacccaaagctcgtttggatggtgggtttccctattctcataaaactcaaagaagggcctcacgggttccgctggtgattttgctgcatcctccaacggagctttgctatttcctaagcttttcgaaaaaacttctttaaccttttccccagctccattctgtttgactggcccttcctcctctcttctaaaatctatattgggaggaaagaaacgggcatttgggggagggacaagggtcttaagcctggcaagaccaatacttgaaggaaaaagggccc

SEQ ID NO: 43406 - DNA, 611 bp, Glycine max
  Clone ID: PAT_MRT3847_139195C.1
ctttgttttccctaacaatcaactttgtttaatttttttaaaaagaattatttttgctgatttaatgcattatggatacagtcactactagatatcaaaatgactacagtatttcagtaataataaactgtattccattcagccttcttaggtctcagattttgggtttgttcagtttgtttgggtcataattgtttataaccttgtaaagcaaaatgacttttgctaatggaggctgtaaatggtggaaattatgagtctcactacacatgagctggttttagaatcctgtgcttgattgcaggtgtgcttgcagcatcggcaccatgcatatgaaggtatgggttgttgcttgttattgctgcttgaatgcgaatattcaatgtactaaaacaaaaccagtatagggggggtaaaagaattgatgagaagaaatcgattagaactaatatgactagcacaagtaattgttagaaggaagtatcttgaatgtctcctgaatgtctcttggctgattagcacttggaatcattttatattctgatcttagcatttgagtcttgtttgacaggctggagtttgtaaggctaaaaaagtgattgtatttctgg

SEQ ID NO: 43407 - DNA, 417 bp, Glycine max
  Clone ID: PAT_MRT3847_139196C.1
cccacgcgtccgggtgtgtgtaggtggtgataacaaagaaaaccaaaaaaggtcgtagaagattaaaaaggctttaataggtcaaattggttgccttgagcagccagtgttaacatgcaaagccgggtagggattccaatgatatgttggctgaggttgtcaagaattcttggaaaaaaagagcaaaggaatcagtcgtgattagtaaaggggagggctctgattttgtggcaaaagctgtggatttagcagccagagaattaataacaagtgcatcactaggacaaggtacagcttgaccgtgccaaggtatccacgaagtctgcagttctaatgaatttagagtccagattattggactcagtggaggaaagagactcttgagttcatcataccattactttgatattatagaaa

SEQ ID NO: 43408 - DNA, 213 bp, Glycine max
  unsure (1)..(213): unsure at all n locations
  Clone ID: PAT_MRT3847_139197C.1
ataaaacccccccccccccccccaaagaaattttttaaaatcctcnctccccccctcccccccncttttttacccttacacaccaactacatttatattctaccttatcattcaacttttccaccatccattctttttccttcaccctttatttcctcctccacaaatccccaatactccaattcaccaatcctccactccccattaaatctt

SEQ ID NO: 43409 - DNA, 142 bp, Glycine max
  Clone ID: PAT_MRT3847_139198C.1
cttcgctcaagctgtgacatacggtttaattgtttatgacatgaaccgagttgactgggactgagagccattcttttggtatctatttatcagtttcgtcacattgttgtactttactttctacggtatgatggctgtggga

SEQ ID NO: 43410 - DNA, 257 bp, Glycine max
  Clone ID: PAT_MRT3847_139199C.1
cttgtcggtttgtgccccgacccatgaaaaacagaatccaacctggattaacgagaaacaggaaccgaccagaagggcttgcacttaaggccaaagcacaaaaaaccaagaaacctggcggccggaaagaaaagaaccagagcccactggacctgaagcgtgaagacgaaaccaaagccgcgggcacaagcaaaaggggactccccggggaaccccttcaccaatttccaaaattgaaaagcttcccccccccccca

SEQ ID NO: 43411 - DNA, 925 bp, Glycine max
  unsure (1)..(925): unsure at all n locations
  Clone ID: PAT_MRT3847_13919C.1
ctcactaactactcaacatcacgttcattccctaacctcagttctctccaagcgcatgattgaagagtccaccctcccctcgctcacgtggcacgttttcattgggccatttcgtctcgtcgggattcataccaacacaccaataaacaataccagtcacactcactcgttttctctttctctctctctgctccgtgttttttctctctgcagaatttcccaaatttctccactaccctatctcctttgctcctgaaactcccacattcttcaccagcaatgcacgatcttcaatacgaatgcagtttcgatatttgatatcggagtatcggtgtttgagcggctgaattggaattggaaaatgcttgaggcaatggaaagttcggtcaatggtgggttcacccatttgcagagctgtggagatagcagcgaagaagagttatcggtgcttcctcgtcacaccaaagtggtcgtaacaggaaataaccgcaccaaatcggtgctcgtcggtcttcaaggtgttgttaagaaggccgttggactaggtggatggcattggctggttcttacaaatggtattgaagtgaagctacaaaggaatgctcttagcgtgattgaagcacccaccggtaacgaggaagatgatgaccttgaatttgaaaatatgccgtggaatggatcagatatggcatcggacgacacacagaagtcccacaaatcgaggcatagaatgcatagaacattgggatcatctcacaagaccatgagtaggtccttctctggcgattcacagtcgaagggatccgtttctatgccaaatgggtccgcggtggacttgagcaaacttgaaatgactgcattgtgnagatattgccgacatnttaatctggtggatgcggtcccaaacccatcaaagagcactagt

SEQ ID NO: 43412 - DNA, 351 bp, Glycine max
  Clone ID: PAT_MRT3847_1391C.1
aaataaagcagacataattccacagttacattttacccgcgaatggagctggtcaccaacattcacaatcaagcacattaccttaataagaggagaccgatcccttcatccccctatcaaaactctgtgtggaccctcccctccttacagctaaggctttgattatacacttacagaaactaactgagttttgaccatctaaaccctagaatacttatctactatacgacatggagacattaacgataaacacttgctattgtgcctgagtaaaccatatccatcaggttcaacaaaaagtctaacggcatacatattactaaggatcacctgattacatgcatccctcta

SEQ ID NO: 43413 - DNA, 467 bp, Glycine max
  Clone ID: PAT_MRT3847_139200C.1
gacctttgggctgatttatgtgcttgcatggtcgtgagaagatgatagaagggggcggcgggcccggagggacgatactagtgacggctccagatgtgacgcgctcctggaatccgcgaaactccagcgtagaatagaggaggctgaactcggaaagcctgctagaaagcgtgagaaaattgaagagacctctaggaaccgtactggaaagttcgtcgaacgccgtaactaaataaagagcacatcgaaaaggacactatagacgaggcatccaaaggaaggctcgccttacccagtctactcgatggcggcgcgcccgaccctttcgggtcatgaaacgacaccgaagctacggaatgcaattcgccaggcggctctagctgccctcctgatatagtcgaacaaacgaagaacgggccccccgaagcccccctcaagctcttaagtactccccgacgtaaagctac

SEQ ID NO: 43414 - DNA, 427 bp, Glycine max
  Clone ID: PAT_MRT3847_139201C.1
gccccccccggggttggatcccccgcccggccttgcataccccccacaaaaattattcttcgggggccccggagttattgtaaaaaaaaacaaaacccttttttttttaaaggcctggggggagggggaacccagggtccgacctattcgacttttcagggcttaccgccttggggcttttggaccccgggaaaagacagggggggctgtttcccttttgtcccccggggccctaggaacaggcccctcggtctttttcccctgaaccaaaaaacaataattgttcccccgcagggaggtagtgggcgaacacactatttccgtttcttgggcgccgaaaagaaaaaaaaaaaaaaggggttgtttttttttccggtttccccacaataaaagaaatttggtttttttttttttcgctcgcgggggg

SEQ ID NO: 43415 - DNA, 316 bp, Glycine max
  Clone ID: PAT_MRT3847_139202C.1
atatagttttgaagagatatgcatcacgaaagaagcgtttgacggagaagagaagttttgtgcaaaatccttgggaacagtagttggttttgccatttcccagctgggaaagaacattcccgtactttcctgctcctttgacagtaatcaagagcaatacactgtggaaggagtgcctaatcttggatacaaagcagagatgtgtcatgggctaagtttcaaaactgcaatattttactgccataaagtccgtgacacaacctctttcctggctccattggggggtggggatggaaccaaaactcatgcacttgcg

SEQ ID NO: 43416 - DNA, 134 bp, Glycine max
  unsure (1)..(134): unsure at all n locations
  Clone ID: PAT_MRT3847_139203C.1
cgttgaaaacaaatgggcgtaccccgnctcaactggcaaccggnccttcatcgttagacttncggncgagatgcttcatcncactttcgtccccaaccgtctccggcgtgtccctngccgangcccctggactt

SEQ ID NO: 43417 - DNA, 569 bp, Glycine max
  Clone ID: PAT_MRT3847_139204C.1
aaaaaaagcattaaacccccccggtttttctttggctttagcatattggatatttccaaaaaaaacaaaaaacaggggaaacggaaactttcctggggggtccaaaaatagccacccccgggaaaaaaagattcaaaaaaacccccccacccctaaaaaaaaaactaaacccctaacccccaaaaaaaaattttttttaatttttaaccaatttcacttggcctcaaaatggggcccggggggggcataaaagcactttaaaacctgggtcccctttcctccgggagcccccgccgccgcctttttttttttcccatgggcgaaccacccccctaaccacaaatattgggaggcaaggtccggcgccaaaaaaaccggttggcccggtaccccgttggggggaaaaggcttatcgaaaattatgggcatggggtggggggccctgaggaacttgttgagcatgatgcccgccccctctatgagagcgaaaaggacccccccaaacccaaagagacgggcggggggggggaggcccttgcgcagggaaaggaaccccccggtgggggccc

SEQ ID NO: 43418 - DNA, 753 bp, Glycine max
  Clone ID: PAT_MRT3847_139205C.1
ttctttttattttgattttgcttgaagacaacgaaaagtcaaattcccaggaacttgctaagctcagtgtagaaaatatcgaaatcatgatcagttaagagaaccttcactgcagtatattaagggatttttattttttttgatagagtaactaagggagtaatatattcaattcacactttttttttattaattagagcgtgtattttgtcatcatatatcctattttccacaccaaaaggtgcgaaaattaattgttcatgacttgtcatgcacatcaagccatgaatttgatctctttatttaaccaacagaggcattacggtctgtagatatagttgtgttcccattctgtaaatagctgtgtcctttaaagcaattcttaattgtgaacatggaaaagctttgttaagataaataaaattcattaaagtgatgcctatgtgtttgggtgaatgttttaagtgtcactcgattctttaacctaaaattttagatttaagtgttatggatgaaaaaatataattgaaaaagaaattttttattaaaaataacctttcaaatttttttacgaaaattaattattaatacaattaatagatatctcataccaatagtttgatataaaaaactatcaacacaggaatattcttgatatatacaaaaaaaaaaatccttttttgtgaaaaaacaaaatccctcaaagtgaaaaattccctttagatattgggtttatttccttttaagtgaaaa

SEQ ID NO: 43419 - DNA, 509 bp, Glycine max
  unsure (1)..(509): unsure at all n locations
  Clone ID: PAT_MRT3847_139206C.1
ttttgctgcgagaagacgacagaaggggatgaatagtactagtacattttgaaaatagaagtaaatgatgaatcccttgagtttgtgatatatagagagagagagttatgagcatgtatagctatagttgtatctccacaagcacaatgattcgtcggttatggtgtttacagagcggctctccctccgtgcccccctcgagcaccaagaagaagaagccccttgtcttgttgggcgcacctcatgtctccgccatcgtccttgaagcccttctgaacgctcctacttgtccagattcttcatttgaggttgcggctattgtgactcaacctgctgccagaagggacagggggaagaagctctctctctctcccttggcctctcatgctcttcagaggggcttctctcctgatctcattttctctccnctccgtgctggtgacgatactttcttgtctaattaaaagctcttcacctcacttgtgcattaccgcaggctatggcaatat

SEQ ID NO: 43420 - DNA, 245 bp, Glycine max
  Clone ID: PAT_MRT3847_139207C.1
ggcgttcctgcggctattaagcgcgccaacccccagtctgagcaaggcctggctgaatttgagacagaaatcgagatgctgtccaaattcagacacaggcatctcgtgtccttgattggtttctgtgaaagaagaatgaaatgatcttggtttatgagtacatgttaaatggaactcttagaagccacctatttgggagtgatcttcctcctctatcttggaagcagcgcctagaagtgtgcatc

SEQ ID NO: 43421 - DNA, 148 bp, Glycine max
  Clone ID: PAT_MRT3847_139208C.1
tggtctgccctagtctttttatttccaaggggggtaattcaaccaatcgcgggttaaccgctggaggtaccttttcttttttaatgtaaccaaattccttgattttcaatttgtgacccgccttaattgatttaccggatatccactt

SEQ ID NO: 43422 - DNA, 1093 bp, Glycine max
  Clone ID: PAT_MRT3847_139209C.1
ggacaagattacatagttaaatttattggatggtaatacaaagaggttttacactattaagacatatctataaactctaaaatagtaataagtaaacaaaaatttatgatctcagattttctacacatgggattgtgattcaatgtcatgattccgggctatatagctagtggatttttggaaaataaggtcaattctacataccccagatcactagtgacttcaaacatcttttacataatggatacaactctgatttccatccaaccatgtaaatagctaaaagattcatgtgtacaaaatggttactagaatttgatgaaagatcctacagtactattccatattctcattataagcttctctagttgatccagaagtgcttttactggctctagagcgagatttctgtgcctctaatctcgcttcaaggagttttgccatcagtgtgttttcctttactcccttgggcaatttggtagaagactcagatttgtcaaaatccgaagcagacaactttgatttccacagtcttgcaggactaccattagctgtaactgcagacttaacacaagaatcttccttgcaaatactctcgggataaactttatcaccttctgatgacatcgaactgtttgcaaccaggatatctggcctgtgactagagctcattctcaggatccagggtatatcactctcttgtggatcatgtctggtctcttcatttagtatagctgtgttgtcttctcccacgtcgcccgctcccctttcgctcgatttcctatcagcaaaaaacctctcattatcatcatatgatatgttcctgctcatgtttgcttgcagtctggagctgatattttggagtccttcaccattagccatttttggctcaaaaaaattggtgtcaatggaatcttcctgagccatattttgaggtgcacttccagcctcttttagtgggaaggaatccaatgactgctgacaagggtgaatttccttgagctcctttggggaggagtatccatattttttcaaatcaactgatcgtttggcatgaagaaatgtttcaatatcaaaacctaacttgtcaaca

SEQ ID NO: 43423 - DNA, 1469 bp, Glycine max
  Clone ID: PAT_MRT3847_13920C.1
gttaattgatggtaagaaggaaaggtgagtgagaaattgtgaagaagcggagtaactcctgaacatgacgttcatgccgtaactccaagcgcatgattgaagagcccaccctcacctcgctgacgtggcacgttttcactgggccatttcgtctcgtcgggattcatcccaacacaccaataaacaataccaatagcagtcactctcactcctctgctccgtgttttttctctctgcagaatttcccaaatttctccactaccctatctcctttgctcccacattcttcaccagcaatgcacgatcttcaatacctgaaactcgcacattcttcaccagcaatgcacgatcttcaatacgaatgcaatttcgatatttgacatccgagtatcagtgcttgagcgggtgaattggaaaatgcttgaggcaatggaaagttcggtcaatggtggcttctcccatttgcagagctgtggagatagcagcgaagaagagttatcggtgcttcctcgtcacaccaaagttgtcgtaaccggaaataaccgcaccaaatcggtgctcgttggtcttcaaggtgtcgttaagaaagccgttggactaggcggatggcattggctggttcttacaaatggtattgaagtgaagctacaaaggaatgctcttagcgtgattgaagcacccactggtaatgaggaagatgatgaccttgagtttgaaaatatgccgtggaatggatcagatatggcatcggacgacacacacaagtcccacaaatcgaggcatagaatgtatagaacaatgggatcatctccaagaagtatctctggcgattcacattcgaagggagtccgttgctatgcctgagcaatcttgaagggcctgcattgtggtcctggacttgagatttcaaacttgaaaatctagtcgaaaacccatcaaaagagcaactagtagacgttgttcagaggcatttcatgtcgcagcaaatggacgagttgcaggtgattgtgggatttgtccaagctgcaaagaggcttaagactgtttggaaatgagatggaatgatgccaaggaaatgatatttgaaaaagtaaaattgtctatgctaacaaagataatgtatgtaatatccacttcccttcgtattatgtaacatattttatcggtgatttttaactttctgatatagtagtaggttagtagtttgaggttatagaggttcttactcttttgtagccacccagttgtgtagatatatatgtgacaattgcaactggatcatcagggaagtcaccacggctttcttttcaacttgattcgatgtattgctgacttgggaagtgggttttggtttttaatttagagaccttaatgtatatatattttagtttctccctttgattcgtcttaaatgaattctcgtgttgtgccacctgattcgctatagtggatgacttgatcttttgttc

SEQ ID NO: 43424 - DNA, 659 bp, Glycine max
  Clone ID: PAT_MRT3847_139210C.1
gcccctacattaataaggcatatttattaaactctaaaataataaacaaaagttatgatctcagattttctacaatgggattgtgattcaatgtcatgattctgggctatatctactgggatttttgaaaatcaggtcaattctacatatcccagacactagtaccacccaacgcttggtaggcatagtgacttaaaacatcttttacataatggatacaactctgattttcatccaaccatgtacatagctaaaagattcatgtgtacaaaatggttactagaattcgatgaaagatcctacagtaatacccattgcaactattccatattctcattataagcttctctagttgatccaaaagtgcttttgtaggctctagagcgagatttctgtgcctctaatcttgcttcaaggagttttgccatcaatgtgttttcctttactcctttgggcaatttggtagaaaactcagacttgttaaaatctgaaacagacaactttgatttccacagtcttgcaggactaccattagctgtaactgcagactggacacaggaatcttccttgaaaatactctcaggataaactttatcacctactgatgacaaggaactgtttccaaccaggatatctggcttgtgactagtattcattct

SEQ ID NO: 43425 - DNA, 417 bp, Glycine max
  Clone ID: PAT_MRT3847_139211C.1
aaaaaggggggggttaaattttcactttcaggggcaactgttccaaggtgaaaaattttaaaaaataaagaactctccctttcactcttttttttctcaatgggcttgggaaaaaaataagaaacctaaaaagaaaaaacctgccaaagctaaaaacctgcctatgggggttgcccccttatccatcggggaattttccaaaggtaattaaaccccttggtgaacaaaaacccccctttgtttgaaaaaagggaaaaacttcaacccccgatcaaaaggtttcccaaactgggggctcctttgtccaggggaacacctttgccccctattggaagggcccccaaaaaaaatttcatcccccaaacaaatggcccccgtttcaaacaattttggaatcaaatcaaacttaggcccccc

SEQ ID NO: 43426 - DNA, 272 bp, Glycine max
  Clone ID: PAT_MRT3847_139212C.1
agcggtccgtgtatgtcgccctcttgttatgtttgaatgcatggctggtccaccagagtcctgtggcaacaccatatgcgctcaagaagacactagaccaaaactccattctcgtgagggggatgccttaaaatgtgctgcatgaagctgaacagggtccaggggtactgaatgaacaatctggctctggaacatgacgccggcctggtcccgctaacacctggacaccgatgatgtcgctttaactggctacaccccgacctgtaaaattg

SEQ ID NO: 43427 - DNA, 124 bp, Glycine max
  unsure (1)..(124): unsure at all n locations
  Clone ID: PAT_MRT3847_139213C.1
tgacaangagctaacaataataatatctctgcggaccattaaggccatggcttgtgttctctccaacctccaaccttcatgtttagctcaatccagatccaacaaagacgaagcaaaccttcac

SEQ ID NO: 43428 - DNA, 196 bp, Glycine max
  Clone ID: PAT_MRT3847_139214C.1
atacaagaccgaaatgtgcaagaattgggaattgagaggagcctgcaagtttggagacaagtgctgctttgcccacggtagacatgagcttaaaggaaaggcattgacccatgtcaaatataagaccaagcgctgctagcaataccatcattccggatactgcccttatggtctaagatgccagtatcttcataaa

SEQ ID NO: 43429 - DNA, 510 bp, Glycine max
  Clone ID: PAT_MRT3847_139215C.1
ggaaaacgatcaccttcaaaataaacttcaaaacagtgcatgattgttgatagttcaattaaccctacaaacagtgtacaatcaacaactttattaggaggaacgcattctaggtaccattccagtatattcttttcattctttacacacctgctttattttatttttttgtaggtatttttttaatgtagctaatacaacttacgtagttttgttttgacttaaataacattttagtacatgtaacataggtgattttaatcttgctttttaaatcaccatttttttaattttagtactccagatattttatgttcgatctaaccaatatgtgggatgttaaaatttgcaacaaaatgtatttttaaacatcttaatagaaaacttttatttttatttttttaattagtattctaaggatattagttaacatttatcttagtcaaaagaatcttatgtttggagataaaagtagaaaaagtttttttattagtttattcaattaaaaat

SEQ ID NO: 43430 - DNA, 368 bp, Glycine max
  Clone ID: PAT_MRT3847_139216C.1
attctttttatttgaatgatgcgaggtacaaactggttgagaggttcaacaggcaaacacatgattttgagttcaaagatgtcttgcaagtattgcacatgcctattttgtaacctttttttaattggacagctgctaaactaaacatcagaaaagcaaaagtggaagggttgatttgatcgagaatgaagttgcaaatgaaggaaaggaagaagagtaacagggaatgtcactgggggtcaggaaaggagctttttcatcggttgtaatcatatacttttgtataaggaagggggtcctgaactaagcttccttattaattattatattatagtctgatctagtctttgtttttaaaaaaaaaaaaa

SEQ ID NO: 43431 - DNA, 467 bp, Glycine max
  Clone ID: PAT_MRT3847_139217C.1
ggaatttccgggtcgacccacgcgtccgcccacgcgtccgcggacgcgtgggtggggctccagactacgctgaagctatcaaaggaataaagaccagccaaagacctctagctgtagccgcataaggagctggacgtgtaatcatttactctgtgcaagtttaccagtgatgcgatctgtatagatgtgtgtcttgtccagccatacgtataccggagatgaaaggagacggaggcagtgaagaaatatccttttttttcttctcgtttttcacgaggatgccgtgcactgctcccagaatgctgtgtccaatttacaaacgcacaggtggcacatgaactagcagagtagctttctcttgaaaggaaactgtatttggggtcgatgaaccctctggtgttattcttcagactggtaaacgatgtaacatgtttgataatcaataaagtgcgtcgtatggctttcct

SEQ ID NO: 43432 - DNA, 1937 bp, Glycine max
  Clone ID: PAT_MRT3847_139218C.1
aaattcggtttttttttcgtttccctattttaatttattaattatataagaggcctaattttagaaaacacattaataaaattaaggtatacacaccaaattaagctaaagagaaattaccatgttatattacataaattaaagaaacagatcaataataaaataactaagcttctagcttatacgggcagacatcttattaactaataaagttttgatgtaatccttcattaaccctcctgcatttgtataattatcttcatctttgtaaagcacgtcaatcatgcgcacaaggttgacaacacgcaaaagaaaattcattggcacttcagtaggattaaggcatgcctcattgatgtccttccaagcactcttaaccatctcaagtagtttattaatggcatcttgccttgaggtgttatgttgcttcatatagctttcaatgcttgatgcaacgtgtcttctttcctgctcaaactcatttccaacaatgtcatccataagcctacaaataattgaagcagccccaataattattggatcacttgttgcccatataaggacctcctctgttgtatctttcatgccaacaaaacatatggtgatcaccatagagtaaccacttgatacatttctaacttgcatgtactcctctattgacggtgtatgattgaaatgaagccatcttgcctcagccatgtgagccttgattaatcttttcatctctttcttagcatacttgatgcaatatacttttccttgttttctcatctcttcctctatttcttcataaacattcaaaatttctatataacatactttcatgtattctgggagatcatccaagcaacaaatatcccacctctcaattgcattggtgaaaagctcaagttcgtcaatggttccataggcatcatacatgtcatcaatgacagaacatagagcaattactttcgttgttatccttctagcaagagaatattgtggctcaaagtatattcccaaaatccaaaagtaacattctgcaatcctatctcgtacaaatggcaatttcgttgagacatttaaattcttaatccaccacctggtcacattgttaacttctttctgatgtaactcctgcaacatattaaaatctagttttgcaaatgttagcaatttttcatcatgtgaagaatcttcttcgtagaaagacatataatatgtggcctccagcctaggcaatccctttcgaagtgatcgtcttaagctatgcttgacttgtgcaatcatagaaggacttaattgggtagttagagacttagttaactgaacaagagcgaaattatgtgcttcttcaagtatatcctctccatgcattcttagttcagcagcttcgtacaagctcaacattccttgtatatcattggctgctttttcactaaagtttctagtttggtctttgaatttgtaaaatacatttgatgaaatgtgataaccttgttgcctaagcaaccgaaagagtaaagccacatgacaaagatcatcatcgtgagttatgatattattgtcctttgttgaaatgttgtaaatttggtgcaatgctccatcaatttcatgttcaaaatggtaggaaacacccaagcgttggactgagtcaataaattctaatttaaaatagaaattgttatcaataggagcaataagcatcttcctcacttcctcttttgttagttgagcttgtttgatgtgactatcatcttccacggaactaggaacatagtaaaggaaataatcgccccaaacggaaggagaaaaatttgcagtgttccgaatgaagtatgagggggcttttgcatcctgggcaacaatcggaagtgacgaggatacgttagtcatgaattgctttctaagtaatttgaggataagggatgctgatttggttggtttaccttaac

SEQ ID NO: 43433 - DNA, 489 bp, Glycine max
  Clone ID: PAT_MRT3847_139219C.1
tacggctgcgagaagacgacagaagggctttcatttaatgagctttgactcatgaccaaaacatcgacttttatattttccacatcatagaaagttcttcattgctcataagaatcacatctctgtcctccgttgtgtatgtataatcacccttttgttaggcattaatgttatgctcgcaatttctttttgaataactaaaaaatgtttttttaacataaaataatgattgggctataatagtataaaatattcgttttccttaccataatagtactaaataactctattgaaaatcgtgattatcttttgttggaaaatcgtgaaagcatataagatgagtatttttcttttaacataatttgacttttggggtatgaaatatatgttaagaagataatattcatcttatgtgcattcatggtatcggacggaaattaatcaccgtttctaacggaactatcttggaccaatactatagtcactaaa

SEQ ID NO: 43434 - DNA, 268 bp, Glycine max
  Clone ID: PAT_MRT3847_13921C.1
ggcaacgatcaacgcggctcaagtggagtaccgggagtacccagcggtggcgactgcaccagcctcctgcaacacctatcacctcggcggctcatgggaaagaggatagacgatcgaggggaaactcctagggtgcacaggcctgcgagtacactcggaggataaggcggtgccatcactccccgctaagtggaagggcacaactacagaggagtcacttcacaccctccacctctacacggagatcacgtcacggccgatggaaaag

SEQ ID NO: 43435 - DNA, 997 bp, Glycine max
  Clone ID: PAT_MRT3847_139220C.1
cggacgcgtgggtttgcactttcctcctcttccttgtgatttttgtttgcatcacagggagaaactgagacacagaagatgagagagataattagtattcatattggacaagctggaattcaggtggggaattcatgctgggagttgtattgccttgagcatggaattaaccctgatggcaccatgcctagtgattcctcagttggtgtagcacatgatgctttcaacaccttcttcagcgagacgggatccggcaagcatgtgccaagggctttatttgttgatctggaacctagtgttattgatgaagtaagaactggtccttacagacaactctttcaccctgagcaattaatttctgttgtgtgctagctctgttagtgttgggtgagataattgctttcctcatgagaagcagtggtttatttgtcagtttgaatcacttttaagtttcagtgaaagagcaaaataaaggatagcgtaggagtgctgcagtttccattacttaaaagaaatcagatgtttattttatcttttgcaataatatgtttttttatttttttttttttgttttttgacaaaaaccttcaaatgaaactttcaacttttaatctttgattctatagacaaatacaattccaccaccaataccaattctttaaatcaagtaacaatataaacaccaatacaattttgtaggccataccaacttatttgcccttgccttattcactagtgcggccaagatatacattgggaaaaataataatttaacatgaatgaatacaagaaaactaatcacaaagtgtaccaacttctaatcaacaagcaatattcaaagccctgaggtgaaagggacaccagagctaggtatccaattgttaccagcaataaagttgccaacagtgaaaggtgaggcctgagaagcactagtgagaacatggtaacccttccaagtaaccctattggcagtgtcggaacctggaccagtgtttgc

SEQ ID NO: 43436 - DNA, 745 bp, Glycine max
  Clone ID: PAT_MRT3847_139221C.1
aaaacaaatacaatcaaagaatcttctttgctttctctcctttgcactttccttctcctcgtgattttttgtttgcgtcaaatttagaaactgggagagacagaagatgagagagataattagtattcatattggacaagctggaattcagtgacacctctgttggcattgcacacgatgctttcaacaccttcttcagcgagaccggattcggcaagcatgtgccaagggctttatttgttgatttggaacctagtgttattgatgaaataagaactggtccttacagacaactctttccccacgcgtccgttaatttctggcaaagaagatgctgctaataactttgcaaggggacactacactgttggaagagaaattgtcgaactatgcctcgatcgtatcagaaaattagcagacaattgcactggtttgcaaggattcttggttttcaatgctattggcggtggtactggttctggtttgggatcattgctgttggaacggttatctgtcgattacgggaagaagtctaaacttggttttaccatctatccttctcctcaggtatctactgcagttgttgagccttacaacagtgtcctttccactcattctcttcttgagcacactgatgtggttgtgcttttggacaacgaagcaatatacgatatctgcagaagatcattagatatagaaaggccaacttacactaacttgaaccgtctgatatctcaaattatct

SEQ ID NO: 43437 - DNA, 350 bp, Glycine max
  unsure (1)..(350): unsure at all n locations
  Clone ID: PAT_MRT3847_139222C.1
cacngggaaanggagcagcaaagcnacaaaagcggncaaggaanacaaaaaaacggaaaaaaannngggncaacnnncgaagaggcccgaaccaaaggcccgggccaaaggggcagancggggnngcaaaaacaanagacaanaanaanccaaaggaagcgnnaacagaccncannggcanacacgaaaggagaagnaganaannaagaaagcacggcananacgaacaaanaacaggcaaacaagnnaaccaaanggnaaagaacanccncgncagccccaccagcagaggaaaaggggncagaggcagcagcggnaccaccggcggagggggaancggcaaaccggaa

SEQ ID NO: 43438 - DNA, 406 bp, Glycine max
  unsure (1)..(406): unsure at all n locations
  Clone ID: PAT_MRT3847_139223C.1
ccacgcgtccgaagaaaatactattactagctaatgagtatgtatctgaagcagaagcagatgatagtgggtgtggcattggtggtgttcttgttgttgatttcggtgaagggacaaagcatatgcaacgtatccttaccagatttaatgacatgcaaaccagcggtgacgcctccaaatccaacgccaccctcccaacagtgctgttctgtactctcacatgcagacttgccctgcctttgctcttacaagaactccccactattgccttctctcggaattgatcctaagctcgccctccaactccctgccaagtgcaaccttcctcatcctcccaactgctaattaatgcttctgcttcctacttaaataataataatcacagtttctaattaatctcttcana

SEQ ID NO: 43439 - DNA, 254 bp, Glycine max
  Clone ID: PAT_MRT3847_139224C.1
gtgtggggtttttttttgttttttattgttttttttacaaccttttttttttggatattgtaaatggtcaaccataaaaaaattgggacaaacccggtcaaaactcttaaggcggagaaaaaaaaaggacggcctctacaacaaaatagccggactcgagaaacaaatcaggcagtttgaagaagggggcataaaccccattgggggggcaaccaaaggggcccatgaaagggatggcccaggaccccgggggg

SEQ ID NO: 43440 - DNA, 2201 bp, Glycine max
  Clone ID: PAT_MRT3847_139225C.1
cggactcgtgggctccaaggaaataaaacaaataccaaagaatcttctttgctttcgctcctttgcactttcctcctcttccttgtgatttttgtttgcatcacagggagaaactgagacacagaagatgagagagataattagtattcatattggacaagctggaattcaggtggggaattcatgctgggagttgtattgccttgagcatggaattaaccctgatggcaccatgcctagtgatacctcagttggtgtagcacatgatgctttcaacaccttcttcagcgagacgggatccggcaagcatgtgccaagggctttatttgttgatctggaacctagtgttattgatgaagtaagaactggtccttacagacaactctttcaccctgagcaattaatttctggcaaggaagatgctgctaataacttcgcaaggggacactacactgttggaagagaaattgttgaactatgccttgatcgtatcagaaaattagcagacaattgcactggtttgcaaggattcttggttttcaatgctgttggtggtggtactggttctggtttgggatcattactgttggagcggttatctgtcgattatgggaagaagtctaaacttggctttaccatctatccttctccacaggtatctactgcagttgttgaaccttacaacagtgtcctttccactcattctcttcttgagcacactgatgtggttgtgcttttggacaacgaagctatatatgatatctgcagaagatcattagatatagaaaggccaacttacactaacttgaaccgtctgatatctcaaattatctcttccttgaccacttccctgagatttgatggcgcgattaatgtggacattaccgagttccagactaatctcgtgccatatcctcgtattcacttcatgctttcatcttatgcccctgtaatatctgctgcaaaggcctaccatgagcagctatcagttcccgagatcaccagcgctgtttttgagccatcaagtatgatggctaagtgtgatccaagacatggcaagtacatggcatgctgcctgatgtatcgcggagacgttgttcccaaagatgtaaatgcagctgtttcaaatatcaaggcaaagagaacagttcagtttgttgactggtgccctactggtttcaagtgtggtatcaactaccagcctccaacagtggtaccagcaggtgatctggccaaggtgcagcgagcggtttgtatgataagcaacaacacagctgttgctgaggttttctcacgcattgattacaagtttgacctcatgtatgctaagagggcatttgtccactggtatgtgggtgaaggaatggaagaaggtgaattctctgaagcccgggaggatcttgctgcccttgaaaaggactacgaagaggttggagcagaaggcgaagaagaagaagaagaacccgatgattactcaaagtagtcaatcattcatcaccagctaccttacctacatctaccttctttcctctgtctaatgtctatccttgtccattgaattttaagcatctttctgttgtgtgctagctctgttagtgttgggtgagataattgctttcctcatgagaagcagtggtttatttgtcagtttgaatcacttttaagtttcagtgaaagagcaaaataaaggatagcgtaggagtgctgcagtttccattacttaaaagaaatcagatgtttattttatcttttgcaataatatgtttatcgctttaatttatataggattgaacaagaacttggaactgaaataaagcagattcccccccaaattgatcaggcaatttattgtcggtgattggctgtaaataccatggttgtgtttacaattgtggctaatagcagtggttagtgtgaccgtggctcaagtaggtggaagaggatttgcagagctagtgacaaattgtgtattattggaacctggcatgagaggatgcactgtcgaaaactgggtattattggacccattgttgagtgctttcggattaatgctggttttaagagccctgaaacattattgggacctttaaaaagtttaataactgccagatagttgcttggtccggtttgtgtttctgttgattacatttgcagatcgatcattttaaataaatctaaataattttagtgtgtttggactc

SEQ ID NO: 43441 - DNA, 2073 bp, Glycine max
  unsure (1)..(2073): unsure at all n locations
  Clone ID: PAT_MRT3847_139226C.1
gttatggatgaggctgataagcttctctcccaagagttccaaccttcaatagagcagctgattcaatctcttcctggaaaccggcaaatcctgatgtatgctgctacatttactgttactgtcaaggacttcaaagatcgatatcttcgtaagccatacatcgttaaccttatggatgagctaactctgaaaggtattacacaatatgacgcatttctggaagagaggcagaaagtccactgcctaaatacacttttctctaagctgcaaataaatcagtcgatcatcttctgcaattccgtgaatcgggttgagctactctgccaagtaaaccgcagaacttgggtattcatgtttctatattcatgcaaagatgttgcaagatcaccgaaatagagtgtttcatgacttctgcaatggtgcctgcagaaaccttgtttgtactgatcttttcactaggggaatagacatccaagcagtcaatgttgttattaattttgattttccaaagaactcagaaacttatctgcacagggttggtcgttcagggaggtttggacacctaggtttagcggtgaacttgatcacctatgaggatcgcttcaatttatataggattgaacaagaacttggcactgaaataaaacaaattccaccacacattgatcaggcaatatattgccggtaactggtggtaaatacccagattgtattcacaaccgtggtgaatagcattggttgatgcgaatgtagttctagcacttgcgaatgctttgtaataaggatacactatgaaaatttttgtttgcataggagggataaactgggagacacaaatcatgagagagataattagtattcatattggacaagctggaattcaggtggggaattcatgctgggagtagcccacgcgtccgcaaaatacaatcaaagaatcttctttgctttctctcctttgcactttccttctcctcgtgattttttgtttgcatcaaagggagaaactgggagacacagaagatgagagagataattagtattcatattggacaagctggaattcaggtggggaattcatgctgggagttgtattgccttgagcatggaattaaccccgatgggaccatgcctagtgacacctctgttggcattgcacacgatgctttcaacaccttcttcagcgagaccggattcggcaagcatgtgccaagggctttatttgttgatttggaacctagtgttattgatgaagtaagaactggtccttacagacaactctttcaccctgagcaattaatttctggcaaagaagatgctgctaataactttgcaaggggacactacactgttggaagagaaattgtcgaactatgcctcgatcgtatcagaaaattagcagacaattgcactggtttgcaaggattcttggttttcaatgctgttggcggtggtactggttctggtttgggatcattgctgttggaacggttatctgtcgattacgggaagaagtctaaacttggttttaccatctatccttctcctcaggtatctactgcagttgttgagccttacaacagtgtcctttccactcattctcttcttgagcacactgatgtggttgtgcttttggacaacgaagcaatatacgatatctgcagaagatcattagatatagaaaggccaacttacactaacttgaaccgtctgatatctcaaattatctcttccttgaccacttccttgagatttgatggtgcgattaatgtggacattaccgagttccagactaatctcgtgccatatcctcgtattcacttcatgctttcatcttatgcccctgtaatatctgctgcaaaggcctaccatgagcagctatctgttcccgagatcaccagcgctgtttttgaaccatcaagtatgatggctaagtgtgatccaagacatggaaagtacatggcatgctgcctgatgtatcgcggagacgttgttcccaaagatgtanatgcagctgtttcaaatatcaagacaaagagaacagttcagtttgttgactggtgccctactgga

SEQ ID NO: 43442 - DNA, 476 bp, Glycine max
  unsure (1)..(476): unsure at all n locations
  Clone ID: PAT_MRT3847_139227C.1
tacggctgcgagaagacgacagaaggggctgtttgaattgctgtagcctactgtccaagtgaataataatattgacattggtttgtcaacaaagttcttcaccttttcttttgattagagaggacgtacacatacccatatgtctctgtgtttgtgtaattgtgtttctctcgtagaatggggaaacacagaagatagttatgtggggcttttggttttgttggagcggtgcagggagtagggattaggaagctaaatgtattaaccatgcatgtgattatttttctctaccatttattcaaacatagacttacacgtataaacttttgcaataattaatttaaaatcatttttaaggtgaaaacgtatttttttatattaacattttttatgtcgntatattaacacttttatctttgtgataatataaaaattttagttttaatgcttatttacaattttgacttaacttttta

SEQ ID NO: 43443 - DNA, 1486 bp, Glycine max
  Clone ID: PAT_MRT3847_139228C.1
tctcccccccctcccttccttttttttttttttttttttttttttttttgacaaaaaccttccaatgaaactttgagctttgattctatagacaaatacaattccaccaccaataccaattctttaaatcaagtaacaatataaaagtacaccaatccaattttgcaggccataccaacttattttcccttgccttattcactagtacggccaaaatatacatttgttgggggcaaataataatttaacatgaatcaatacaagaaaactaatcacaaagtgtaccaacttctaatgcaacaagcaatattcaaagtcctgaggtgaaagggacaccagagctaggtatccaattgctaccagcaatgaagttgccaacagtgaaaggtgaggcctcagaagcactagtgagaacatggtagcccttccaagtaaccctattggcagtgttggaacctggaccagtgtttgcatattcagcatagtacaaagtgtctagggcaaagttaccatcccattccatccaaccagcagggttgatcaagctatcaagataggttttcatgaacactgttcttgagtacttttgccagggtcttcctaggtatgacttaacagaactagggttgaagcctgaggcacctgtgaccttggagttgtggatgatgattcctgtgttttggttaggatcagttctgccttgagctgtgactgtgatggttctctgtggaggggttcttgcatagatgttgcagttttgcaagactgcagcagcattgccaaagatgaaatccactgtgccataaatgtcacattctctgtagaattgcctctctgaatgaacatatagtgtgtcttggaaaccctcaaatctgcatctgtaaaatactgagagatctgagccattacaactcgtaccctttcaacagtggttccagctggtgatcttgccaaggtgcagcgggcggtttgtattataagcaacaacactgctgttgctgaggttttcgcgcgcattgattacaagtttgacctcatgtatgccaagagggcatttgttcattggtatgtgggtgaaggaatggaagaaggtgaattctttgaagcccgtgaggatcttgctgctcttgaaaagggctatgaaaaggttggagcagaaggggaagaagaagaataagaaggccccgccgattactcgaaatagagtcaatcattcatcaacattttcgccagctaccttacctacatctccctttttttttctgtcaaaagtcggtcctggtccattgaattttaagcatttttctgttgtgggcaagctctgttcttacaattgtttcatgttaaagtgttaagtgatccaattgctttcctcatgagcagcaatggtttatttgtaagtttcagtgaaagagccaaataaaggccagggtaggaatgctgcaattttctttaaaaaaaaaaaaaaaaaaaaaaaaaaaaccac

SEQ ID NO: 43444 - DNA, 2938 bp, Glycine max
  Clone ID: PAT_MRT3847_139229C.1
acaacgcttatgttcatgtcatgttataactctaaggaaattaaacctttcccactgaatctttctttgctttctcctcatttgcgactttcctcctcttccttgtgattttttgtttgcatcacagggagaaactgagacacagaagatgcgagagataattagtattcatattggacaagcttgacttcaggtgggtaagttcatgctgggagttgtattgccttgagcatggaattaaccctgatggcaccatgcctagtgatacctaagttggtgtagcacatgatgctttcaacacccttcttcagcgagacgggatccggcaagcatatgccaagggctttaatttgttgatgtggaatctagactaaagttatgagaatagtgagtggtagaatccaaacaagaacctgaaacatcacgtattacaagctcgcctggcagaataccaacagtaaccagggattgcaatcccaacctatttgaaacagccaatgaagaagtaactgctccatcatatccaacaagtggggcagatcaagaaaaggaattagggctccattgactatgttatgatgtgcttgttcttttgaatcgtgcatttaagctttcaaaactggagccttggactcgaattcactccagcccttaggcttatgcataaatactccttacttcagaggccaaccattagcggctataggttcctcaaaacaatagcactgtgttttatgcattttgtatttttggtattcatgatgtaatctattgattttaagtttcaaccttaatccttccgaaccaacacataaaaatccaacactctcttcttcttcttctctctccgcgggttcaattgaacctcacaaaaccctctttctctctctctagatctgttcaaatcccgaatcatttccgctccaatttcaatttccccgaacaagagcaaaccctaaccctttctctctgtatgatacctgattttttccctcaggcgtgtagttttcgtgccgatttgtaaattctttcggtagtttaggttagaatttttttttgttaagtttttagggttttgaatcggtgagatgaatcacaacaacaacaattgagcgaggtaccctcccgggatggggcttgggtggtgaggtttcaatccgaacccgagccagaacccgaacttgaaccagaacccgagcctgaaccagaatcatcacgcgtttgagtctcggcctccgtaccatcaccagcaaccacgggtgcaagttctgtgtagaggcattttctacagcagcagcagcagcaatgattaagaagtcattgccgcggacgctgtcagctttgatgaaaagatgactttaatatgaaacagtagattagatgttgaaagccatatgtctaaaagattatagttcttagaaggttgatactccagagagtaaaaaagttgaatgcttaactactcgaaatgcttttcagcaagtaatttattgaggagaggtactcatctcaatgaatgcaaacagtgttgatgggcaatcaacttacgaagcttgaatatttctggttacacttacatgtactgacattatttccacatccaaatcagaaatttgcaaaacagctgcttattgcattactgctttatatagttttgactgttcttataatgagattaatcaagttataagggttggatcttgagaatggtcttggcaatcttatcaagtgtgcaaatagcttgcaaaggacttgaagtttcaagttgtggtgacaacatgtgaaaccagactgaaagatgatataatgcgctcacataaacaaattcatttttaatcttggaactcgaataaaaatactagagctggtcttaaaaattgtttgtttattgaagttttgtgttttgcctgtgatgaatgaggtcgatgagattatttgcacagatagtcaccatttgtgtgagcggggaattcattgtcagacgaaaacatgtcaaatcttgatgttttcagcaacattttcttgttactgtaaaggatttcaaagataggtatcttcgaaaattttatggcatcatcattatggatgagctaactctgaaggttattactcaattttatgcattcgtggaagagagactgaaagtccactgcctaaatactctattttctaagctgcaaataaaccagtctatcatcttctgcaattcagtgaatcgggttgaacttcttgccaagaaaatcacggtaacttggttattcatgtttctacattcatgcaaagatgttgcaggaccatcgtaacagagtgtttcatgacttccgcaatggtgcatgtcgaaatcttgtttgtactgatctttttactagaggaatagatattcaagcagttaacgttgttattaattttgattttcccaagaacgcagagacttatttgcacagggttggtcgttcagggaggtttgggcacctgggtttagcagtgaacttgattacctatgaggatcgctttaatttatataggattgaacaagaacttggaactgaaataaagcagattcccccacaaattgatcaggcaatttattgccggtgattggctgtaaataccatggttgtgtttaccattgtggctaatagcagtggttagtgtgaccgtggctaaagtaggtgcaagagaggatttgcaaagcaagtgacaaattctgtattagtggaccctggtatgggaggatgcactgtcgagaactgggtattattggacccattaattgagtgctttcggattaattccagtttgggtttctgttgattacatttgcagaacggtcgatcattttaaataaattaaaataatttatagtatgtttggatgagtgttaataaaattgatttggttaaaattaattttgaagtgatggagatgtttttatttt

SEQ ID NO: 43445 - DNA, 726 bp, Glycine max
  unsure (1)..(726): unsure at all n locations
  Clone ID: PAT_MRT3847_13922C.1
ttccatacaatcatgggatgctaaagctagcaccatgctagttttaattttctggtagtttgtccttctatttgtgggggattcaagttttggtgtttgatttttcttcaattctactctagttttctccaatatgcagttatgttttatattactaaatgaaacttggaaaacaaagaagttactgtggtgtcttgaggaaaaatttatagcatttagacaatgcttgtttaaaaggttaggctaggttctgattaagtaaataaaaactaatttttgcacaattcttttacatcaattttttttttttttttttttgcataatccaagtctttttaactatcaatatgatgaaggtgacagatgtctcgtaatgggtatcatatgttgacatggaaattgtttgcttgtgatggttctctttacctaaaaaggataatacaaacaaaagcatgagtttgataatcaaatttaggttatacataatatatgcataatgcaccattattaggaagaaaaaaaaatgagctaagtttgattcctttttnnngtttggtgtcttgaatttaaaaatcaatgtttttttaattattaaataatatgatcatcattattattatgacatgagggcataagttgccnnnnttatacancaaaaaaatatttaatggatactactgtcataatgtggtattttggttatacaccacacatggaccaaaaaag

SEQ ID NO: 43446 - DNA, 361 bp, Glycine max
  Clone ID: PAT_MRT3847_139230C.1
cccacgcgtccgggtaataattactgagggttatatatagaatgggctgctaggcgctgaagcacggttacttattgttatttttataggagaaaggttaggcagaacttgaaagaatggtgggtgggttaggaggacagagtgaacccatgcgaacttccccttttctcattatgccttaaccatgcaacccaccttatttatctggtacttagaattgataacaaactcgagttgtattcagactggaatgaacttgatttttaaaggggacagatatccgtattgtacccagtaccagtgcttgagggtgaggcaaataccatcacacaaagagggaagggttgatgcaaacgaacaa

SEQ ID NO: 43447 - DNA, 402 bp, Glycine max
  Clone ID: PAT_MRT3847_139231C.1
ttcggatgagataaaaaacgggaagggggctcgaacaaaaatactaaactattcatttggggtccaacacggaagaagactgcggtatcgcgcattctgattggtcaaacaagtgttctgctccggagactccttgattcgccacccccactcaaattcaaccatgccagatgcacgtgctcgttgcgtcttgtatcagttggatccaactcaaccacgctcctctccttgcgtccagttccctctaccagatcctactgctctagcttcagaggaagaaagaaacccctgtgggagccatgcaagctccctgctaaaaaagatggctgagcacaaactcacacatctctgaataacttcaatacccgtgggccccgcataactcatgcccgtacccatcat

SEQ ID NO: 43448 - DNA, 285 bp, Glycine max
  unsure (1)..(285): unsure at all n locations
  Clone ID: PAT_MRT3847_139232C.1
gtgcanacaggnnttaacatgagacagatggntgaattaanaatacttggttttcacagtnaatttaaaaaaancttataacttcgatgccattaggagctcctttgttctatgctccaaanttttttggttttcaagnagnaacnggattcnnagngattatncggttgtttagtgantagcaaaatntcagtgttcacttaatgggagtcctacaagtaagantggggtgtnctaanggnctaggatacgangacccncttgctcctttntgttcaatanagc

SEQ ID NO: 43449 - DNA, 331 bp, Glycine max
  Clone ID: PAT_MRT3847_139233C.1
ctcacgcgtacggacacgcgtactgaattgtgatgtgattgcaaagcgagctcaggactttgatatacacgcggctcttgaaagtcttatggatcaaactcttgttgttgtcatgcacaatactgctgagggtaactgagctagcacaaattatcaaccttagacagagagttgatggtgaacttaaacctcttactggtggtaagtagcctgagggccagcaccttccgggacgtaacatatttgtacgggaacaacctatttgacaagtctaacgggtggcacggcaggaaactctagcttctatagcacgagagtaaacaaatgctat

SEQ ID NO: 43450 - DNA, 449 bp, Glycine max
  Clone ID: PAT_MRT3847_139234C.1
attgagaagagacgtgaagaggtggaaagttctttgaaggaaagagaaaaggcttttgaggaagaaaagaacactgaacttcagtatattaatgctcttaaagagaaagcaacaaaagagttggaacaggtttccttggagatgaaaagcctgcagacggcgcgggcggacataaatttgggatcgtgaacggagaaatagggaatgggctgaacttactaactgtattgaggaactcgaggttcaaagggataagctccgaaagcagagagaactgttgcatgctgatagaattgaaatttatgctcagactgaagaattgaaaaaactagaagatttgaaagctgtctctgatgataatgctatcactgaaatgcttaaatctgatatggagtctaaccaaaagaaaatctctgcaaggaagaacttgaagcatcaatctcttacac

SEQ ID NO: 43451 - DNA, 247 bp, Glycine max
  Clone ID: PAT_MRT3847_139235C.1
gactaaaaatatcttacgccaaaaaacaatccggtattaatctgacgcgcgcgaacatagcgcggatccgatggcggcacatttttgagtaaatcaccttattgattttcggtagccccttcagccgatggctccaataatggaccaaccatttgcggatgccgtaccaagctggctaaccccacagcggaatacatttcacgtatcaacaggatcgacaatccttaaacgaccggcttgtggcact

SEQ ID NO: 43452 - DNA, 377 bp, Glycine max
  Clone ID: PAT_MRT3847_139236C.1
agcaggacgcaaggagaaccggcccggaaaccgcgggccgacccacgcgccgttccaccccgggtacgcacaaaaaaacgaggagcgcgggaaagggggcaaaccggggggaacacgggaacccgcacagggaagggagagcgcgcaagagacgcccagagggggggaaacaaaacactgagaacggcggggaggacaacagcgagagaaaccaccagcagagcgcagagacgaagagggaggaaacaggagaggaagagggggaaggagaccagggaccgaagaagaggaccccccgaagagaggggaaaaacaacggcggagaagaaaaggaagaaggagaaacacgggacaagccaggccaggacggagccgga

SEQ ID NO: 43453 - DNA, 410 bp, Glycine max
  Clone ID: PAT_MRT3847_139237C.1
ttacctctctaaactttattaattctatgtatattacaactattcaggccttaagaaccttttaaaatgaccagcaaaccttcaatacccaaaatttcaatatatcaatgccaaccatctccatctctcacaactcaacaattcatcattgcaacactactactatacaacttcataactctcaattaactcatacattcatacatacctcaaatctacaaaattattccatactcaactctaactaatatgcatcatatctacatactacacatctacacaattcatatattaccaacttcactatacaaatataccacctacaatgatctaatttcaatccttcaaaacttcacaaatcaaacctgaaaacctcaaaccttcaaccatcttatctttctaaatcaatc

SEQ ID NO: 43454 - DNA, 157 bp, Glycine max
  Clone ID: PAT_MRT3847_139238C.1
cactactttatatgctttcataattatatcatcattgaccttatgcatctctcctctacgactgctatatcctatgtcatgaatctggcgtctataactttgttaatgcaatacaattctcattactgatccggggtctcgtagaccggtccggaat

SEQ ID NO: 43455 - DNA, 487 bp, Glycine max
  Clone ID: PAT_MRT3847_139239C.1
gaaattatatcttccggttccattaggcaaactttctaaggagagataaagttgatctaccccagctcaaaaacacaggaaaaaaatatttgcatccttcgtcagggccaaacccataccagttaccaaggcaataataaattttttccccgttatacctcatgctctagaggacaatacaggggcaacagttgtctaacctcgaaaacgcgtcacgccaatcaaatacggggaaacttcagacatacatattttttctaaagtagattacattgtccagggaaaaagagaaaggagcaaccacttgcttgccaaaaaagaaaagcggaggcttcactaacgtgatatcccctaaggcgggcaatggctccaaaaaaataacactgggcgaaggtgtcgtgtgcaaaagcacaaatctaaacatggctttcattcttaactaggaaatttatttttatgaggacatgccccaaatcccaattcccag

SEQ ID NO: 43456 - DNA, 320 bp, Glycine max
  unsure (1)..(320): unsure at all n locations
  Clone ID: PAT_MRT3847_13923C.1
gttactgcacgcgtacgtaagctcggaattcggctcgagggaaagggctgggaaggatgtgttctggggtagcttgtggttgttttggtttgtctttccttaaaggagaagtcctaccaaaactgtaaatgccgctttgcccncgactttgtagaaggttgtagttctgttttcttgaacctttgaaaacaaatctctaaggaaggagccattatcttatctcaaatctctgtcctgacaacaaatttgtgatcctctacgtccttaggtccttggtaggcacccctacctttgtcatctgtgttctttctccagcatct

SEQ ID NO: 43457 - DNA, 365 bp, Glycine max
  Clone ID: PAT_MRT3847_139240C.1
cattaagaaacaaaatgccatcaaatcactaatttccaatcgggtacactaaaaaaataacaattgaccgctgggagctatccacccccctccccaacatgaattgggacaccatattcaccgatccctggcctgctgaacacatgctgaacatccgatgataattgatgcgccggcttttacaaaagtaaatcgaatgtgggacctagactgcctatgcctgaaatcacgggtgaatatagtaccacaggtggtggggggatgaaactctgatggcatacacaaaaaaccgccttaagaaagcctgtctactactgattaacttggaatctaaccaaaagcttttaaaccacccggggtccata

SEQ ID NO: 43458 - DNA, 559 bp, Glycine max
  Clone ID: PAT_MRT3847_139241C.1
ccgagtcggctctatcctctggtgtatgcgggttcggatggttactcctcctctctttgcttggaagattcgttggatccaaagtctgtgagggggaagattgtcgtgtgtgacagaggggtcaattcgagagccgcaaaaggtgaagtggtgaagaaggcgggaggagttggaatgattttgacgaatggacccttcgacggggaaggtttggtggctgactgccatgtcctcccagcgacctccgtgggtgccgggggcggggatgagcttcggagatacatgtccttggcctcacagctgcggtcaccagccacggcaaccataatattcaagggcacaaggctcgggattaaaccagcgcccaaggtggcatctttttcggcgagagggccaaacccggagtcccccgagatcctgaagccggatgtgatagctcctggattgaacattcttgcggcctggcccagtacacttgctccctctggagttccctctgatgagcgtacgagtgagtttcaccttctgtcgcgcacttcaatgggcttgcccccacgtt

SEQ ID NO: 43459 - DNA, 196 bp, Glycine max
  unsure (1)..(196): unsure at all n locations
  Clone ID: PAT_MRT3847_139242C.1
gtagtaagtcggaatgggtcgagtcgagtgctcgagcggctggtagggctcgagttgaggtgtgtcgcttacagtttcttagtgccgagggataacagatacacgcattactgncatgggtaaaggttgtgtcaactaaagcagatgtttctgcgcagatgctgctttgtagtcgacaatggtttggtagcattta

SEQ ID NO: 43460 - DNA, 226 bp, Glycine max
  Clone ID: PAT_MRT3847_139243C.1
tggattttgattctcgttatctgtgattgttgactcggcagatgcagatcttcgtcaagaacctcaccggcaagagcatcaccctatatgtggaaagctctgacaccatcgtcaacgtcaaggtcaagatccacgacaaggatggtatccccccggaccagcaatgtctcattttcgccggaaagctactttgcagaggtcgtacccttgctgagtataacattca

SEQ ID NO: 43461 - DNA, 391 bp, Glycine max
  Clone ID: PAT_MRT3847_139244C.1
gttaacattctttgttatttcatttatttaatcgtttatttgaccaaaaagggggccgaatatcaaataattcacccataaccgattggtcccgccccgaatccccagcataaactctcacccacgacgatttttgcaggcccaattcaaaccggtatacaaaacgtagaggccagacaaaaacaacggaaattaagcagagcctgtgttctcaggaccggcagtcaacattggttcagcacatgccggcggtggggctggattagcattgtcccctgccgttttatgaccactggcattaagattctcctcaggagggaggggttgctgcagcagaggctgctaaggaccctgaggagggggggacgctggagctaatggtgtaactggc

SEQ ID NO: 43462 - DNA, 438 bp, Glycine max
  Clone ID: PAT_MRT3847_139245C.1
cccacgcgtccgaaaaaaaaaaaaaaatttaaaatataaaaaaaaaaaaaaaaaaaaaaaagaaaaaaaaaaaaaaaaaaaaaaaaaaaaaaaaaaaaaaaaaaaaaaaaaaaaaaaaaaaaaaaaaaaaaaaaaaataaaaaaaaaaaaaaaaaaaaaaaaaggggggggcctttttaggggtcccagttttattttccctggtttgggttttcttgttttttttttggggtccctaaatttaatttatttggccgtgtttttaaacctttggttttggaaaacctttgggttttccaattttattccctttgaaataattccccttttcccaggttgggttattttaaaaagggcccgtccggttggcttttcataaagtttgccattcttgattggtattgggaacctcctttttttgggctttttaacgtgggg

SEQ ID NO: 43463 - DNA, 444 bp, Glycine max
  Clone ID: PAT_MRT3847_139246C.1
ggtttttgataagttggagtttataatgttttatattgcatggatgctggaacaaacatgttgaggagaggtgagattgatgtgaagaccaaagtttataatgtgattgatgttgtgttatgagaactaaaaattgtttatggatatgaacatacacagttgtgatgtgtcttttaagtgtctatatggtgattggtgtcttgttgctcataacataaacttgtaaccttcaccttcactattccatttgggcattttcttctgtctatttggtgacttctgtttccaaatcatggtcctgctttttttcccccccatacaggaacatatattgacaagaagtgcccctttactggcaatgtttacattcagagtcgaatcctagcctgttcttgtcacagtgctgaaatgacaatgaccattattgtatggaggagttttgtc

SEQ ID NO: 43464 - DNA, 1113 bp, Glycine max
  unsure (1)..(1113): unsure at all n locations
  Clone ID: PAT_MRT3847_139247C.1
ttttttccttctttaacatggaaattcgcaaattgtcatcaattaggcacaaaactggaacaggaacagtgaattcacagtagaacctagactccctacgtggcacaatcccagtggcccagttaacgcgaggagtgtatccagccattgattcaatttcactgtgaaaaataaatacagaactctgagcgtgagggtccctctcttccatacggataagtggggctctcaccattgttagggtttgtttctctctgcgttctttgctgtcccaattatttatttattttttcacattcacaatttttttaattacgaaaacccctattccattctgaattggggctctcaccattgttaggcgccagaaagcttcaaaccacagtcaacgtttcaaaactccgcttcgctgttcttctctacccctgcaaaacccactgaatggaagcgaatcccacccacgacggggatgacacctcggagacgccaccgccgcccatggtggacccgtccccatctccgccgcctcaaatgaaagaagaggtgatggacgcggagcaaggcggtgacacatctcttccgatgaccgttgttccggcgcatttgccggtgtcgaaggcggcggcgaagaggccgtcgaaggatcggcacacgaaggtggagggtcgtggccggagaatcaggatgccggcgacatgcgcggcgaggatcttccagctgacgcgggaactgggacacaagtccgacggggaaacaatccggtggttgctggagcacgctgagccggcaatcatcgaggccaccggcaccggcaccatcccggcgatcgcggtctcggtcggcggcaccctcaagattccgacatcctcggcagcaagacccgagggagaagttgacactccgaaaaagcgaaggaggagagcatcaaacagcgaattcatcgacgtgaacgaaaaccaggtttctgtctcttcagggctggcaccaatcgcgcaaagcgcgtatggaagtggtgttggtggtggacttgttcctctgtggcatggtaacgctgctgcttcggggcctttcttcatgtttccgaacgcttcaaacccgnctcagtattgggcc

SEQ ID NO: 43465 - DNA, 776 bp, Glycine max
  unsure (1)..(776): unsure at all n locations
  Clone ID: PAT_MRT3847_139248C.1
aacttcaaaatccaatatataaagaaatatatataaaacagagctggtgcacataaacgacaggcttcgtagattccctgatcagcaacacaatcacataattgcaggttggaggcaacccaaccccaccgtcatcaagcaccacgcaagaccttcccccgaaaagaaaagaaaaataaaaattatctaaagcattaatcattattataacgtacaccataaacctactactatgaactggaacaacatcttacacttacattacagctaatagcctcaccagtgtcactgatccaacctcatgataatagcagatttaagactctcttcactcctcattccattgggaagcttaacgaccacatcttgaagcatgagatcattaacacaagacatgctagcgtggtgaacctgaaactctaggtctcttaaagcacccattagcctagccccagggtggttcacattttctgattgtaccctcaccatggcatcgggccccacgatccttacatcaaccttcgagtccaagggggcctagacctaatctggatccagacccgctttgatccacgacggttgatgtnggtcgtggcactctggttatccagagtgncagncatttctgtcttcatttttttattactgnctctcggctgctgcgactccaagtcctcaatcttcgccttcnagttcgttgatgtaggcgaacagcgtcggacaacaacgaagccttgtccatcctcgaaacattcggaaaacagctcgtaaggcat

SEQ ID NO: 43466 - DNA, 563 bp, Glycine max
  unsure (1)..(563): unsure at all n locations
  Clone ID: PAT_MRT3847_139249C.1
gtgaataaatttaaaagataaaggttcaaataaaacactaataataattgtttattctagaataaaatttccttgtaccaaagtgagtacttattttaaccaccacaaataagttatcacaccccatttgagtgagtgatttttgaaagtgctaaataagaaggactatcatgaaaccaagctctttctgctaattgcttaagctctttagccctttccctcattacacatccttctttgtcatccgtatccattatcttgataactcctccctttggtgacacctctactcgaattgcattgccaacttcctccattagcattgtagcattcatcatttgctctgcaaaaagaggcaatccaattattggcaccccacatgaaacactctctattagtgagttccacccacaatgagacacaaaaccaccaatagatgggtgcttcaaaatatccaattgtggtgcccaatctgtgatcacaattccattggtttgtatgcggtagaactcatcangaaaagatggttcattattagactcaagagtagtttccattcccct

SEQ ID NO: 43467 - DNA, 211 bp, Glycine max
  Clone ID: PAT_MRT3847_13924C.1
catactactaccattctccaccacctccagtccaccaccacccttgcccccatcttcgcccccacccacaccctcatcctccaccacctcctaagaagccatactactatcattctccaccacctccagtccagccccactcttggcccgatcctctttcccactcacagcctcagccccatgcctaggctcatccagcggctggtcctcc

SEQ ID NO: 43468 - DNA, 461 bp, Glycine max
  Clone ID: PAT_MRT3847_139250C.1
tacggctgcgagaagacgacagaagggctctgtctcattaagcatatcttagcctttaggagtatgaatagagatctaaaacatatgtacattgatacttcatagtttagaatattcatgaacattgtatttaaatttcctgatgtcagcatgagttgtattaagggtggtttccaatttctacactttttttcacgtttggagtatacttatttaaagagaggacacaattttacagcatccttttttttttttcctttacaatcttataacctattctataccataacgaagtagccttaaaagtaaaagtacgcaccatcagatgatttacaatctatgagtttagcagccacacccgggggttttcgccagcttctgtcaagcccactaacctgttgaattcattttaaccaaatagggggaaattctagcattagatggaacaaaaagaaagaaaa

SEQ ID NO: 43469 - DNA, 781 bp, Glycine max
  Clone ID: PAT_MRT3847_139251C.1
ttttaaataaaacaataataataattgtttattctagaataaaatttccttgtaccaaagtgagtacttattttaaccaccacaaataagttatcacaccccatttgagtgagtgatttttgaaagtgctaaataagaaggactatcatgaaaccaagctctttctgctaattgcttaagctctttagccctttccctcattacacatccttctttgtcatcagtatccattatcttccttattgcttttgataactcctcccttccaaccatgttggtagatggtgacacctctactcgaattgcattgccaacttcctccattagcattgtagcattcatcatttgctctgcaaaaagaggcaatccaattattggcaccccacatgaaacactctctattagtgagttccacccacaatgagacacaaaaccaccaatagatgggtgcttcaaaatatccaattgtggtgcccaatctgtgatcacaattccattggtttgtatgcggtagaactcatcaggaaaagatggttcattattagactcaagagtagttccgattcccccttcctcacctgctgtgaaatagttgccggtgccagctttggtgacaggtgagcgcacagaccaaacaaatttatttccactcagctccaaccctaaagccatctctttcatttcctcaaatgacattgtgtatccactcccaatatcacatataccacagactcttcttcttgtttgtccagccactcaaaaacatcaccccacgcgtccg

SEQ ID NO: 43470 - DNA, 1302 bp, Glycine max
  Clone ID: PAT_MRT3847_139252C.1
ggagtagctgatctgaaaggaatggcgtccatttcgcggttctgttgtgtgcatatgcgagcgtctctatgcaacttcacagcccagaaaggtccatcacctcccacaaccttggacttggagcatcataaaacaacaccatgtttgctttcttccatcgaagaaggacgtgcggttaataggagacaacttattcttcacacgccagtagcagtagctgcatttgcagtcccaaatgcattggcactcaatgatgtgtctgaggatgttcgtgtctacactgacgatgagaacaagttcaagattgagattccccaagagtggcaagtgggaacaggagacggagaatctagtgggtttaaatccataactgctttctacccaacagtggcatccaattccaatgtgagcgttgtgatcacagggctgggaccggatttcactaggatggaatcctttggcaaagttgacgagtttgcccagactctagttagtgggcttgacagaagctggcgaaaacccccgggtgtggctgctaaactcatagattgtaaatcatctgatgggatttattacatcgagtattcgctgcaaaatcccggtgagagtcgcaggtatttatattcagctatcgggatggcatcaaatggttggtataacagactgtatacggtgacaggacagtatgtggaagaggaaacagacaagtatgcttcaaaagttcagaaggtagttgcatcatttaggttcatatgatgaacatggtcatgacgaggaagaaattttctcacagcccttcttcatcttttctatttcataacggatttttctttgcttagatcttttctattctggttcccctcagattttcatgggtatgttcataagctataaatgtcattccagatcagactagtatgataaaaaccatgacagttccttcaagattgttgaatgaaagtaatatacttgtggccctagttcctcgtacttttacttttaaggctacttcgttatggtatagaataggttataagattgtaaaggaaaaaaaaaaaaggatgctgtaaaattgtgtcctctctttaaataagtatactccaaacgtgaaaaaaagtgtagaaattggaaaccacccttaatacaactcatgctgacatcaggaaatttaaatacaatgttcatgaatattctaaactatgaagtatcaatgtacatatgttttagatctctattcatactcctaaaggctaagatatgcttaatgagacagagcccttctgtcgtcttctcgcagccgta

SEQ ID NO: 43471 - DNA, 719 bp, Glycine max
  Clone ID: PAT_MRT3847_139253C.1
ctgaaccaaaggaacacaatgagagggtgtacattgccgttaaccaaattcgtgcctcctcttccccatgtggccattggaatcaagttaaagccttttactttttccattgattcaactcactctctcagctcaacaccaaaacacccccttttcctctctacccatcatcactcaaagtccaatgcacacttctcattttctgtttctgcccaacaacaacaacaacaacaagtagaagccgatgaagaagagaactttcaagtgctcacagctctcaaaactgcgtgcaatgacatactcatagtggacaccccaaagtccagaatgctgctccttgattcatcttatagtgttcacagcattctttacaaggaacaaaaatggactggttcttactgggatgaatttgcaagcttgccagtcattgttccaaaaggtcccatcgcaatcttaggtttgggcggtggaactgcagctcacctgatgcttgacttatggccttcactgcaacttgatggctgggagattgatcaaattttgatcgataaagcaagagattattttggcctatctgatctggaaaagacaacggacaatggtggtgttttaaatgttcatattggtgatgtcttcattacctcagaagattttcaccaaagatatgctggcattatagttgacttgttctctgatggaaaagttttgcctcagttgca

SEQ ID NO: 43472 - DNA, 294 bp, Glycine max
  Clone ID: PAT_MRT3847_139254C.1
aaccaaaacggtggagatttgaaagaacaacgagatgtatccgagtatgtacgatgtaaaaacggacgttaccccttagactataattaaatcgcaagtgatacactcgatattttctcacgatcatataataaaacactacttatttttaaggcacacactcctagcctggaacatgaacgagataatcatgattctaataaatactgaatctagcttccacacacagtacttactgctgggcgcacttgcccctttgtgcaccaccaggcatgggaaatccttatgatatgc

SEQ ID NO: 43473 - DNA, 1006 bp, Glycine max
  Clone ID: PAT_MRT3847_139255C.1
cacgcgtccgcaaccatttaaaaaaaaaaaaaaagaaatggtggcagagaagctgatctgaaaggaatggcgttcatttggcggttctgtggtgtgtctctatgcaacttcacagcctctaatgcccagaaaggtccttctccttctctgcccataaccttggacttggagcatcatataacaaccccatctttactttcttccatcgaagaagaagaaggacgcgcggttaataggagacaacttattcttcacacgccagtagctgcagcagctgcatttgcagtcccaaatgcattggcactcaatgatgtgtctgaggatgttcgtgtctacactgacgatgagaacaagttcaagattgagattcccgaagagtggcaagtgggaacaggagacggagaatctagtgggtttaaatccataactgctttctacccaacacaggcatccaattccaatgtgagcgttgtgatcacagggctgggaccggatttcaccaggatggaatcctttggcaaagttgacgagtttgctcagactctagttagtgggcttgacagaagctggcgaaaacccccgggtgtggctgctaaactcatagattgtaaatcatctaatgggatttattacatcgagtatttgctgcaaaatcctggtgagagtcgcaggtatttgtattcagctattgggatggcatcaaatggttggtataacagactgtataccgtgacaggacagtatgtggaagaggacacagacaagtatgcttcaaaagttcagaaggtagttgcatcatttaggttcatatgaagaaaatggtcatgacgaggaagaatttttatcacagcacttcatctattctatttcattatggattttcctggcattgttctttaagctagatatggcattctagatcggactggtatgataaaaaccatgacatttccttcgagattgttgaatgaaagtaatatacttagtggccataattgaccattgt

SEQ ID NO: 43474 - DNA, 348 bp, Glycine max
  Clone ID: PAT_MRT3847_139256C.1
caatgacaaaccaggccaatggatttttttttggaggccaattggtgccctgccaaaagggggccggctttgatttacagaaccgaaaaaaaagcttacaacttatcaaggtcagagatggaatgccaacccaaaaaccgccgaaagaactccacgggcgagaaaggaaagcccctatgctccaacaaaaaaaccaaaattttcgagacagcgtcgacacttccggttgggaccagaggtggtaaaaaagcaacccttcctgtgcaaactgccaaaaaaatgtaaactgatcctcaaacactcaaaccggaacgaaatatatttatcccacgctgtggcagattatct

SEQ ID NO: 43475 - DNA, 244 bp, Glycine max
  Clone ID: PAT_MRT3847_139257C.1
atgcttgcaaagaattgaaatagatttcaaatgaacaatggacacccgtgagcgacagaccaaattatgaacaaagaatgcccacatgcatactaggaggactatatatatgccttgccctaatcgtagaccttaaaaactgaaagacgctgttatgcatggcagccccatgaaatatgcgtagatcatgcatatgtgttgctagacttgtatctcaaatatgatgttctggatatgactgaat

SEQ ID NO: 43476 - DNA, 361 bp, Glycine max
  Clone ID: PAT_MRT3847_139258C.1
atccacaggagtgtaagagagtttaaggggacttaacttacgcaccatgtgtttgctcaatcaattgagttagacctccttaactatagagcagtagttcatctatgcatctccacaaaatatgatcatgggcaaaagaagtaacttcactgtaaaatattgatttcaaaatcatcctactagtgttaattgaaaacctggtgtactaaaatttattatttggatattttatttaaaatcattcaaagtttagaaaaatttagtgagaattatcgattagctaaaaatgaagaattcgatattccaacaaaaaggataattcggacattttattctccctgaactctcacacatcttcctc

SEQ ID NO: 43477 - DNA, 405 bp, Glycine max
  Clone ID: PAT_MRT3847_139259C.1
gagcatcctctagctatctcgatcgaactgtccaaggtccatgtcacgtataaccgtaccaaacataacatgctagcttgaccacaggggaataaagccatacatactttgtctgttagccatgtgtgtgggtttagttggccatgccataaccttcgcaagtgccctttagcaagttttgaacgtcctacccgtactagcaccaacattcgtattaactaccttgttgttccaactttagccgatcctttatattcacataccgatgcccctttaggtgtgcctcactttgtcgatgattgtatgcatgacggtttaccgcatgatccatgcccatatgcatgccatggatccttcatttagaaattggtcttccaaatccactacgtgtgaaaccaagttatg

SEQ ID NO: 43478 - DNA, 481 bp, Glycine max
  Clone ID: PAT_MRT3847_13925C.1
cctactttcagcaagacacccgtttctgagttggcgactcatcacccttggaccagtgtggtacttcatcatctacttcccgttcaagaccaatccatgctcgtctagtgtcgcacgctacatctctgatgcccgggtgctgacccgagaggatgtgctccgtcaacggctgccataaacgaggcagctgctgcagcgctacctggcccactacttggccctagtcgatgagatcaccacctttcacaccttactactgcttgctgctaccgccaagaccccattcgtgtgaggagcacctgatctacagcggctgcatcggccgccacacacatcttcatatgtggggactgcagacattgtagatcccattaccaataacaggatgcaccatcaactgcatgtgtttcacatgttgatcctgcactgatatctaggagctatgtactcgcgaggaaacccctacgcatagctcagtctg

SEQ ID NO: 43479 - DNA, 277 bp, Glycine max
  Clone ID: PAT_MRT3847_139260C.1
caaaacctaagcttagaattagaaacaaagaaaagaagaaatgaaagaattgatcgttgaaaatgcatggaggaaagaaagcgtgagagtccattaaggaaacagctacaaacattggtgcttctgccaaggctggcatggagaagaccaaggccactggtccaatagaaggcagaaagaatgacagcacgtgatccggtgcaaaaggtagtgggcaccccaaaagaggagtggcagagattaagcaggcggagctggacaagcatgcggcgcgtca

SEQ ID NO: 43480 - DNA, 557 bp, Glycine max
  Clone ID: PAT_MRT3847_139261C.1
ctacagctggctgataggctacttgtgtgatttgatcgaaatgctgcttgagtgggtgctgcctttgaggtgcttctgtggatgaccactacagttgtgcctgcaactatccatctgcaacactacgctgaacttgctagagcgacacccttggaggaagcataaggactcacaaacccatgacttggacgagacaggcagaggctaacagtaagaaatgtgacggcaaagaccaatgagaataaaggaagacaagataacccactgagccttcccttttcacatatgctgacgacataagactaccatttattgatcaataatatgctgtcaatcagcaactgcttgcatggatatacagcctgttgatcaatccaagcaacaatgatgtgtagttaagttgaataggcatcacacatatgattgtctatactcttttattgtacaaaaaaaaaaaaaactgaggggcgtccatcgcttggaggataccctatgtcggttcactggatgtaactgctcaatatgctgaaatccttgcatggatagaagccgacgtg

SEQ ID NO: 43481 - DNA, 717 bp, Glycine max
  unsure (1)..(717): unsure at all n locations
  Clone ID: PAT_MRT3847_139262C.1
gcccggattaccacttcttcgacggaaccagcgagaggcagaactgcacagaaaagaaccatatccaatggacctacaacgctggaatccacatgtctggcgttgcagcgttgtggaacatgtcagaaacgaacggtgatgcggaagcagcgggcaggtggcgagagcgcctgggtggcatcattaatggaacagacatcttcttcaacgccgaaggcgccccaggtgtcatgatcgagatggcttgcgagcgcaacggactatgcgaccacgaccaacgctcattcaaggcctacctcagccgatggatgggctacacgatgctgagcgctccctggacccgcgacaggatcatgccaaaactccgcacctccgccgcagccgccgctcaacaatgcagtgccggaaaaggtggatgcggcctcaggtggtggcgaggcggtgtgaatgatggagaagtgggcgttggagagcaaatgtctgcattggaagtcatgcagaacttgcttgttgatcaagtctctgggcccgtgggactcgatactggtggaatcagtgagactgaccctaccgcgggtagtgacgggggaaatgtgcggattgagcatgacgccatcacgacggnggataaagctggtgcggcaattcttactatagtagtatttgctgtgtttttgggtggaggtggttggcttattatgagcgagtaggttcgtt

SEQ ID NO: 43482 - DNA, 408 bp, Glycine max
  Clone ID: PAT_MRT3847_139263C.1
atgggagtatttacaggttgagtctaagtttctgcaaatatcatcaccttttgtgcaatcatgatattattctgatatcattgtttttttcatgggtattagtttgccacttgtggtcagttaatatttaatagatttttgaacatatcactgtaaaaattaatacttgacaacttttcacgagtatgatagccatcagattaccaatacaagctttatcatgttagctcacatcttgttcctctctgcatctgttcaattagattagttgtttccaaatgcatgttttgtcttaagtatacgtggttctgatttattttgttttcatagtttataatgtggtttagtagtgcgccttttacaaaccttgctcatgagggttgcgatgagaaagaaatcatttatgtg

SEQ ID NO: 43483 - DNA, 489 bp, Glycine max
  unsure (1)..(489): unsure at all n locations
  Clone ID: PAT_MRT3847_139264C.1
tacggctgcgagaagacgacagaagacgagaaaatggaccttcagttcttcaccttcttcacttgaatcgcaacttcccaaatccaaatctcacagagaaaccctaattcaaaccctaaccctcccaaaatgtcctcgccgcttacctaccccgcggtgctcgacgacaaggacctcgacgacgccgcattgtgggccatgatcgactccgccacagcctcacactccccctccaagtgcaagtccctagcctccgccaaattccccatccgccagctcccttccccgatctcaaacccctccccgccgcccaagttccggaaggtcctccgggactctggcgacagcggcgaggtggtgcaagacccgtggccctaccgccctccgcggaagatcgcgaggacgtgtccttccgaggagagcagccccctcgctctggtcagaggcgtgcagaggacgccgncgccgctgaagggcttctcgtcgccg

SEQ ID NO: 43484 - DNA, 282 bp, Glycine max
  unsure (1)..(282): unsure at all n locations
  Clone ID: PAT_MRT3847_139265C.1
tttctttgtagttctcaaatttattcataaaactttgtgtttccacaactaccagggaagtanatcattcgggaataaatcatgaatggggctagtagcagtaaaananaaagaaaaaggggaggtcggcccaaaagtaattactggaatgaagttgaaaaaataggtgacatgtggaagtgcaaccattgtgaaggggagttccatggaggtgctacaagaattaaagagcatatcattggtggaggaaaaaatattagaaaatgcccccactatcctgct

SEQ ID NO: 43485 - DNA, 393 bp, Glycine max
  unsure (1)..(393): unsure at all n locations
  Clone ID: PAT_MRT3847_139266C.1
cccccnntccttatctggggccccggggggcggtgtttgcccttgtctttgcccctgcgacaccgtcacgcaaaaaaacgcccctggccggccacggacaacgccgggagggggccaaccctggccaaccccaacccaagggccgggcgcggcatccccccaaaggcggggggcaaaaccaagaaggggcccgtgacgatcgccccccccaccggaggcgcaaccggaaaggggaccggcacgcgcccggccccggcccctcacccccggcgggaggggcgggaacgcccaccgtgggcggcccccccgccacagccccaacgccggcgcctagcgggggtgccccccgccccgggccccgggcacaggccgcccccctcaagcccgaccccg

SEQ ID NO: 43486 - DNA, 696 bp, Glycine max
  unsure (1)..(696): unsure at all n locations
  Clone ID: PAT_MRT3847_139267C.1
cgtccggaattcatgattaccgaaagagtccgaaagggaaaggttttcccccgaaacaaaaatccctctcagctcgagtccgaggaatgaattccgaaagagaaaaagggggaaagaaaattttcgcatagtaagctgtagtatccagcagctaaattaattacattagtgttttcgattttgctgtgtgttcttcttctgtatcgtatcaccgtctcgcgattttccatctccatgacttcgagggtttagctgtgttgttgaagcttcagaaacgaaaccctagcttgcgaatcgttttttgtaaggaatggcctcttacaggcccttccctccccaatcgagtcaaattccaaacccgatcccaggtgggaatcatcagtataataataataataatcaaaatcaaaattggggtgcttatggagatccctctacttcttcattcccccaaatccctccaaattccaattatcatcaaaatcaacatcatgttccatatgcaccagcaccttcaaatccccaccaccctcctcactatccatatccaccaccaccgccgccgccgccgccaccggaggcttcataccagccgncgncgccaccaccaccaccagctgctatgtattatccctctagtagtcagtatagcaaccagccacctgcaccgncaccgggcttgtcggccccccacca

SEQ ID NO: 43487 - DNA, 798 bp, Glycine max
  unsure (1)..(798): unsure at all n locations
  Clone ID: PAT_MRT3847_139268C.1
gtacttggttcctgtctttgtagcagaaattgcaccgaaagaactccgagggacaccgactaccttaaatcagtttgatttctgcagcaactattgtagctttggaatcattggagtccatatatatatgtatagttcgtgatcactgctgctgtgtcagtgtcattcacaattggaaatgtactttcatggagggctttatctataattggcctcattcccactgttgtattgcttttgggtctgtttttcattccggagtctcctagatggctagcaaagagaggacgtcaaaaagattttgtggcagcgctgcagatacttcgtggcaaagatgccgatatatctgaggaggcagaggaaattcaggattatataactactttggagcggctcccaaaatccaggctactggaattgtttcatagaagatatttgcgctcagtcactattggaataggccttatggtctgccagcagtttgggggaatcaatggaatttgcttttataccagcagtatttttgaactagcaggattttctcctaccatcgggactataacatatgcttgccttcagattgtgnactacaggtcttggagcagccttaatagataaagctggcaggaagcccctacttctatttcattttagatatccggatcagnattggtagtangaatgtatgtttgcagcagttgcattctattctcaggttcacgaggtgnggtgtgcnggcagttccagcacttgccgtaatgggcatactggtctcattagggatcattttcaatagga

SEQ ID NO: 43488 - DNA, 379 bp, Glycine max
  unsure (1)..(379): unsure at all n locations
  Clone ID: PAT_MRT3847_139269C.1
ggctcgagtcanaacccacngttgngccaatttttatgtttaggcgatacgagaagggtgttggtttattaccatgccggggggtcctaaccattttttgtgtgagaagcaagctactgaggtgcttgggcttgtggtggagttgggtgtgtctgaatggagcatgtctccttatgatgccaggaaagaggtggtgggttgggaaccaatttagaatgctttgaggaaaggtatttaaggataaaggaggttatcttaacaaacaagttaaaggtatgtaggataaagcacatgtattttgttcaagatggtggtaacttttactactatgttttttccttttttcaatgactttgactgtttttgaatgttttttgtt

SEQ ID NO: 43489 - DNA, 806 bp, Glycine max
  unsure (1)..(806): unsure at all n locations
  Clone ID: PAT_MRT3847_13926C.1
ccacgcgtccggaaggatccaatgctgcattgagtaaaatggatcagttgaataaagatttgcgacaaggatcggataattcttctccttccttggcgatgccagttatgccagagacaacacaaatctctgccgaggcagattgtgctccagtgaaaccattgtatacaaaagagttatcaaccagtgaaaacatagtaagccagattgaaaattctagtcttacggatggagtcgatgttgagaaagtttgtcatggtgtttgtttaaatgccgagcaggttaccatagaaacagttgctatgcctatggttgataatggttcagagttgaatgatcctggtctgcaaacttcttctgttagaactgaggaagaaaatgctgctgatcgtgatgcttgcagattgaaactcatgaatgagcctccacctgtcccacgaggcaatggtgaaggctgtgtaagtgatgaagaaaagataaccctatctactgatatgttagaggatgattcttacggttctgattgcgagtcagatgagaatcgtgctgtaactattggtgtggataccgaacggtatgttgaagatgatgattatgaagatggtgaggttcgagaaccactggatccttccacagcagaagacaccatatgtgaggtaagagaagtagagcatcctgactgtagtaattntgtaaataaacagatggaaaaaggaatggtgagtggcgattgtnccacttcatatcagntggtggaaaaatgacatattactggcattcaaagtgaaataatatgaagttgttga

SEQ ID NO: 43490 - DNA, 319 bp, Glycine max
  Clone ID: PAT_MRT3847_139270C.1
gagatggctcttatgtgcgttgctgttctagataggccgtatgcatgggccagaacgtacaaagtcaaaagtgacgaaagatggaagagagcatgactgggcaccatcaaccccggacttagatggactataacttatcatatcaagaaggacaaaaaagcatcacatcaaaggcagcatgatgcacaacaacgctgcattctgatgcagcacgggtatgaatgtcatatacaagggagccacttgcgagctcagcagggaaggagctatagagaacacatattggggaatttgaaattctacgttttacaaccaatgc

SEQ ID NO: 43491 - DNA, 1103 bp, Glycine max
  Clone ID: PAT_MRT3847_139271C.1
aacaagcttatacttcatagcaagcgagagtccagggcagttatatatccaccgtttttatacacgcaccactaaaagccacgtgtactagtacaccacagcaagtaactcaagtatctcctaaggtggacgtagaactaaaggccaccttcaacttttgtctctgcaaaaccaacacgtgttcagcatgcaccatccaaaacattccaaatactcttgggcatgtagagcgtccgcccacgcgtccgtacacgcttacgcccaacctttttttccaaaacaaaaaccaatgagtcatggccaaaccaagaagccacaagcagacggtgaacccaccgaatgcggcgacgttttcggtgtctccaccgccgcggagcctcacgctgcgccggtggtgtccgccggtatcggttcggctgccatagatggcgaccccataaccatcggagaagctctggaagcggcggcaatatcgatcggggataaaccagtggaccaaaatgacgccgatgcgattggcgtcgcggagattagggccaccggagagaataaggtgaggtccggtggggtgggtgaaaccgcacaagaagcagctactttcaacagtcacgtcatgcgagtccaagacatgacgaaactttccgatatcttaacggatgcggcggagaagctccccgtggacaaggcggtgacaaaagaagatgctgaggctgtgtatactgcagaggtgcagtttccatggcagagagatgcggcggaagtggttgctgaacctggcggagtggcggcatccatggccaccgcagctaacctaaatgaactaagttgaagtttgaagtgcagtgcttcctcttttttaaatgtgttattgagtaaaattaaagtagctttataactgctgaatatgcaaatggtatcttgttaactactagttctttgttttttactagtctggtactatgtcattgtaaatttttttagtattgaaaaaatgctttataaaagtggtgaaaccttgcagctgatggtccaaaaggaagtgctgagttatcattccttaagcaaatttaactaattttatattatttaatttatcattcttg

SEQ ID NO: 43492 - DNA, 327 bp, Glycine max
  Clone ID: PAT_MRT3847_139272C.1
atcgagccgctatacctgcgaggcctaaaggacctggatagggtaaatccgagctgactacagtacctgcgttgccgatagttcgtgatgtgcctaagccaccagcccttaagactcccgtgagaccttgggcacttgacctgcctcagccagctttacctaagatacttgagagtcccaaaggttctcaattttctaaggcattggccaccagcaatgcttgactgatgagttatgcctgatgaagacccgttgctcaggacgatacgggctgaatcacagtcccttggtaatcttgggtgatggacgtgatactctctatgcatt

SEQ ID NO: 43493 - DNA, 387 bp, Glycine max
  unsure (1)..(387): unsure at all n locations
  Clone ID: PAT_MRT3847_139273C.1
aaaaaaccannaaccctnnttttataggggggggaaacgggtctttattcaaaaagtttgttcaaggccactcaggcaagtttagacaaaagatgagtaaaatccaagacgaggggaaactctagggaagttcctgggcctcatactgacctattttgactgaaccctaatcctacgctctacaggccctttttcccttgccccctttcttaaaatgattttgaaaacaaaggcctttgatttggtttggtgggaaccaaaaacctttggaaaggtaccaacctttagtctacccagctttaaaaggcctatttttttttcaagaaaaaaaaaggggatggaaaaggtaaatacccccccccccgttttaaaaaattttaacccttt

SEQ ID NO: 43494 - DNA, 342 bp, Glycine max
  Clone ID: PAT_MRT3847_139274C.1
agaaacccaaaactctataattctaacctctgtcaacataaacatgaaaataagcacgcgttcactattaatcaccgttatgccagggaaaacccccccgttacaaaaaaaacagccctaaaaaaccgggccggggtcaataaactgcccccccccaagaaccaaaacaaggaccgacgggtaccaaaccccccctttttaactggaagcccctccaggccctgcacatacatgctatgttcatccccctcctaatgcactgtaacaccctaaaaggctctcaagcccttgaaattgtccacatcgccttcttcgaattccttcgccccaccctaccggaaa

SEQ ID NO: 43495 - DNA, 780 bp, Glycine max
  Clone ID: PAT_MRT3847_139275C.1
acatagtactctgagttgaaaatagagagagatagatattggcacgggaagacgacagaagggggtgagttgtaattaagcacactatttccacccacaccacaagctccttatcgtgtttgcattgcagagagagagagaatggcgaccacacccggtttgtgtggcagtgtgttgttgagcacctcgttcctgaggaagcaggcaatggcatcagtgaacatgagaatgctgaaggctaatgctggtgtttttggcttaaagggagggcgtggagggcgtgtgagtgcgatggcaagttacaatgtgaagctgataaccccagaaggagaacaagaatttgaatgcccagatgatgttttcattcttgaaaaggctgaggaatttggcattgaccttccctactcatgcaaggctggtgcttgctcttcctgtgccggcaaagttgtttctggcaaagtcgaccaatctgatggtagttaccttgatgatacccaaatcggtaacggatttgttctcacctgtgttgcttatcccacctcagatgttgttattcagacccaccaggaggatgagctattctagttctatatctcatgtctctttctatcttgcattttcatttatatgcttgtttatcatatcaccaacttcaactgtagtacctacgtaccatgtcatcttcattcttgaataacaatatccttaatttatttccaaaaaaaaaaaaaaaaaaaaaaaaaaaaaatatattttatttttattttttttatattaaaa

SEQ ID NO: 43496 - DNA, 855 bp, Glycine max
  Clone ID: PAT_MRT3847_139276C.1
ctttcgctgttgctcgtgttcagccctccattttcttagttcttgctctacgcctaactttccctcccttgccttttcggctttatccattgcaatcttcagagattcccttctagcagccatctctctattcacatcattcagcttctccaaggttttcaattcagactccttagctatctcaatttcagaattagcagctgcaaccctcatattcgcttgctgttctgcgtcgtgtgcttgtttgctgagattgtagtactcctccacagaaagtgtcacccaagaggatgaatccaattcattgttgttcctagatgatgattcactctcttgcaatgctttagttgctgctattgccaacctttcagaagccctggcggcctcaatctccttttgagctgcaagtaatttgctttgcattgtacttgcaccagcctttgcttgctccgcctcctcctttattcgtcgcaactcttcgcgagccgcttgagcaagcaagttggcctgattagcctcttcaactgcttgctgtagtttcttcggtagctcagcgattttctctctgccttctttttccttcatctgaaccaaaaccatttctgatctagtgctgtccagttctgcttcaagagatgcaactgtaatggatgccattccctctctttgcctgatggaggcaaaagatgatttctcattttcaagttctgattttaatgatgccgcggccacttttaagtaatttacctcagcggtagctttctctatgttaagcttcacttcctcaagttcctttttggctgatgccaactgctctttgaaatttaattgggtgcttcttctctgggttctcta

SEQ ID NO: 43497 - DNA, 192 bp, Glycine max
  Clone ID: PAT_MRT3847_139277C.1
ggctcgagtgttgcgtcaccaagcctagtgtcgcagctgtagcgttaagtgcggttgcgtttttgtgtgggaaaaccgtccgacagccgcaagctttggctggtggggtggtgggaattgtcatgggtgccgatcgtcttacttctgccaccagctgcaccgccactccaacggtgagcagggtctcctccg

SEQ ID NO: 43498 - DNA, 975 bp, Glycine max
  Clone ID: PAT_MRT3847_139278C.1
tttttttttttttttttttttttttttttttttttttttttttttttttcagcagcattttttttttgcatgtgtattgaagatcattatattttaaaacagtaagactcttaaaattttatcattcaaactgaacaagttaaatgtgccaatgctttttatccatcgaaaactgaacacagcaacagctaagacacaaaaagcctctatttatagggaaaagaaatgaaggaattgcatagttcaacattgcaggccagtctatataacgaattctttgctttgtttgtccgctacatactaacaacacaagcgcagttcattaaagagtacatatcttcacccaagacaggtataaccttcgatgaacttatgcagtgtgctcttcaacatctccattttcaccatcttcagcagcagcagcagcagccgccatcaactcatcaaatttttcagtcttcccaagtaatatttcaatcttggccttttggacaggtctgcctctagaatcatctttgatgtcaactgttgatgtcgtgattttcttttcaatagcaagctcattgtttttcaagatttcagcaacagtaaccactgtagcaatagccattcctagtgctgagagctcaacctcattatgctgttgcatatacctcttggcgagattgacgtagaagaagagaggctttttggtgttggagacctgaatgcgattcttcttgtaagaatcagagatgttgatgttgttcactccctctgtgattgcttccattgctgttgtgtgactgtgagaaaacaagagcatcagcacgcagccgaagaaaccctaatcaaccaaactctttgattgcttccattgctgtgtgactgtgagaaaacaagagcattagcacccgaagaaaccctaatcaaccaaatgttcccccaaatctgtcgtcttctcgcagccgtactcttctgaaatcgtcgcagccg

SEQ ID NO: 43499 - DNA, 603 bp, Glycine max
  Clone ID: PAT_MRT3847_139279C.1
cagacatttttttctgggctggaatcccttgatgattttctcacccaggctgccactggtacaggaaaaccagcccttcattcttttaatgggaagggtggagaggaaaattttgtcacacctgcttctagttccattaactcttttggggaatgtgatactacccaagttcaaaggtgtcccgagtatcatactcctcaagattcattaaccttcaatgaagctgcagtcttcaatgaggatgatattcacactagcaataggaggttggaaacagaggaaattgtggacttgaatcctgcctgcccaggtgatgatgtgattgattatcaatccatgaaatctggcgaagatccaactttgggaattccagtgcatgaagagttgacaaatgctgcagatagtcccacattggttgattttttgcatgcagatgttacaagggaaaaagaagattccaataagagaaaaaaggatggctcaacatcatgttctctaaggaagaacagaagatgtattgctggtgaggaggataaaggtgctaaaacctcaaggcagctgagaaaacagcagctcgtaaacctgtaaacagttcactcaatg

SEQ ID NO: 43500 - DNA, 557 bp, Glycine max
  Clone ID: PAT_MRT3847_13927C.1
atgaaacaagagacatcctctgttattcggtcggaattagggcgtctgtaggcgctgattctgattggaagtatgttacgcagtgaattaaattttgttgctttgtctcaatctcctcccagtcctatccattaagagaattaccagatccattgttggcaccacttggctgattatacgacaaattctacttagattaatttggttcttttatatttagatctaaatctcattaccccagcatcattccgtccacatagagctcacaattcttgaccgacacagagagaatgcatgcagccaaattgttcagtaatgtaacatgtgaatactcttctcaagtgagcaacaaaggtgggagtgagtgctctccaaatgtacgagaaacttgaaactggaggttagtttaacatttctctaaaatattgggttgtttgacttatttattacttgctgaagttaccaacccccctaacaatcattgtaattgattcaccaaggtctctgtcaccttggttctttgctataccatatatggaatgctttttgattcaagc

SEQ ID NO: 43501 - DNA, 942 bp, Glycine max
  Clone ID: PAT_MRT3847_139280C.1
tacggctgcgatacggctgcgagaagcgacagaagggggatttggatttgggggaacatttggttgattagggtttcttcgggtgctaatgctcttgttttctcacagtcacacagcaatggaagcaatcacagagggagtgaacaacatcaacatctccgattcttacaagaagaatcgcattcaggtctccaacaccaaaaagcccctcttcttctacgtcaatctcgccaagaggtatatgcaacagcataatgaagttgagctctcagcactaggaatggctattgctacggtggttactgttgctgaaatcttgaaaaacaatgagcttgctgttgaaaagaaaatcacaacatcaacagttgacatcaaagatgattctagaggcagacctgtccaaaaggccaagattgaaatattactggggaagactgaaaaatttgatgagttgatggctgctgctgctgctgctgctgcagaagatggtgaaaacggagatgttgaagagcacgccgcataagttcatcgaagttatacctgtcttgggtgaagatatgcactctttaatgaactgcactgatgttgttagtatgtagcaggactagtaaagcaaagaactcgttatatagactgtcatgcaatattgaactatgcaattccttcatttcttttccctataaatagaggcttttttcgtgtcttagctgctgctgtgttcagtttatctttattcgaaggatagaaagcattggcacatttaactagttcagttagaatgataaaatatcaagtcttaatgttttaatattattttatcactagcagagtaactgtgctaattgggcagagccgggtatgtattccaaatcttctaaggttctgtattattagatcaatatgaacctgctagaagaatattcaatacacatgcttggcggt

SEQ ID NO: 43502 - DNA, 463 bp, Glycine max
  unsure (1)..(463): unsure at all n locations
  Clone ID: PAT_MRT3847_139281C.1
tcgattttaattactcttttaattcttactatataaaaatattagtctacaaattagttatgaaggtatcaattacttcttttattacgaaattattttatngataaacttagtgtatgaattattctgttaatatatttcatagtctaattataatctgataatactgactcatatttntgatgccaaaagagcttaaattaacattacaaatataaagggatagaaacttaaaaatatcaatgttcaatactatanggagattaaaaaaaaatanaaatacattagactaaagaaaactgacttttacaaattataagaagattaaaaaacaattgaaaatataacattatgcgaaattaacaaaaggtaaaaatgggagaaacctattgtggaagtaatttatactttagacaagttaaattcttattttattacatgtaacggatatttgatgcttgtg

SEQ ID NO: 43503 - DNA, 683 bp, Glycine max
  Clone ID: PAT_MRT3847_139282C.1
agcagccactgatcattgatgagagagagaagagaaccgttggcgttgggtgcatcgtgcatgtgacaaacaaaccatcaaataaaaaaaaaggtgatgggttaagcaagagcgttgaatccggtagctttatccaaaattgtaggtaaagtgggggcgaaattacatttgggatgcatttggtttgcattttggtttgcgtgtgttttgtcctatctgggtgcgtcaaccccacaagtgtaaagtcacccagcttcagcatttctataaatgccctattccttacacttctctcttgtttaattttagctttaggttcttcggtgagagttagagagagagaagaaggcttttttcttttttttttttcttttttgttggtttctcttgttcttttttgtaggtactgaggaagaaagaccaagactttatccgtgtgcttcacttagctcaagagcgtgtataagcttagctgctcaggctctaatatacccctgccgaagtttatacaacaatgatgggcctgtaagtaacgagtcatgatgagactaagcagctgggacctgtcacggagtggatgtaacagttgaggaaaggacagttatgatgctcccaacaagttttggtggatgatcaagacactatgaaaagttgaaaagtctgcatacttaatttcaacatag

SEQ ID NO: 43504 - DNA, 2700 bp, Glycine max
  Clone ID: PAT_MRT3847_139283C.1
ggatgagagagagaagagaaccgttggcgttgggtgcatcgtgcatgtgacaaacaaaccatcaaataaaaaaaaaggtgatgggttaagcaagagcgttgaatccggtagctttatccaaaattgtaggtaaagtgggggcgaaattacatttgggatgcatttggtttgcattttggtttgcgtgtgttttgtcctatctgggtgcgtcaaccccacaagtgtaaagtcacccagcttcagcatttctataaatgccctattccttacacttctctcttgtttaattttagctttaggttcttcggtgagagttagagagagagaagaaggcttttttcttctttttttttttcttttttgttggtttctcttgttcttttttgtaggtactgaggaagaaagaccaagactttatccgtgtgcttcacttagctcaagagcgtacaattcaggcaaaggccttgaagtcggagtgtgttaaggtttcttaggagttgctgctgtcttgactgaagaaatggaggtatatggcaaatctatggttgcaggtcctgcaaatgttatttttctgtcaagtattttgggccaagaaggtccgattcctggtcacaaatgcgactggaaatgtcaaaatgaacatgtttgtggaaacatgtatcgctgcaagctaactgggcttactcacatctgtgataaaaactgtaaccagagaattctgtatgacaaccatagttccctttgtcgagctagtggtcaaattttcccccttacaccagcagaggaacaggcggtgagaggcgttcgaagaaagctcgatgcagagaatttgccttctgaaagctgtggttttaagcgtagacggggggatgcccaattccatccttctccttttgagagatctttctctgctgtcagccctatctgcagccaagttggagatggcatggatatgagctagatatatatatatatattatttaactgaaaaaactctatcatttcacttgtcctttttttctccctttttctatcatgagtatgaataaacggaacttgaacaattatggttacttatcgatggacatgtatgttcatctattgtaggaactccttatatttctagtatcaatgtaatgtagtgcttaatgtagcttgactgttaaatggggatttgagtaggctttatttggcattcagatagttatgaaatctgaattgacttcagtttcttgctaaccttggtgagaagcagactttgtagctggatctgaatggtgcactatgaatcgaccatgtactttaactgttttaacattttctagccagttgttaggtttctagtgtttctgtaatcacagggcagcgttattcaactattagtgtactcattgccaagagtagtgctgttaagttgtattattttaccccttttatatccctcaattccactggaaactgctcaccattatcgatcttatcacttattaggctttcagggtcaggttgattgccttgacttctgtaagctcaggttctctccagttcctcacatggacaaagttgtgcatgtgaaaactaatttttaattttgctgcctaatttcttgatcttttgcaggctcaagagagatgttcacattttcataatattcatgttttgattatcttatttgttccatgagttaactgatgtctggctgtctgagtttaatgtgacttgtgcaggttttgaagcatatgctaccaaggagcattcaaaacatttgtgttgcaatactgaattacattttaatatggatttgctctagactagaagatgaaatatggatacttctctttttttcttgtaggtataagcttagctgctcaggctctaatatacccctgccgaagtttatacaacaatgatgggcctgtaagtaacgagtcatgatgagactaagcagctgggacctggcacggagtggatgtaacagttgaggaaaggacagttatgatgctcccaacaagttttggtggatgatcaagacactatgaaaagttgaaaaagtctgcatacttaatttcaacatagtttgaattttgaagtacaagaccaaatgaatttgtctttcactatcatttcttgccttggtgacttgttggtcatgggttcgaatccggaaacagcctctttgcatatgcaagggtaaggctgcgtacaacatccctcccccataccttcgcatagcgaagagcctctgggcaatggggtacgaagtttttttatattagttgttccttgtgaggtcaattaaagggtagccatatatattaagggggtctaactcagttggttgagtaaggtgtagagtgttgtaaactttttggtaccgcaatcattttttacaaataaaaaaagggtattcatatacaatactatttttatctacaaataattgaatcaaaacattgttatatccgaatatttattctggttttgatgcacagataataaggaacacggccgggattcctgaagttttaacgaggttggatgcagcaccgtctatcttgggagattcaagtccagagtatgaaagctaggaaatgggaagtgaaattttgtcccagcttaatcatgttgatgaatcaaattcttgttcctctcagcagccatggacagcttctgtttctttctcactgaaaactccttttg

SEQ ID NO: 43505 - DNA, 759 bp, Glycine max
  unsure (1)..(759): unsure at all n locations
  Clone ID: PAT_MRT3847_139284C.1
gatattatnnnnnnaaaaaaaacaattgtagctctgcacctcccacttacgtaatatgtagttgcatcgagccagacaggtatattccaattcccccaaaccgtaaacacactcaagcactgaggcacaggcaagccaattaagggataagggacataaatgagaaggaaaactaacaatgaggtagtggttaatattgtgttcgaattgggggctgatgtagaattttcagggattagagggttcattcctacaccatccccgccatggattggagttgttgtggtaggtgctgccacattcggcatcgctgcaggtgttgtcactgttgtatttgtatttgtaactccagcagtacttggggttgcggaggatgggtacacgcaagatccatagctgggatcggtttgtgcgatggtggaagcaccgtggaagaggcatgcatggggagctctagtgttgcgctggtagaagctgttgaaagcataagaagcatgagcttgaagagtgttgggaacgtagcagaggccatcaggctgaatgggtgcacaatcagctccaccaccggcttcacatgcagagtccaatgccgtctgcagtgcttcctcgctcgcgccaatcttcgccacgcaccaactcgctgatcctcccactatgcttatcatcaccatcaccattgtcgtcgtaactgttatcactatcatatttctcatcgccatttgcctgctgcttttccttgagggagggagggaaataaca

SEQ ID NO: 43506 - DNA, 432 bp, Glycine max
  Clone ID: PAT_MRT3847_139285C.1
gccacataataataatatgcttcattaactttagcaaacaaacaaaataaattagcaaaagataagagcggggcaatgcaacaaaaaaccgttacacgcaacgggaaattgcaattcgaaccccgaaggagaaaaacaataataatagtggtaaatattcttaagagcaaaaagagaaatgctgctgtggatgacataacagagagtcaatcggtgctggtcattttaagccgtctgattggagaggcaagcacgctggctgaagaagtacgagaagatgacggtgatggtgaggaaaccgacggtgatgatgaaagggtaaaaagttgacggtggtgataatgacacgtcagaggtgtcttgctcttccagctttcttttgttgtttatctgcagaacaccaccatcaccaccgttaacatagccatcact

SEQ ID NO: 43507 - DNA, 366 bp, Glycine max
  unsure (1)..(366): unsure at all n locations
  Clone ID: PAT_MRT3847_139286C.1
ctgtatactttttttgaacnacacncgcccaccngggcgcactgacgaaaagaaatctaagcggaataagagtaacattcatatgtccggctgattatacgacggcggaaacagacactggactaaacacgagaaaaatcttgctttgacagaagaggaaaagatggaggtgattagaaatagaggcattgctgctgatgttcttgcaaagcgagctcatgaatttgaaacacatgctgctcatgaaagcctcaaggatcaaattcctgccggtgacaagcagcatactactaaggttcataagtttgcaaaaaatatgaaacttagacaaagtgttgtgggtgaacttaaacatcctactgatgg

SEQ ID NO: 43508 - DNA, 159 bp, Glycine max
  Clone ID: PAT_MRT3847_139287C.1
ttacaactcccagtagtgagtcgtattaacgacagaagggggagtcagcaataacctcagtcacaaccgacggagtcatttattttacagcacaagtcattctgtcacagtgcggtgttgcacaggtggtcatcaggtgaaaggtactatttcgtgtgc

SEQ ID NO: 43509 - DNA, 260 bp, Glycine max
  unsure (1)..(260): unsure at all n locations
  Clone ID: PAT_MRT3847_139288C.1
gtgaagctagatttgcacaggctcttaaaatgctggcataagtggccgagtcagcacctattttggctctttgcatctcaacgaatagctttaggccatcttcatggagtcccttctgaacataacccgagatcaaggcngtccatggaactgaactttgatgtgccagatctgcaaaaatcctatttgcttccccaaatttgtcacatttagcgtacatgtcaactaacgaattcctaaccagaatttctgaaatggct

SEQ ID NO: 43510 - DNA, 553 bp, Glycine max
  unsure (1)..(553): unsure at all n locations
  Clone ID: PAT_MRT3847_139289C.1
tttgaagaacaattaaacttacgccacacttaattcagcttaaaacaagactacaaggacaaaacagaatgacatggccgtccacggtgatcaccatatacaccaatgtgcacatggagcatacttatttataagttatgcctagaaaacagaaaaaaaaaaaaaaagagacaaacttaagcagaaccaccttatgaactaccatgtattacaatcatgcatgcatgagttaactcatggagcagctggtgctggaacacttccaccactgccaggaatgggaacctcataaccaggatttggcacaaaagtgtcatcaccactgccaggatttgggaacctcatcctccatttccatagccaccaggaaatggattttgaggtgtgaggtaaaatttaggtagaaatcctacaggtccaaggaggaggatattggaagtgagaacaagtgcaaggaaaaaggaagctttggaagccatttttcagataagaaaaatgctgaaacttgaaagcaattaaggggggaattgaatgacnnnnnnnnnnnnncnnt

SEQ ID NO: 43511 - DNA, 488 bp, Glycine max
  Clone ID: PAT_MRT3847_13928C.1
gcacgagtttcactccctttgactcccaacccatcaccgtttcaaccaaccccctcaccccatttcataaatttcgaaacttttttcgcggctaccccaacattttgagacaccatcatttgcctctctctgtttcccagaaacagagttcccctgttccgaacagaaccctatggcaatagaagtgtgctccgagatatctagcacgggaatcagccctcgaatctcattctcacacgatctaaagaacacagaggatgcatcggttcgtgttgaagatcgtcaccgtggatcagacttatgcctcttggactcaagctctgacttcgtgttctgcatcaccaatggcttagctcaacaactctcttcagccgatgaactcttctccaatggaaaaattatcccaacggagatcaagagagtttccaaggaacccaaagaaccttctcgacctcaacctgcaaccacggaaaagattcaaaagaaga

SEQ ID NO: 43512 - DNA, 831 bp, Glycine max
  Clone ID: PAT_MRT3847_139290C.1
ggaagcagaaaaacagaaaaagaaaacaattatcagcaataataaaattataggcacgattctggcatgtccaattctcaacagaatgagcttcattattcaaccgccaacggggacgagaggtcaaacccttgtttagccaacacgcgctgcagcttctgctttccctgttgcttcggttcccgtcgcgactcggccaccctcgggttcgggtggtgggagcgcgtgcgagccacgtcgtcatggtccgagtcgcgctccgaggcgcaaccggtgaccgggagtcccggtgggcggtggtggtctggcggcgtgagggcctttatgaaggtgcgcgagtggtcggagctcgcggcggggcctcggtggaagactttcatccggcggttcagccggagcccgagtggcgggtcgcggcacgcggcggggaagtaccagtacgaccccttgagttacgctttgaacttcgacgaggggcataacggggatttcggcgatgacggctacgacgggttacggaatttctccacgcgttacgccgcgcctcctccgattaagtccgtttcctcggattcgaatcaagacgtcgccgttttgggataagactaaggaaaaaaaaaaaaaaagaggaattgcgctgattacatatgccaggtcatgtggtgtcgattttgggaattttgcttctgctaaatacaatgtgcagttactgtgtattaattttattatattactatcaatcaatagttataggattttaatttcttactattgtatattccttccttggcattacagtattttttttagttaatatattggttatatatt

SEQ ID NO: 43513 - DNA, 375 bp, Glycine max
  Clone ID: PAT_MRT3847_139291C.1
gttattacaagcaggtccaaaggtgacaaaaccgacagcatcaataaatacgggtgacatcaaaaaaacaaagctcagaacaaaaggagaaaaaaaaaaaataaggacaaaacaaaacattacacaaggaacgaaaatattagaaaccaaaaccatatcaaccttaccacaataaattgggggagaaaaatacaccctgcccggaagccttctgccccctataaatttgccttgttcaaaccaattctaccattctcaatccagggacccaacccattaaaccctggcgcatcagcaccacctaaacctaccttgggggcccagaaaggaaaatccctgccccggaaattaaaactagcacactttaataaccca

SEQ ID NO: 43514 - DNA, 351 bp, Glycine max
  Clone ID: PAT_MRT3847_139292C.1
tgggaggggcttggaaaagagggtttttgtttaatggtccccaagggaccgttaggtcaacaataattgcggccatggcgaatttttaaggctataattggattgatctggagtggactgttgtaaaggacaaaattaagttgaggaagttcttaattgaaacatttagcaggtttataattgtgattgaggatattgatggttaattggattaaaccggccaacgaaggaaaaaaaaggaaaaggtggaggaaaaggatcaaaggcaaaaacaccaaggaatgcaggaaagaaaggttaaaagtacccaggtaactttttttgggtttttgaatttaattgatgggtaat

SEQ ID NO: 43515 - DNA, 421 bp, Glycine max
  Clone ID: PAT_MRT3847_139293C.1
aaattgttaaaaaaaaaaaaaaattaaaatttaaaaaaaaaaaaaaaaaaaaaagaaaaaagaaaaaaaaaaaaaaaaaaaaaaaaaaaaaaaaaaaaaaaaaaaaaaaaaaaaaaaaaaaaaaaaaaaaaaagggggggccgttttaggggtccaaagtttacgtccgcgtgcttgcaaggtaaaagtttttttatggggccactaaatttaaattaatgggccggggtttaaaaaggagggaatgggaaaaacctgggggttcccaatttaaatggcttggaagaaaatccccttttggcaagttgggttaataccaaaagggcccgaaccgatggcttttccaaaaagtggcgaaccctaattggcaaagggaacccgccttgtatggggcattaaagcccgggggttgtgggggtta

SEQ ID NO: 43516 - DNA, 471 bp, Glycine max
  Clone ID: PAT_MRT3847_139294C.1
gggcccgccaaaaacccttcaatattttcctccaaacaataaaaggaggggggaaaaacaaaaactaaatggagcatttgtaaaacgatgatctaaaaaaaaaattgggtccaaactaaaaatgaactggaaaacttataaacttaaacaaaaagcccttttggacaatggtgccttttcaaaaaggaccaaacaagtactttttttccaaaataaaaatttaccaacaaaactagggatgggcctaaagaagcctcacccccaaaactttgtttataaatgcatttaagacattcctcaacttttggggcccaaggtttgaacctgaaggttttggttgtcttctaaaaggctatcatattcaacccgtaaatctgccccttgcttttggagggaaacaacatgtgcttgggggggctcaacttttttatcctttttttcaaaatccaattttattttttccaaactttt

SEQ ID NO: 43517 - DNA, 1048 bp, Glycine max
  Clone ID: PAT_MRT3847_139295C.1
cgtccgacttgttcagatcgcttcggcgtcccattcgtccgtccctccaatacctcaatctctgcgttgtaagaggaagccacgattctttgaaaccccaatttctggtagttgatttgaaaaggctccagcaatcatatttgggatggtttttaagtaaataaatataaattccggtccaatcctccttgttgtttccctaactgagcacgttgcaactcttggccaaaatggtatccgagttaatcaatgcaaaccctatcatatatgaaaagaaagagcgtcgacctcgaactgctccatctgctccccatgatgagtatgctgtcgaactaatcgaccaacaagaggtttttgatcatataagagatataaaggaccctgagcacccatattccttggaagagcttaaggtgatcacggaggaagcagttgaagttgatgatcaacgtaattatgtgagggttacgtttactcctacagtggaacattgcagtatggcgacagttataggtctatgcttacgtgtcaagctcatgagaagcttgccttcacgatacaaggtggatatcagagtggcacctggatctcatgcaaccgaagctgcagttaacaaacaattaaacgataaagaacgtgtggcagctgcactggaaaactcaaaccttctgaatatggttgatgattgtcttgctccatcttatgattgaaggaacttttttcctcctccaaatgcaatgaactatgtaggtgcttttatgcctgtcgtagaagttggtcagctttatctgtgcttatgatatttttggttgctggcatattggtcttgctatttgtggttacctcatgcaattcgttaaataggatacgtagttgaaaatgtgatagttgagtaaggttccaaggttctttgatcattagctaaaaaaaaaaaattcagctcatgtttcatagattgaacaatttaaaccgtgtttggttgaacttttttgagatattataaaattagtttatatcaattacattaatttatggaaattaattctcc

SEQ ID NO: 43518 - DNA, 535 bp, Glycine max
  unsure (1)..(535): unsure at all n locations
  Clone ID: PAT_MRT3847_139296C.1
gaaatgtataatcatattcggcttatgatggaaaccttatgcctggtgtgancttctcagttatggtgactttgggaatcttggtgaaagaaagatgacatgggagaaaatgaaagaattacttnntgcatcaaatggaatggtntgtatttgacaaatgccttattcagaaaaccctgaaagagcanntttatctattagacgcttagcaanaattggatgcccccgcaataataaagaagtgttaccagagatgccagcaactgggaattcaaagcttggggcctatnnttctgctaatgannntatcaagcaatattagtgcctctagtggaagttgtaccctaaggggctcttnttggaagatttnggctgagaaggatgccgagagagaaagtctgatgctgtaaagtgaagcaccttttggctgaacttgctcttgattcccaagaggctgttaaggggggaagtgagagtgcaagacatgtccgagaaacaaaagataagaggaagaataaggatcacagaaaagcca

SEQ ID NO: 43519 - DNA, 607 bp, Glycine max
  Clone ID: PAT_MRT3847_139297C.1
ataatatattacggaggagaggggttctggctgaggtggaggtgttgggaaacgtgaggcacaggaatatcgtgaggttgttagggtgctgcagcaacaatgagtgcaccatgctgctttacgagtacatgcccaatggcaatttggatgatttgttgcatgccaaaaataaaggagataatttaggtgctgattgggtcattagtgactagatcgccttgggtgggggttcaggaatttggtatctccaccatgaatgggaacccggaattcgacaccgggatcttaaactaataacatattattggaccctgaaaagaaaggcaaaatggcagaattttgtggtggccaattgatttaaaacgaagagtccctgtctgtcattggcgggttctatgggtacattggtccagaatatgcttacaccctttaagtcgatgagaaaagtgacatttacagctaccgagtggtggtgatggagaaccttaacggaaaacggtcgggggatgcacaatttggcgatgggaacaacattggtgattggggtaaggctaagataaagacaaaagatggcatttatgacatattggacaagaatgcaggggca

SEQ ID NO: 43520 - DNA, 622 bp, Glycine max
  Clone ID: PAT_MRT3847_139298C.1
gaagtcacaagtcaatctttgaaacagttaaaaaaaaaaaaaaaaaaaaaaaaaaaagaaaaaaaaaaaaaaaaaaaaaaaaaaaaaaaaaaacttataaaaaaaaaaaaaaaaaaaaaaaaaggaataaaataagcataatttttgttggatgggattaaaactattttactgttctgatatgaacaatgaaataaccattaagtgagtgggcgttattaacataattaagattgcataataaaccgctatgcactttacctgtaagaattaaaaagaattgataaatgacatatccttgtatttaatcatcatatgtggataatggattggcccataaaaaaaaccattaaaaaaaaaaaaatttgttttttaagtgaagaataaaaaaaaaagttgacaagagaaatatccacagaaaattgcgtttttttaaattaatttagggacaggtcttagggggtttacaataaaaagctaaaattaggggtttaactttaaggtttaccattttatttgtttttttggcaccctaataacctcaaaaaaaaaatggaataagatggtagatggggtttcaaagagtaaaaaataaaaaaaggggggattttttttttgtaaa

SEQ ID NO: 43521 - DNA, 251 bp, Glycine max
  Clone ID: PAT_MRT3847_139299C.1
ccgacttcggctcgagccttgctaggacatcctattcacattgacttactaattatcactgcattatgttaagattcatagatctcacttgacccagtcgctacgacagcgcctacagtagcctatggacacgatcatggccaagcaaggacagagtacgtctcctgcgatcagtacctagcacccagcctctcagcatcagcggctcctacagcaactgttgcagcagcagccgcttgcacgaccacaaa

SEQ ID NO: 43522 - DNA, 466 bp, Glycine max
  Clone ID: PAT_MRT3847_13929C.1
ctcatacgaacgttactgcatgagatattatggcttttaaactaacaactcacacctccggggaacaagggcctctgcatcaccatctctgataatgtcatcacttggtccccacaagagcgagtgggtgaaaggacaaacacattggcagccgtcaacatcaacagtgagacgcaacaccaccaccccatcccgcctgaccatcatagctggctcctatgcttaagagctcataaagaccctgaaaacagcggctataccagggctgggaatagcggccataaatgagtccaatgctacctgtcggaagctgatacgcttctatatggctagagaacactgaagctaaccaacagacataccgtgccctcctcgtgacagctacagaactatgacaatacatacctggcgccactctatatggtgaaacactctatcaattcacaactgatggcaggaagattgt

SEQ ID NO: 43523 - DNA, 276 bp, Glycine max
  Clone ID: PAT_MRT3847_1392C.1
aaaataaaataaaacaaaaataaaaccaaagaggaaggctggaaaaaggcgacacccagcaaactcaaaaaaaattgaaaaggaggggcagaaaaccactttgagccaacttaccaaccacggaaaagccagggaaaggaaaaacaacactggctcggaggaacgcaagaaaaaaaaatctggccaaagacaggcaaccaccccgcacacaccatggaaggatcacagcagggtcaggggggggaaaacgcggccaaaagggagcccaacgggacc

SEQ ID NO: 43524 - DNA, 392 bp, Glycine max
  Clone ID: PAT_MRT3847_139300C.1
ctttccgttatgcatatacgtagaagttgtatttgggtattcactttagttagctgtcgtaatttaatctttttcacgtgaaaataggtgttcgaaagagcttatagcagttcttagaagaacaaaatggaatgaaaaagagataaattatcagaatggtacatttagagggctatctggcaaaactgcttctttagcagattatatacattttgcttcaactgaattttacatgcttttcaatatacaacatgataatgaaggcgaacattcgccattattcatattaatcaatatcttacgagttacccaagtttaactacgtttagccaactgtgaatgctaagctaatctcaacaatttgattccgtttcaggccagaacaatgaaac

SEQ ID NO: 43525 - DNA, 244 bp, Glycine max
  Clone ID: PAT_MRT3847_139301C.1
cgtgagcggcgagggaggcacttgcacatgcaatggaagagtcttcatccattgttgaatcgctggcaggccttgccgacaaagccaacgacgttcacgacgccttattctatcacatatataaggctttcaccgaccaggaacctgtgcctcaacgcgttcacccatctattccccaatcccttcactctgttcctcatcttattctctggactccaccaacacaaatccttccctacttaac

SEQ ID NO: 43526 - DNA, 467 bp, Glycine max
  Clone ID: PAT_MRT3847_139302C.1
accggtttaggagttacgggctcggggccggcgccgatttcccgttttccccccttccgggggggttattttttggcggataacacataaatgttgttgagtttcggtttatttatagattgaattctcagctttgatttgaaaacaataaacaagctaaaacttcaaaaaataatccatggcttctgccccgtttcaaaaaactacactgatgaataccccggacaaggggtacgttctccccttcaaacactatatctaccgggacactgttcccaagcaggggtgcagcgtcttcaggggccacgcttcttgaggggggcgcgccacaaaagcctttttccgagctggcacaaaattgatacatatcgggaggggctctcaccactccgggtggggaaaaacccagcggtgccccagatgagagggacaaggccccttcccttttttaggaggtgcggggatac

SEQ ID NO: 43527 - DNA, 369 bp, Glycine max
  Clone ID: PAT_MRT3847_139303C.1
aaaatggcatagagttttgtttaaaattagtggctctgcattggctggaaactgccagaacattgaccccaaggtggcaatgcagattgctaggtgcatatctgttcttagtttgtctagccatagaaggagaattagcaccaccaccactactgccagccttatcatcatcagaaacagttttcacagacagagagttgccaacaatagcttcaatcttcttaaaccaatgccagtgactagtggcaatgccaccactcccaattctctgaagctccaccttatacctcttcttcaaattatcaatcttattcttacactgctccacgctcttctgatgcttccactctccgccgcatcgttccagca

SEQ ID NO: 43528 - DNA, 711 bp, Glycine max
  Clone ID: PAT_MRT3847_139304C.1
ccacgcgtccgggcaactcggagccagaagcagttcctgaaaaaacagagaaaccagaacctctgccaactgaagtggaggaaaagccaagagaacaactacaagtagatgaggaagttgcagaagctagtaaggaaatggaaactaagaaagaaattgtgattgagactgccaagagtgaaggaacatctgacgacacgatcaaggaagagaaaactgagaaagaggaggaaactagcctcactgtaaatgccacacaagtttcatcaaatgcggaacctcaagaaaatcctgtggaaacttcttctgaagttgtgcttgagacttccaagagtgaaggagctctggatgacacggccaaggaagagaaaactgacaaagaggaggaaactagtctcactgtaaatgctgcacaagtttcttcacaagtttctcctgaagcagcagaaaagattgttgaagaggttgatgacaagaaagaatcaagcatttccaatgtgatcgaagcggaatcaaacgaagccgctgacatcataaaaagtccagagcaagcctccattgatgaggaagctaaaactgacctaaacgaagaaagagagatttatgttcctgctgctgtggaggaaaaggttgctgttgatgttgctgcaaatgatgatgttgacaagaaggaacctgaagcacctaataatgctgtccctgaatcctctc

SEQ ID NO: 43529 - DNA, 1240 bp, Glycine max
  Clone ID: PAT_MRT3847_139305C.1
tcgaggcctcacagattttgcctttataattggtccacacgccccattgtacctacggctgcgagaagacgacagaaggggattgtgattcatttgcacatttggaaagtgttgtttttctttttttcatttgcattgcaaagcaaaaaccttgcaaattgcaatggcttccaacaaggttattgccaccatcttggttctttctctccttgcctactcaacatcattcaccaatgcatgtggcacatgccacccaaaacctactccttctccccctcctccatcagggaagtgccccaaggacacattgaagctaggggtgtgtgctgatgttctaggacttgttaatgttgttgttggttcccctgtctctagcaagtgttgtgcattgcttgaaggtttggctgattcggaggctgcactttgcctttgcactgctattaaagccaatgttcttggaatcaacttgaatgtgcctatcacactcagtgtgctactcagtgcttgccaaaaaaactgttcctgctggcttccaatgtgcatagaactccatcacatgctaggttcattccatcacctgtgtcctcaaattgttgttttgttttagttcttctttgtgctatgacacgtttcattttaataataagctaggtaaacacgtgtttgccttagttagtaaccttttctcttttctagtaaatttggggaactttgattattgtaatttttacttttggggtatattggaggtggaaaatgttaagtagagaaagagagtgacttccttaggggatgattaaacctctgatggcattgttaaaccttaaagaccaatgttagtcgacaaaattgtatgcaaattgtaatgtacgttacaatcaagtgtgtgtattatcaatttatgttaagaacgatctaagaagttttatagaaataagtacataaggggatgattaaacatcagaaataacagttacaacaatccccccacctcttattttttcgacttgtttgtgtgcggactttgatgttgctgtgaagtgctgccagatgatttcatactgttggcttctttcaatgtatctgatgatggatttggcatgtatggaatattggttttgatttctttatggccagttattgcatgaatgttaatcatgaaagcagaattctttgtggttatgctgttcaaatatagacgagatttggttctaatccacttactgtcaactttcaatac

SEQ ID NO: 43530 - DNA, 357 bp, Glycine max
  unsure (1)..(357): unsure at all n locations
  Clone ID: PAT_MRT3847_139306C.1
ggaaaatcgactttcccgcacggcacttcccgaagtgttaagagaatgcctctttctatagggggaggagctggtgcaaataatgctattnncatgaatatgccaaatgctgctctttcaatgtggagatattgtgttggatacctcgtctttgaagtttctaacatgacttctccctacattaaatgtacagcctataccttcataacatttgtaaattcggctgatgataccatcaatttctaggctttttcccacaagctggtgcaggttgtgaaagattcaggaaaaagatgtctcgaaatttttacaagaggaattttttacagtttggtcaactcaggtgcgtcctgcaac

SEQ ID NO: 43531 - DNA, 1628 bp, Glycine max
  Clone ID: PAT_MRT3847_139307C.1
ggtcagggagactccaaatcagaggcttcagtccagaatagggaacctggtgcttctcctaacaccaagttcttttgctgccattagcaatatcaacttaaccacccgttctaaaactaacgtccgcggcagcccacacatctttgtgtttcaaaaatggaacctaatgacaaccaactcacctctttcttccaccaccaccaccaacagcaccaacaccaccagccgccgccaccaccgcagaccacggcgtctccgaccaacgggctcttgccgaacgcggatgggtcccacatactttacccccactctgtggcgtccgctgtttcgtcgcagcttgaaccggcgaagcggaagcgcgggcggccgaggaagtacggaacgccggagcaagctctggccgcgaagaaagccgctacgacgttgtctcattcgttctctgtggacaagaagccccactccccgacgttcccttcctccaagaaatcccattccttcgctctaggcaatgcagggcaagggttcactccgcatgtcatttctgttgctgctggtgaggatgttggccagaaaattatgttatttatgcaacaaagtaggcgtgagatgtgtattctgtctgcatctggttccatctctaatgcctctcttcgccagccagcaacctcaggaggcagcattgcatatgagggtcggtttgagattatttcacttactggttcttatgtccgtaatgaacttggaccagttcaggtcatcgttggaacattctttattgacaacaagaaacataatgttgctggtttaaaaggtgaggcccctgccagcaagttgccatctccagtttgtgaaccggtaccttctttagggtccccccgatcggttctctcttccagtggtaatccaatccgcggaaatgatgagcatcaagctatggatggaagtcatttcatgattcaacagcttggtttgcatggaacacctccccgatccacagacatgggggcgtccggattcaagaaaagtaccggttttgagttgacaggaaggacaggtcatggggcgccccagtctcctgagaactggaggctatgaccaaattcccggttgcaagacctactgggcttgtggggtctggtcgcggggcgcaccgggcgcctgaggttggaggcctcgacctacctcccgtctgtggcacccggtgcccttttgggtttgcttcctgcgttgaatttgcggtagatgtatgatatctctacataccaccagtctttgtcacgtgatgctgtttatagtatgcaccattcattaaggatcgcggcttctgaaaattaatactcgtgcatctccttgaaaatattgttctgcctcgtttactgatgttgtattttataaatcactaaaatcagggctgctttcatttttgcgggcctgttagtttagaccgggatcaatataatagaaatacgcttcctagattagctaatctattgggggctatattttccctcccttttcaaggggcagtcttaatattggtcaaaattctatcaagcatatattattatgggtctttatttattagccttaggaaaaaaaaaactcgagactagttctctccctcgtgc

SEQ ID NO: 43532 - DNA, 364 bp, Glycine max
  Clone ID: PAT_MRT3847_139308C.1
tccaaatcagaggcttcagttcagactcggtatccctgctcttcttccaagataaagtgggtttgttttcattataaagaggaaattaaaaatatcttttaaaaaaattgcagtggcagcacacacatctttgtgtttcaaaaatggaacctaatgacaaccaacttacctctttctttcaccaccaccaccaacagcaccaacaccaccagccgtcgccaccaccgcagaccacggcgtctccgaccaacgggctcttgccgaacgcggatgggtcccacatactttacccccactctgtggcgtccgctgtttcttcgcagcttgaaccggcgaagcggaagcgcgggcggccgaggaagta

SEQ ID NO: 43533 - DNA, 631 bp, Glycine max
  Clone ID: PAT_MRT3847_139309C.1
ccctttttccgaaatactcttgtggccaaccaaagctctcttctttctagacataggaggaggagagaaaatttgtttctattgaaatactcttgtgaccaaccaaggtctcttatttctagacataggaggaggagagaagaattgtttctatttcaaagattcagcaaattaaggagcagaaaaaagtcacatattttgttgttgaattcatcaatatggctaagggaatcagaaacctaagttcgtggatggaggttgccccggcaccaataattttcccaacaaagccttctaattcgcctgctttggagaccatcacagaagaagttgctgaggatgatgaagcttccatgaatacccttctcaagtagtagcaaatgttgcaagatcaattatgaagcctcttttgaagaggcttcagcttatgaagattgaagaggatcaatcaagttgtggaaataatcactagttgttattcgctacaactttgtatagtcaattttgtgaaatatgtagttctctttttccttctttttggatgattttaatctatacatccctgcctttgtttaggctggagttggtttattaagaaatggcaaattgcagtttctcgttgttttgcccc

SEQ ID NO: 43534 - DNA, 277 bp, Glycine max
  Clone ID: PAT_MRT3847_13930C.1
gacccacgcgtccgcccacgcgtccgccccatccaagcatcaaagcttctaaactgaagcttaatctatatataaggagagttcattttgattctggtgaggaagaagtattagaagtgaattagcgatatcgatcagagtgtgaagaagatgtctctggtgaagctgttggatacgtcggcgttcgacgcctggaacctgatcagcatctttgggacgacagtggcggcggacgcgtggctggcgagcgaacacgtagcggtcgccaacacgtaca

SEQ ID NO: 43535 - DNA, 900 bp, Glycine max
  Clone ID: PAT_MRT3847_139310C.1
gcacgagcagtattccacattaccgagaaaagggctaaagttcatctggaattgggtgcagcattttacgactggaattttgatcaggtaggtgaagaccctaagctcttgtggacagaagaagaagagaaaaagttcgaggatgcgatacgatcaaaccctccatcacctgagacatatttctgggaccatatctttagggcatttcctacaaagagcggggcccattttgggcgttcccccttcaacgttaacagtgatgacgaggacgatgaagctggaccactgaggaatgttttcggacagcagacacaaaattcgcgtggttccatcttattaacccccaaaaagtcacagacaaagaaaaagtagcaagtggatgtttgtcaaaacaataggagctttgttggggatgtaaattttgacaaatttgtgcattctcactggcatttttcagcatctaaggatctttctctccttgtttagaaggtaaatcatcattggttttagaagcagaactttggagcttaaaatggttttgtgtgtggaggaagggggggtgtatttggtggtggaagtgggaaaattttggacaaacttagaagctgattgctaatcacatgcttccgattttgagatgcatcttttgtctgtccacagtgatatatagctgcctcagattgcacatttttttttcttaaaacaaacttggttttgattgcaaggttttacttgaagctgaagccttagggaatataggtccccattttattgtagagagtcatgaacaaatacatcaaagtgcaattcaaattgtaggtttcatatgatgcgactttatattttgatttgatgtttcttactttctttcaaagtggtatagaatttgttttggctcag

SEQ ID NO: 43536 - DNA, 244 bp, Glycine max
  unsure (1)..(244): unsure at all n locations
  Clone ID: PAT_MRT3847_139311C.1
ggctcgagctcaaaaatcagtatattctcccttgttcaatcaattactcttcttccttcccttccttccttccttaaacccaatcgaagaaaaataagatgttgttccacactccatcatatagagactnttaataacaaactcaatttatgggtttattatactttgattgctcaattaatccttacttcttagttagctggttcatcatgaatatcaggtcagacggtgttcggaacgtacg

SEQ ID NO: 43537 - DNA, 1437 bp, Glycine max
  Clone ID: PAT_MRT3847_139312C.1
ggcgagccctggcagcacacacatctttgtgtctcaaaaatggaacctattgacaaccatctcacctctttcttccaccaccaccagcaacaacaacaacaccaccagcaccagcaccagcatccgccgccgccgccgccgaccacggcgtcgccgaccaacggtctcttgccgaacgcggatgggtcccacatgctgtaccctcactcggtcgcgtccgcggtgtcgtcgcagcttgaaccggcgaagcggaagcgggggcggccgaggaagtacggcacgccggagcaagctctggccgcgaagaaagccgctacgacgtcgtctcagtcgttctctgcggacaagaagccccactctccgaccttcccttcctcttctttcacttcctccaagaaatccctttccttcgctctaggcaatgcagggcaagggttcactccgcatgtgatttctgttgccgctggtgaggatgttggccagaaaattatgttatttatgcaacaaagtaggcgtgagatgtgtattctgtctgcatctggttccatctctaatgcctctcttcgccagccagcaacctcaggaggcagcattacctatgagggtcggtttgagattatttcacttactggttcttatgtccgtaatgaacttggaactcgaactggtggtctcagtgtatgcttatctaatactgacgggcaaatcataggtggtggagttggtgggccacttaaagcagctggtccagttcaggtcatcgttggaacattctttattgacaacaagaaagataatggtgctggtttaaaaggtgatgcctctgccagcaagttgccatctccagttagtgaaccggtatcaagtttaggtttccgccaatcagttgactcttccagtggtaatccaatccgcggaaatgatgagcatcaagctatggatggaagtcatttcatgattcaacagcttggtttgcatggaacgcctccccggtccacagactggggtcatccggattcaagaaatactggttttgagttgacaggaaggataggtcatggggcgcaccagtctcctgagaatggaggctatgaccaaattcccgattgaaaaaccaagatggctttttggatttgatagcagtgataaatgtgtgatagatgtatgatatctctacataccaccagtctttgtcacgcgatgccgtttatagtatgcatcattcattaaggatcgtggcttctgaaaattaatactcgtggatgtccttgaaaatattgttctgtctcatttactcatgttgtatttataaatcactaaatcggggttgcttacttcatttttgcgggcctgttagtttataccgggataaatataatagatatatgcttcctagattagctcatctactgtggaatatattttcttcaattttcc

SEQ ID NO: 43538 - DNA, 618 bp, Glycine max
  unsure (1)..(618): unsure at all n locations
  Clone ID: PAT_MRT3847_139313C.1
tcagttgactctcccagtggtaatccaatccggggaaatgatgagcatcaagctatgggggnaagtcatttcatgattcaacagcttggtttgcatgggacgccttccccggtccacagactggggtcatccggattcaagaaatactggttttgagttgacaggtcatggggcgcaccagtctcctgagaatggaggctatgaacaaattcccgattgaagaaccaagatggcttttggatttgatagcagtgatgaatttgcggtagatgtatgatatctctacataccaccagtctttgtcacgtgatgctgtttatagtatgcaccattcattaaggatcgcggcttctgaaaattaatactcgtgcatctccttgaaaatattgttctgcctcgtttactgatgttgtatttataaatcactaaatcagggctgcttcatttttgcgggcctgttagtttataccgggataaatataatagatatatgcttcctagattagctaatctattgtggactatattttccttccattttcaaggtgcagtcttaatattgttcaaaattctatcaagcatatattattatggttcttaatttataagcttattcgg

SEQ ID NO: 43539 - DNA, 180 bp, Glycine max
  unsure (1)..(180): unsure at all n locations
  Clone ID: PAT_MRT3847_139314C.1
ggtggagatgttttcccaggctccacactttctgaccatgttttttggtttaacaacataccacannttaaattgattggggtactttgagaacgtggtgggcgtaattagtattctcttttttaatccctaaatcaacggatatttactaaaccattgattgcttttgttagcggaacc

SEQ ID NO: 43540 - DNA, 298 bp, Glycine max
  unsure (1)..(298): unsure at all n locations
  Clone ID: PAT_MRT3847_139315C.1
acagatccaaatctaatcctttgaaattcattaacccccattcctattatctctcagttccagtttntcactttgtnagtgtcatctgcaatttgctttcacagttgcttcagcaggaagaaatgncaaaggaaacaccttcttgcttttccttacctgattgtaaagaatcnctcttttctcatcatnggggatatcactgtgcactctgcatnanntggctatnggattggaacatgtancanngctatcatattgcnaagctctcacttcgggggcaattngtgtggtaaagtag

SEQ ID NO: 43541 - DNA, 433 bp, Glycine max
  Clone ID: PAT_MRT3847_139316C.1
gcaatgtcgaaggtgtgatggcagtggtcaggtgcaatctaaacaaacaatggaagtagaaattcctcctggagtcaatgatggagacacaatgcaaattcaaggacaaggaaattttgataaaaagaggcaaattactggggatctttatgttgtcctgcatgtagatgaaaagcagggaatttggagagagggtcttcatttgtactcaaagatgagcattgacttcacggatgcaatactggggtcagtttaaaaggtcataccagttacctcctctcccctcatcaataaaaaacagtaacattgtgtgtgcaaaacatagaatcacattggtttgttatttaaggattttatcatcttttgggatctttccttatttttcaatcttattaaatttaacttggttaagtcaaaaacccaactattgaca

SEQ ID NO: 43542 - DNA, 271 bp, Glycine max
  Clone ID: PAT_MRT3847_139317C.1
gttgattttaaagaagtttttttaagactattgttgacaatagtaaaagagatcaggaggatgaagaatctaaaacaagcctgaaggatgtccaactgtgtatttagaatttccgacattcttctctactggatctacacattggaccccatctgatcctttgctgcttttttggcttggtcaggtcctggcctcattttggcgttacctgtgtcagagttcaaggtggatgtgcttagagctggtcagccccttccagacctggacacgt

SEQ ID NO: 43543 - DNA, 419 bp, Glycine max
  Clone ID: PAT_MRT3847_139318C.1
gggcttacccttttttaccctttttttttctccttgaagaacaaggggtccttcccatattaaattcaaggatcaaacaaaattggcctacatattttttttctcttcaaaattcgactcataaagattgaatatgcctgacccaccccatccttttttcctatgcataattcctttatcatccaacccgaggatactggaccacaggagttgttcttgggggtttaaccttgagcatctctctttgttcacttaatcttcttttttctcttccatttatggatcccacaaacgcaccccttttggagcatccttcatctattctttctgcactacccgaaggtgccaatggtcaaggtagttctccaccaaagggccaaaatggtctcaggggaacccaccatacaggggtttaaaaa

SEQ ID NO: 43544 - DNA, 234 bp, Glycine max
  unsure (1)..(234): unsure at all n locations
  Clone ID: PAT_MRT3847_139319C.1
caaccactcttaatttctctctgtctcgtttacacatctctccttcctttcactttcntttctcatggttattggaatacctctatcaagctccgggccaaaaaaccaacatttaagtttcacatcaaacactaacaacaattcccgaaaattaaacatctctagttatcatgacactggaatctatttcactcactgatgcatctttaacatttcaacttatttctgaaattt

SEQ ID NO: 43545 - DNA, 249 bp, Glycine max
  Clone ID: PAT_MRT3847_13931C.1
aggcgtccgaacacgtcagaaagggctacagaagggggcaacaaacaagttagtgaatgagctgctgggtctgattcacacagctccttgtccattcatctccacctactaatgctactcctacactatcattgtcttgagccctcttgtctcttaaatcctatacacagcgtgtggagtcatacaagactaatcctatttttttgcctctgagagtctgtcgaactgacccatgctgggagaccaaaa

SEQ ID NO: 43546 - DNA, 1918 bp, Glycine max
  unsure (1)..(1918): unsure at all n locations
  Clone ID: PAT_MRT3847_139320C.1
gcaaaatcactcacactctgactcgggtactctactcgatctattactttatacttttattttgatcatctgattgaattgaaaattgcattcctttcaaaggaggacatacataaatataacactttttctgcactcccaccggacttgagtcagcgaattttcaacaatatggtttactcctcctatctcacacctgcttccctccaaccctttcgagattctgccctccaggatatttgcttgggagaatatgaatatgcaaatggtggtggtgctgctgctgcaattgtggatgatgcctggatggatgtcatctcatcacagggatcctctttacttcatctagatctttctgcctctgatgtcactgatcatggtctcacctttcttggacattgcacaaatatcatctctttaaatcttaatcactgtcaccaaatttcagatcatggactagagtgcatcagcggtctctccaacttggcaagtttgagttttagaagaaactatgcaatatctgctcaaggattgaataccttttctggtcttattaacttggtcaagttggatttggagagatgtcctgggattcacggaagcctagttcatattcaaggtttaaccatgttggaatctctcaacctaaattggtgtaactgcttagtagatgttgatatgaagcctctatcagtgcttacaaacttgaaaagcctagagatttccttcaataaggtcacagattttgggatcagttttctgaaaggattacaaaagcttaatttgttaaatttggaaggctgccaagtaacaactgcatgcttggactctcttgaagagcttcctgccctgtcaaacttgaatcttagtagatgtaatctttctaacgatggatgtgaaaagttttcacgactggaaaatttgaaagtattaaacttgggatttaatgacataacagatgcatgtttagcacacttgaaaggattgacaaagttgaagagcttgaacctggattcatgtaggattgaagatgaagggttggtccacctggcaggtcatcagcaactgaattgcttggaactctctgatacgggaattggaagcaatggactacatcatttatcagtaatggtggtttaagcaaactgtgtggactctcatctcttaagtcactaaatttggatgctcgccaagttaccgatactggattggcatccttaacaagtttgactgggcttacagaactggatttgtttggtgcacgaataacagattttggaacaaactatttaaaatgcttcaagaacctaaggttgctggaaatatgcggtggagaattgactgatgatggtgtgaaaaatatcaaagaactttcatctctgaagagcttaaatttatcacaaaactgcaaccttacagacactaccctggagttaatttctgggcttactgatttgatttctttgaacgtttcaaattctggtatcacaaatgctgggctgcagcatttgaaaacactcaagaatttgaggtctctatcattggagtcctgtaaggtgacagcaaatggcattaagaaacttcaatcaacagacctccccaatctggtaagcttccggccacagtaattggggaggtatccccaacatgttgtagtctatattaagaatctctatttgcactggcatacctcagaaaaagtatggaaagacgacctcaaattgaatatactatgtatatataggctaatgccttcaagagaagttagaattattattgcctcttaatttggttcgaagctttctttaattttatattgaagtatgcctagagcttttatatttcaactttcaagtgggtctgtgtagaagtgtatagaacgtaaatcagcatgcactattccataaacaaanntggt

SEQ ID NO: 43547 - DNA, 588 bp, Glycine max
  Clone ID: PAT_MRT3847_139321C.1
aaaaaaaagtagatggcaggtaacatagcaagaaaatggagagacctcagtggcagaagcaactggaaaggtctgctagatcctctagacattgatcttcgccgttacataatacactatggacaacttgctcaagctacatatgatgctttcaactcagaaaagacatcaaagtatgccggcaacagccgataccctaagaaagatttcttttccaaagtaggtttggaaaacggaaaccctttcagatacgacgtgaagaagttcctctacgcaacttccaaagccagcgacgcagaagcgtttctgctcaagtccttttcgaaggactcgtggagcaagcaatcgaactggatagggtatgttgctgtggccactgatgcagggaaagaagcgttggggaggagggacatagtggttgcttggagaggaaccattcaggctgcggaatgggttaaggattttcatttccatttggatcttgcgcctgagatttttggtggtgattcttctgctcaagtgcaccatgggttttattcactttacacctcgagtaccccgggttcgaaaatcactgataccagtgct

SEQ ID NO: 43548 - DNA, 500 bp, Glycine max
  unsure (1)..(500): unsure at all n locations
  Clone ID: PAT_MRT3847_139322C.1
cgagactctgtttactgtcgttcagattcgcattgaagcaataagcaatggtaactgcagcatgtcagtcaggacgtgtgagtttcaaacatccttcttctcatttccacttacctcaatgtccatccttgttggacttgtgcatccgcaaaatcactcacactctgactcgggaggacatacataaatataacactttttctgcactcccaccggacttgagtcagcgaattttcaacaatatggtttactcctcctatctcacacctgcttccctccaaccctttcgagattctgccctccaggatatttgcttgggagaatatgaatatgcaaatggtggtggtgctgctgctgcaattgtggatgatgcctggatggatgtcatctcatcacagggatcctctntacttcatctagatctcttctgcctctgatgtcactgatcattgtctcacctttcttggacattgcacaaatatcatctctttaaatcttaa

SEQ ID NO: 43549 - DNA, 940 bp, Glycine max
  Clone ID: PAT_MRT3847_139323C.1
ctcgagccgcaagtaacaactgcatgcttggactctcttgaagagcttcctgccctgtcaaacttgaatcttagtagatgtaatctttctaacgatggatgtgaaaagttttcacgactggaaaatttgaaagtattaaacttgggatttaatgacataacagatgcatgtttagcacacttgaaaggattgacaaagttgaagagcttgaacctggattcatgtaggattgaagatgaagggttggtccacctggcaggtcatcagcaactgaattgcttggaactctctgatacgggaattggaagcaatggactacatcatttatcaggattgtctaatctggagaaaataaatctatcgttcacttttgttaatgatagtggtttaagcaaactgtgtggactctcatctcttaagtcactaaatttggatgctcgccaagttaccgatactggattggcatccttaacaagtttgactgggcttacagaactggatttgtttggtgcacgaataacagattttggaacaaactatttaaaatgcttcaagaacctaaggttgctggaaatatgcggtggagaattgactgatgatggtgtgaaaaatatcaaagaactttcatctctgaagagcttaaatttatcacaaaactgcaaccttacagacactaccctggagttaatttctgggcttactgatttgatttctttgaacgtttcaaattctggtatcacaaatgctgggctgcagcatttgaaaacactcaagaatttgaggtctctatcattggagtcctgtaaggtgacagcaaatggcattaagaaacttcaatcaacagacctccccaatctggtaagcttccggccacagtaattggggaggtatccccaacatgttgtagtctatattaagaatctctatttgcactggcata

SEQ ID NO: 43550 - DNA, 440 bp, Glycine max
  Clone ID: PAT_MRT3847_139324C.1
ctccaagcacacacaaccgctttagatggaactttgagcttccataattccgtgaactcttccccctgggcctccgctggtacgtgctgtctaagcacactgtatgtgctcttaactgagtactgcccagttgggtcagcctcccacacccactagtcgccaatgagaggttgaattctgaacccctccacttcttgaataaatgaaactaccagctttatctcactgtcgaacagtggtctttgccatttgaaatctcatacccatcctgtgtctttgtgggttcccatatgctgaattaattgattttgctgatccaatatgatgtatagcctaggatacttctctaataattggtaccctcctcctgccagtatcctcccaaaatttaaattgatccccacacctaaccttccattgtatcgacctgtccaataact

SEQ ID NO: 43551 - DNA, 1288 bp, Glycine max
  Clone ID: PAT_MRT3847_139325C.1
ctgatgcaatacgaataggaaactataaggatggcctgtatcctacagacagcagagaatttgctaaacgaatattctatactgtgtttatgggatctgaaaacagttccgaaatgacaaggtcacgagccaaggtgctggctgatgaaattggttcatggcaccttgatgttagcattgacgtagttgtgtctgcttttttgtcattgttccaaacacttacaggaaagcgaccacggtataaggtagatggtggatctaatgttgaaaatttaagcttgcagaacattcaagctcgaatcagaatggtgctagctttcatgttagcatcactcttaccttgggttcacagcaagcctgggttttatcttgtcttggggagctccaatgtggatgaagggttacgtggttacttgaccaagtatgattgcagctcagcagatataaatccaattggtagtataagtaagcaagaccttcgggcattcttgcaatgggcagccatccatcttggttactcatctttggcagatattgaagcagctccacccacagctgaactggagcctatacgttctaattacagtcagcttgatgaagtcgatatgggaatgacttacgaggagctatcagtttatggaagactacgaaaaattttccgttgtggtccagtttccatgttccagaatctatgctacagatggggtgcaagattgacaccatcacaagtggctgaaaaagtaaaacacttcttcaagtattattctatcaatcgacacaaaatgactgtcttgacgccttcctaccatgctgagagttattcaccagaggataataggtttgatcttcgccagtttctctataatgcaagatggccatatcaatttaggaaaattgatgaacttgtaagtgaattggatgttaaagatgttaaagattcaggagaccatgaggcaatggcagctacatctgatggtgttggtgggatgggagttgccgcagctggttcaggcaatcctaatgttggattgtaattaaaattaacccctaccctaataaaaaaaagaagaaataaagcaggattgatgaaattcattcaacctttcatttcagcttttattatgtcagtgtaaaaatatttttaattagtcaatgtcaatcatgtttcagcagtttcgttgtattggaaagaggaagacaatgtgtgttctggaacccatttgcagtgatgcaaacacgggttcacactttccaacacatgaaattaagaagcaagaatttgtgtttt

SEQ ID NO: 43552 - DNA, 133 bp, Glycine max
  Clone ID: PAT_MRT3847_139326C.1
gtgtaacgaggggttcacaagttcaacagcaagaaataagtcgcttataaagggctattagaactccaaatgtcttatcatgaatgtgtgattacttttatataaatcctgtcttaaaattaggtgactatca

SEQ ID NO: 43553 - DNA, 489 bp, Glycine max
  Clone ID: PAT_MRT3847_139327C.1
tttacgcgtttgcacataacatgatccggtaactatagatgccaaatttggtctttgttgcgagatgtttagaactagcgaaagcagcattgatatctatgtgcttgggaccatattatgcaaaagatttgaacttgctcaaataaaccacgtggagttattggcttaaggcttctaagtcttaacatacaagtgaatcaagacttggagtttgcaagtaatcggaatttgtctttttgtgtaacgaagaattttgacttcatatgattttcttattgacaattggttaaaagtaaattattgacgaaagaaatgaattcctcactctagctacacttacacaaactgtgtaggctgccacatgtgaccttctgttattcttgcttgtttcaggaaccgttgggttaactttttatgcatgtcagtagttgtcttcaaaatggttgcttctttgacattcaatgaagagggggaaacctatgataattg

SEQ ID NO: 43554 - DNA, 164 bp, Glycine max
  Clone ID: PAT_MRT3847_139328C.1
gtgaccaactgtgacatcaatatggatcatctttcaaatatcattatactcgaatgctcaattcctatgacacctcatgatcgcggcagcacggctacgatccaggttgagctagacgggattgctacatcagcgctcttctgtacaggcacctagattcaagt

SEQ ID NO: 43555 - DNA, 363 bp, Glycine max
  Clone ID: PAT_MRT3847_139329C.1
gtatggtgaaagaacatttataacactttataactgcgctagatggtcaggatcatgattcaagtccttcactattgcagcaagagaacacacaaccgctctgacacctatattttcactaagatgctgatcctccctcatatgtcgagtgcacatttgccctctgatgatgcatcacattggccgatcatatctcataaagtaaagcctgcttttattaatagctaggaagaaccgggtacaattcttcaatccttataatcatggtggtcatgataatcagagagtgttacttcttttggttaggacgggaagtaccactttctttggtgatggagcaattatattgctgcaaagggagtg

SEQ ID NO: 43556 - DNA, 962 bp, Glycine max
  Clone ID: PAT_MRT3847_13932C.1
acgaggccacttggaagtatgcgatgggaatgaaaattactgccgttgtcatagtagtggtgagctaatgcattttccatttaaatgaatgtttttttttttatcattcattattttttcttggctgtagattttgccttttatcattcatttcatcaatgttttttgttccttccttcaagttgaattatgttctgagtaaaattgcctagtggaccgatgcaaggaggatatgatttagtgattggttgaacgaatgattgtaagattgggatgaattctgttttcttattcaactgaaaagtgtataaatatgcaaaaatggagagagataaaagataatgctccagaattttgaagacacaggattggagtgaaggttaaaatactgtttaatggattaaatattttaaagttttgttatttaccattattatgtttttcatcgtggaggttaaatggtgaaaaaagttacataaatgtgaagttcatggcagaccagaccacgatttgggctaggttcctttcctaataatatatcaaaacttggaccactagctatgatatatgattggtcccctagacatatcatggtccgcatgtcatagttccaccaacacattgataacttgtgtctcagtggatacgtttatggccaactacgttaaaacgaagaaaaaaaaatccatttctcttttatgttctgttttcattttgttatgtaatgtggggataccagtcactgtaagccttaaaagtttactccctttttctgatattagtagttatgaccagaataatccacaatctctgcttagctatccggtctgatgtttcatttaacatttccttaaccatagataacaatagcaacagaataataatagtgcaaattactaatttgtgcctcagtatcttcctggccatgattactcgttgcttttggctgttatctctctgac

SEQ ID NO: 43557 - DNA, 773 bp, Glycine max
  Clone ID: PAT_MRT3847_139330C.1
aggctgcgaaagacgacagaaggacaaataagttaaggttccacgttagtaattttttggtgtttgaattgaagttaaagggccatggcttcaggatccaaatcagtagcctctatcctcttggcactgaatctagtgctgtacttcattgtgcttgtaattgcttcttgggcagtgaatcatgggattcaaaggtctggcgaaacagcatctgttttgtccattccggctcgcatatttccaatatatttcccaatgggaaacatgacaactggttttttcgtaattttgtctctggttgctggtgttgtgggattcaccacctcactcactggattgcaaaacattttccagtggaatgctcccaacttacatgcagcagccatgtcttcattgactacatgggcactcactctactagccatgggatttgcatgcaaagagattgaacttggctggacagactccaacctgcgcaccttagaaacgatcacgatcattgtaagcgcaacacaactattatgcacgggagttatccatgttggagtttcaaaagttgttgcgcagagaatgggaggaagagtatgagtttcagctggtgcaggcttatacgaatactatctttcaggaaaattatcctctatgactgcagaattaattgtaactctttctttgcacagagttgtttcattcattcatgtacgataaaaatatttaattgtaactatatactttagtttcatttgaggaaacttataaatatactttttcag

SEQ ID NO: 43558 - DNA, 195 bp, Glycine max
  unsure (1)..(195): unsure at all n locations
  Clone ID: PAT_MRT3847_139331C.1
ggttgtngtggacacaccacttcctagatcatggcatngctcttgcacaattgaaggtcaaattggtgtctcggggtgacagtgtgggatctatgcctattatgactaaaattcacaggngatcactctggcntnngtggatantanatggtannagtggtcantgntcgagcgngtnatntagtncnaggatgt

SEQ ID NO: 43559 - DNA, 253 bp, Glycine max
  Clone ID: PAT_MRT3847_139332C.1
taagacgacacaaggggatgctggaaatatgtatgagatacttagctacgctgggaaagagaaaaaggtctctaagagagagccagtgtgcggttagagaagataggaaacagagaacacgacatcggtgcgcatcttaggatggacacctctacgtgatgttatctgtaatgtctcgcttagtaactacggcaccatcgtgatctatccaattgagacaagcatcgattacaactctcaatctcactctgga

SEQ ID NO: 43560 - DNA, 328 bp, Glycine max
  Clone ID: PAT_MRT3847_139333C.1
atcttcttgctttttccaacttaaatagatacctttttatttttagggcactttttttattacaaaaatttacgaaaggggggtgccaaactcaagggaaggcccttgccccatttacagaaccaccacccaacaatcccatccgttttacaaaacacattccttaatattacggcctaccaccactcagggcgagaactcaatttgctaacaaaccaaaacctttaaaaaaaaaaagaattcctcatcaaaactaaccctcttgaaaccctgcgccccaaaaccgcattatcaccgcaaaagccctaattgggaggctcaaatcccc

SEQ ID NO: 43561 - DNA, 255 bp, Glycine max
  Clone ID: PAT_MRT3847_139334C.1
gactccaccaacatcagcgagaccatgtgcaccgacttgcactgcaccacgagtatcaagctcgaatcgccgccgtcgtcaataccgacgacgacctcacctccgccgcacaagcagagcgcaacgccgtatcctccggcgtcacacacaccgaggccgaaaacgagggtgcaatcaccgtcgatgtcggcgtctaagtcaacgacgagagttgacgtactccgacgtcgaaagcgagctcaattccggcgacga

SEQ ID NO: 43562 - DNA, 865 bp, Glycine max
  unsure (1)..(865): unsure at all n locations
  Clone ID: PAT_MRT3847_139335C.1
tggtaccgcccctgcaggtacccggtnccggnnaattcccggngtcgacccacgcgtccgcaaagccggctcgagaaatcatccttcgaagaaaaataattccaatcaatcctagaatccaatccctcccctttgaatttgatgcctcctcgcattcaattccacgctctggtggcatcatcatcatggatcgtggtaataacaacaataacggcgttgttgttgttgtcgtttgggtgcgaacggggacacgctctgaaggtgccgtttagagtaaacgacgtgctccccgtgctgccgcgcgagatctcgtggccggttctgaacaacctgcacagcgccgtcgacctgctcccttatttcgttgggtccctcactcctgccaatgcctccgtcaagtggaaaggggcatgcttcttcgataacaccgccaagattgagttcgcaccctctttggagggtgccactctctatctcaagacagaggctgcacatagctggacctgcatggatttgtatgtttttgcaacaccctacaggattacttgggactactacttctcttcacgagaacataccttgaagtttgactcgtgggaagagcctgcagagttggaatatgtgaagcagcatggggtttctgtgtttctcatgccatccgggatgcttggaactctgctttctctgattgatgttttgcctttgttctcgaacactggttggggtcagaaagccaacctggattttctgaagaaacacatgggagctacatttgagaagcgcattcagccttggcgtgcaactgttgatcctgcagatgttcattctggagattttttagctgtgtcaaagatccgtggtaggt

SEQ ID NO: 43563 - DNA, 207 bp, Glycine max
  Clone ID: PAT_MRT3847_139336C.1
atattacactctttgcctcgcagcttcaacttaaccttttctactcatgatcttaatgcttgctagagaagataagatagagaaagtggttgtgtagagagacatggtggctcgtggagcgtctctgtttctgtacatcctcgatgtattgaattcatgtaggagagcaaaatgggcggctcggttgcttgacgactatcaggtgtg

SEQ ID NO: 43564 - DNA, 469 bp, Glycine max
  Clone ID: PAT_MRT3847_139337C.1
cgttcaaaaaaaccccttaattattaattttggttcgatcccctggcctttaccccaacgaacccgtcccctaaaaaaaacccaaaaaaataaaaggggttccccaaccatccaaaatttttacccccgttttgatctacccatttaggggaccttgaccccgaaaaattcagggggggatttggccatgagggggggaaactcgttaaagctaaggaccccgcccccgttgttatcggcctcaccataggggagggcgagctcgcggaaggggaggggctggcccattttcgccagggaacccggaagctcgctggctgggaggtacccgttgccatcacgggcaaaaaaccgaaaaacctcaaggagctgctcctggttgatgaggaccctttcggggaggccaggcatgagggcatgcacaagctcgtcaaactcgaggaacccgtggccgttttcgtccatgtta

SEQ ID NO: 43565 - DNA, 758 bp, Glycine max
  Clone ID: PAT_MRT3847_139338C.1
ccttcgcgtccgcccacgcgtccgcccacgcgccgcggacgcgtgggctggcctcaagctcgccagccatactcctcagaaactattgactacataaagtcactggatgctgaagaagacattgcccttttgaagtttcatggatgggatctgccagttgaatgtgcccgcactcttaggatctcaaccatgcttttgaagaaaggggtagagagaggattgaccccttttgccattggaagcctgatgtgcagggaatccttgaacaaggaatctgtgatagaagaagtagtacaagcagcactggattctgttcttcctggcacaagtgaagctacattgctggattctgtttcccaaatcctggacttgcacctcgatgagattgtcagatctcatttataatagcattgaattctgcaatggtagctggtatatacatgtcagtgtgtacatatgttcacgtacatatgtatagctcaaataattggatttttagttcttgacaaaggaaatctactttctttggttggaatgtcaaaccattcttagcttaactccctaggttttgttttttggtagtttcctgccgttaacaaattctttcaagattgttgttgatatcttttttaaatttgaattgtagtttaacattcttgtcctgtagtgagtgttgtcttgtttcaacattcttgttaggagtgtgaaaatggaaatgtggataatgaagtggtttttacagtatgtggatacaatat

SEQ ID NO: 43566 - DNA, 568 bp, Glycine max
  Clone ID: PAT_MRT3847_139339C.1
ggaatccggctcgaggctggctggcaggttagcccagatttatatggtgataacaacacgcggctattcacctactggacgagtgatgcatatcaagctactggctgctacaatcttctttgctctggatttattcaagtcaacagtgaaatagcaatgggtgcaaccatttccccagtttctgcataccgaaactcccaattcgatatcagtatacttatctggaaggtaaaatcccaggaatcttcctggttattaatctgcagatggaaaccaccctttaattaggtctcatgccattattcttccaactaggtgtttggcatgtggaccatattgtaatgtcccaggtgtttggattcttggaaacctctatcatctttcaagcatttgtatgaaacattcatgacatgtggagatccaagcctatgttttctaattcatagctaatatgggaatcttgagtttttaccgtgttcacttattaactggccagtaaaagcttttttttttttaacctagtatcagtagcattcttcgtggtagtggtaccctagttagaatcatc

SEQ ID NO: 43567 - DNA, 301 bp, Glycine max
  Clone ID: PAT_MRT3847_13933C.1
acgatcttcattttttttttttggcaacacaaaaataaaattattcaataagaagagaaaatgtacaatattttcatttatttacttcatagttattccactggcactggttctgaaaaagccaaatattcttgagctgtgactgaaccgtttccctgaagtcgttaactttcaccaaccaaaaatgggtcgaacaaatgccaatgccattaccgggtgctgaccccacccgacaagtctttaaaagataacaaaccggaccgtacccgacgcccttcacgtgaagcaccaacccccacgc

SEQ ID NO: 43568 - DNA, 605 bp, Glycine max
  unsure (1)..(605): unsure at all n locations
  Clone ID: PAT_MRT3847_139340C.1
caggaacattcaagtggttgatagctccaataatctcaaggctcccaaaggcattggccccttcactgagcaatcaaattgttatgatgtccaaacaggcagtaatggggattggggccattacttttactatggaggccctggtaaaaatcccaattgtcaatgagtaatgatgagaggtgaaagataaaaaagtaaaaaaaaaattgcggcctctcttgtatcattcaatgcttgtgttaaagtccttcctttcttctccttccatcttgtatacccttacccttttctgtagtggaaagttttgactgttttttttttcttctaatattgaaagattcttcatgtaagctagtggagaagtgtggccaagtttctcaaaagcctaaagaaacaggcctgcctttataacatcatctttgtattttatttctttgtccactcctcctccctctataggagtgtttgtcaatggcaatggtgcttactccccgaatgagtcgcttaatgtagttccataattttaaatgattatatggtacctatgggccatgctttgaatgnnnnnnnnnnnnnnnnnnnnnnnnnnnnnnnnnnnnnnnnnn

SEQ ID NO: 43569 - DNA, 2255 bp, Glycine max
  Clone ID: PAT_MRT3847_139341C.1
tcggctccagctctgcgactcctgcgacaagacgacacaagggggagagagagagagagaaaagagagtttttaagaaagagggaataaaacaaaagagggtaagcttaggtttggtgtttagtgggtacccttgccttcataggaagtgagaaactaggctagttagtcccattggaattttttttttttgtggctgaagaaggtgaaaagggggcaagtttcactcttcaaggagtttgaagggtgtcaacttgtgttttgagactctgaggttgaagctgcattttttttaagggtggggatgggttctagttgtggttgtggtgtgacacttgttcttgttttctgcttatggggtgtgttgatctccctatcttctgctgctaggctcagtgcttcaaggcagaagcttgaggttgctaagcatttgaatcgcttgaacaagcctcctgttaagaccattcagagtccagatggggatacaatagactgtgtgcctatttcgaagcagcctgcatttgaccatcctttcctcaaagatcacaagattcagacaaggcctagtttccaccctgaagggctttttgaagagaacaagttatctgaaaagcctgatgcaaaaacacatacccccatcactcagctgtggcatgcgaatggtagatgccctgaggacacaatacccgtcaggagagccaaggaagaggatgttctgagggcaagttcagtcaaaaggtatggtaggaagaagcacagagcaatccctaagcctaggtcagctgagcctgatcttattaaccaaagtggtcatcagcatgcaatagcatatgttgaaggagacaagtattatggagcaaaagccactataaatgtgtgggaacccaagattcagcagactaatgagttcagcttgtctcagctttggatattaggaggctcatttggtcaagatcttaacagcatcgaagctggctggcaggttagcccggatttatacggtgataacaacacacggctattcacctactggacgagtgatgcatatcaagctactggctgctacaatcttctttgctcgggatttattcaggtcaacagtgaaatagcaatgggtgcaaccatttccccagtttctggataccgaaactctcagttcgatatcagtatacttatctggaaggatccaaaagagggacactggtggatgcaatttggaaatgactatgtattggggtattggccttctttcctgttctcatatttggctgacagtgcttccatgattgagtggggaggtgaagttgtaaattctgagcctgatggtcagcacacatcaactcaaatgggaagtggtcatttccctgaagagggttttggcaaagcaagctacttcagaaacattcaagtggttgatagctccaataatctcaaggctcccaaaggcattggcaccttcactgagcaatcgaactgttatgatgtccaaacaggcagtaatggggattggggccattacttttactatggaggccccggtaaaaatcctaattgtcaatgagtaatgatgagaggaaagtaaaaaagaaaaaagaaaaaaattgcagcctctcttgtatcattgaatgcaagtgttaaagcccttccttctcttccatcttgtatacccttttttctgtagtggaaagttttgactctttttttttttttttttccttctaatattgaaagattctccatgtaagctaggggagaagtgtggccaagtttctcaaaagcctaaagaaacaggcctgccttttataacatctttgtattttatttgtttgtccactcctcctccctctataagagtgtttgtcaatggcaatggagctggtcttttgtgactaccaaaaaaagaatgtgcttactcccagaatgagtcgcttaatatagttccataatttttaatgattatatggtacctatgggccatgctttgaatcttcctggttattaatctgcagatggaaaccaccctttaattaggtctcatgccattattcttccaactaggtgtttggcatgtggaccatattgtaatgtcccaggtgtttggattcttggaaacctctatcatctttcaagcatttgtatgaaacattcatgacatgtggagatccaagcctatgttttctaattcatagctaatatgggaatcttgagtttttaccgcgtccacttattaaactggcacgaaaacctttttttttt

SEQ ID NO: 43570 - DNA, 1528 bp, Glycine max
  Clone ID: PAT_MRT3847_139342C.1
acacgagaacaaatgcaaagaagttggatatatatatctagctttaccagctatgtgttcagtatccagtctctcctagtcctagctaacattgccaacagaagaaagataattttttttttaaaaaaaaagattggctttccatttaaacttggtgcttatatatagtgctgaaatagctagctacgaagccaaattaagctttatatatattcatccccaatcatttcacaaaataactaggataattcacattaatttataattaaaacccatgcattaattctcattaatcactgggtggaatcatcattatcttgctctacttcagatgcaggctcatcttcttcttcgaatccatcgatgccataagctgcatggccactcccgaatgctttaatatggtctttaagggacctcttgtgcttgaaatcggagccacaaatacagtaccaaagcttgccacagttcttctcatgagttctccaatctcccctcacagcaaaagccttgccacatttcctgcacatgaagggcttgatcccatgcttcctcttgtaatgcgtttggagtgttctaaagtctttgagaggcttcgctcttgggtggtcaatgttgtttctgcaccctggggcacaacaatagcaaggaagcctcacattcctgttggttgggttcccctcagagattcaggtccttttctgtactgtgatccatgcccccacatgtgcatctgcatgttgttgtatctgttgaaagttttgcagcaaacagggcaagagaactgggtagggccaatgagaatctgggaaggggtagggatccagtactggcccttgttgagtctgaagccagcagaagaagaatcctcagcagcaccatgatctccatgttggtctttgtcagtgatctcatgagaggaagaagagaggacagaagccatctcagcagcactagggcttggcaaccctatgtggagtgcaacagtgacactagtacttccatcttcatcatcttctaattcctctttaaggtggatcctctcttccacgtccatggctccaccagtgcaattagacaccaagtcctctacttcctcctcatcttgctttgttggactcagcttcaagaggggtagttcttctctcaaaggaggtgagggtggaaaagaagaaaaagcagtagtagtttggtgttggtggtagtggaaaaaggcggtggtggtggtggtgtcgttggtttttgtgtggttgatgaagttgtggttgtggtgttgtggagaagggtttgaagaagggaaatattggttgtggttgaaacggaacaagggtgaagaggaagagaagaaattggagtaggggtcagccatgggtggaaaggaaaaagaaaggtgttgaggagagagtgggaacagtttatggctagttgcgtttgcttttatagagagatagagagagtacaagatggctgaagggagtggacggtggagagagagagagagagaatgcgaaagagattgcggtatcag

SEQ ID NO: 43571 - DNA, 648 bp, Glycine max
  Clone ID: PAT_MRT3847_139343C.1
tccaaaaaaaaaaaattttttttttttttaaaaaaagaggaaataaaccaaaaaagggttaccttagtatggctgtttggctcgaggtgggtacccttgttgccctcataggaagtgagaaacaaggctagtgagtcccattggaattttttttttggtggctgaagaaggtgaaaagggggcaagtttcactcttgaagggttttgaggggtgtcaacttgtgtttggagactccgaggttgagtttgaaggtgcattctttgaagggtgtttttgttatgggttctagttgtggttgtggtgtaactcttgttcttgttttctgcttatggggtgtgttgatctccctctcttctgctgctaggctcagtgcttcaaggcagaagcttgaggttactaagcatttgaatcgcctgaacaagcctcctgttaagaccattcagagtccagatggggatacaatagactgtgtacctgtttcgaagcagcctgcatttgaccatcctttcctcaaagatcacaagattcagacaagacctactttccaccctgatgggctttttgaagagaacaagttatctgaaaagcctaaagcaaaagcacatacccccatcactcagctgtggcatacaaatggtagatgccct

SEQ ID NO: 43572 - DNA, 235 bp, Glycine max
  unsure (1)..(235): unsure at all n locations
  Clone ID: PAT_MRT3847_139344C.1
ataanatnaataaaaggccagcctccccatccctgtgccagcctggctcctaaggtctttagactcccaagggcaggatactctgggccccgcctctcttctcccagcagtggaatgtaagtcatagctcgggcttgatgtgtggaagtcccagcctccccaggactggtgaaggtccaacagcagggatctctgggggtacacaccagccccatcctcagcagaacctgctgac

SEQ ID NO: 43573 - DNA, 1492 bp, Glycine max
  Clone ID: PAT_MRT3847_139345C.1
aattcggctcgagtttgatttgtgtaccaggtttttgatttggggaagaatgctccggataaggttctgcagaagctttatgctacattggaaacgctcaagcacaatggagataattttgcagctgaaattcagaatagattgaggataattgtaagatgattgctatgttgtgctctctaattcttgggtacttgaagcaaggaagcagattcacgttgcaatggttttttttttctcttgttgatctttgattagtctttgtttctaatgtattctggaaaaccaggttgcgggtggagatggtactgccagctggcttcttggagttgtatctgaccttaaattacctcagccgccaccaattgcaacggtgccattggggacgggaaataaaattcggctcgagaacctttcgcgttctcttctctaggcgcattcatttcgctagattctcactttccaaggaatctactattgcttcgtaagctaaacaaaacaaacacaaactaattatttgttcgggatcgttctgaatatcttaagaaaaacaacacatcacgcagatacgataccgtttcgttgggaaacagcaatgggagatggtaattatgatatgagggagttctgtattcctgattacatattagtgccgggatctgaggtgaaaagtgtttcgcatgtacctgcttgtccagtgattgctttcataaacaccaaaagtggtggccagcttggaggggagcttcttgtttcctatagtacacttcttaacaaaaaccaggtttttgatttggggaagaatgctccggataaggtgctgcagaagctttatgctacattggaaacgctcaagcacaatggagataattttgcagctgaaattcagaatagattgaggataattgttgcgggtggagatggtactgccagctggcttcttggagttgtatctgaccttaaattacctcagccgccaccaattgcaacggtgccattggggacgggaaataatcttccctttgcatttggatggggaaagaaaaatccaacaacggatctccaatcagtggtgtcattcctaaatcatgtaaaaggggcaaagggaaatgaaaatagacagttggcatatcataatgagaattaaggctccaaaagaaggttcatgtgaccctattgcaccccttgagctgcctcatgctatgcatgcatttaatcgtgtctcttcaacagataaactaaacttgaaaggttaccacacttaccgcgggggattttggaactactttagcatgggaatggatgctcaagtatcttatgcatttcattctgagaggaagttacatccagaaaagtttaaaaatcagttatacaatcagagtacctatctgaagcttggatgtacacaaggatggttctttggttctctgtttcaatctgcttcgcggaatattgctcaattggcaaaggttaagataatgaaaaaaggtca

SEQ ID NO: 43574 - DNA, 316 bp, Glycine max
  Clone ID: PAT_MRT3847_139346C.1
aaaaaggtggcctttaataaacccaagccacccccccccccaaaggcctgaaactcgctgggcttaacaaaaatgtaatcagggggtcccaccaaccccccccctttaaaccccgtttaataaaagccattttgccaccggcgatcaaaaaccccgttttgggaacaacagttgggaaaagatgggggggacttcaaactttgtgccaaaaacaagctcccttaaaaagaagacacccgaggtcccaaaagaaaccccccttttttggaacccacctcccccgatgaaccaacccccacgatttactttttttttt

SEQ ID NO: 43575 - DNA, 504 bp, Glycine max
  Clone ID: PAT_MRT3847_139347C.1
gttatatttgattcttactcgcagtttgaggagagcatgcttgcttacaagatggaggagatggggttgagtgatgaagagggtgatgaggaggagggtgaagagagtggcgttgaggaaggggatgaagaggatattcgtttcaaaggaagattggtggaggaggattttgagaggaagattttacatgggttttggttgaatgacaagaaagacatagacttgaggttggctcggtttgattaccttatggaaaggaggcctgaattggctaacagtgtgcttttgcgtcaaaatcctcataatgttgaacagtggcaccggagggtgaagctctttgaagggaaccctactaagcagatactcacttacacggaagcggtgaggacgattgatcccatgaaggcagtgggaaagcctcatacattgtgggttgcttttgccaaactgtatgagcagcacaaagatctagccaatgcccgtgtcatatttgacaaggcagtg

SEQ ID NO: 43576 - DNA, 548 bp, Glycine max
  Clone ID: PAT_MRT3847_139348C.1
attcgagctctgtacccggggatcctctagagtcgacctgcagccctaagccgcgattcagattgcgttgctatccattctacttgtttcttcagatccctgcaaattcaataaaaaatatatcaaggaataaatacgtatgcacaatttgggaaacaaattgaatgtaggttgtgaaaatgtaaaagtaacacacatgcaacggggtatgcgacatgctgagtctctgcaattctttgagtgtaaagtcagtccttgccaaaccttcttacaaaattggcaccccccagaaaatcgaatttcgcacctactggcatgagcgaacagctttttaatttgacggcaatgtgggtaagtgcatggttgagttttgattgagtgacacagagatgcatgttcaataacatccagaagttgctgcaactgcatgacaacaaattacacagtaaggaagcaagcaaccatatatatattatatatattatgacaagaacggaaaataaattttaaaaactaagaaacaaaaaaaggtgttattaacatttaaa

SEQ ID NO: 43577 - DNA, 228 bp, Glycine max
  Clone ID: PAT_MRT3847_139349C.1
catcttcttactctttcgtttgtctctcttctttgcctttcccctctctttcgcggtggtctttgtctttttttccccctttgttatttttccttttttgtttttgcttgcccttgtttttgagttttgcttccgtttcgtttgagtccccatttcttgttccgctgcaactttaggcctagaattgaggatggcaaccacagaggttaagggaccatgccatgttgc

SEQ ID NO: 43578 - DNA, 310 bp, Glycine max
  Clone ID: PAT_MRT3847_13934C.1
ggcaacttccttgctggaaaagaaatttggtccctttgttgagtgggataatagtgaagtgttaaagaagcaaaatagaaagaccagaacaactaatgatgaaaagttgtataggtgtgagtgcctagaacccatattgccttctaggaaacactgcacacattgtcacaaaactgttgcgagtgacattgaatttgatgggcacaatgatggcaagtgtaatgcaggtcttctggccatagagaagaataaggataaaaatggatcttctaaaggaagagggaacttaaaatgtgataccttacatgaa

SEQ ID NO: 43579 - DNA, 154 bp, Glycine max
  Clone ID: PAT_MRT3847_139350C.1
ttcgtgttgccacgcgtacggcttgtgggccatcggttgctgccacagagggtaatgacaaacatattgtaggtgcccatgcctctggatgcactggaagactgggatatgcttcattgataccatatgtagagccagttgtgcaagtctcaaa

SEQ ID NO: 43580 - DNA, 447 bp, Glycine max
  unsure (1)..(447): unsure at all n locations
  Clone ID: PAT_MRT3847_139351C.1
gtactataaanttgtttacatctacaccatattccacatattattttacccaccacttanacactactaacgtgaccttttttaacatagggacgggcacctacaataactctcttcctctaaacctatcaaacttatgtcctaaccttacaccaccaactcttctcttgtcaaataggctacatctcttattgattcctccttcccctcacctcccctcttatattatcatcctatccaccaaaaacttctacaaaacatattttacgatactcttctctggaacaccttcaactgcctccttattctcgacaaatctcttcatatatcaggaatacttcctggtattatcctcctacatcttccactttccttatttacctctccattttctaaaactcaatttaaacaatcttaccaatttgcttctatatttaatgaactttt

SEQ ID NO: 43581 - DNA, 400 bp, Glycine max
  Clone ID: PAT_MRT3847_139352C.1
tcgattaaacggtccaccccatcaagggttttaactgttcattaccgaaattggaaccggatacgtgacaaaccacaacgcaacggtcgagaccgatatttaaaaaaccttggctatggagttcatacagagtctggtggagccgtggatgagggaccagcggtcgcggctgctggggctgaatgagaaggcgtcgtggggcccactccagtggcggatgaagcggccgagggcgtggcaccgcgagtacaagaagcggatccagaaatagttcccgcgtgtcctgaaactgtgactggccctcaaggcagaatccgtctactattagcaggaccttctctgctgtatggacctcttcgagtgcgattacaagagacccggtggtgagatgattcgagct

SEQ ID NO: 43582 - DNA, 205 bp, Glycine max
  Clone ID: PAT_MRT3847_139353C.1
cccggcgtgcagcccaagaagtctccactttggactgaaatggcactttagccccttaggagtatagctaagccaacatagcaacttagggactgaacattgatgagacagatcccgatagggcttctatatcttcatagccatgaacgacctgtgatccttagagatcttccatgagataatctctttatcactgcaaaccaag

SEQ ID NO: 43583 - DNA, 2271 bp, Glycine max
  Clone ID: PAT_MRT3847_139354C.1
accacgcgtccgctggatgatatcatttgtaaagaggggaactgttatgtacttatgtaagatctagtctttgaaaccttatattagtggaatttagaaaatgaattgtctgtctattaacacattctaatatgaattatggaaatttgtttcaagactcaatttttattatgctcccgataatttattgtgtgtactggattcaccttgtttaattcattgtcagttttttttgggttatattctgaggtggtggtgagagcataggttgagttaatgacagtgggatgacgttttgtttttaactatgagtggtacatgaatggatggctgtgtgtaggggctagtaatatttcctctcacccaattgaatatagtttactatcatctttctctacctgcttcaaatttcttaactttttaattttaatcttccttttgaacctattttttcaaattgctttcggttttcgttctgattctgcaaaatcatggagatggagcgcatcgtggaattccctcacacatacatggatacgacccccgagaaagagagcgcgtttgggctgggacatcgctgaggtccccaaggctcaggtaggattgttttgtggacaagaggttgagaatatttcaagcttttctccttcataacatccccctagttctctgtttaagggagttgctcgaaatggttctcccccatggcgagacgatgacaaagatggccattacatgtttgagcttggagataatttaacttctcgctataagattcatagtaaaatgggcgaaggaacttttgggcaggtcttggtgtgctgggacagagaaaggaaggaaatggtcgcgataaaaaatgttagtgggatgaagtaataaagaattgtccgtggtataaaaaagtatctagtagcagccatgatagaaatttgtggtgttgcaactagcttggtgaacacaataaacgagtttaattatttgtatcctaattcggttcttgtttagaaacttgggtctagcttctattatgatttttggataaacaagtaccgtgcatttcccattgatcttctccatcagatagtctcgctagttttgctatttaaggtagttattcgagattgtcatatgaccattgctatccttaggcattgatgcatactcctggtttcgccttcgtaatgacataaagcctaataacagactactagtttcaccagagtttgttatatttccagactacacgagttaattgagatcaaaattttcgtttttgaaaagagttcatatatacaagaagatcaaacatatagtttttgaacacgccaatttagggcacctgagattatacttggatttggttagatcgatacttttgatatatggagtgtgtgttgtatattggtttaattatgcacatgtgatagcttgattgtgggatgaataaaatttgaagtatccacgggtgatggatagggtcagactcactaaaatttagagcatcttgaccatgatggaaagggtacgtggaccattacgtcagcccatgttgaagagagtcgaccgacatgcggagaagtatgttagaaggggtagattggactggcctgagggtgcaacctcaagggagagtatcaaagctgtaatgaagcttcctaggcttcagaaccttgtaatgcagcatgtagatcattcagctggcgatctcatacatctcttgcaggggttacttagatatgacccctctgaaagacttacagccaaggaagctcttagacattccttctttatgagagatcaatttagaagataattcactttctaagctgctgcatcatcgttgaccttcctaagggattaactttagaagatgtgggcaaatgaactcacctgggtgatggctggtttttcctgcagctgtcttcactcctgctgaaaaatcctcatttaggaatttttgaattgatccgaattcaaagtacagaagaaaaaaatgctaatgttgtggtgaaaattgtagctttgtgctcacaaatttaattctccatttgagggtatgaaatttaataattttattatagaagttttttttttgtaaaattttaatacagtatgtttaaattttgaatacagttttttatttgataagttgataaaaaataatatttttgttggatataattttttagcattaataatattaaatgaattgatataaaaaattgtgtgcaaatacggaactggcttgactatcgaaatcatatctgt

SEQ ID NO: 43584 - DNA, 437 bp, Glycine max
  Clone ID: PAT_MRT3847_139355C.1
acgcgggcgcgcggtttttcgcgtgggtttcaggaggctcttcttcggcttcagaccatttggttaaggtattcaagttggagaagtttgtggatgagcttcctcacatgtctcaaatccttggctatcatcggctagagggcgtctcaaaattcaaggttttgaagattggcatgttcaagaagaactggaaattgcacagggatctggctccagcaacagagaacgcttttggaacaaccaatcacacagcatctgttcctggtccaacgatcgaggccctgtatggcgatgacacccacgtgagagggcagaatcacctccgtccaaagcacatacttgcctgggaccctacgatccccaccgtgatgaccaacatcacacgtggtattccgcagtggcccaccttcactgtgggattcacgcgccagagagcg

SEQ ID NO: 43585 - DNA, 1159 bp, Glycine max
  Clone ID: PAT_MRT3847_139356C.1
gaaacttgcttttgttcccaattttctcaaattgctttcgggtttcgttctgattctgcaaaatcatggagatggagcgcatcgttgaattccctcacactcacatggatcgacccccgagaaagagagcgcgtttgggctgggacatcgctgaggtccccaagataagatacatagcaaaatgggtgaaggaacttttgggcaggtcttggagtgctgggacagagaaaggaaggaaatggtcgccataaaaattgttcgtgggataaagaagtatcgagaggcagccatggtagaaattgaggtactgcaacagcttgggaaacacgataaaggtagcaatcgttatgcatgacttacacatgatccatactgacctgaagccggaaaacatacttctagtttcaccagagtatcttaaaattccagattacaagagtacaaccagatcaccaagttcctttttcaagagagtgcccaaatcaagtgctataaaagttattgattttggcagcaccacttatgaacgagaagatcagaactacattgtatcaactcgtcattatagggctcctgaagttatccttggacttggctggagctatccatgtgatatatggagtgtgggatgtatattggttgaattatgcacaggtgaagctttgtttcagactcatgaaaatttagagcatcttgcaatgatggaaagggtacttggttcattaccacagaccatgatgaagagagtcgaccgacatgctgagaagtatgttcgaaggggtagattagactggcctgagggtgcaacctcgagggagagtatcaaagctgtaatgaagcttcctaggcttcagaaccttgtaatgcagcatgttgatcattcagctggcgatctcatacatcttttgcaggggctacttagatatgacccctttgaaagacttacagctagggaagctcttaggcattccttctttatgagagaacaccttagaagatgatttatttatgtgtttgtaaacgattggtctgcttttaggtgaaagatcactcgagggcaaatatggctgtaaggagcctatgtgccaatgtaaataaatatttaaatttaggcttgtgtgacaagtgaggatggttatttagcagcatttacacctca

SEQ ID NO: 43586 - DNA, 1731 bp, Glycine max
  Clone ID: PAT_MRT3847_139357C.1
cccactggcacgtgcttttgttcccgattttctcaaattgctttcggttttcgttctgattctgcaaaatcatggagatggagcgcatcgttgaattccctcacacctacatggatcgacccccaagaaagagagcgcgtttgggctgggacatcgctgaggcccccaaggctcaggtaggattgttttgtggacaagaggttgagaatatttcaagctatgctccttcagaacatccccctagttctctgtttaagggagttgcccgaaatggttctcccccatggcgagatgatgacaaagatggccattacatgtttgagcttggagataatttaacttctcgctataagatccatagtaaaatgggcgaaggaacttttgggcaggtcttggagtgctgggacagagaaaggaaggaaatggttgccataaaaattgtccgtgggataaagaagtatcgagaggcagccatgatagaaattgaggtattgcaacagcttgggaaacacgataaaggaggcaatcgtcatgcatgatttgcgcatgattcatactgacctgaagcctgaaaacatactactaatttcacccgagtatgtcaaagttcctgactacaagagttcatctagatcatcatgttcctatttcaagagagttcccaaatcaagtgctataaaggttattgattttggcagcaccacttatgagcgagaagatcagaactacattgtatcaactcgtcattatagggctcctgaagttatccttggacttggctggagctatccatgtgatatatggagtgtgggatgtatattggttgaattatgcacaggtgaagctttgtttcagactcatgaaaatttagagcatcttgcaatgatggaaagggtacttggttcattaccacagaccatgatgaagagagtcgaccgacatgctgagaagtatgttagaaggggtagattagactggcctgagggtgcaacctcgagggagagtatcaaagctgtaatgaagcttcctaggcttcagaaccttgtaatgcagcatgtagatcattcagctggcgatctcatacatctcttgcaggggttacttagatatgacccctctgaaagacttacagccaaggaagctcttagacattccttctttatgagagaacactttagaagatgattcactttcttaactgctgcatcattgaccttcctaaggatttgaagatgtgggcaaatgaactcacctgtgtgatggctagtttttctgcagctgtcctctccccaatgctatgctgaaaaatccttatgtaggaatttttgaatggatctggattcgatgtacagaagaaaaaaaaaatgctaatgttatggtgaaaattgtagattttacgggcatgattcatatggcatcctgagctttgtgtgcacgagtataagtctccattcgaggtttgaaacgttctttctatccgcgtctcttcttgactttggaacgcgagctttgcccctttttgaagggggtttaatgattttagtgttttatataataaaaaataatatttttctatgttcattttttaaaatagttaatttaaatgaattgatatagaacatggattcatgacttaagtgatcagtttgtctcttgtgtgcaaatacggaactggtttgactatcgtaatcatatctgtattgtgtatgagaaacttggaccaagcttata

SEQ ID NO: 43587 - DNA, 244 bp, Glycine max
  Clone ID: PAT_MRT3847_139358C.1
ctcagacaaggatattaaagagagagagaaaaaaaatgatggaggttgtgattgttgcaattgctgctacacttgggaatcttctgatgggatgggatagttcaactattgcagcgggtatgacctacatcaagaaggaatttgtcttggatgccacacttgaagggctaatcgtgtccatgtcgtttataaccggcaccattgtgacattattctcagggacagtttctgatttggttggaag

SEQ ID NO: 43588 - DNA, 266 bp, Glycine max
  Clone ID: PAT_MRT3847_139359C.1
tggagacagagataggggggccgtcacattggtcaagcataatgaagatgatagaaaaactgagtctgaatctaaattagctaggcttgcagggcatgatgatgatagttctgagcaaagaggaagaaattataacaaggatgttgaatcacattttgttggtcgaactgctcgctatggtgaagatcatgaaacaagaaggcatataagagatgatgataatcatagggagcatgagcatagaagggataatgataaccgaggag

SEQ ID NO: 43589 - DNA, 171 bp, Glycine max
  unsure (1)..(171): unsure at all n locations
  Clone ID: PAT_MRT3847_13935C.1
gaaaatatntgntgatttgcatgggcaatttggagatctnatgngcctactttgaagagtatggnngcaccatccaantgctggtgacnatagcatatangngannatntattcctgggagnttatnttaaanggggcaanaacangnctgggaaacnatttagccttcgg

SEQ ID NO: 43590 - DNA, 264 bp, Glycine max
  Clone ID: PAT_MRT3847_139360C.1
ggggaaaccatggatgtgcttgtatgaaccgcctctatggcttttatgatgagtgcgccagaaggttcaatgtacggttgtgggcgacatttacacactgcttcagttgcctgcctgtggcatcccgtgttgttgaaattacttaaggggggagcaagtcctacttgcatacacacactcttttggctcctgattccccttgttcagctgcccacacttgttcctgttgcaggttggctctgcgatctcgtttggtcttgcccg

SEQ ID NO: 43591 - DNA, 321 bp, Glycine max
  Clone ID: PAT_MRT3847_139361C.1
cggaccctgcgaacgtgtggctggtttggacccgtgtgggacaaacagatcccggcatcctcccaggtccggtcccgaaacgggttctccgtgttggtcaccggcgccgtcggttttgtaggcacccacctcttctcagcgcttaaactccgtggtgactgggtgctttgacttgacaatttcaatgactattattacccttcacttaagcgtgcactcctggggcttctggatcgcatttgggtgttcataatttaaggtgatattaatgattaggcactctttgaaaaacttttttaggttgtgtctttacttcatttt

SEQ ID NO: 43592 - DNA, 226 bp, Glycine max
  Clone ID: PAT_MRT3847_139362C.1
taggtttctatattggaatggttctaaaccaatgctgtgtctcactgagactgagttgatcaaagagttcctatcaaaacacatcacggtatctgggaaatcctgccagaagagacaatgttccaagaatttcattggggagggactgatgatggcaaatggagaagattggtaccaccaacggcacatcgttgctcctgcattcatgagagacagacttaaggca

SEQ ID NO: 43593 - DNA, 343 bp, Glycine max
  unsure (1)..(343): unsure at all n locations
  Clone ID: PAT_MRT3847_139363C.1
tcagggaaaaaataaaaaacatgtttattttggaaccgcagatagctactactgttcgtggacgttccactctccatgccacctctctctcacactcacaccaaacatgccacaaatgcatcatcatcatcctcgccgccacaatcttcatcattccaattccaaagccctctgcaagtgtcgattcgtcccgttttttcttcgagcgtggcctacgtcttcctcatcctcttcaccacctttttcttcatcggcttcgtcttcctctacttccgccagttcgcctccgacgcggncactttccgccgccgtcatccgccacgccgggaggaggaggaggacg

SEQ ID NO: 43594 - DNA, 350 bp, Glycine max
  unsure (1)..(350): unsure at all n locations
  Clone ID: PAT_MRT3847_139364C.1
ggtccggttatncccggngtcgacccacgcgtccgggaggacgaggcggaggnagcggcggcgctgtcntcntctccgaacagcgccgccgcatcatttgaaatggatctctgcatatacagcagcagaggagggagctcctataagagggactttgagggtgaggcttatgatcaaaggacctcttcaagggccagtgacgatgacgacaataatagggggggtggtggtaatactaggaaaaaactcagactctccaaggaacaatctgcattccttgaagagagtttcaaggaacacaacactcttaatcctaaacaaaagctggctcttgctaagcaactgagtct

SEQ ID NO: 43595 - DNA, 326 bp, Glycine max
  Clone ID: PAT_MRT3847_139365C.1
gagattggaaagttaaaatggcatttggagctaagaatggcgtgtgttttcccttctgtttttttcataactttcttggttatatgttctgccactgctcggagccctattttcttctcaagtgagtttccttttcatttcatcttattttgtgtatctccctttaattttttaggtaattagtaatatctagctaggagagaaaacactaaatggaagactttgatatatttgttcatcatccttttttttttgtggttgttattagtttaaagaactaaagtctcgttggaatattatattttgccctttgaaaggatggattt

SEQ ID NO: 43596 - DNA, 386 bp, Glycine max
  Clone ID: PAT_MRT3847_139366C.1
ggaaggagcaacaaaattagcagaatcattgctcaaaggaactgaagagtttgtgaaacttgacctatcatattgtggtctaacatttaactttgttttaaacaccagtgttaattttttttgttctgtcatagagctgaacctggaaggaaatcctatcatgcctgaggtttgttgccttgactagatttctattgctaatattattgtaatgcatgcttcattggctggttttatttgagtgttactatgtattacttcaacactcaaaatagaatctggcttttcatactatttctttacccttaaaacactggcttgcagtttatagatttaggtatagctgtggcattttggtgataattttgagtttaaccagtttctta

SEQ ID NO: 43597 - DNA, 238 bp, Glycine max
  unsure (1)..(238): unsure at all n locations
  Clone ID: PAT_MRT3847_139367C.1
ccattttaccaaaagacctgaagaaattggcgctggtgaccaacatgacatgtttggctatgccactgatgaaaccccatagcacatgcttttttttcatgcccttgcattcttggggggggggcgaatcactcttgttcgcaagaacggaacctgcccatggatgaaacctgacgcgaagactcaaaagactgccgagtattacaatggtaatggtgccagggntccaggtcgtgtt

SEQ ID NO: 43598 - DNA, 264 bp, Glycine max
  Clone ID: PAT_MRT3847_139368C.1
agagacacgtgatttgattgatcggtataagaggttgaacggtaggatgatcaggctattccgttcaatgatatgtgcaaatgcgacagtagactcacaacgattcaaggggaatattgaagaagttagcactgctggacatctagtgggcacagagtgctaaattacatggacagtgaggctgtcaaaactcaagccaacaactagtctgcttcacaaggagggcaaaatcatatcataagcgagtagacaagtagctttatg

SEQ ID NO: 43599 - DNA, 336 bp, Glycine max
  Clone ID: PAT_MRT3847_139369C.1
ttagattgtggtactatgaacaattaaaggggtgaggtataatgttaatgtatattggattatttatccaaacattattatatagatgttgagctaaaaatgaatcaattgccaatggacctggtgactcatatatttggcatattcaattacttcactgacttatgacaggctggtcttaatatggaagacatggagtcagaggaaactggagtatcgtttgcactgactcaatacgaactctctcaattagaacatatatgataaatgcgctgctctgatactgaaacatgccttcaacatgactatactacaaatgccgatgagatgcttaat

SEQ ID NO: 43600 - DNA, 188 bp, Glycine max
  Clone ID: PAT_MRT3847_13936C.1
atcaggggactgagcactgaaaggaaaaaacgccacctataaatacatcttacacggatactattagtggagctggttcaaagggttccttaaatctaacaatcatagtgctattgttgaagaaaacatgatatttgaacatggtaaaggcttgggacatctatgattcacaccttattactatttgc

SEQ ID NO: 43601 - DNA, 412 bp, Glycine max
  Clone ID: PAT_MRT3847_139370C.1
cggttatggtccaacaccaagactaaccctctatgaggggttcctttgaatcctagctatgactactcattacagcccttatcctcattcctcaaggtcttgctacttactacaaaccaattaagaagccaccagtacatcaccctactacttacaaacctccactgtacaaactacctgtttataagccagatccacctgtttacaagcccaaaccaccggtttacaatccaccatataagattccaccatactagaaaccaccttattgatagtaccctccagtagagctcaacacccaagcctaaagcatgcactgatgtctattatctacttaacaattatgattaactgctttgagttattctagcattgcgatttacatcttcatatcaatgcttatacttgactc

SEQ ID NO: 43602 - DNA, 287 bp, Glycine max
  Clone ID: PAT_MRT3847_139371C.1
cccacgcgtccgcttaatcttacgccatgaattaaaggaactgaagatcaatacgatgtcaggagcgagtgtccatgtatctatgtagatggactcttaatgagaactacctacacattatctgatcaccgtgctcaccagctcatgcatcgactatgaatgctcgcttctaacatgctccatgttgaagctatgaatatatgattatacatgaagcaagtattctactatacttttggatacctaatttgcacaatgtaactagattacatgaatcgaccaatttg

SEQ ID NO: 43603 - DNA, 2413 bp, Glycine max
  Clone ID: PAT_MRT3847_139373C.1
acgcgacgtaagacatgcgattcgggtaaaccaactccctccaaactacaaacagtgtccgtgcgtctctctttattttctctgagaaaattcagcaagaaaaatttgcaaatgtcgaatttcctgagcaacactaatccgaaccctaacaagtcctttgaggtgaatcagcctcccactgattccgtgtccagtctcagcttcagtcccaaagccaacttcctcgtcgccacttcttgggacaatcaggttcgttgttgggaggtagcacagaatggagttaatgttgccactgttcccaaggcttctataacgcacgatcatccggttttgtgctctacatggaaggatgatggcacaactgtcttctctggtggatgtgacaagcaagtgaagatgtggcctttgttatctggaggccaaccaatgacttgttgcctgcatgacgcacccctcaaagaaagttgcttggatttcctgaaatgaaccttttagtcacaggaagctgggacaagactatgaagtaatgtgctagcatttgctgcctttacagcaatttggttttaaattatatctttagaaattagaatatatgaaaaatatcccgtaatatcaacattatatcttttagaatatcattggtgatattggaggaatagtttccatatctcgttatagtttcatgatttgttttatttaatttgaatttagaatttcctgagtatagataggcatttgtgttttgtatcacattcatcatgtcattttttttacccaagaaaatattattcggaatctgtattttctctttttttctttccatacctaaatccctataatttgaacagtatctgtgtgttacctttgtagtctgtcttgccactattctgctgccgagttccttttccttggctgtatgatacaccagccttactttcaaatttcaatttgaaaattcaaattattttgggttctcctaagttcttttgtagcttgaagcacatgccattcttgatttttggagaagttgtagttctttctgaatatattttgcttgccaggaaatttccactaatgatcattacaatgtaatatcttcttccttgtttatgtaacagtccaataagctcttcagtttagtctgatttttgttccatgcatcaagtgtttcctattacctttgcacattatgggattagtattttgtgatgctgatatgtattgtatccttcttattaaatatggtatgaaagctaacaattttgcttgatctgatgcttctgtcctctccacatgagtctttttggctacttttagatactgggatacaaggcagtcaaatccagtgcacacacagcaactcccagagcgctgctatgctatgacagtgagacatcctctgatggttgttggcactgctgatagaaatcttattgtttacaacttgcaaaaccctcaggttgaattcaagagaattgtttcacccttgaagtatcaaacaaggtgccttgctgcattccctgaccaacaaggtttcttggttggatcaatagaaggaagagttggggtgcatcatttggacgatagtcagcatggtaaaaacttcacttttaaatgccatagagagggcaatgaaatatactcagtcaactctttaaacttccatcctgtacaccacacatttgcaacttctggttctgatggtgctttcaatttttgggataaggatagtaaacagaggctcaaggccatgttgagatgcagccaacctattccttgcagtaccttcaacaatgatggttcaatatttgcttactcagtctgctatgactggagtaaaggggcagaaaattctaatcctgcagcagcaaaaacctatattttcctgcatttgcctcaggaatctgaggttaagggcaaaccacgcattggtgctactggcagaaagtagagatgatcctgctgtgtgatactgttctattatgtaaatagttggcttgtcctggtatatggtagaggcaaggtattagttgatatcaaaatatagaagttgaatgggctggtcgtacttggaagatttttttttttttttgtgcgccatgcttggaagaaattatcaactaattcttggtgagaaattctatatccaatgtatatgtgtataaagcatatgttgtgtatacgcatggtttgtattttcctgttttaagatcgatgatggttggcttatacagtgaagcatctgaaagtagattctttcatggctctgcaagacattggagggttgttgcatttaggggtgaatgtcggttttagatgtcaaattatgaattgtaggatttagaaaatagcaattaaaagaatattttagcaagttataatttggattatacacttaaaaaaaaacaaaccc

SEQ ID NO: 43604 - DNA, 237 bp, Glycine max
  Clone ID: PAT_MRT3847_139374C.1
ttttgttgcttcaaaaaaaaaaaaaaaattaaaaaaaaaaaaaaaaaaaaaaaaaaaaaaagaaagaattataaaaaaaaaaaaaaaaaaaaaaaaaaaaaatgggccgtccgttctaaataatccaaatttccttccgcctacatacaaccaaatagaacttcaataggctcaccaaaattaaattaactgtccgtcgttttaaaacttatttacttgaaaaacctttaaataacc

SEQ ID NO: 43605 - DNA, 474 bp, Glycine max
  Clone ID: PAT_MRT3847_139375C.1
tgcaccaggtgtaaaagttgtcattttataaaatagactttgtttttataacatttactgaaccctccctggtcacaatggcgtgatcaaaatttcaaaatgacctctctttgatatggatctcaaaacacccctttaacccttttttaaattgaatgggtatttgaccccaaaagttaatattaatcttgtctttgaaatctattttaatttatctttgatttggtatatagagctctatgtttgttttaacgcacgcgaacctaagtgatcttagaacaatgccacaaggaactaacaaagagatatacataagtgaagggagtcaattgcttgtttatagcttttgataccatagttggggttagtgaacccaattatggggatgtatgtttgttcctgtgcatgctggttttcaagaaaaattgtgtttttaactaatgggatgtgatatatttgttattgatgtgcatg

SEQ ID NO: 43606 - DNA, 350 bp, Glycine max
  Clone ID: PAT_MRT3847_139376C.1
aaaaaaaaaacattttcttccttttttactacctaaaaaagggtttatttccctttttacaggaacaagatgaattaataaaactttttgggcccggttcccacacccaaagattcggggcaaaaaaagcagcagcagtgctcactcgatcaaacccaacagcttttaggatgggaaaaattaaaaaggtgggaaaaaacctcccttttttttttggcacattttttttttaaaccattggcgggtgaccttgactcctccaaaaacaaatccaaatgctggggctccccaccaatttccaacccttacgggttgggacaaaacaaatttttcagggttaacttcccctt

SEQ ID NO: 43607 - DNA, 746 bp, Glycine max
  Clone ID: PAT_MRT3847_139377C.1
ccacgcgtccgggagagaggagcttgaaagacaaaatgcaaagagagaggagcatggtgttctttctacctaggaaagacaacaatttaggtcaagcagtgtgcagaaagcaaagaacattagaaaaattcaggctggtcgtgtatttaaaagtaaatggaaagggcaatttcataggcttttaacctttcactctcttccatgtctgcatgcatacattttgttaatctttagcaacttaggtaccctttgcttcctttattttttttcctcgtgacagtcaaagtaatgccgtaatgcatttttgcaacgcaaagtaggcatgccatttaattcctcgtgattatcaattgttcgaatttagctccgatgccaagattttgatttttgtacgtttttaattttatattttagagtttaacatataaataatttatgggctacaccatttggagactggataaaacacttgattccttttttcctttcttgtaatttttttttctagtgaagacaattaacaaaagatgaatgataatatattttagatcttttccttttgatatattcttcattatccaccccgtgtaataacataaagtcctcactctttagattaaaaaatctaatagtgtactatatttagatatgattccatcgctaagcactttatatatatatatatatatatattatggaaataattttttttttttaaaactctgttacttatacactaaattttt

SEQ ID NO: 43608 - DNA, 345 bp, Glycine max
  Clone ID: PAT_MRT3847_139378C.1
acgggtgagacaggagcaaaaaaagggatccacgtgcgtttagattacggttcgacactaaactgtcactggttatactgcctccacttcactgcctttctaaacttttttttcgaacccaattagggatactgtctgaatggctcctgccccatcaacactgtcggccatagtggggattttctcaacacagactgatggtgatgcgcagacttactgaacatgctccattgctctcaacattacggtagactgacctgtcattagggatcataaggtttgtgactcatgcagtgcatctcacaggggtgagtttcaaagccttccaagatgtgtagaatggtt

SEQ ID NO: 43609 - DNA, 256 bp, Glycine max
  Clone ID: PAT_MRT3847_139379C.1
tgggactggtttggcagttcctgatttcagaattttcgctggccggggatactgccttgtccgttggaatcgcaggatggaagactcgttcctgagtattgatgactccttaggtgacacctccttaacctcgggcggtttgtgcagaaaacccttgtggtttgatattttgtattttttccctcaccaattaatttttagggatattgatgtacaatgagcgcacttaatatatggtttcgtgaactggtgtgct

SEQ ID NO: 43610 - DNA, 5179 bp, Glycine max
  Clone ID: PAT_MRT3847_13937C.1
ttttgttattttttctctgggttaacactcaacactactggacatggaaatcaatatgaaccaggttttattggattcatttacactgtgtggctggtaactagaaaaagctttggatttgctaaacactccttggacgtgaccggctctctttgcccaatgcttagggttgaacaaggagtctgaggcttatgcagagaagctttttgatactcttgctaggcagagaggtattcaggggggttccattaacaagatccagttgaaggagttctgggatcatatttctgaccagagctttgatactaggctcaaaacattctttgacatggttgataaagatgccgatggcagaattaccgaggaagaaattaaagagattatctgccttagcgccactgccaacaaactgtcaaacatccagaaacaagcagaggaatatgcggctttgatcatggaagaattggaccctgctgacacaggatacatcatgatagacaacctggagacgctcttgttgcatgaaccagaggaaaccacaagaggagaaagtaaatacctgagccaaatgctaagtcaaaaacttaagtctacatttgccgacagtgcaattatgaggtggtgtagagatgccaagtacttcttgctggacaattggcaaagatcttgggtacttgcactttggattggtgtgtgagattgtggccatgatagagtcttatctcagggaaaacaaactgtttgttgactataatgagccgcaacaagacagagtgtattcatcgtatcttgaattaaacctttccgatgttgaaccatgcatttcaggaccaaagagaccccatgatcgggtacctttgaaagaaatgaaggccgactggcatgcttgtcttgataacaaagttgggtttaagggatttgctataccaaaagaggcacaaggaaaagttgcaaaatttgatttccatgggcagccagcagagctcaagcatggcagtgttgtgattgctgcaatcacaagctgtacaaatacatcaaacccaagtgtaatgcttggtgctggtcttgttgcaaaaaaggctcatgagcttggtttgaaggtcaagccttgggttaaaacaagtcttgctccaggcttggagttgttacaaaatatgtacgtcgacgcagccacagtgctgcaaaaatatgtagtcacgctcacacaagggatccaccttgatgcaccttttcttcttaaaaagacagatagaatctattcacgagatttccaaccgcactgtagctcaaaatggcagagaattccaacggcaatggcgtctacgtcgatgaagaagaagaagaagaagaaataaagttgaagcagaaaaagcaaagactgaaagagaccttgccggaggtccttaaccgcatcgcctccgccattctcttccaggaacccgccgatgccggatccctacttcgccggatcaaggtctccgtcgccgacaacgctactctcctccccgaagcttccagaaactccgcccgcgacgttctcatctggactcgccgcggcactcccttccgcgcgctcttcgtcatctccgttgggacggtcacttttgttgctttgacagggctgcttgtgtttatgcttttctttctagctgcgaccgtaaatgccattgtcatatcgttactgatgtctttggcagctgcaggaggattcctggctcttttctttgcttttgttacagctatatacattggagcattatcaattgccatatttgctatttcagttaccacattttgggcaattgtggctattctgatgatcacaggctggattgtattcatttacactgtgtcgctgataactagaaaaatctttggatttgctatacacttcttggacgtgaccagctcttcaaattcatcttacaaatattgcagaatgtggccgataccaatttctacacaaattttaagtgagatatgcttataaagggcttttcgtaaatagttcctaagtacattcagcgttattcttaaagtcaaccccgtttgggatcaagtacaattgcttgttcttggtctttacagatgtgtttttaactaaacatatatcattaattatcctaacagtgggaatgttacgaatgtaaccaccagtattgtatattgtcttagatgctcagtacgtggtgaaattggggtcgaagctgatgactcaatccatggacgcagtatgagaaaggtcataacgaatgttattgagcacaaatgccctggtaaagtgcgcattggaacgacaggaattcaattcgttataaaagtcacacaagggaatagaaaaggtgatggcgaggggaaacttttgccaatattcgcctggttaacaagctcttgaaaggggtagttggtccaaagacagttcacattccaacaggggaaaagctttacgtgtttgatgcagcaacgagatacatggcttctgggcaagacaccattgtgctggctggagctgaatatggcagtggaagctctagagattgggctgccaagggtccaatgctactgggagtcaaagctgtgatagccaagagtttcgagagaattcatcgtagtaacttggtaggaatgggtatcattcctctttgcttcaaacccggtgaggatgcggacacattgggattaactggtcatgaacgttattcaattgacctaccaagtaaaatcagtgagattaggcctggccaagatgtgacagtcacaaccgataatggaaaatctttcacctgcacagtacgctttgacactgaggtcgaacttgattacttcaaccatggaggcatacttccatatgtcataaggaacctcattaagcagtgaaggccattgtcgatgggatatttccatggtggttgtcccagtgggcattaagagtcgtgaacttggctctgaagttgctccaagatatcaaattaaccgtggtcctcgaaagtgacttaatgaacagggtttcaacaagggtggctttggatgtaccacatgtataggcaattcaagggtactagaacattctgttacttctgctatctctgaaaatgacattgtagctgctgctgtgttgtccgggaaccgtaattttgaggggcgtgtgcatcccttgacaagagctaactacctagcctcaccacctctagttgttgcttatgctcttgctgggacagttgacattgactttcaaaaggagccaataggaacagggaaggatggaaagaatgtttacttaagggatatctggccatccactcaagaaattgcagaggctgtccaatccagtgtgttgcctgacatgttccgaagtacatatgaagctattaccaaaggtaacactatgtggaaccaactacaagttcctgctgagaccctgtactcatgggaccccaagtcaacatatattcatgaacctccatacttcaagggcatgaccatggatcctcctggagctcatggtgtgaaagatgcctattgtctgctgaattttggtgacagtataacgaccgatcacatttctcctgctggaaacattaacaaggatagtcctgctgcaaaataccttctggagcgaggggtggaacacaaggacttcaattcttatggaagtcgtcgtggcaatgatgaggtgatggcaaggggaacttttgccaacattcgtcttgttaacaagctcttgaatggagaagttggccccaagacagttcacattccgactggggaaaagctttatgtgtttgatgcagcacagagatacaaggctgaagggcaggacaccattgtgctggctggagctgaatatggtagtggaagttccagagattgggctgacaagggtcccatgctattgggtgtcaaagctgtgatagctaaaagttttgagagaattcatcgtagcaatttggtaggaatgggtattgttcctctttgctttaaatctggtgaggatgctgacacattgggattgactggtcacgaacgttatactattgacctcccaagtaacatcagcgagataaggcctggccaagatgtcaccgtaacaactactaccggaaaatctttcacctgcacagttcgcttcgacaccgaggtggaacttgcttactttaaccatgggggcattcttccatatgtcatcaggaacctcattaagcagtgaagtcatggctgatgggaaatgttaaacaatgttgccactgcgtgtacacgttttgagtggtaatataatgtgagagaaatgagaataaattcaataaataggaaagatcccttcttaagaaggcaattttttgacacttccaggtaacatattaggcctgtaaacaacgagtgcattgattctagatttctcatgtctgtgttgtgtgcccattgaacaatggggggacaattgtattttttgtataagctgatgtgatccatgccgatggcagtgaatattcttttcatttaaatactccacttaatatttttaagactacagtgatttgctatttcagtttccacattttgggcaattgtggctattctcatgatcacaggctggattggattcatttacactgtgtggctggtaactagaaaaagctttggatttgctaaacactccttggacgtgaccggctctgcaatttcatcttacactactgcacggcatgcccgctaccaaatacacacgaattcaaagtaggggatgatcacaaatggaaacttgtgtacaaaccctaagctacatgtccgtgttttggaatgacgcgagcttctgttggctggtatgaagccttgttcttagatccttcataatttggtttcaatccctatcctttgtttcatatctgaatagagagatgtttagataaataagccagattattgtgtgttgtgttttaagtttgatgttaacacaaaacagtggcttttcttctgtagccatctagttacctggtgtagtgcaacttatagctgatatgaaattacatttgtgtgtaaatgatgtaattttggaacaaggtatgtttgctgcatttgtgggaacatttgtgggagcaactaatgtacatgcggtacttgtacagccacacgtcacataatttcatcacatcatattctgatatatttactattttgttat

SEQ ID NO: 43611 - DNA, 330 bp, Glycine max
  Clone ID: PAT_MRT3847_139380C.1
attgggacccaaggggggttttttaaacataatttgtacaacaaaaatagcctaaaaggggggggcggcgggtcaaaaaaaaagtggccccccccggaaaaaatgatgggggggggggggggaaaaaggccctcgggggcccgcggaaaagatccccaaaataaaaaattttcgggatttttaggggaaagaaaacccccccctaaccatttggggggggggactttttttttttcaaaaaaaccccgcttgatatgtttccccaaaatatttccgaggaggggggggtgatgctatcagggggtcttaaatttctggggaaggaatggg

SEQ ID NO: 43612 - DNA, 292 bp, Glycine max
  Clone ID: PAT_MRT3847_139381C.1
aatgaaaatagacgaagaatgaattgaagctgagaaaaaacgggtaaaagaagaggcacatcaacttgctctaatttttgaaactgttggggctttcaaggtgaaccgtaactgtggttacggacaacaagtttttgggagtgtcactgatcaggatcttgttgacataatcgagggacatcttcaaagggaggtgcacaacacaattgttgatcttgcaaagatcatgcaaacaagctaatatataggggtttgagagctacccccgctgccctctggtagagtgtgggtg

SEQ ID NO: 43613 - DNA, 164 bp, Glycine max
  Clone ID: PAT_MRT3847_139382C.1
taaggtaaaacacacctttctttgcaaataaactcaacgcaaacttatctcttgaatccaccaaaaaaaataaatgctcctctaccctgcaacacggtagccgagacccatgttccatcccaccgaccaccatgaagttgcatcgcatttaacatctctacaaa

SEQ ID NO: 43614 - DNA, 1352 bp, Glycine max
  Clone ID: PAT_MRT3847_139383C.1
aggctttgccacataacacattgaaactaaactccaagttcctaccatagtgctaggaaagtgagtgagagaaagagatcacatagcagaatggcttctactcaatgtttcttgcaccaccatgctcttaccacccctgccagatccccatcacaacgcatcatggttagcaccaagcctaaccagcttgtttgcaaggcacagaagcaagaggatattgatgtcagcccaatctctcgccggttagctctaaccgtgctcattggtgctgctgctgttggctccaaagtccaacctgctgatgcagcttatggggaagctgccaatgtgtttggaaagccaaagacagacacagatttcctgccatacaatggagatggattcaaactatcgattccctcaaagtggaacccaagcaaagaggttgagtacacaggtcaggttgttagatatgaggataactttgattcaaccaccaacgtggttgtcaccatcactccgactgataagaagtctatcactgactatggttcacccgaagagttcctctctaaggtggattatttactaggaaaacaggccttcttcggcgaaacacaagccgagggtggttttgatccaaatgcggtggccacggctaacatcttagagacggcaacacctgtgattgatgggaagccgtactattttctgtctgtgttgacaaggactgctgatggagatgaaggtggcaagcaccacataattagagcaactgtaaaagatggaaaactgttcatttgcaaggctcaagctggagacaagaggtggttcaagggagcaagaagatttgtggagagtgcagcaagttctttcagtgttgcttaaaaatcttcaataatagctggttatatatatctgctatgtgtaaatctaccttaagtgctatctatgtttgaagttgtctaacctcccttttgtccacgagtttcataattttaagggacttggttggattaagtatctgaatacttggtgcgcatgtttggatgggtattaaatacactaatcgcgaatcaagttgaggcaaaaaacaaagttgctttgcgtcactgcatggtttttggacgtggaaatattagaaaacatggataacaaacccagatccaaacacactatttaatgttcctggcggttgtaaacacagccatccatccccttttctttctgtgcttaagctagcattttaacttgtctcctttggtaagctgctacacaagccgcgccatttataggcattatgcttgacagaaggttcaaggagcatgcatgttcgtaaaatggcttaaattttgaagagaaacaattatctc

SEQ ID NO: 43615 - DNA, 294 bp, Glycine max
  Clone ID: PAT_MRT3847_139384C.1
gaacaaaacactggcttatttttttgtttatgcaaatcgcataagggacctgtattttcacttcccaaaccccaaaattggggggaatgaagttgttataccccaataaaaagaagaagggggggagcccttttaaacggttttttcaacttcaaagccgtttttgtttttgatttaaaataaattgggaaacccaatacccccctaacctttggtggggttaatttccaggccataggtccgggtttttcccccccaaaatttagaatttcaaaaaccttttttaaatttaaa

SEQ ID NO: 43616 - DNA, 367 bp, Glycine max
  Clone ID: PAT_MRT3847_139385C.1
aagtaagaagtttttttcctttgttatttatttgcattacatatattcaattcaaataatagaaaatccagtgtaagaacaaatatgacaaaaagttacacatactactaatcccttcccaaaaagaatgaaataaaatacaatgtataaaagcagcaaaacaaaagaccttgccaacaaacttgattttggctgctttgcaagagggaaagccaagcaagcagactgaagcttccagatctgagaaatcaccagaaatgattaccagtgctccaatctttcattagtcaatgttaccatcaaccatgaaataaaacagatttggctgcagtatacactttttggtttgggaggaaacttcaaaata

SEQ ID NO: 43617 - DNA, 434 bp, Glycine max
  Clone ID: PAT_MRT3847_139386C.1
cccacgcgtccgtacggctgcgagaagacgacagaaggggggatatttgttgatgtgcgcgataaggcgaggctgagcagagagtggtaaagtaaaatggcttacaatctttgctcttccccttcctctctcttccatgaccttccctccatttcttcttcttcttcttcccgcaaattcaaacttcgaaacttgtcctcttcttctctcactcctcattccaaaacccttctccatgtctccttgcacgaacacgaacccattcccgaacacctaccacccgacgcaaaatcctcgtcttcgtcgaaaagtaattacatctgggtcaacccccgaagccccaaggccaaacaactcgagagtagatcctacgatgcccgggtacacttctcttgtaaatctcgcccactccttggactcttgcaatccctctc

SEQ ID NO: 43618 - DNA, 345 bp, Glycine max
  Clone ID: PAT_MRT3847_139387C.1
agggacggatcttttgacaacaggatctcttttagtttttttttttcatttttgccaaaatttggagtgggtattatttaacccatgaggaaggggggatttctcatttaatcttaaggagtatggaaatgggaggaggaaagggaaccccaatcaacttcagttaaaaaataaatattacttggaattaggcccggatattacttggaaggctctctcaaaatatgggccatgacatgaggtttgcaagtttcacgtgcaagggttaaagctgaaaaggggctttttttttatcgaaagcatttcaaaaccttcagcaccacttttacttgttcggacccgtgg

SEQ ID NO: 43619 - DNA, 516 bp, Glycine max
  Clone ID: PAT_MRT3847_139388C.1
ccctcgcgtccgcccacgcgtccgctcagctaatgagacagaatatggaagagtgaaactgagaactgcaacaggcttaaaagaacgcaacgatggccagccaagcaacgaagtcgtttgagaatgtcatgagccatggaatgtggagggctatgcattgtattctggggatgctgtcattgtttcaagaggataatttgtggtctgagcagaagattattggtgatataatgttgaaagttggccatgtgttctcctctccagtttgattaataatgtaatggaaattgcagaaaacgaaaagggaggcttccggttagagatgaaacctttcattcgatgatgagggaagctgcttccactgccaagtgcttgtgtgtttatgaaggctttggttttgaaattgatgtccagaagtctttgcctgaaacagttatgggtgatgaggcaagggcttttaagaaattctacacatgattggctatttattgaacatgaatgacacagggactctca

SEQ ID NO: 43620 - DNA, 252 bp, Glycine max
  unsure (1)..(252): unsure at all n locations
  Clone ID: PAT_MRT3847_139389C.1
aaaaaganaaaagcgatcatagtttnannnnggcnttatccagnttanggntncggggnnctagacctagntttnacgtatnggaaccttaaatttacgatcaggtctgagcaatnctggttggtagaaccttggtcttagtgagtcaagttttatantcttaattagacgatcaaattccctantgccttcgatcctnttgctngatgcaaatgctgatgactcgggtgctgggtcaaaggagtatgtngc

SEQ ID NO: 43621 - DNA, 858 bp, Glycine max
  Clone ID: PAT_MRT3847_13938C.1
ttgtgctggctggagctgaatatggcagtggaagctctagagattgggctgccaagggtccaatgctactgggagtcaaagctgtgatagccaagagtttcgagagaattcatcgtagtaacttggtaggaatgggtatcattcctctttgcttcaaacccggtgaggatgcggacacattgggattaactggtcatgaacgttattcaattgacctaccaagtaaaatcagtgagattaggcctggccaagatgtgacagtcacaaccgataatggaaaatctttcacctgcacagtacgctttgacactgaggtcgaacttgattacttcaaccatggaggcatacttccatatgtcataaggaacctcattaagcagtgaaggccattgtcgatggaaaattccaaggtcattgtcccagtatgcttttaaagttgtaaaatgtgagaataattttcccagagataggaaaagatccccttttctagagggagattttgacaccagaccagtaaacagtgattcatttgattgtgctataacacagccccttgaaaatggggacaattgtgtaaagccgacttgaagtgtgaaccctgccaattgcgcgcggcacttggtctgctaagttgctaagtatagtgtttaaggtagtaaaaatttctttcttttcaaggcttccgcttggatattcaatgaaaagctgagtatagtagaacaatacgtagagaatagaataagattgagtttgaatgaaaggttaggttagaaatttaagtttgaataatttcattctgtgaacgtttgtaaaagcaactctcattttttctatcaaattgagttttagggtaaataa

SEQ ID NO: 43622 - DNA, 710 bp, Glycine max
  unsure (1)..(710): unsure at all n locations
  Clone ID: PAT_MRT3847_139390C.1
cgatctcataaatgttataaatcttgtattctgatgctttaattatggctatgtatcattcataatctccatctatctcctctgctcctactcaccgcggacgcgtgggatcagaattcatcacaatttctggaaattaaaccgaagatcgagttcttctcttgtttgaaaaattccgatacattttagtactttctgaccttgtccatgatgttttcttacccgtgtcttttttcatttttaaggtgactatgtggctttgtgtgtgtggtttgatttaatctcaagatacaaggttgaagcgtgagcgtgttatcgttaattatcttctaagaagcatgtttcttaaacgttgaacattgcagtcctgtcttgagttttcttcaaggcttggtttaacagcgatatatagagagagaaagaaaaatagcattgtctgtttgcataagaatctgtctcccccccgtgtgaaggtgttgaatttgcaacattgttgattgagagatattaaaagaaaaaaaaaagtgaagaagggtattgagatttttgcgggaaatccggtgtcctaacgtcaaaaaatagaagtctttctttgtggggatgatttgcaatccccataatctctctctctctcatccttctttgntgntgntttgttttcttccccatctgggtggttccctctgtttttcagggtagggaagctaaac

SEQ ID NO: 43623 - DNA, 292 bp, Glycine max
  Clone ID: PAT_MRT3847_139391C.1
aactcggcatgagcctcgagacagattataggtgcctaacaaaaagcgacactatcaagtgaagcagttacgtttgagcacagcggaaattaaaggcgctacgggtatgccagatggcatagaagattctgaagaatctctaggccagtatatgtgcgcacctgcagtaaggggggctgctttatcagcatggcctttggagaaatttggaacataccggtatttattgtctgggccgaatgtgggaaaagccctctatgaatggatgtatgagaaggaacgctcttactac

SEQ ID NO: 43624 - DNA, 826 bp, Glycine max
  Clone ID: PAT_MRT3847_139392C.1
aatggctctctcagtttcttaaatcttaatctttcacttcttcgctaatctctagattactcccattcattccattttgtttcattaattaaccaaataaaaaacgatgagcacttctcatcaacaacgttatctcctcttcgctttcactacgttaatagttttcttcagcttcaacactacaccagtttcggctcgtttgttccccaacgtttcctccatcccaaggtggaacacatcccacgcgccacctgatagcgcgtggaacgcgtatcgcaatttcactgggtgccgcccgggaaaaacatataacggtctttcgaatctgaaaaactactttcattattttggctacatctccaacgtgtcctcgaagtcgtcgaattttagcgacgatttcgatgatgcgttggaggcagccgttagagcctaccagaagaacttcaacctcaacatcacaggggagctcgacgaccccacgatgaaccaaatcgtcaagccacgctgcggcgtggctgacatcatcaacggaaccacaacaatgaactccggcaagacaaacaccacggattcaccgacgttccacacggtagcgcattattctttctttgacggccagccgcggtggccggtggggacacaagaactaacctacgccttcgatcccgataacgctctcgacgacgtgattaagaccgtgtttggcaacgcgtttagcagatggtcagaggtgaccacgatttctttccgcgaaacggcgtcgtatgtggctgcggacataagaataggttttacggtggggaacacggcgacggcgaaccttttg

SEQ ID NO: 43625 - DNA, 208 bp, Glycine max
  Clone ID: PAT_MRT3847_139393C.1
cccacgcgtccgcccactcgtgcgttcacatataccatcttgttatttatacaaacaatgaccaggatgatgaggggactacttacactaacatgtatgctctatacctatatcacactatataaagtgcagaattcactcagaaagctaccttcaatatttatcatcatgatcaaactatcttcaataacaaaattgtagtcataga

SEQ ID NO: 43626 - DNA, 677 bp, Glycine max
  Clone ID: PAT_MRT3847_139394C.1
cagacacacaggacgagagagagagaggcaacgagggcgagacagagggaggcatcggcgtctttgtaattgttgatatttgattgatgcgcatgcggtggttcctccgaagcccaatcatcaaaacctcgctgctgaatctgagccctccaatttcgtttagacctcactgggcgaggaggaccttcacttcttcgagattgtcaatggcggccatccacaaccacagcaacagcaacagcgaaaccggactcgcgagacggttttggatcaagttcactcgtgaatccatcttcgccatgtacactcccttcgtcatcgccttggcctccggtaatttgcacattgattccttccaccattacatcgcccaagacgttcatttcctacgtgcctttgctcaagcgtatgaagtggctgaagagtgtgctgatgacgacgatgcgaaacttggaatctgtgagttgaggaaggcagttctagaggagctgaagatgcacaacttgcttgtacaggaacgggagttggaccttgccaaagagcatggtattaattctgcaactggtaagtacacagagttcctgctggctacagcctctgggaagattgaaggactaaaaggtccttgtaaacttgctacaccatttgagaaaacaaaaattgctgcttatacttta

SEQ ID NO: 43627 - DNA, 318 bp, Glycine max
  Clone ID: PAT_MRT3847_139395C.1
agtactagagaacggacattatttttaagtggagggaacaaatgtatatttttaggggtaaagaccaaaagggacattggttaaatataaagacccacaagttaaaatagcacaaattttaacgggtataaaacataaagcacagacatgggcaaaggtggggcattggcataaacttgagtttttgctcttaaagaactaaaatgagggggttctaggggtatactaaaagataaagatttcctaaggattaaaacccagggagtaattaaatcttcaaaattaaaggggacatttcatttatttcaactggagccc

SEQ ID NO: 43628 - DNA, 243 bp, Glycine max
  Clone ID: PAT_MRT3847_139396C.1
aatgacctctgatgggggttcgtatgttctcggggacggtgatcaccgtaaagtgagcaccatcttagctgaacacctctaaaggactctgactcctgatacccatgagtagcatattgcggccgacctttttctacaaatggtccatgatcatgagcatgtatttgatgatgaagtataagatgtcgaacttgacgaagattttgaccttgataatgccttaaaacgttattctacttttat

SEQ ID NO: 43629 - DNA, 440 bp, Glycine max
  Clone ID: PAT_MRT3847_139397C.1
gaaaaaaaaaagactgaaaatatatatcttcaagcagacaaggatgttctcctaactgggatattccgctctattaatacataaatcaaaccgaaagttatcggaaaaaaaggagggaaccatgaaatgcaaatctgactattacagctgacaatgatctaaagaaagcacagcattaacccaccttatgctccaaggagatctatagtatttgtctgaggaacacccacaagctccaacttttttaataccaaagagatgatgaaaagaaggctggggagggtcattcaggcagaacatagggcaggcaagtgttaacacctagtgaatcacaatctcgagcatgccttttgggctatacccttctttgtcctctgcttacgtggatgaaggacaactctcatggctgcataaaagactgccatcacgttctactgtgg

SEQ ID NO: 43630 - DNA, 580 bp, Glycine max
  Clone ID: PAT_MRT3847_139398C.1
agcgagttttccgaagaagaggaaatccggtgcatggcgaactgcaagcacattttccactgcgcgtgcgtggaccgttggatcgatcacgatcagaagacgtgtccgctgtgcagaagtacgttggtgccacatcagaagctcgaagaatacaaccagcgactatgggcggcttctggagtttcgcagttttattaccaagacgattacacggcttccctctgaatttttctttttctttttccacttatataattatatatatctttttttattatggtggggggacttgacagctagtgtagccaaatgtatatagctaattaaaacaaaaatattgtatcaatcaaaaagtgagatttttttttggattcgtatatacattttcccaacttctatttctatttactacactattattagttattataaaaattaattaatttttaattattttataggataatttatgatatgattgaatgaaagggttaatttttcttatggattattattctttgttgttcaagaaaaaagggattttattcacaaagaaatgatatgagttggttattgtaat

SEQ ID NO: 43631 - DNA, 666 bp, Glycine max
  Clone ID: PAT_MRT3847_139399C.1
ggctcgaggctgattgtggccttcgatcccttgttgtttcaaacaaatgaattgaacttgtgattgtgtgaatacaccccttcttcaaatgatggttcttgtggcaaattagtttgattcacaaagcgccacaaaaagcaaagagagggcatgggcaattagggggttggttgcctctatttgacccaccaaggcatgacattgccgagaccataagacgtgctattatgactgttgtcttcttctaggcgctgctcttacatcgaatttcttcacggacatatttggcgtgagatctatcaagaacaaccaccgtgagctcatagcagttgtttatcttcaagtattgtaagtcaggctttcattgctacacagtcaaggagctggacttacattgaaatggatagccatgatcatagctgtgtatgtgaattggggctttgcaaggattgaatggagtcaggttgctttcacctcaaagaaggattatggaaaaggagggagagagagagagaagcacaagctgaagctcaacacagtttacatggtctgaatcctcttgaaatagtcaaaatcttgaatgaagaaaacaactatagagaactgtttgaacaggctaggaaatgctgctgaagttgcaaggttaagggagcttgacagtgtaca

SEQ ID NO: 43632 - DNA, 518 bp, Glycine max
  Clone ID: PAT_MRT3847_13939C.1
agatgtcactgtaacaaccaatactggaaaatctttcacctgcacagttcgcttcgatactgaggtggaacttgcttactttaacaatgggggcattcttccgtatgtcatcaggaacctcattaagcagtgaagtcatggctgatgggaaatgttaaactatgttgccactgcgtgtacacgttttgagtggtggtaataaaatgtgagagaaatgagaataaattcaataaataggaaagatcccttcttaagaaggcaattttttgacatttccaggtgtttatattaggcctgtaaacatggagtgcattgattctagatttctcatgtctgcgttgtgtacccattgaacaatggggacaattgtatttttccatgccgatggcagtgaatattcttttcatttaaatactccccttaattttcttactacggcctatagagttgaacatgaatcaaggcgaatagtagtgaatgttcttttcccaaaaaaaaaaaaattaacataaggtaac

SEQ ID NO: 43633 - DNA, 245 bp, Glycine max
  unsure (1)..(245): unsure at all n locations
  Clone ID: PAT_MRT3847_1393C.1
accaaaaacacgggggggagggaaacaagaaagacggccaggggccnaangaacacagccggccgcgcgcgccccaagagaagcaacaacaggaccccggncgcgaccagccggcaacgacaacgccggagcacagacaacagcgccaaacacaaccaaggcagggggggggcaaccaacccnccagncccncaagccacagccccaccanacaccaaacgacgncggagcggccaagaacacca

SEQ ID NO: 43634 - DNA, 289 bp, Glycine max
  Clone ID: PAT_MRT3847_139400C.1
tttcttctacaaaaacatcacctttggctttactctattcttatatgaggagtatgcatcattctctgggcaacctgcatacaatgactggtttttgtcactctataatgtcttcttttcgtcacttccggagattgctcttggggtctttgaccaggatgtgtctgctcggaactgtctaaggttccctatgttatatcaagaaggtgtgcaaaatgtcctctttagctgccgtcaaattttcagctggatgcttaatggctttattagtgccataataatttacttc

SEQ ID NO: 43635 - DNA, 274 bp, Glycine max
  Clone ID: PAT_MRT3847_139401C.1
gaacgagctcccgacctgatctcttatgctctggcttgaaggaccttatgcttatgcggcttaaatgctatgtgccagtgataaactagctcaccctttttttccattaaaactggtcatcaaccttggcagcttataggtgcgatacggtgctcaatagataatttcatactaactaaacttggcatctccaaacctgaacgaactggtggaacgtgtaagacaaacatacctgtcgatagctaatatacttggtatcacaatcaagacactt

SEQ ID NO: 43636 - DNA, 387 bp, Glycine max
  Clone ID: PAT_MRT3847_139402C.1
ctctcacacactcaatcctaacattattaatactcttacttatgtttaccttttactttgggaagcggatactccatatctgatcacccatataatgtgggttctattctcaacatcaaagaacatggatgcgagccggagactgcgaatgcaccgggagcaacaccgtacagacccttcactgtgacggaggctttgatacctggttatcagtaatcacttattatccgaggatcagtttttcgctatctttttgtttactctgttctggttcggtaaggcgtacgggggtggtattattcttcataaagggtgcaacagctgctactgggtcgtttgtgcctgggcctccgccgaacgctggaaaagggcaacccaagggtggtg

SEQ ID NO: 43637 - DNA, 211 bp, Glycine max
  Clone ID: PAT_MRT3847_139403C.1
acctcctcctccaccagcctcctcgtcgccatcactggcttcctcacctccccctccttccatgacaccaccaacactgtcctcccctcctccatccctacctcctcagctggttctcctctcgtcgctagtccaagatcaagaagactaagccatatacacacatgcatacctgagctaggaccttgtcatcttcagcaacaattgcaca

SEQ ID NO: 43638 - DNA, 346 bp, Glycine max
  Clone ID: PAT_MRT3847_139404C.1
agaggctgcgacgatcgagatacggggaaatatcacattgacaaagaaccccattcttgtgggagatagatggcacgcttgtcactgctcattttcgcgttctgcgccgtcgccgtcgccgtcgccgtctcgggctcatcgttctaccatgccgcacgcaaccgtttgtcctctgacctggagtcacatgtgcaggatgtgctttgatcgagcgtccacgctccctctttcacgcgcgccgtgcgccgacacggcatccgctcctgtaccgtcaatcatgtccgctgcctcgtcccgatcatcgccgacattcatggccaccacttttgctccaactcgaggtcac

SEQ ID NO: 43639 - DNA, 230 bp, Glycine max
  Clone ID: PAT_MRT3847_139405C.1
cgattgttttcttgcgctctgctcgagcctctggggtggttatatctacattgccatttgctctctctcagattccaaaaatcttaagctatgggaaagtcttacccaaccgcgagcgcttattaccacaatgccgctgagaaggcgaataagaaactcataagcttcatcgctcataagagatgcgctcctctaatgctccgtttggcatggcactcttctgtaactta

SEQ ID NO: 43640 - DNA, 493 bp, Glycine max
  Clone ID: PAT_MRT3847_139406C.1
aaaacggaaccgggccacattcccctattaaatttttcactttacataaaaaagggggaaaccaacccacaagcaaaaggcgggggagcccatttttttttccccaaacccttcgggattttaaaaaaaaacccccggggtgcccccctttttgggcggggtttttaaaaaaaactaatttttcccattcccaccggaaataacaaccaaaaaaaacccttaaaaacccatcctccacccccacaaccacaagattttacaatcttacaagagggcaaaaattaccccaaactttttttataaacactttcccccccaaactttcccaaatccaaaacggccttcccgttaaaaaaaaacacggggggggaaaaaccccaaaaaaaaaggggcgtaagggaaaaccaaaagattcttaattaaggaagaaaaccaaaaagggaccccccaaaggggtaaaggcgggccaaaccccccccgaaatccggaaacg

SEQ ID NO: 43641 - DNA, 831 bp, Glycine max
  unsure (1)..(831): unsure at all n locations
  Clone ID: PAT_MRT3847_139407C.1
acgactccactatatgggncgagattggggtacccctncgagggcccggccgggggcagtcacaatcgtcattagccttcaaacaattagagcgtataacttggtactagccagtatacatgtctaaaaaatcatatttctatatcttagtttttctatgttctttatataatctagtcttgttaattagtaggtgatataccagtaacatattaatctctgataactcacacggttaactaggttaaatttttctacgaactatatgactttaagtttgccataagcaaaaaggattgttgaagatatatacaaataactcacgtagctaattatatacttcagttcattaatatttttgctgatttattatgtatttattcctttcacaggttgtggcaaattgtgaagcatgaggaccttacttgcagtactcttgtttttcttcatgatgacggtgaccatgctgcatgttggtgcagtcatcgtggagcatgagccaaaaacaaagacaaagcgcaatctactgagcgaaacttctcttggacgaaagggcatgggaaccgagacaaataaccaacaaaccatgaaggtttctgcaagtaatgcaaataccaacactgctgattctgtcagcaatagcaaagcgaaaaagaacgacgacaacaatggtggcgacaacgacaaaaatgatagctctcagaactacggttcaggacctgtccttaacagccaccactatttccatattcgcactccacccattcacggctagctctatatatcttgtcggagacgaaaaagcttcataaatatatatatatatatgca

SEQ ID NO: 43642 - DNA, 517 bp, Glycine max
  Clone ID: PAT_MRT3847_139408C.1
gcgtgcgcacgcgcgcgtcatggacagggacctcgaggcatcttctcctgaaatcattgactttaactaagttcttgcatagaacctttatgtgtgtgaagcatgaactaatgagaaacgaattaggttacagtcaaacactaatatccagacatagcttttcattattaaagatagcgtggtatctttggcggcctgagcagaatgattattgttccaattggggcttagcattttttttcttttcaggcttctaaccccacctgggactccccttttcccttctttggagatggaaacatcaaaaactgttatgagccagcttggggctccaactgtccgtcccacaccattaaaagctcgatttgcaaattctccattagaagatactgggaggagcaacttcgtatctaaacaaccagcctcctcccctgggttgacctcttcaggtggtggaattaggaggccctcatcagccgggaatctgtcagaacttactggaaggagcaactcagta

SEQ ID NO: 43643 - DNA, 783 bp, Glycine max
  Clone ID: PAT_MRT3847_139409C.1
aggatcttctggtgttctttcacctcaatcaaaacgaatcaaaattattcttttcaaatactaaaagcataagtgggtaactactccaacaaaggatccaattgaaccaaaccaagacgccagaggcactgcaataattgatagtgtgtttggaaaagccaaatcacgcaatccaatacacattgaacgccaatctccctcttgtgttggattgacgctcaacctgatgaaaaggtgaatcaaacaccacaaaccattatgaaaaaaagaagacactatctatcaactgcatttggatccctcctaccacaagcagctgcatgaaaataagattttacatccaaaatttcaagaaaaaggggtagggagtggggtttcttttgttacagaagcaaataggcaagcacaacagcaaatcaagttagtcatgttagtgtgtctttctagatgttactgtgcaaaatggatctgtctctctagactgtacaaaaccaatggcatagagaaaccctataaagctgctccagtgtgtcacatcttccctgagggccaccttctctggtttgccaaataggttacttaagtctttatttgttagtgtgtccttaaataagtaggcatttccatattgcatctgatgaactatatcagcctacaatgtatttctctatgtttgaaattgtgatctaccttaatggcatcataatgtagtgattatgttgttgtgatgtattacatatgtattaatgtaaccatgttatgcgaaaaaaaaaaaaaaaaaac

SEQ ID NO: 43644 - DNA, 2221 bp, Glycine max
  Clone ID: PAT_MRT3847_13940C.1
cccacgcgtccgcccacgcgtccgctgaaaatgacattgtagctgctgctgtgttgtctgggaaccgtaattttgaaggccgtgtgcatcccttgacaagagctaactaccttgcctcaccacctctagtcgttgcttatgctcttgctggcacagttgacattgactttgaaaaggagccaataggaacagggaaggatggaaataatgtttacttaagggatatttggccatccactcaagaaattgcagaggctgtgcaatccagtgtgttgcctgacatgtttcgaagtacatatgaagctattaccaaaggtaacactatgtggaaccaactacaagttcctgctgagaccctgtactcatgggaccccaagtcaacatatattcatgaacccccttacttcaagagcatgaccatggatcctcctggacctcatggtgtaaaagatgcttattgcctactgaattttggtgacagtataaccactgatcatatttctccagctggaagcattcacaaggacagtcctgctgccaaataccttgttgagcatggggtggaacgcaaggacttcaattcttatggaagtcgtcgaggcaatgatgaggtgatggcaagggggacttttgccaacattcgtcttgttaacaagcttttgaatggggaagttggcccgaagacaattcacattccaacaggggaaaaactttatgtgtttgatgcagctacggtgagttatgtcctactcaaatatggcaattttttgtttactgctttatagcctttcaaatggcaaaacatactgtattagtgtattttatttttaatgatatttgctggtgctgatgtttttctatatttatttcaaaatactagcagagattcagagaatgtctttatgacaaaatctcttccaaatgctacatttgtaacatatccgtttacttccctctatgcatcaactatcgagtcttgtttgttcaaatagataatactaagggcatgtgaagattatctcttgatttggtagcaactctcctttaatgacgtggtggagggtattattgtggctctaaatccactgtgtactgtgcatgaaatacaattcccccttttcttctctcaagaaaaaagagaattagtgactcccattgtaccagagactgtgacaggccatcattttctaatcccctggaattgttctctcatgccagagatacaaggcttctgggcaagacaccattgtgctagctggagctgaatatggcagtggaagttctagagattgggctgccaagggtccaatgctactgggagtcaaagctgtgatagccaagagtttcgagagaattcatcgcagtaacttggtaggaatgggtatcattcctctttgcttcaaacccggtgaggatgcggacacattgggattaactggtcatgaacgttatacaattgaactaccaagtattatcaatgagattaggcctggccaagatgtgacagtcacaaccgataatggaaaatctttcacttgcacagcacgctttgacactgaggtaatttaaccttctcattgatgcattttttttatggtcgcatcgcatactagagcttcactgttgtattttcaggtcgaacttgcttacttcaaccacggaggcatacttccatatgtcataaggaacctcattaagcagtgaagccatagccgattgaaaattccaaggtcattgttcccatatgcttttaaagttgtaaaatgtgagaataattttctgagagataggaaaagatccctttttttagagggggatttcgacagttttcaagcttattaattattagaccagaccggtaaacagtgattcatttgattgtgcgataaccctgccccttgaaaatggggacaattgtgtaaaagccgacttgaagtgtgaaccctgccaattgcgcgcggcacttggtctgctaagttgctaagtatagtgtttaaggtagtaaaaatttctttcttttcaaggcttccgcttggatattcaatgaaaagctgagtatagtagaacaatacgtagagaatagaataagattgagtttgaatgaaaggttaggttagaaatttaagtttgaataatttcattctgtgaacgtttgtaaaagcaactctcattttttctatcaaattgagttttagggtaaaaaaaaaaaaaaaaagggcgg

SEQ ID NO: 43645 - DNA, 254 bp, Glycine max
  Clone ID: PAT_MRT3847_139410C.1
gattgtcttgtgaacactcatgaccatgggccaagcttgggctttacctttgattccttcttttaagaggccttgcttcgtctgaaagagccaggaccgtcaaatgagtgcccaaccccaaagctgaatgccctcgaacccgataaccctatagagtcggaaggggggttcattgagaactggaaccctagcgacaagccattccagagtgccggtgataccctctctccctggacccttaaacgaaatggcct

SEQ ID NO: 43646 - DNA, 636 bp, Glycine max
  Clone ID: PAT_MRT3847_139411C.1
gttgggattacattttagagctccggagaatctaaaggccttagtggaacctcccagactaccgcagcctcaacatggcttaccctctgaagatgatgcacaaaaacaaggggagcagttgattattcctaaaggcttgttattagttgctcatgaacctagctttcagtcaacactgcacctggaccccacattagaggaaatacattgagggcatactccataggtgacaagcaagttgatcttttacttcctggtactgcaaggttgagagtgcaattaggagtaaacatgccagctcaagcaacacgcaaacttcaggaggataaggtggaagaatcagaagtagagctttttgaggtttatgatgtggtcctatacatgggcataattgatatattgcaagaatacacagtgaaaaagaaacttgagcatgcctgcaaatcactgcaatatgaccctatgactatttcagtggtggaaccaaagacatatgctgaacgtttcatcaatttcatggagaaaaaagttttccctgagccagagacttcttgaatatgtatattttatgtttccttgttggtttaatacttctttgtaatcaattgttcttaaggaagagtattttgttttacc

SEQ ID NO: 43647 - DNA, 671 bp, Glycine max
  Clone ID: PAT_MRT3847_139412C.1
ggtaaaacaaaatactcttccttaagaacaattgattacaaagaagtattaaaccaacaaggaaacataaaatatacatattcaagaagtctctggctcagggaaaacttttttctccatgaaattgatgaaacgttcagcatatgtctttggttccaccactgaaatagtcatagggtcatattgcagtgatttgcaggcatgctcaagtttctttttcactgtgtattcttgcaatatatcaattatgcccatgtataggaccacatcataaacctcaaaaagctctacttctgattcttccaccttatcctcctgaagtttgcgtgttgcttgagctggcatgtttactcctaattgcactctcaacctgagtaacactccatctcatattatgacatgtgttattacaatggaacacaataaaaaaaatgatttttgcttaggactgttatttaaagaaagtgacatgaagtacagtgaaagaaacaaaatgcacaataattggtacatgcaactgtctaggaccaaagaagatacttgcaaaggtgctagattaatgaatattgaaaaggaaacaatcagaataatgttatagacgataccttgcagtaccaggaagtaaaagatcaacttgcttgtcacctatggagtatgcccttcatgtattt

SEQ ID NO: 43648 - DNA, 1722 bp, Glycine max
  Clone ID: PAT_MRT3847_139413C.1
ataaccttcacttcttttcttctcacttctcacattaccatattccaataaaaaaaaatgtcaccttcttttcgcacatccctctccctcttcacactctcccttctcttcttcttctccctctccgtctccgcccacagcggccaccgcgacgacgacgacgacgacgacgcggacgccggaggcgacgccacccccaacctccgtgctcggtccttgattctcgcaaaggtgtggtgtttgatcgttattttttttgctacttttgtatcgggcgtttccccctacattctgaaatggggcgaggggttcttagttctggggacccagtttgctggaggagtgtttctgggaactgcaatgatgcattttctcagcgacgctaatgaaaccttcggggacttaactcgcaaggagtaccccttcgcgttcatgctcgcgtgtgcagggtacttgatgaccctgctcgctgatgctgtcatttcctcggttttgaagaatacggggcgtgaccaaccgcgtgatgctgaggatgtccaagttcaaggggctgatgtgagcaaagtaagtaacaacagtgttagatctcagtcacaacaccggagccattctatttctagctctgatcatcatcacttagcaaaccctgcacttggatctgtccgttcgcttggagacaccattttattgattgttgccctttgtgcacattctgtgtttgagggcttagcaattggagttgctgagaccaaagcaaatgcatggaaagccttatggacaatctgtctgcacaagatatttgcagccattgccatgggaattgctctcctcagaatgattcctaaccgtccccttgtgtcgtgtgcagcctatgcttttgcttttgccatctcgagtccaattggtgtggccattggaattatattggatgccacaactcagggtcatgtggcggattggatctttgccatatcaatgggtctggcttgtggagtatttatctatgtatcagtaaaccatctgttggcaaaagggtacatgccccacataccaacaaaggttgactcagcctatttcaagtttcttgccgtgttgttgggtgtgggagtgatagcggttgtgatgatttgggacacctaaggttgttccaagataacttctctttacagcatttgcagaatctttttctttttcttttttttatctttttgataatgaatacgtacattacagaaaaagttgtggtagttcctaggtcagatttggtatttggatattcttgtcagaaatgatttcgtcaatcatttataaggtagaaaagatgacagaaatttgcctcaaatgatagaaaagatgagcatgtattgagaattaagaggacttataaaagtcttgggaagaagggtagttcacatggagggtagcctaaatcattataggcaaaggggaacggagaagaaatatatacaaagctatagaaatgaatttatagatcaatagtttgtctgtagacatgatttataatagaagctatgctgttatttaattcatgtagcctataccaccttgtggggaaaaaggttggttggtggtggtgtgtatactttattgattgaataattattatgagttttgttcgtaatacagacatatggatttgtttacgaaaatgattgttcaaggctgatcattttaaaaacaataaagatattatttgagcat

SEQ ID NO: 43649 - DNA, 529 bp, Glycine max
  unsure (1)..(529): unsure at all n locations
  Clone ID: PAT_MRT3847_139414C.1
aaaaagtggaggtgaatcttgagtaccatattaaaagggctcatagctacaacccaaagcgagacaagagcgggggcgaaacctcaagcgacagctaaagagctattgcgggggataaacatcgaaatggagactataagaaaccctgggggaggacgcattgctgaaatccccaatgtggtaaccgggaaatccgtggagggggctcccctgcgtcttgaggggcggaacaacgtccatggganggacgggcttgcggcgagcgtgtgcagggtgggtgacagcgggccgaatgagggtctctacaaagagcttgagaacaccgcgaggttcttcatagataagaccactgagacgcttggcgccaccacggctggccagacggcgaatcgcgggcttggagagtccctgagatggatccctcanaaccttacggggtggggttggctcctccctttccgagacccttgcctccctttcctcttccagacatgcgtgggcgaggggtctttttctctgagattcaacc

SEQ ID NO: 43650 - DNA, 1407 bp, Glycine max
  Clone ID: PAT_MRT3847_139415C.1
cgcattaccatattccaataaaaaaaaatgtcaccttcttttcgcacatccctctccctcttcacactctcccttctcttcttcttctccctctccgtctccgcccacagcggccaccgcgacgacgacgacgacgacgacgcggacgccggaggcgacgccacccccaacctccgtgctcggtccttgattctcgcaaaggtgtggtgtttgatcgttattttttttgctacttttgtatcgggcgtttccccctacattctgaaatggaacgaggggttcttagttctggggacccagtttgctggaggagtgtttctgggaactgcaatgatgcattttctcagcgacgctaatgaaaccttcggggacttaactcgcaaggagtaccccttcgcgttcatgctcgcgtgtgcagggtacttgatgaccctgctcgctgatgctgtcatttcttcggttttgaagaatacggggcgtgaccaaccgcgtgatgctgaggatgtccaagttcaaggggctgatgtgagcaaagtaagtaacaacagtgttagatctcagtcacaacaccggattacaaaattacctgggactgaggtattctcacaatttgagtccggtaatggtttagcatcagtgctgagaagctctggaatgggcttgtaccagccagctggggggcttgtaccgccttttgctagcaggtttatgtcaacagaggcaacttctggtgattcttcttctcaagatagttcgatgctggagcctgaagttcctcctcgtatcaaatttaagagattagacaaaactggcaggcacattatgcagattttagacaaggaggcagtagggatgtgagagggcaaagagagatacctgacataaagcccggttatattgtgcaactcaaagtggaagtacctgaaaataagaggcgtgtctctattataaaaggcattgttattgcaagacgtaatgctggactcaatactacattcagaattaggaggcaggtcgctggggttgggattgaatctttattccctctgtattcacctaacataaaggagataaaggtgcttgacaagaagagagtgagaagggccaaactctactatctgagggagagaatgaacccacttaaaaattgacatggatcttcatcttgttggacattttttatgattcatgatttgtcataattagtatctacatgtgtattcttttatttgctgctgttgtgtcgtcaactagatttgttgtttcaatgtagcttattactacctaagaattaagataatgcagttttatttcaatccttagaacctgtcatgttttgaaagggtaatacgcaagaaattgtaataagatgcattcgtgttaaaattttcttgtaggcatgttttt

SEQ ID NO: 43651 - DNA, 528 bp, Glycine max
  Clone ID: PAT_MRT3847_139416C.1
cgatgaagaagaacctagttaagcaacaactagaataacatcaggaaaagttaggcacaaaatgaagagtcgccccataataacattcacatctttcgttcttggttgtagaatcaactgccattgagatatgaacacaagtagaagtaggtgtgcataaacgcacaggtaacaaataaatatcccctagaaactatgcaatctaggtagaaagatctattcatgaacatctccatctatctaccaggaaaacaacttaaaagctagtcaaaggaaattaaaaataaacagaagaatcatccaataaatcaaattataaaggggcgcaaagggttgtgaggacgtgattctgttcaggtcacatatacagtctaaataatgttccacacaatggacacgtttaggaagggtcaacatgctgggcttccagaaagtaagcttactcaactaacccaaattaataaaccttctacaggcaaaatgaaattaaagaaattcctcaaatccaaagaccaatctctcttttat

SEQ ID NO: 43652 - DNA, 430 bp, Glycine max
  unsure (1)..(430): unsure at all n locations
  Clone ID: PAT_MRT3847_139417C.1
agctnggatcctctagagcggccgcttgnnnnnntnnnttttttttttttttgttcggctactgaagctcatcaagcatatgttctcagggaaagtaaagatggaagttctcatttaaagtgtttagactcaccaacaaaaattcatgtgttactagattttacaaagtaaaaaggcagcaacacatatgttctcatttaaagtaaagatggaagttcctctagctcaaagtttattttaggtctcacgcactgtagtggtcagattttaagagtctgtttggatctaagacgaaaagtacttttgagaagttttctgtaggaaaaaagctctatttttctcaaataagtagagaagctctcataaacacttatagtcttgtatccaaactaacaggcccttaagcagtgagctcctcctcccagtgagt

SEQ ID NO: 43653 - DNA, 465 bp, Glycine max
  Clone ID: PAT_MRT3847_139418C.1
ggacaaacaatttcattcaacggaaacaaaaggacggggtttttaaaactatttattatagaaatcgcaatacaatccaaaaaaaaactggggggggcttaaacaatttttttgtaatcccaaaaataaagattaaaacccccttccggcgacatagcaaaaaactctaaaagggacctgcctgccctttttactagttaaaccctggggttcaaaaagcttatcgaacatttcaacagggtcttgaacgggggggaaaccctgggcacttttttcttccacgggaataccaaattccccccaaagccccatcacaatctcaaccggcccaaagtgaaaagcaaatcttaaataatcaaggaaaatatcatcaaccaaaaaccccggaaatgggggttggaccgggcaaaaaaaaaaaacaaaggttaacccccacatttaaggttaccttatggggaagggggg

SEQ ID NO: 43654 - DNA, 376 bp, Glycine max
  Clone ID: PAT_MRT3847_139419C.1
tttttggttgaaagaattacgtgggaattaatttacgcacacatatgcacaagggcaaacttaaccgtgtattagagatgggttgcctatcgatgcaaagaaaacgactaccatgcagaactcgacctttttcctctgtatagtccggacgataaataaacaataggggattgcagatacaaaacttggtaacttaaactttgctagatactccaaaacttggatttgggaggaaaatatcacgcagcaatatcaatggttaccgttacctgatggaagttaatattttttgaatgaatcccttcaattgcttctgatcattattataccttgcacgtgaaagaacagtgtatatccaaacaggaccaggatccat

SEQ ID NO: 43655 - DNA, 814 bp, Glycine max
  Clone ID: PAT_MRT3847_13941C.1
ccacgcgtccgcggacgcgtgggcagagaacaataaatccaaatcgaaattcataacaacgagggctcagcaacggtccctttccttaaaaacggctactttctctctctacaattcaaactctcatttcaaaccaaaaaactctcactttcttcattctctccacaaaatcaactcatttcctcttctcagccgcgacgacgacagaaaatcattcccaacacgaagcgattcacagatcccttgcgttgttcagatacaaagagccccaaaatgtccaaacctcaaaatgatccccttgtgcaatcggaaacaacttgtggaacacttctctatgaacttcagataatatgggatgaagtaggggagtctgagtctgacagagatagaatgctgtttgagcttgaacaagagtgtctagaagtataccgaaggaaggtagatctagcaaatcggtctagagctcaattaaggcaggcaattgctgattgtgaggcagaacttgcagccatttgttcatcaatgggagagagaccagtgcatattcgacagactgatcaaaatgctggaagcctgaaggaagagcatgcaagaattcttccgcagttggaggagatgcaaaaaaggaaaattgagcgtagaaatcaatttatagaaattcaagagcagattcaaagcatttcaattgaaatatatggtcctagagagtatattcctgctgtcgaagatgaaactgatttatccttgagaaaacttgaagaattgcacaggcagctgcatgcacttcagattggaaggagtagtcgcttaaagc

SEQ ID NO: 43656 - DNA, 369 bp, Glycine max
  Clone ID: PAT_MRT3847_139420C.1
agatctgctagttttggcagatcttgtgctcctgggctatatagaaagtttgcacatagagattttcttaagagatgctttaggcagagctctaatgtaagggggttggctcctgacgacatcgcttgtaaatgatcacgaatcaattatgattcaaggcttcatctgtgaaggcgataagctgctatcgatgatctggtccatgtgatacaagactcgtgtctgcacagtccataggtagctcgccaattgagaaggagagctgtctatcgtcaagaatgggtgcaaaacgcagatgtgcctaccatagcacaaattgcagaattacatccaatgcacaagatgatgaatgctcctgatacagactat

SEQ ID NO: 43657 - DNA, 166 bp, Glycine max
  Clone ID: PAT_MRT3847_139421C.1
aaaaaatggcatggaaatgaccccttctgatttatgtgccttgaaagagatattatgttactcaattcctccctgtaacatgaaagatgaatgcctgaacttccacttgttctgacttatgctgcaacatgagtttttaattcgtatgactaatttattctagtag

SEQ ID NO: 43658 - DNA, 265 bp, Glycine max
  unsure (1)..(265): unsure at all n locations
  Clone ID: PAT_MRT3847_139422C.1
aacaacaaccacaccgcccncggncgccacacaggaacaacaaggacnacaacgggaccaaacaaaacggngcngcggcccggccgggccgnggaccaaggaaccggccnngcagcngggagacacgngcagggggggggggcnnncnccacaaggccgccgngaacnaacccaccaacaaggacccacncgcgggcgccagcgcggcgccgcgncncgccgccaccgccgcccccgccgnggaaagaagcgangccgccgagag

SEQ ID NO: 43659 - DNA, 515 bp, Glycine max
  Clone ID: PAT_MRT3847_139423C.1
cccacgcgtccgcaaaaactttcatcttatttacaagtatttttttcagaaccttcacttctcaagtctcaacacatacaacaatgggttttcgtttacctggtatcagaaaggcatcattaaaccaagcatcatcaaaagccatggacgtgccaaagggataccttgcagtctatgttggagagaaaatgaagcggtttgtcatccccttatcatacttgaagcaaacgtcgtttcaagacttgctgagtctagccgaggaagaatttgggtataaacatccaatgggtggtcttacaattccttgtggagaagatgtgttcttagatattacttctcgcttgaacaataggtgctaaccctgcgatgataagactgacgtagacatatagtacttaacacaatttttgtaactcactttcttgccttgaaaatattttctcttttttgttattatactcaggcaagtgtaaaaatgttaatacaaatatgaactttatgaccattatcatttc

SEQ ID NO: 43660 - DNA, 495 bp, Glycine max
  Clone ID: PAT_MRT3847_139424C.1
ctcgacacttttttgcggaatgtttgcatcgcccaatcttcgcctggtcaccagatctctggagaccagaggcaacagacactactcttcccagagtggttctcagactaccagtctcaagcagagattgacggaactcattccccagaagaatgctgagatcaaggagatcaaggagaagtacggagagatgaagcttggcgattgtaccgtcagccaggcttacggaggaatgagatccgttaagtccatggtctgggaaccttctcttttggactccgaggagggaattcgattcagaggatattccatccccgagtgccaggagaagctgcccaaggctgctggaggacaggagcctcttcccgagggaaccttctggctcttggccaccggagaaatccccaccgacgctcatgttaaggagttgagccgagagtgggccgcgcgatctgatgtacctaactgggtcacggatctcatcaagtctctccc

SEQ ID NO: 43661 - DNA, 199 bp, Glycine max
  Clone ID: PAT_MRT3847_139425C.1
gaagaagaccaagatggtgaaaccgattgtgccgcagaaatcagtgatctaccagctctgcgcttttcaggacaagatattgcccagtctctggagggactagaccacaaagatctactacaaggactgcccgaaaacaatcaacgaccatttttggctaggatccggagaccgaaccgacacaactgatcagaactac

SEQ ID NO: 43662 - DNA, 441 bp, Glycine max
  Clone ID: PAT_MRT3847_139426C.1
gcctcttaggccacagactaagttcagatatatcacttgaacttgactatttggaccttcgttccagactctttgagcattaaccatgtctgtcccattatccacattcaccccatgaaacaaaaaccttcgaagagggatcttctctcagacttgacttgtgacagccaccttaagattgacatgttcatcaacagacagtccaacttgcctcttcatgaaatgtaacgaggaagttactatcttaaaatgttattgcctagcgcttacgaggaggcacattggtggagctcacaatatattcggaaacctcagcctgatcacggtgactcatagcgatggctctcacagcttcatgctgacacgtgccgtgctggtgccatcctatggagatgttcttacagtgatgcagcaccagacacgactcatgttcaagacact

SEQ ID NO: 43663 - DNA, 409 bp, Glycine max
  Clone ID: PAT_MRT3847_139427C.1
gtgcgaaacaatattggggaacctgcttaattttaatagttgtggagggtccttttcgggggttttttggaaacccaaatttgcctttcccctaaatttttttggggggcgccccttccctggggtaaacaaaaggggcaaaaaaggcgccggcctttggcccccttggggggtggggacatgggggaaaaaaacccaccctggcgccaagaaacactcccccccgggggccaaaatttttccaacccccccttgaagaaaaacccccttttttcccggttttttcttttgtggggacccctaccccctctgggggcccgggcctattttttcccccaaaaaaatcacccccccgctttttggggaacgcccccccaattaatgccgggtttttttttggggggggggg

SEQ ID NO: 43664 - DNA, 118 bp, Glycine max
  Clone ID: PAT_MRT3847_139428C.1
aaaaaaaacaactcggttagggtgatttagtgaggcaacgtttgttctttacataggaattctcatccattggatggattaaatgtaacatccgtctttgcttccatacattaaaggt

SEQ ID NO: 43665 - DNA, 425 bp, Glycine max
  Clone ID: PAT_MRT3847_139429C.1
aaggccaacaaaaagtggggggggggattttttgattttaaaaaccccctttttttaaaggcaaacagggccccggggggggtccccccaatttcttaaaacccttttttttttgaacgccccccaaggggcctaggtccttttgggagctggggcattaaatgggcccagggaaggaagcttttaaattgtgggaaagccacctttgaagttaaacaatttgaacctcaagggcccttgggccccccttttttggtcttccaattgggggaaaaagggcccacactttttttaccaaaataccccgggggcccacaaagggttttttttgattttttttaaaaaaaaaaaatgcagggtttggggatttgggtctggctacttttcctcaacctttgggaagggcattggtaacttttgaccct

SEQ ID NO: 43666 - DNA, 342 bp, Glycine max
  unsure (1)..(342): unsure at all n locations
  Clone ID: PAT_MRT3847_13942C.1
cataggtggcctattggatggttattttccattttccatgagagcatgcaagattttgtgctttcatgaagaagaaaaaaagagagtttagaaccatatagttgaatgctagagatgattagataagattatataacatacgtggcatttctggtgctggggtgtgactgtgaccattatttgctgttctattttgaacatcaggtggggaatttccatgatgagtaggttgactgactgatgaattttttggcaaaattgcaggagctgttgcaactggggctgttcaaaatgccataaaaaagcagatatttgaaatcaacatcagctagaaatagcnnn

SEQ ID NO: 43667 - DNA, 297 bp, Glycine max
  Clone ID: PAT_MRT3847_139430C.1
gaaaaataaaaatcaaaggactttggttaatgctgcttctgcttcatcatcgtcagggtatatattctgctactgtgtcttctgcgtggtcaaatccctgctcgtgttctctctattcctatgaacacgaatcctaactccttcaacagaacaactacaagccactctcctacttcccctccctcgccgccttcgcttccaaacccaagaagaataatgcccatacctacttcctcgccgaattcaccttcaaaccctacaccttcttttccgaccaaaatcccttcatccttccca

SEQ ID NO: 43668 - DNA, 152 bp, Glycine max
  Clone ID: PAT_MRT3847_139431C.1
gcatccctacatgggcgtgacgcagcaggatcagacgcttaggacccgaaactgcgaagtttcccgtaaatctggagagacacgagaagtgactcgacgagaagtacctagctggcagtggacagcgaatgaagcatctttctcgtgcgcct

SEQ ID NO: 43669 - DNA, 235 bp, Glycine max
  unsure (1)..(235): unsure at all n locations
  Clone ID: PAT_MRT3847_139432C.1
atatgattctgtgaggntctggcctcataacaanctgaanttgatagtggtngaaatgtatncatacttcccctgtagtagacggcagtttggantgcntgggcccttcccgtcgggngattgatcntgatgagagnctgaatntggaagntnnntgntncngcttggggtnagtgtagtggggnntatgacnttggatctnttggtgnnngtgngaggcgggaanggtgatggt

SEQ ID NO: 43670 - DNA, 364 bp, Glycine max
  Clone ID: PAT_MRT3847_139433C.1
caaagaacgatgaggtttcataaagtttaaaaaaccggggccgctggttacgttcttagaaggcacacggggcggaggttcaaatgtttggcctaattccacaaaaaaaaaaaatgggggaaagcaggggaaatttgtgaagggcagaaaaccaagaacttcgcaaatttggaggcttcaaaaaaagacgggggggaggaaaaccaatcttgggggaaatcccctaacatcagaaaagcattagggctttcgcccctgggaagttgggacaaggatcattttcccttatagtacctttttgaagacctgtagtggtctttgaagaaaaaaaagtgctcccccccgaaccctaagtttggagggg

SEQ ID NO: 43671 - DNA, 363 bp, Glycine max
  Clone ID: PAT_MRT3847_139434C.1
tcgttttcgcggccgacattgagcactctaagttccttgacttgtgtacccacatatgagagactatattatattggtgcatatatgatgggactgaacgaacacagagcaaggtgatagactattgacatagagagatttaaggttggcagagaacgaggccaacggggattggacctttggaggcaactacgctgattgtcgggctaaacttgctaatgaatctgaaaaacatgctgatcatcaacgcatgcaggatctaatggctggtgtagacaagttgcactaccgaatgaactacagcgagcgggccttatagaccgtccacgaagagctgaatgagactctagacttcatacatga

SEQ ID NO: 43672 - DNA, 161 bp, Glycine max
  unsure (1)..(161): unsure at all n locations
  Clone ID: PAT_MRT3847_139435C.1
gccccaccaccaccatgtccatagatctacgcacttatgccnatacgggnaacccgctccgatcccccaaccgggtcgaccctttntcgcccggctccgcgctcgagaccctcaagacccgaatcttcggagcggcgaaggtttcctgagggtcgggggtt

SEQ ID NO: 43673 - DNA, 280 bp, Glycine max
  Clone ID: PAT_MRT3847_139436C.1
ctcgtgtgtcaggacgcgcacgctatccttgcagcgagtgttctactctctcgttacaacacccacacttagcacacgctggtcgtccacctcgacaaacgacacacgaaacccctttattcacatatctatttgaaaacccgggcaactccgacatgctgtgcgactcagactctgatgctgagctcgatacctaccttgtacatgaccctgacaggacagctggacgcgtgacatgcgccttgaacaacttcttcattgcctctggtgagatcacttc

SEQ ID NO: 43674 - DNA, 384 bp, Glycine max
  Clone ID: PAT_MRT3847_139437C.1
ttctaaaggtgccaagcctcggattcaatcaccaagtggatatctcgataactaaaggtgccaagcctcggattcgagatatccacttggtgattgaattctaatttgttgttttcggaactactaatacatatgctctcaaagtctcacagggagtcattcagccggattgattacctgaggaaaagacggaaagaggatgtaaaggatttctttctgagagaatatgatctcactcaagggaggattagtgggggctaagctaaggagaaagatcaatcagcgggatggattcacctagaaagatgaatcaataaagaagtagtcacggaagaaaaggcattcatttacaggacataaagttcatccctcttttcgttcact

SEQ ID NO: 43675 - DNA, 335 bp, Glycine max
  Clone ID: PAT_MRT3847_139438C.1
cgaaacagctcaaataagcattgatcaaagtaaagatccatttacatttataatcatgaggcctgctcttgtgagaacattgcatattagaaatgttcaaaaggcagagggaaatctgtcaaaaatagcctacaaaaagcaaaggaaatgctgaatgtggatcctgatctatctagatggaaagaaggtaggagtcggagaactcgaagatagctggctacagcgaaacaaaaaagaaggcttgcttatctaattctggagacacaagctaatgcggggtaactttcacttaatgctgggtgcttaggaatgtcaaaatctttaaatttttgact

SEQ ID NO: 43676 - DNA, 687 bp, Glycine max
  Clone ID: PAT_MRT3847_139439C.1
actctaatctaacgatgaatctgaataccaagctttctcactcataagttcccactccctctcttatcatttatcaaacaaatttttcatctttccccacttgttggattaatggctgcctcagctttgtcactaacatccccattccatttcagaaaaccccacaacagggtttcacctctcaatgctcatcctctcattctcatccaaaagggtaaacaatctcttaaatcaaacttctcattctcaaccctgaatgcttccccccacttcagaccccctattgccattgctccttccacactgaccctaacaagagcttcttcctctgatgaatgctttgaccctgctggtgaagcccaaaggttgctgctttctgaggaaaaaccagttaattttgctttctgggtcatattttgggcctctttgtccctggcttggtttgctgtttcaagggatgctaatgctgctgttgaatcctccatcaaagcctctggctttggcttcaacattgccaattcgttgaggaaattgggttggcctgattgggttgtggtgttcacccttgccactcttcctgtgcttgagcttcgtggggctatacctgttgggtactggatgcaacttaaccctgtaacttttacagtggtatctattctggggaacatggtccctgtgccattcatc

SEQ ID NO: 43677 - DNA, 376 bp, Glycine max
  unsure (1)..(376): unsure at all n locations
  Clone ID: PAT_MRT3847_13943C.1
aactaatcgctatgacattaaccccttcgataagaaagaagttaaccctttctctaatcctaaaantattcccactaccactaattcaagacttccacctcttaagccataacctattaattataattataactttaatacaacacttaatatacctcttaattcatcaataaatttaaaaaataagaagaagaaacttcaagccgaaaaaactaaattgacaaaaaatgaacaagaattgatacagaaataagaatctacttcactagctaaaattattcttaaagataagaatganccgcctgtgttcccaataatccatcataacattactaataagattgcaattcatcttcagaaattacaatatattaca

SEQ ID NO: 43678 - DNA, 255 bp, Glycine max
  Clone ID: PAT_MRT3847_139440C.1
ggctcgagctttatatctagaaatcgacatcaacaaattactggcggaagacaatccagggcgaaccaagaggtggaaccgtgacatcacactgctgcgattgctgatcataacgaaacaatacaggcaaaggaccacaatacattaaaaagtgttgcagcagatgcccttaaagcagtagacagtgaataaggcggcccactccgatgctatatagcctatagtgatgaacttagttgctcgaatatacaacat

SEQ ID NO: 43679 - DNA, 1183 bp, Glycine max
  Clone ID: PAT_MRT3847_139441C.1
caagcccctcaacagcctccttattacattccacccacccctatgccgaattcagccttgccccagcacccccagaatcagtacttaccatccgatcaacaatatcgaacaccccaacttgtggctccacaaccaacaccgtctcaagtaaccccatccccacctgtgcaacaattttctcactatcagcagccacaacaacagcagcagccgccgcagcagcagcaacagcaatggtcacagcaggtgcagccttcacagccacccccaatgcaatctcaagtaagaccctcctctccaaatgtgtaccctccgtaccagccaaatcaagcaacaaacccatcacctgcagaaacactgccaaacagcatggccatgcaaatgccatactcgggagttccaccacagggatctaaccgtgccgatgccataccttatggatatggaggagctggaagaacagttccacagcagcctccaccccagcagatgaagagctcttttcctgcaccaccaggtgaaatgtatggacctaccgggtccctcccggcgcttcctccaccgagtagtgcatacatgatgtatgatggtgagggaggaagatcacatcatccaccccaacctcctcattttgctcaacctggatatcccccaacaagtgcttcccttcagaaccccccacaaggtcataacctcatggtccgaaatccgaaccagtcacaatttgtccgcaaccatccctacaatgagttgattgagaaactggtgagcatgggattcaggggtgaccatgttgcaagtgtgatccagaggatggaggagagtggacaggccgttgatttcaactcagtacttgacaggttgagctctgtgggtcctcagagaggaggatggtcagggtgatgaagaacttttctgaacagttactttgcctaccaaactaaatactctgtttaaaccctcaatcattgcgtgttttattatgcatggaataaaagtttttatgtaatgtgacggtttaccatcgtatgtaaaaaatgtcttgagatgtgaggattatctagtatttttatgcagaaatcactcgctctttttctacttattttttaacttatattttaaagaagtatatgtaactctagattattggtgatctacacgtttgctatctaaccatcaaaaa

SEQ ID NO: 43680 - DNA, 525 bp, Glycine max
  Clone ID: PAT_MRT3847_139442C.1
tggtaccattacaaagtaaagatggtcaagatgagtctcaaggtgctcaggataagacaggtgttgagactgatgaagccaaattttgccacttgatgactgatgtagtggacaaactaaagatcgaagtgaaaagtgaaaatgattaaatcccttccgaagattatgttctgcattttttctaatgatgtgctattgtatgaacaatgatcagtgaacacacatctctctccgtatcctcttttcacacaatacctggatggacagagagaccataactccaggatatgtgtattttgttaaggatcgggactacagtttcattcagagattcatgccttcacagaatatttttttgatatccaggaaaaaaaaaattgtattaggattctatgcagtataaccttttttttttgggtcacaacattggtcttagtatgccttgcttaatttatgttgtgcaaaacgattttcttgtgatccataatattttttggtgccacgttatccaatttgctttcatga

SEQ ID NO: 43681 - DNA, 516 bp, Glycine max
  unsure (1)..(516): unsure at all n locations
  Clone ID: PAT_MRT3847_139443C.1
tcgtatagttgttgatcactgactcgaagcgggcaatgttgggatgcgggaacagaagatcaaaaggtggaaacagaaaatccaacaccagcagtggcagcggcattcctaaatctcgaaaaagaggttcggatgttaaaactgcattgttcgtcgaaggcggtttcttgtctgattggcatctaccttcccctacccaaattccagggagaagttctggatccaataacaaatctgggagccatcgtagaggtgaaggctctgtatctaaaagtgggtttgcgaaatctttgggagctactattcgatacaattatccttcatttgatgttcaggaggttgcatgtgctgggattgggaacaatggtgaagatagtaatttaaatcagctgcaaccttttggtttcgcagactccaagaaagggcaaattattgctcatatagaccaaacacctncttaaaacccaacaatgtgaaatataggtacacttatgatgcagattttattttgggtga

SEQ ID NO: 43682 - DNA, 748 bp, Glycine max
  unsure (1)..(748): unsure at all n locations
  Clone ID: PAT_MRT3847_139444C.1
attgtgtntctgagttttggaagcatggaacgattctcgaggactcagttgagagagaatgctatcgggtcggagaagagtgaacataggtttctgtgggtcgttaggagcgagttgaagagggggctcgagcggagccaccgagtttggaggagttgttaccagaagggtttttggataggactaaggagaagggaatggtggtgagggactgggccccacaggcggcgattctgagtcatgactcggtgggtgggttcgtgactcactgcgggtggaactcggtgttggaagcgatttgtgaaggggttccaatggtggcgtggcctttgtacgcggagcagaagctgaatagggtgattttggtggaggaaatgaaggtggggttggcggtggagcagaacaataacgggttagtgagttccaccgagttgggtgaccgagtcaaggagctcatgaactcggataggggaaaagagattagacagaggattttcaaaatgaaaaacagtgccaccgaagcaatgactgaaggtggatcctcagtagttgcattgaataggttggtagaaatatggagggagcattaatggtatagaacttgagaatgagagaatgatttagaaatgtgcatgagattcagtataagaactgaatttctttctcaataaagaatgagcacgagttaagttgttgtaaattatcgatgttctgaatatgaattcggtcgtgatatttattactatct

SEQ ID NO: 43683 - DNA, 524 bp, Glycine max
  unsure (1)..(524): unsure at all n locations
  Clone ID: PAT_MRT3847_139445C.1
ctcccgccgggggggcggccattctctatcatgcaaaaccgctgtcgaaatattctcacccgcaaaatanataacattaaatttccaaatttgccattctcccacctatctgaacagaagaagtcaacaaccatcttttcctctttttgacccataacaattcttgtttctgatggcaatcacacactcattggggttatcgatttttgatcgccgcggggagaagattgggaagttggggagcgattctgaaacatccagatgactttcaccctctgctgtcgctgaaaatggcggcgaggaacgccgataagcatatccccccggacccgctctgggcgttctgctacacagtgctccacatgtgtttctcgcagtttccccctcgttcttcaccccctccccttcccgcttcgcccccccgggcgcctttcttatttggttttgcggcgctctccccccccgtcttagtttttccctcctctactccattcttccgggcgcccatactcgtcctcttcccc

SEQ ID NO: 43684 - DNA, 402 bp, Glycine max
  Clone ID: PAT_MRT3847_139446C.1
cgcgtctgagtatgattagaactttgtgggctcataagtatgatcagaacttttctggacctgtgttggttaccctgggtgagtgagaataatccttacgctacgcttctattgctacccttctttaattgacaggaagactaatcaggctgccattctgccacaaattcccaatgactctcacttgtgattgggtgccatggtattgcttaatgctgcatgctctgctccctcatcggctttgcatattgaacaaactaggacggtgtctggtcgtgtgctagcccccaactttggttgttggttgatgaaaacatacttggcgaatgctggaccagatctactgcttctatatatacactaatgccacctatgactatgaaatactaatgccccctactg

SEQ ID NO: 43685 - DNA, 412 bp, Glycine max
  Clone ID: PAT_MRT3847_139447C.1
ggggaaaccaaataccccaattccgggttttcgttcccctaagcaccctataaccccccagatttttggggaaaaaacaggaaccgggggaccccgaaaccataaaaaaactcgtactttacccccaccacctaaaaatcggggggattattaaaaaccctaaggggcgacctcaggccttattttttcacggcctccattccccccattccccccctgagggtaccccggggtttgggcaccgccataaccccccccccccccccccccaaggcccccgcctaaacccccggggggggtgggggtttcaccaggggcaggggcccgggcttttggaccaacatttcccccgccccccggaggggtttcttttttttcggcgggggggcggtccccgggggactgggctttt

SEQ ID NO: 43686 - DNA, 426 bp, Glycine max
  Clone ID: PAT_MRT3847_139448C.1
atggaaactggtgtgtttttcctacaacatacatttgattgcactcgtcagtcggaaaccatgcatgtccgacagaagacgaaatacttaacatgaggcacacgaaatcttggaagactctgatcggcattggctggtgcgctgtcctcacctccatcgcccgactcggtaccatcctcataaggctcctggtgaggagcagcaaggtcttcagaagcctgtgagaactcaccgtgttacatagggggaaccacataccagtgctggatggcgcttcaccatacgggaggtcaagcttatgagcaatcccgcagaacaggttcagactcactaggggggttcgatggtatgcacactgccctctgcagcttggcgaggtcacctccaggaacaacagtaggatgctggtggtttataccccacttg

SEQ ID NO: 43687 - DNA, 311 bp, Glycine max
  Clone ID: PAT_MRT3847_139449C.1
ggacggaaagaaactacaaatttttaccctaaaaacaggttcttttttatacatactctttgggggcatttggcaaccctacaaaaaatgaaaaagtgggggggaatctttaattattcacaaatatggggcaggctgcagagggcattttgttttctaagataatacatatgaaagagggttcatatatagggtattcaaacaggggctggtactggagttgaaggagcaacacgggtttcagctgggatttcaacaaactcagacaatataggacgggattcattttcggtcagaggcttctttttcag

SEQ ID NO: 43688 - DNA, 392 bp, Glycine max
  unsure (1)..(392): unsure at all n locations
  Clone ID: PAT_MRT3847_13944C.1
acgataccggcagaataagnaataagacgacctcagcgccaggagtgtctaggaggagtcaagtcacatatcaagctcttgatgagatcttgaatcagaacgcatcccctcactggagcacgctgataaaacaaagaacgtgctcgtagggtacatagatctcgccaatgtgaagcgtgtggaggcagaggcataagcccaatgacaagaatgaagactgtgctggactcataacaccaggcgaatgctgctctatacttactgcaggtgcatgtactgtgttctgcgaagcaagagatccaaaactgagacccttctgggatggaacatcaacatgtcacgcggtgtagttgctgctgatgctggtggttgtataagggtatggatattcc

SEQ ID NO: 43689 - DNA, 381 bp, Glycine max
  Clone ID: PAT_MRT3847_139450C.1
aaaaaaatcctctataaatggagggggccgcccgaagacacagacaaggaaaaactcaaagaaagaatcatatgattcgggacataacttgggaaacttaagcaaaatgaaatccaatgcccctggaaattgaaaaaaccctaagggggggtcgctgcccatcttcgcaggataataatgggccccacaaacatgaaaaaaaaatcacttccacaacttccgcaaagacagggtttttttaagctcctttttcataaccttggccacagccattttaaaatcctcctgaggcacggggaccctccgctccctcaatggaaacatttcaactttggggcaaacagccttaatttcaacaccaaatgctccattcattttttt

SEQ ID NO: 43690 - DNA, 378 bp, Glycine max
  Clone ID: PAT_MRT3847_139451C.1
ctaaaatatcatgaatctctgcaaggctctcagatcccttcctcgctttgtctcccaagtccctaagagaggcttcggaggtggtggacatggttccgaacaccatgcccctccccagaatgaaattacacaagctgatcttgataaatacaactatctcttccctggcccaaccaagtcagaaagcacctttgctttacacaatgttatcggaaaacttcctttcactagatcaaagggcttcatagaattcttggctaccaatttcaatactgatcaagctaatagcactactgaacgtttcgtacctcctaaggtccatgaaaattccgtctttatatatcaatctaaggagcttgctaatgctgttagaggatt

SEQ ID NO: 43691 - DNA, 499 bp, Glycine max
  unsure (1)..(499): unsure at all n locations
  Clone ID: PAT_MRT3847_139452C.1
ggcatcttcagttgtacaatctcatgcttgcacaatctctggatctctttcattctagtgtgattcgatcgaggtgttacaagaagatatcagagtcaattgaatcagggaacaaattcaatagtaaatatttttttgggtcttgggagagagaataacagacaaaatgttactgtaagtttgtaacaactatatagttatcatccgcactcttttctttctttctttttcctttggtattgagggttgtaaagaaccttcttgtttgatattttcctttggtattgagggttgtaaagaaccttcttgtttgatatgtatgtaaatgatgtaaatgcccaagtcttgtacttattttcctgttaaattcaagagttctggtaaagtgtttggactttaaagaaacagttnnnnnnnnnnnnnnnnnnnnnnnnnnnnnnnnnnnnnnnnnnnnnnnnnnnnnnnnnnnnnnnnnnnnnnnnnnnnnnnnnnnnnnnnn

SEQ ID NO: 43692 - DNA, 195 bp, Glycine max
  unsure (1)..(195): unsure at all n locations
  Clone ID: PAT_MRT3847_139453C.1
ggttgnannnnngngtangtnagntcggaattgggctcgagntngaggttnntgngantcagntgtggggnaggtgntgnntgtngtgattttnagannggtgnttgttntntgnnatngnggttgttgangtgtggtnagtgaaanaatgttgtgttgggtggggtnagngggagtggananagtgttatnttt

SEQ ID NO: 43693 - DNA, 825 bp, Glycine max
  Clone ID: PAT_MRT3847_139454C.1
tttctttttccccattttttctctttctttttttttttctttttcttttttcattttcattttcccctgggcttcgtctccacaggtgacgccattctcgtctcccttttccaacaaaccgtttcctcgggaattgagagagttctaattctgcccctcgcggcttcgcgaatttaccaatccgagagtcatggctccagccaccaccaattcctcgccctcggctcagcgccacgtcggcttcagtcggcgcacgcaggcgccgcgccagctggacggcgactcgccgccagtgaagaagtaccggatgctgtcagagataatggcgcgcgcgccgtacgcggtggtggagagagaaacttacagcgacctcttgtgcgaccaatgcggctccggcgagctgccggaggagctgcttctctgcgacaaatgcgataaaggctttcacatgaaatgcgtgaggcctatcgtcgtgaggattccgattggatcgtggctttgccctaactgtcaaggagggaagagagtgcggcctttctctcagaagaagataatcgatttcttcgggattcggaggagttctgatgatgctaatgataagcgttcctctcaggatgctaaaaagcgtaagaaatgttcacgacctctggtattacataagaaaaagaggagattgttaccatttgttcctacaaaagatcttaaccggagattgaaacagatgggttctcttgcttctgctttaacagccttaaatatgggaatcagtgatcacctcacatacttgcctggaatggctcctagatgtgcaaatcaagccttact

SEQ ID NO: 43694 - DNA, 1721 bp, Glycine max
  Clone ID: PAT_MRT3847_139455C.1
accacgcgtccgaacaaactcatttttcttttccccatttttctctttctttttatttattttttttcattttcttttccccttcgcttcgtctccacagttcacaccattctcgtctccctctccaacaaaccgtttcctcgggaattgagaattccaattctgcccctcgcggctccgcgaatttacctatccgagccatggctactgccaccaccaattcttcgccctcggctcagcgccacgtcggcttcagccgccgcacgcaggcgccgcgccagctggacgacgactcgccgccggtgaacaagtaccggctgctgtcggagataatggcgcgcgcgccgtacgcggtgctggagagagaaacatacagcgacctcttgtgcgaccaatgcggctccggcgagctgccggaggagctgcttctctgcgacaaatgcgataaaggcttccacatgaaatgcgtcaggcctatcggcgcgagggttccgattgggtcgtggctttgccctaactgtcagggagggaagagagtgcggactttctctcacaagaagataacttaagagtaccctttacaaattaacattaagaacatgatgtcaaagcattatcatataatatctgattggaacttttttttcttgatttatctgttctgaacttctagatgctaaaaagcgtaagaaatgttcacgacctctggtattacataagaaaaagaggagattgttaccatttgttcctacaaaagatcttaaccggagattgaaacagatgggttctcttgcttctgctttaacagccttaaatatggaattcagtgatcacctcacatacttgcctggaatggctcctagatgtgcaaatcaagccttacttgaaaatggcggcatgcagactctttccaaggaagacatggagaccttagaacaatgcattgctttgtctaaaagaggcgaattccctccctttatggttgtttatgattcacgtgaaggctatactgttgaggctgatgacctaatcaaggatatgacgattattgctgaatacactggtgatgtggattaccttgacacacgggaacgtgatgactgtgacagtatgatgacccttcttcttggagcagaaagttctcaaagtcttgttatttgtgctgataaacgaggaaacattgctcgctttatcagtggcataaataatcacacacaggaaggtaggaagaagcagaattgtaagtgtgtgagatacaatgttaatggtgaatgcagggtctttttggttgccattcgtgatatttccaagggagagaggctatattatgattataatggtcatgagtatcaatacccgactcatcattttgtgtgagtggaagacaaatacatcctaaacagcctagggtggttgggacacaattttacgacctagagtggttgggacgcaattttagatcctcgggaaaggattttatttatattcttgaaagtttcaactaattgtagcagattcaacaattttgcccctaaattatcgccatgggccattcattgtaatttatgctgtagagctgcccaattatgtggctttagagatgaatagagtaccttagaaaaaccttgttcatgtaggttatgtctcagaagatgagatatacattttttttttcaatacagtttcaaggaatttaaaagattctcagatttttactttgt

SEQ ID NO: 43695 - DNA, 256 bp, Glycine max
  Clone ID: PAT_MRT3847_139456C.1
tgtataaacactcattttttttctttttaattgctatggtttcaataaaccagcatgagaacagtcccttatatcccttgtgtgctgaacatctaactaccccctatagttaacagtcctaaaaaactaaaacaacgcacctcgggtctgaccaagcgtgggaggaggtgaaccaagatattttattcaactctgctgctgagtctgactagcaacttatagatcgctgcttgtagtaatgatggtagtaaccaca

SEQ ID NO: 43696 - DNA, 277 bp, Glycine max
  Clone ID: PAT_MRT3847_139457C.1
ctcgaggttattacttaccacgccacttcatattgtttatcccagactagtcaataacctagtgggcagccctagtgtgtttgtataccgagtaagaccacataatgctgttgaaacattacttatgacactcctacaatccagcccccgagggggtacagagggacaccaacaccaaactgggggtgcgggcacgcgaaaaccaccgattcctcaccttatcattaacaaaacgtgcagaaggttaacatgaccaaagaggatcgcgaatacatgc

SEQ ID NO: 43697 - DNA, 284 bp, Glycine max
  Clone ID: PAT_MRT3847_139458C.1
ttccggattcccgggtcgcccactctccgttcggctgctataagtactacatatgtttcataacatctatcagcataaagaggggcgtcataaaaaagataatcgcatggcttccacttcgcttttcattggctatgccatttacttatgccagccataaaagaatactgttgcctatctctgatgctttattcctcaagccactggctttacgttcttcattcttccaaggtaattttcaccatctataataccctatgtaatgtttcatttgatgtctttca

SEQ ID NO: 43698 - DNA, 354 bp, Glycine max
  Clone ID: PAT_MRT3847_139459C.1
ccactctccaccaacacaaaagcacttgcaaactagttttggtttgggaacatcagcacattacattagactgggggtaatggcagggttactacaagcaggagctacttttatgcaacccaccaagtggagcaggagcaacactttggggcaaaagtctacacagtgcatttcccagggttttgggttggaacccagtggagctaaaagggcacatgctcccttaaggctggacttaaagacttgggtcaaaaattgggttgatgcctaccaaaatggcagggaaattagcccttgccaccatctgtccctttggaagaacgttgggggaaaagggcttgaaagggggtctcc

SEQ ID NO: 43699 - DNA, 183 bp, Glycine max
  unsure (1)..(183): unsure at all n locations
  Clone ID: PAT_MRT3847_13945C.1
gcgaggggaaattnccttggctagaagttccctcttaatggaaatgcttggattacanaatnatcttgataggaacctggggggagctggtgtggcnnaccttttatcgtttatntgcgttgctttactaannaccttctnncaaaggataangnnttgtttggaaatgctctnnntcgacac

SEQ ID NO: 43700 - DNA, 271 bp, Glycine max
  Clone ID: PAT_MRT3847_139460C.1
agctctcatccattaattttcattgaagtccgaaaacagaaaccaaaaatacaggatgatgaaatcttaaaaagcaaaaacaaatgggaatgtagtttaagtgcaaacaaacaaagtggggtggcggttacaaatgctttgcaaatttttcacacttaaaagcctgggggcttgtaggccataaaactgaagcactgcacttggcagaacgttgacaaatccgatgatacggatgaaaccgatggggtgtgcaatcttagcctgttgaagc

SEQ ID NO: 43701 - DNA, 276 bp, Glycine max
  Clone ID: PAT_MRT3847_139461C.1
aggcgaggtactcgggggagtgcaaattttgactgagtttcttggatgattaatccaacgctcagagcatcttgtaatggcttgctgcgctgctccagagttacggattagggtgtcgtctatgtctgcaatccggttactcacaagtacaagctgctgtgccaagatgagggaaaggcatgtgactcgattttacccagatggccaggctaccttgattggttcggcctgtgatccaacatatcggaagagcaatgttgttttaacgggatacca

SEQ ID NO: 43702 - DNA, 592 bp, Glycine max
  Clone ID: PAT_MRT3847_139462C.1
cgcacccggccggcatccgggagctcggatcgagctcgagccgcgaaacgaacgcaattacattcaaggtttctatggttgacttgccaacactaaactatcacaaatatgctaattatattggttgaaatcctttattagggtttgcaagactgaacaagttcagaagtgaaatccgtcaattggttgattcatgggttggcgatggtgaagatgatgtttctgatcagggagacgctcattgataatttgttcatcaagggagtgaacgtggcttttgtggcggcttcaactttttgtttttcttcacgtagagcatcgcaaagaaaattgcggtaaaagtcctcaaactccttgaagtcaatgtacccatcgccgtttcatcagcatccccgatacttttcaacaactcgaaggtgggtttaataccgcatgcacaaaccctgtccttcatatccttcatctagatttttcagtcgccttccatgtaattaaattataggtgagtattataattatgagagaaaaagttatacgttaataatgtaattttttttacataattattcaataataacttttatgataaaaa

SEQ ID NO: 43703 - DNA, 660 bp, Glycine max
  Clone ID: PAT_MRT3847_139463C.1
gtcattatcctctctcgattattttggttggtgttggagatggaccatgggatgagatgaagtactttgatgataacattactgagcgcttattcgacaactttcagtttgtgaacttcacaaagatcatgtccgagaacacagaagcatcgaagaaggaagcaacatttgctcttgctgccctcatggaaattccattgcagtaccgggcagcccaaaatatacaacttaacgatagagaatcagttcttcatcaacataaaaggcctctccctccacctaatgaagtaatacatcatgataatgcacgcatggcaattccgcacatgccaaatttggaatcagcagaatcgacagctccagctgctgccgaaccagtatgccccatttgcctaaccaatccgaaggacatggcttttggatgtggtcatacaacttgcaaggagtgtggctcgacattatcttcctgccctatgtgccggcatcaaattacaactcgcctgagactgtacacttgatgaggaagcttgttttatgtattgaatatgataaccgttataccatttgaagttaagaatgaaatatataaagattttgggtgtaaaattctttaaccatgcagtcaatgctcattaaatgtatgaaaaaaaaaggttcaag

SEQ ID NO: 43704 - DNA, 280 bp, Glycine max
  Clone ID: PAT_MRT3847_139464C.1
gcaggatggctagaagattggtggtattggtactgtgccagtgggacgtgtagagaccggggttgtgaagcctggtatggtggtgcactgtggtcccactgggctgacaactgaggttaagtctgttgagtcgcaccatgacgctctcacagaggctcttccaggtgacaatgttggctttaatgtgaagaatgttgcagtcaaggatctcaagcgtggttttgttgcatccaactccaaggacgaccctgcctaagaagctgccaacttcacatcccaa

SEQ ID NO: 43705 - DNA, 122 bp, Glycine max
  unsure (1)..(122): unsure at all n locations
  Clone ID: PAT_MRT3847_139465C.1
agattcggacncaagccaactacccaaattacttcccagtttgcntcaattcgtnntgttactagggntanggntttncnatccatttaccccctgcaaatttacaatncattaacaagtgn

SEQ ID NO: 43706 - DNA, 1319 bp, Glycine max
  Clone ID: PAT_MRT3847_139466C.1
ccacgcgtccgtgatttttcattaaaatctttgtttgtgatgagcatgaacatgaacatggctctgtttctgacgttcctagttctccacatagcttcgcttgtagcatactccagtgtggaaaatcaaaacaaggtgccatctttgtttgttatacatgaccatggccatgcccctgtttctgatgttccttcttctgcacatagcttgggtggcatcgtcggatctccgacctgggttttactcaaaaacatgtccaaaagcggaactcatagtccgagatgtgatgaagaaggcccttatgagggaacccagaagtgttgcctctgttatgcgcttccagttccatgattgctttgtcaacgggtgtgatggttctatgttgcttgatgatacaccaacgatgctgggggagaaattggccctctcaaatataaattcgctgagatcgtatgaagttgtcgatcaagtgaaggaagcgctcgagaaggactgccccggagtggtttcctgtgctgacatcataattatggcatctagagatgctgtctctctgacaggtggacctgagtgggaggtgaggttgggaagattggacagcttgagtgctaatcaagaagactctaacaacatcatgccaagcccaagagccaacgcaagctctcttattgatctcttccagaaatataaccttaccattaaagacctagtagcactctcaggatctcactctattggccaaggtcgttgtttctccgtcatgtttaggctatacaatcaatctggaactggaaggcctgaccctgccattgaccctagctataggcaagagcttaacaggatatgtccactggatgttgaccaaaatgtcacagggaaccttgattccacgcctctcgtctttgataaccaatatttcaaggacttggctgctaggaggggctttctcaattctgatcaaacactcttcacattcccccacacaagggagtttgtgaggttatttagtagacgcaaaactgagtttttcaaggcatttgtggaaggaatgttgaaaatgggtgacttgcagtctggtcgacctggggaagttaggactaactgcaggctcgtcaatgctcgcccgattaatttgctgcttcagtctccacacaacatggagagtaacgataaataaataaaaaataaatgcgtgtctcttcatattatatgttatccaaatatgaaacgaaatattttcacttccaaattcaaatgtttaagagtgttatcaaaagaatcgtatttgaaaaattaaatgcagcctatttcacttctcc

SEQ ID NO: 43707 - DNA, 808 bp, Glycine max
  Clone ID: PAT_MRT3847_139467C.1
gtcatatagatgccagaattccttcaattgtcttccctgctttctaatattaaagcaagcattctggattctcatcttgaacttgaagaggtgtcagaacactcaaaggcatttatgcctgctgacagcctccgagcacccactcatgttttggagtctaagtctagtgttttgcaaaaaaacaatattttaactattccctcacagcctgcattccatttgtcacctacaatcgtgcgggtcattccacagaaactaaagatttggctgctgaaaagtctactgttcaaaagtttgatttaatctctaatagtgaaaataagcctactctgctttggaaattgcctcaaaacccctcaatccctacctattcaaccacagaaacaccttcaatgaagattaaatccagtgaaatgccctttccaaatagtaaaatgactatggcttcaagttccacaaccggagacaaactttctagttcatttactcctgagtcttggggaaaagacttcccatcctctgggtcacatttatccactatttctgcaccctcaaccttccttggaaaagttaccgagttccatgttgataaaagcttgcccaaagaaaatattcctgcggtgcccaccaatgtgggcacccacgcgtccgcccacgcgtccgcccacgcgtccgctagttctttagatcgcgatcattcccaactattaaaacatcaccctctccatcgagatcatcgtggctcatctgcagcagggacagtgggatgaagcatgtgggctaggagagacaccaggacagaatctaa

SEQ ID NO: 43708 - DNA, 392 bp, Glycine max
  Clone ID: PAT_MRT3847_139468C.1
atcttagtaagtgtgatgttaacatggtggatgtggaagctaaggagaaatggagcagccctaaggatattaaagttggagatggtaaggaagattttatctcttcactttgtataataagaaatgatgaagtgcaggatgacattgttaatgaaataggagcaaaatcaggaatttcatttgaaattgaaaatggtgaaatgataaactctgaagaaaggaatgcaattattgagagggaaattggtgtcaaatcatcgcatgatttagatttgaagtcagcttcagtcgcttgaaggaggaagatagaaaaaaagagaaagaggaaagaagaaaaaaaagagaaaggaaaagaaagaaataaaaaataaaaaaaaaaaaggaagaaaaaa

SEQ ID NO: 43709 - DNA, 582 bp, Glycine max
  Clone ID: PAT_MRT3847_139469C.1
gtggcggagaaggttggggtgcttcctctctctccggtgagggaaagaaacgcactttttggttttggttttggatttcgatctcactgcattgccttctgctactgctagttgcatgatggttgtgcagaactttgtagttgatttgaataaggcccttgttttccaggttgggcatcttggagaagcttatgaagagtgggttcaccagcccattgtcagcaaggaaggcccccgtttctttgaaaatgagattctggagttcttgacgcgcacagtctggtgggcaataccagtcatttggctgccagttgtatgctggtttatatataagtccatacgaatgggcctcagttgtcctcatttagctctattggtggttcttggcatttttgtttggacactgcttgaatactcattgcatcgttttcttttccacattaaaacaaagacctactgggggaataccttgcattatcttctccatggctgccaccataagcaccccatggatggcttaagactcgttttcccttctgctgcaacagctatattattgatgccgttctggaacttggtgaa

SEQ ID NO: 43710 - DNA, 749 bp, Glycine max
  Clone ID: PAT_MRT3847_13946C.1
tccgtgtaaggagaagtcacaaaatttctcagctcctgcctgtatacttcacatggcctaatcccacagtcgcacactcttccaccctgccatcaccaatcatcaacacaacgcccattattatttaaaaatccttaatatattattattcttcgtccatcgctttttcttgaagactacttcatccttcttattagtttctttttatttcaatctttctcactcgcacgcacgcacgcacagtctctagtggtaccgtgccggttcatttgcttcatccaccacctcattttcagagatttcgtgcactcaaacgccgaagaagaagggcgaatcgaaagggttcgtggaagagatgaggttcgtggcgatgaggctgcacacgagggaccaggccagggagggcgagaaggaggtcaagcagcccgaggagaaagccgttaccaagtgggacccatccgtcgaagggtacctgaaatttcttgtggacagtaagctcgtttatgacacgctggagaaaatcgttcaagaggctcctcatccttcttatgctgaattcagaaacactggattggaaaggtctgcaagtttggcagaagaattggagtggttcaaggagcaaggttataccattcctgaaccttcttctcctggtcttacctatgcacaatatcttaaggagttatctgtgaaagatccccaggcattcatttgccatttttacaatatctactttgctcattcaactg

SEQ ID NO: 43711 - DNA, 338 bp, Glycine max
  unsure (1)..(338): unsure at all n locations
  Clone ID: PAT_MRT3847_139470C.1
ttcaaaaactttcccaaactgaatgaagattctctatagatataacacctcaagtgtatatgagaaatgggtgaagaagtagctagtaatccccctcgatatccctatngaacctctacctttgcctttgtcccattctctcattccccaaacccacccgcactccctttttgtccctctcnctcactagaccatttctcacctgtctctctagttgcatgtgacattcactgttaggcttactacgagtatgtcaagcttttatttagctcaagtctttattatttgaagatggatagncantttgttgtaaatgtagtntgtacaacatnttaata

SEQ ID NO: 43712 - DNA, 413 bp, Glycine max
  Clone ID: PAT_MRT3847_139471C.1
ccttaagctccttagtgctgctccttgcggctctaattctataccctcaagttcttgcaaactatgagaatcccccactgtacacgcctctcactgagaaaccaccggtttataaccccccacatgagaggacttctggttacaaacctacaggtgaaaaccctgcaatttataagcctgcagatgaggaggcaccagtgtgcaagcccccagttgtgaaaccctcggagggcaagctcccctatgaaaaaccaccagtgtacaagcccctaggtgagaaaccaccagtgtacaagcgcccagtagagaagcgcccagtgtacaagcccacagttgagaaacccccagtgttcaagccccgcgatgaaaaatcaccagtgtacaagctcccagctgagaagcccacagtttac

SEQ ID NO: 43713 - DNA, 1901 bp, Glycine max
  Clone ID: PAT_MRT3847_139472C.1
ggctcgagcaagaagcatattttcaaagtgaagtgaatagtttaaagccatcagaaacagattcaggcaactctcttgaagaaatactatttgtttccaaaccaatgaagtaattggtgaactagagctaggtacaccaattacttcattggtttggaaacaagaagcatattttcaaagtgaagtgaatagtttaaagccatcagaaacagattcaggcaactctcttgaagaaatactatttgtgttatcccgggatggaaaaattaatatagttgatggtgatagtggaaaaattatctgcagtcggccattacaagtgaaggaatcctctgcaatttcaatgtatgttatagagggtagcatctcagcatctgaagcatcaaatgacaagctgcaggaagaaactgtgaagaatactgctgatgctagccctgatgaggaggaagaacccttatcaactagggtaaattcatcagaagctggtctttcctcttcagaaagctcacactctggagatttgctgttggatccacttgttctgctatgctgcgagaattcgttgcgcttgttctctgcaaaatctttgatacaggttcatgagttcattatcacttcacaatttgcattcacatcgtctttaccagatttggaattggttgcagaaagctctttattgtcaattttaagatggaattataaagtgaatatggataaaaccatgtgttctgatgattatggagagatagtgctggtacaatactctctagaactttcaaattgtcagggattccacttcaccggataaggaaaaggatgcagaaggctcctggccgacaacattcagaagggatcaaagagtgaaaatggaggacaccacgaggcccgcagcttatggagagaacgtgcaggctaacagttctgaattggccttcatgtcattactggctggcaaagatgaattcagtaatctggagcatctgccttgtcttcacgataaagttcttgcagccgctgctgatgctgcctttaaattctcttcaaatcagaagaaaaaacagactgtggtgccggggattctaggtggtattgtcaaagggtttaaaggaggaaaaaccactccaacagatgtgactaaaattccaacctccaattttggtcatttggaagacattttctttaagccccccttgcctgattcccctacaacagtggcaatcccagataagaaagaagcggagcttgatatagatgacattgaaatagacgagccccatcagcccatacctaaggcttctacttcctctcctgatgttaaaaataaacagaaagataagttacaagatagggagaaactatttgaaggtgggaccaacaatgatgatttaaagccaagacttagaaaacctgaagaaattatggctacttatagaaaaactgaggatgctgcttcagttgctgcccaagcaagaaacaagcttatggagaggcatgaaaaattggagagaatcagccaacgtactgctgaactgcaaagtggagctgaaaattttgcgtcattagcaaatgagcttgttaagaccatggaaaggaggaaatggtggcaaatatagcaaaaaaatgtctgtatgaattatgtatttatcgtcttgtatattatacatatatttttgtggctgttggcgttgtttttgtttcattttagcaaaaggaaaatacataacatctgcagaatttgtaaaataaaatccaatccaaatagtggttagcaattctttattactaaaagaattgtcattttttttttaatttgagatatttgaatatcaatttattatgtaatagtgatagatgtaaagaatacaataagaaaaaaaatgtatttttaaaatgtttttatg

SEQ ID NO: 43714 - DNA, 196 bp, Glycine max
  Clone ID: PAT_MRT3847_139473C.1
ggatgagacgtggaggagatcataggctctctcaagatctctcccccatctgctgccactgggaaccatgccggcgccggcctgggtgatccatgcactgtcctgggtgtctgggtgcctaccccaccagatttactctctgtgacattacctccattgctaccagcgggggaagacgtcagtgcctgcatgggtg

SEQ ID NO: 43715 - DNA, 373 bp, Glycine max
  Clone ID: PAT_MRT3847_139474C.1
aggaaacttttcccggattttggaaaaattcaaggttggaaatgaaaaaaaaaagggggcaaaccagccccttaaagcttatgaaacactttctccccctgttgaaagggaactacaccctacccttcctattcgttggggccgggtccaaaattccccggggtttaataagaaaataatgaatccccctgaaagggccggccttcttgcaaagcaagcctttaataatgttgcctcaaacctgaatcccctgaaggaggatccttccaaggccagacccttgataatgcagttgttaaggaatacccttccttaatgaacttctgatatccccaaaaaggtggaggcccaaaaattggaaaccccacccagg

SEQ ID NO: 43716 - DNA, 429 bp, Glycine max
  Clone ID: PAT_MRT3847_139475C.1
tttttctgtacaaagggtcatgcatcagtcataaaacgaggctcctacacctctcttgccctggatgcccagagctgagccgctctcaacatatgaaggactcatactaagggtccacctccatgccctcggatccgccgggaccgccagagatggtcggctcggtagcgacacccgcctgctccttgcctgcgccagcggtcaccttgacctcctcgctgacgatcaggctgcgaatcgactctttcgtccaggcggtcggtccccggcggaacttgtagttgcgagtcttgagcccgcgctcgttaggcgtctcgtaattgcgcagggtctcggtcctgctcttcgtaatgacagacacatcaacgttgctaccggaacccacgtcgttgaagacaccggaccggatggcgcgagcgacgaggtcaa

SEQ ID NO: 43717 - DNA, 275 bp, Glycine max
  unsure (1)..(275): unsure at all n locations
  Clone ID: PAT_MRT3847_139476C.1
gctttctgctgacccagagactttgccaaaaaccgtgaactggaagtcatccactccagatgggccatgttgggagccttgggctgtgttttccctgaactcttgtcccgcaacggagtcaagtttggcgaggccgtgtggttcaaggccgggtctcagatattcagtgagggtgggttgataacttggggnaacccaagccttatccatgcannaagcattcttgccatctggggccaccaagttatcttgatgggttccgttgaggggtacgg

SEQ ID NO: 43718 - DNA, 280 bp, Glycine max
  Clone ID: PAT_MRT3847_139477C.1
cactttcaccgcttccaatataatgacaaaacacggatatgccgccatcattgctaaaagtcaagatttgaaggtgcatggcccaaatgacgaaaatgaaaagacagtcttgactggcacggggttgagctctactaatattgcaatgacgatgaggggacaacatacaaatctgaacatttccattggaggctgtggacatgcagtggaaagtcgtggctgtgcgtgctggttgtcgtggaggctgtggaaatttgattaagagtggtggctgccgcgg

SEQ ID NO: 43719 - DNA, 455 bp, Glycine max
  unsure (1)..(455): unsure at all n locations
  Clone ID: PAT_MRT3847_139478C.1
cacgcgtgcgaccacgcttacaacaacacgtgagaccactctttcgaatattcattggcacaggcttactttaagctttgtgggctgctttttgaacacattgctcaatatcacacatactaaaaccatctattaattaaatcaaaccatacaatgactttttcttaacctgttacaagatctgtataatatctacctcacctcatatactcttaaaaaaagtctttgaactcttcgttgtacgaaacgaacccgggtcattcgaatcatatccatatcaaatttacgattcacatcttgttattctaaaacaagaactctttaatgtcttactgataggtctactcctatatattgtgcacgccttacgacatgttactggtataaatataaaatgtgcttttgttaatgataagattgccttacacaangttttactggttggcactgataca

SEQ ID NO: 43720 - DNA, 446 bp, Glycine max
  Clone ID: PAT_MRT3847_139479C.1
ataaataggacaattatcacctactctaaatttccgacgacatgcgatatatgattatagatctcgtggttaacgttaatgctcacataaatgtttaaatcgtaatctataactaaatattacaaactggaattcttatccaaatggactgcaaatcattccttttatatgataccctacgattgtttacttaaatatttaatgacttgaactatttaacttaataaaattagtcgggtgctattctatttcacgaaatgggttttctttcacagtatctaatgctagtcaccgcacttaggcaatgagctagaatgggtcttgacgatatctatggatgtatctagacctacctatctatagatatctttagaatcaacagaagagcttagacgtactggacgtctactgtcatggatagctacggggaactatcggacagaaaa

SEQ ID NO: 43721 - DNA, 1011 bp, Glycine max
  Clone ID: PAT_MRT3847_13947C.1
ttccagttaagcatataaatccaagtttgaatacctaacataacaatatataaggccgccaccaaataccaaatagatcccattggagagtaggaggagttgttcacccacatcaccttaccattgtcattttcttccccccttcccctacaaggctgcatcccctccatccaaaaccatcctcatccaaattatcccatcatacctttactttaccccacccaaagcgaaaaaaaaagaggattcaaacatatttgccttatacaattcaaatggcacacacaaaagtggatatgggtttggttttggtggtaatggccatgctatgcgcaggagctgcagctcaatctcaatcgagttgcacaaatgtgttagtgagcctgtcaccgtgccttaactatatcacagggaattcttcaaccccatcttcaggatgctgctcacagcttgccagtgtggtgcgctcacaaccacaatgcctatgtcaggttcttagcggcggtggatcatcactggggatcaacattaaccaaactcaggctctggctttgcctgttgcttgcaaggtgcagaccccacccaccagtcaatgtaacaatgctgctgcttcaccaccaacaggaacagttgcggaatctccaaattcagctccatcaggaaccggaggatccaaaaacctacccacaactgataatggctcatccagcgggaattccatcaagttatcgattcctctgatacttattttggcagcaacatacgtgtcaactttcacaacatactgattctatattcggtcgattttccatttgctattttttgcttgtttgccaattgtccttgtttaatcatttgctattattgagtttccttatgctgaagggttcaatctattcattcgtgacccctactgggttacatagttttgtataatcagagacatttgttctctcatttatcaataaaatgggttgtcacttggtttgctaaaaaaaaaaaaaaaaggcccct

SEQ ID NO: 43722 - DNA, 867 bp, Glycine max
  Clone ID: PAT_MRT3847_139480C.1
agccctgaggcttatgccaaccctattatgagagacatgtggcctgctgctgccaaaactggagctgaatctggtcatgattctcctcggcttttatacagaattgacaagcataagcaagataagggacatcctctttggcaagaaaatgaccctaaagtaggcagtggtgatgaagcaatgccgggaactcccatttgtcagcctattcatggcaccatcgccccatcaatgggtggaaagagcaaccgaaagctctctacagatgcaaaacctggatcctttgactcaggttgtgctctctatcttctgtcaacacttcaatcacaaagtccagagttgagtatggtgcaatctagcatcacctgccctgtgcaatctccatcaggatctgtgcattttgatgctgtgaatgagtatgcatgctcagaaacggaaagagataagcctagtggtcaagtattggttttcgatgcaaaaacaaccaaccttcattacaacggaatgctgcaaatggatctcgatggatttgttgaaaatgaggacccactagcacttcctttcttgtgggagtaggtagctaactaagtggttatgtctttgttgggaaattatggattcaaaaccttgtgtgtgtactgtgtactccaatgattaaagcttaaacttgttgaagctttcaataagggtcctttgttgctgtcaatcttgttgtggtagcacaattgattatgctgcggaggatgaaatggattgtatgcgaactatgttctttcagttgtcatgagatcagtttgaacagttcagaagttattttctttaatgaaagattttcaatttcattgagattttgcttcatgattagat

SEQ ID NO: 43723 - DNA, 331 bp, Glycine max
  Clone ID: PAT_MRT3847_139481C.1
gtgagtggttcactgtgttttttgctttttgggttccccatttgttcctgctacataaattgttttttgggtttgatcccacttttttttttggctaattactcaaaaaatatcctactttctattttggagctggtctatctatcccttccttgaaatttgtctcctttgtggtaaatttcgttgctttctgcatctccacgcactcactcaatgtgtttcacattgggttttgaacattgtcttttggatttcaacttcaactttctttttggatagtggatgctttttttctatttgattgttttggagtttgagctggttttcccac

SEQ ID NO: 43724 - DNA, 435 bp, Glycine max
  Clone ID: PAT_MRT3847_139482C.1
attaaatgatgaaaaatataacattataaatttcatcatttaataaataaaaagtaaaagaggttacacgcttgaagacccatgattctatacataaaataatacagaaaaatacctccaccacatgatatccacattgcctagcagctacatgtgcaagtgttgtttttccaagacctggtggtccacagagcagaaggatctgcaatcattatgaaaattcagttaacaatgggattcaacactctatatctatcggttggtatcataacacattataaatcaaatggctgcatcttatgccatgtacaaacaaaacaatgagcatagtgcaattgcaatattgcatgattagaaggatcatatggaaaatattatcaagaatcattacattaatactaactccatccctaaatataagactcttttaactaa

SEQ ID NO: 43725 - DNA, 2934 bp, Glycine max
  Clone ID: PAT_MRT3847_139483C.1
agaaagagatcacacgacagtagtttcttatttgggtgaagttttatgttggggttacaacagggatggacagcttgtttatggaacagagaatgcaacatctaattacaccccacgtgtggttgaatccttgaagggaaagactttgaccagagtttctgctgcaaaatatcacacaattgtattaggatctgatggcgaggtatttacctggggtcatcgacttgttactccaaaacgtgttgtagttagtaggaacttaaagagaagtggaagcactctgttaaaatttcaccgcaaggaacggcttagtgtggtttctatagctgctggaatggtacacagcatggctcttacagatgatggcgcattattttattgggtctcctctgatcctgatcttagatgccaacagttatatgctatgtgcggaaggaatatggtgagcatatcagctggaaagtactggactgcagcagttacagctacaggtgatgtttacatgtgggatgggaagaaaggtaaggataagccccttgttgcaactcggttgcatggtgtaaagaaggctacatcagtttcagttggtgaaacacatttacttattgtggcttcactgtatcatcctgtctaccctcccaacatgattgagaattctcagaaatccaagctgaataacaaggatgatgtggaagagttaaatgaagacattttatttgaagatatcgattccagtaacataatatctaatgtgcaaaatgatactttaagccagagatctatacccagcttaaaaagcctttgtgaaaaagtagctgccgagtgtctagtagagccacgaaatgctgtacaactgcttgagattgctgattctcttggagctgatgatttgaagaaatattgtgaggagattgtcatgcgcaaccttgattttatatttgcagtatcatcacatactgtagcaagtgcctcactagatattctggctaacctcgagaggttgttcgaccagagatcatctgagccatggagtcaccgtcggctccctactccaactgctactttccctgccatcatcaacagtgaagaggatgatagtgagatagagtttcagaggactcgtgacaaacccatgaaattggagaaagtcctcaggctagattcttttctacagccaaaggatgatcctaataaagaaatctccaaagtagtccgagctataaggaagaagttgcagcagattgagatgcttgaagataagcagtctaatgggcatcttcttgatgaccagcagattgcaaagcttcaatctaagtcagcacttgagagctcacttgcagagctaggtgttcctgttgagacatcacggtataaagaatcatcttctatgttaccagaagggaaaggtagtaagaagggtaaactatcgaaaaaacaaaggagaaagagtggcaaatcaaacatagagcagacagaaatagaatctgtttactctaaaagtgaccatcgttcagggacatccaaatggaacagggatagaaacatcaaggcctttcacacagtccgtggaagaggatgccgtgtgtgaacagatcagcgcagacgagggtggaaaagatttagcttttgttgtgcagaagaaagatgctttagagttgttgaaagccaagggtccatcaccaaaggcttcaaagaagaagaggagcaagaagggtgggctttctatgtttctgagcggcgctcttgatgaagccccgaaggaggtggctccccctccaccaacaccaacaccaaaacacgagggtcctgcatggggtggggcgaagttcacgaagggttctgcttctcttcgtgaaatccaggatgaacaaagcaaaataaaggtaaacaaaccggctgggagcaaagataaggttgaagatctttctgattttggcagtgggggcaaaataaagttgagttcatttcttccttccagcccaatacctgttacctcatctcgaagttcccaggtatctgatggagaaacaagcacccctccttgggctgcttccggaactcctccccaaccttctcggccatcgttaaggcacatccaaatgcaacagggaaagaaacaacaaagcctttcgcacagtccaaagactacaacagctggattttccatccctacctgtcaaggctcgccgtccgaaacaaccggtgtgagtcgctggttcaagcctgaggtggaaacaccgtcctcaattcgttctattcaaattgaggaaaaggctatgaaagatctcaagcgcttctatagcagtgtcaagattgtcagaaagcaatcttgatgccatttaataatttatctaataaagtagcaagagggctctttcctgttctcctctaccttgagcattaccattttttctcatccttttttcactttccttattagtacaatgactgaattaatctgtacagatagttgcagtgtacatcctttctttccatatcaaaattgtagttttagtttcttagtatctgggtctttttccattttctgtgtttccaaactatcactgtacatgacccaagatttattttatgtactcatttttaaccgtctcaagttagagactggtcaataatgatcctgaacctgatgtcaagggcagccatggtagatttccctgactcaagttgcttcaaggctcaagaatgtcagaataagaggaaacttctttccaaataagttgcttcaagccctaatctcaccccctgtattatatacatccacctagtgttgtgacccttctcaactgccttgatgttgttccatttttagttgaggaatatttggactttggagtgataataattgttcaaattgctttttataagctttctgtatgccagcaatttaagagactatcaaccttttagctttgc

SEQ ID NO: 43726 - DNA, 387 bp, Glycine max
  Clone ID: PAT_MRT3847_139484C.1
ctcttattctttgtcttttattttttttttttttttattcgtttttgtttttttggggtggttttttaaaaacggacgaaacccgcgggtttaaaaaactcctgggcccctttttatcataaaacaccgcgcgctcagggtggcttttacgggagcatgaggagagaatgaggcgcaggaaagtaaggtgtgtctcccgccggggaggagattgtcccaaaaaatcctacattcagggcggaagcggcgcgcatggcttaaactcttaaaaacgccgggggaagcagccccttcctacggggggcgggcgggaggattacgaccctaaggcctggacagacttgcctctctctttggaaaatgttgagaactcgcgcgccagtcagg

SEQ ID NO: 43727 - DNA, 268 bp, Glycine max
  unsure (1)..(268): unsure at all n locations
  Clone ID: PAT_MRT3847_139485C.1
gacggccangatggtaccgtgtntgtntagtttgtagctctttgcaggccaaaaggtcgtataaacttacatggaatgttgtctcttattgctaagcagaagctatacacatatcctggaaactaccgcgtctttaaggtgctcattgctgccgaatttaacggcattgacattgagttgccggaattgacttgccaaggacatcangtccagcggagtttcaaagcccaatctccagctgagaangtgnccattctggagacggagg

SEQ ID NO: 43728 - DNA, 233 bp, Glycine max
  Clone ID: PAT_MRT3847_139486C.1
gcgatgattgttccccagcacgctgtttcggcggggttgttactgagcggagacgctagtacaactatattcagggctctaagtattcataaatcgatgccgatactgcttcttatactcctgatgatggagactggcgcctcgttagttattggattacaacattggtgacagatacaagatctattgtagcggcaaatacaccttctcatttgctccaaaggcatattgga

SEQ ID NO: 43729 - DNA, 224 bp, Glycine max
  Clone ID: PAT_MRT3847_139487C.1
ccttcataaccagccacaagattacacaacttctgcaaccagaatccctctaaaaatgtctctgcaaaacatgaatattattctgattgcatagtaaatattaatagcacttatcctgatcatactcctatctgtatagtcttcaattcaactgtggaacacaatccattcacccaatccttttataatgtaatttcaaccttttatcccatgaaacattctaa

SEQ ID NO: 43730 - DNA, 229 bp, Glycine max
  Clone ID: PAT_MRT3847_139488C.1
aagaattacttgtactatttcatggtcctgaggggagacagaaaaacatcggatgatatgcaaaactttatggaaaaggttcatatcctcatccaaataacataaatcaaaagtacgtctatgctcctgaggttctttggccaacactagcaacagaccccgccttgattggagcagctgaactttcttatccacacttctcacactgatgaaagaagaggcaaaaatg

SEQ ID NO: 43731 - DNA, 528 bp, Glycine max
  Clone ID: PAT_MRT3847_139489C.1
gtccaggtctgtccttaggtacatggattccatggtataaacagcaagtcccaaaacggcagcaacagccttccggtccggacaatgcccccaaacccgattagcacaacaaacaacaacctgcgttataacataataattatacagcataaaacctggtacactatttgcaacacaagaccccgcaagcttagtttcctgaggcaccaccgtaagagtgggaaccagcatcgacggagttacgggtgaaagtttaaacggtaactagttaggctgctgaagatggcccggcgtacgccggtgttataaataaacaacggctaacagagatgtttgactaggagttattaaggaccattacagaatggacaaaattgcaacaactgacttcactaaggttacaactacctgttgcaaacacttcgtccggtaattatactgtaacaacacaagcagcagcatcagcgtttccagtggcggttaacttaccaggggcacatactgctggcacacattaactgctggtgg

SEQ ID NO: 43732 - DNA, 2742 bp, Glycine max
  Clone ID: PAT_MRT3847_13948C.1
tacggctgcgagaagacgacagaaggggatcctcatccaaatcggctcgagctatcccatcttaactttactttacccctcccaaagaagaaaaaaaaaaggaaaaggattccaacatatttgcattatacaattcaaatggaacacacaaaaatggagatgggtttggttttggtggtaatggccatgctgtgcgcaggagctgtggcacaatcgagttgcacaaatgtgttagtgagcctgtcaccatgccttaactatatcacagggaattcttcgaccccatcttcaggatgctgctcacagcttgccagtgtggtgcgctcacaaccacaatgcctatgtcaggttcttagcggcggtggatcatcactggggatcaacattaaccaaactcaggctctggctttgcctgttgcttgcaaggtgcagaccccacccaccagtcaatgtaacaatgctgctgcttcaccaccaacaggaacagttgcggaatctccaaattcagctccatcaggaaccggaggatccaaaaacctacccacggcgtttctttttttttttctaaattctttaactttatttattgtaacaatatctcacctttcctcatcctatagtcagctatgttttaagaaggatacctgtaggtatatattagaggaaataaaaaaccgcatctgttccgtgtaaggagaagtcacaaaatttctcagctcctgcctgtatacttcacatggcctaatcccacagtcgcacactcttccaccctgccatcaccaatcatcaacacaacgcccattattatttaaaaatccttaatatattattattcttcgtccatcgctttttcttgaagactacttcatccttcttattagtttctttttatttcaatctttctcactcgcacgcacgcacgcacagtctctagtggtaccgtaccggttcatttgcttcatccaccacctcatttttagtgatttcgtgcactcaacaaactctcatccacccatggcgtcatcactaacaacaatagctctattcctgccccaatcgctctatattaagccccgcctggcgccacggcctcttcctccccctcaattccgctcccttttcctaacctcaccggcggtggcgggtggtgttcgtgctgctgtcatgcctagaaggactgcggttatcgtgtcggcggcgacggcggagacgccgaagaagaagggcgagtcgaaagggttcgtggaagagatgaggtttgtggcgatgaggcttcacacgagggaccaggccagggagggcgagaaggaggtcaagcagcccgaggagaaagccgttaccaagtggaacccatccgtcgaagggtacctgaaatttcttgtggacagtaagctcgtttatgacacgctggagaaaatcgttcatgaggctcctcatcctttttatgctgaattcagaaacactggattggaaaggtctgcaagtttggtagaagatttggattggttcaaggagcaaggttataccattcctgaaccttcatctcctggtcttacctatgcacaatatcttaaggagttatctgtgaaggatcctcaagcattcatttgccacttttacaacatctactttgctcattcagctggtggtcgaatgattgtgaaaaaggttaccaaacacatgcatgcttaaagggttgctgaaaagttacttaacaacaagggcattggagttctacaaatgggacggtgaccttccccagttgttgcagaatgtgagggactttttgaataaggttgctgaaccttggactcgggaagaaaaggaccactgtctggaagaaacagaaaaatcattcaagctctctggagagattctccgtctgattttatcatgataatagatgccctgttgtctgtgtaattatgggtattaaagtgcatggcggaagccaacaacattaccatatgtgaattattttatttccaatacgcaaaggaataatagaactgatgtttgattaacttgcttttctcaaatgaggctgctcattcagctggtggtcgaatgattgggaaaaaggttgctgaaaagttacttaacaacaaggcattggagttctacaaatgggacggtgaccttccccagttgttgcagaatgtgagggacaagttgaataaggttgctgaaccttggactcgggaagaaaaggaccactgtctggaagaaacagaaaaatcattcaagctctctggagagattctccgtctgattttatcatgataatagatgccctgttgtctgtgtaattatgggtattaagtgcatggcagaagccaaaaacattaccgtatgtgaattattttattttcaatacgcaaaggaataatagaactgatgattgcttatccagcggaaattccattaagttatcgattcctctgatacttattttggcagcaacatacgtgtcaactttcacaacatactgattccatattcggtcgatttcccatttgctattttttgcttgtttgccaattgtccttgtttaatcatttgctattattgagcttccttagtctgaagggttcaatctattcattcgtgacccctactgggatacattgttttgtataatctgagacatgtgttctctcatttatcaataaaatgggttgtcacttggtttgctattataatcttactcacacggaacgcgtcagtgtattctaacctcat

SEQ ID NO: 43733 - DNA, 357 bp, Glycine max
  Clone ID: PAT_MRT3847_139490C.1
ggccaagagccacccctccgggaattggaaaaaaaaaaaaattaggctaattcaatccccccccgacaaaaaaaaaggaaaagggggttttaaaaaaaggaaatacccacccctcccacgggggggaaaaaaaaccccccgggggggggaactggacatatctagccgggggcgggggggtttcaaaacaaactagggggcctgggccccttcacaaaatggggtttttaaccaaacgcatttttccttggagaaaaacccctaaaagggggcagcccaattacaaccaccggggttccaacggaaacagccataagagaccgattaaaaacccgggggaacgggtgggggtttctt

SEQ ID NO: 43734 - DNA, 507 bp, Glycine max
  unsure (1)..(507): unsure at all n locations
  Clone ID: PAT_MRT3847_139491C.1
aacctttgggctgatttatgtgcttgcatggtcgtgagaagatgatagaagggggcgaacaaacagaaaaaaaatgcagaaggaaggccaagatccaagagaggccgcagtaacgcctccccctcctgcgggagggccattgtaagagccgtggtaggcgtcgaaactcggcgcgggtaagcgtatgcgtcgtgttaataattgtgctgactctgctaatcatgataaggcctctaaatctcctcctgccttcgttgtttggaattgttgttgacctggtgctggtgaaggcctttggtgttccgtgtcgttgcccacgtgattgtgtggcggaggtcgatccttgacctcgttttcctcgcggtcttgaatcgcgaagagagacgcgctaagagaggccccgggaaaacccaaaaccaanaaanaaaaatccgaggcccaccagcgccccgccacgcataacatcacgactggaccaccccccggcgcagaaactgcaaaacaacc

SEQ ID NO: 43735 - DNA, 544 bp, Glycine max
  unsure (1)..(544): unsure at all n locations
  Clone ID: PAT_MRT3847_139492C.1
naatnnncngannnatgacnnnatcatagnngttgtcgaacnntacagacanannnanaannagtaancaantgtngtantgatannntgaggtcnatntgganangtgtnaggntnnaggngttactcnnnatgatagtanagtagagnntnnannatcagaantagngcnanncgancantgnatcaaacagangncagtagnaagtnctgtagngtnnaatatgtgatagancttgntgntcgntagtagtannctaanatgantcnagagtanataaagagtncganangngtgntgngtangtgnggtngnttntgcaacgagtntgnatntgngnctatggtntnttgngatataganacnccacaagacantctncctgtgagagttgncgagaaangcgnctgtatngntgtgngatgtgngncnntanangtgtacggacnaanagtnccnagntagtactcgangtgtgnnttgtgtgntatganaancacgggttactcnagtntagactangagagcnanngctctctnttc

SEQ ID NO: 43736 - DNA, 365 bp, Glycine max
  Clone ID: PAT_MRT3847_139493C.1
tgccgatctataactagagccctttatttgatttttagtgaatcattcatatgagaaagccattttcatacgtacgtacatacagatgcaccattaccttgatctctgtacaatttttattccccagatataagaatatcgaacagatcctactgaataaggggcgactattgaatcctgcgctctaaaatggcgcatcctttaatatatttccaaaagaaaattttaaaaaataaatttctattttaggatcagccgaattccagagttacggacaagcgcatacgtagttctagcctcgtatatagaggcacctaaatttaatccactggcaggtgtttaacaaccgtcgcgcttgggaaaac

SEQ ID NO: 43737 - DNA, 497 bp, Glycine max
  Clone ID: PAT_MRT3847_139494C.1
ggctcgaggtgtgtatatggttgccgctgatacggcgtagtctgtttattctctctccatcacctgtctaaaccctaatttaaaaaatcccagaatatcttctttcttcttctttgctctcactcatatacaggtacaccacagaattctctctcccatctctgcaagacgcgctggttctggaaactccctgattttggtttcgaatttttcgctgctcgcgggaaaaaatcgcgtccttctcatcaaattcgtcttccccactgaaattgaacttttctttcgctcttttactacagtttatacagatatacatcaaaactaagtttcatcagctttcaacctcatggctggattgttgcttggtgatgcctctcatcatggaacttctcaagttgtttctcaaccggaggatggttcgaggtggtacttttataggaaggagattgaaagaatacttaccatccaaaccatgatggcataggattttgaaggaa

SEQ ID NO: 43738 - DNA, 1079 bp, Glycine max
  Clone ID: PAT_MRT3847_139495C.1
atgttgcatttaaagttatcgcagaccacattagaacgatttctttcgcaattgctgatggcgcattaccagctaatgaggtcgctgatatcatggaaccatattatccaaatgtcaaagacaaatccaactttattaaacgtgtcattaaatcagaggaagaacgcttccatgaaacgcttgaggaaggtcttacgattttaaatgaactgataaaagaagcgaagaatagtgatcaggttattaaaggtcatgatgcttttaagttatatgatacttatggattcccaatagaattaactgaagaattagcaactcaagaaaatttgtctgttgatatgcctacttttgaacaggaaatgcaacaacagagagatcgagctagacaagctcgacagaattctcaatcaatgcaagttcaaagtgaagtactaaaaaatattcaagatgaaagtcaatttgttggctatgaaactacggactatcaatcattaataactcatatcatatacaatggtgaagaagttaaacatgttgaagcaggagaaacaatttactttattttaagagaaacgcctttctatgcagtaagtggtggacaggtcgcagataagggaacagttggtaatgagagctttgaaataaatgtaactgacgtaactaaagcgcctaatggccaaaacttacacaaaggtattgtgcaatttggtgaagcaacacagaacgcgaaagtagaagcacgtgttaacaaagaggatagacgacttattcaaaaaaatcatagtgctacacatttattacatgctgcattaaaagaagtattaggagatcatgttaatcaggctggttcgttagtagaacctgaaagactacgttttgatttctcacattttggtcctatgacacaagaagaaattaatttagtagaacgtagagtaaatgaagaaatttggagagctatcgacgtccgtattcaagaaatgagtattgaagaagccaaatcaataggcgctatggctttatttggtgaaaaatatggagatattgttcgcgttgcaatatggcaccattttcaatag

SEQ ID NO: 43739 - DNA, 236 bp, Glycine max
  Clone ID: PAT_MRT3847_139496C.1
catgcactcctgatcaagctccgaattcagcacatgacggcagggaacaaggggaaaagcaaatgcggagtctaaagtaacaacgccgtctcgaaaacctaatgattttccgtcctgtattcagagcgtgcctccttcctccgtccctataaccatccacgccaaacctggtgccaaatccgcatctataactgatataagccgacaagcggtgggagtgcaaattgacgcacctg

SEQ ID NO: 43740 - DNA, 318 bp, Glycine max
  Clone ID: PAT_MRT3847_139497C.1
gtccgatgcttatatatatctacacgcactcatactggaggcctaatactaaaaaaatatatgatgcacagggggagatagctgaccacacttttaagaacaatgcgactctattgaccgagtattatgaccgatgaacaacacctgtcaaacatgtcataccttacacatacctctacgtgactaataatgctcacacattacatggaaacatattaacactcaactataccgagaggcaagcaagaaatggcatacattttaatgaatgaacatgaagtgtttttgaaaagaaaaaaatacacattgttgattatt

SEQ ID NO: 43741 - DNA, 539 bp, Glycine max
  Clone ID: PAT_MRT3847_139498C.1
attatttgaatttgtttttttgtttttggattaattcaacttaagaaccaattcagattcactcaacaataaatttcttctgctacagaagatcaaggggattcagaagaaaagaaacttgtgttaacattaacaggtaggctgggggaggacacactacggcggggaaaatgtggctaagtattcctactcgaaaactaagggatagaaggttttccatccagaagatggagacggtattcacctcaatgaaactacaaggaaggagggggttcaagaaggaacatccttgggaacacgaactaaaaaccaaacgcgaactaatcccaaaatcaaggtatgaaggagaagtgggttggtttctttttctacccgaacgcctaacaggaagagacgatctcctgctacaaaagaccctgctggggggggggggtctcttgcacagggagggtaaatgggggggcggacccaacacacgggtgaggcctgcacaacaaaaagcggcccccccaacgggggaggggggggggccccccccc

SEQ ID NO: 43742 - DNA, 233 bp, Glycine max
  Clone ID: PAT_MRT3847_139499C.1
cggacgcgtgggcggacgcgtgggctagaacagaagttaaaggcaatgtcataattaacaatcatcacattgccttgaactagaacagaagttaaaggcaatgggatgattgttaactatgatggtcgtgtttttagctgatggcaactaaattgaaatttcggatcggctcacttttaaaatgcaaatgtttggaaagcatgaagaatctaatacaatgatcttatcttatt

SEQ ID NO: 43743 - DNA, 109 bp, Glycine max
  Clone ID: PAT_MRT3847_13949C.1
tggaaacctgaagaaccctcctgcaccctgcctgagaagaaacgaggccgccataaaagaccggggctgcctgctaaaacagaagtccaagtgccactagtagtctgga

SEQ ID NO: 43744 - DNA, 318 bp, Glycine max
  Clone ID: PAT_MRT3847_1394C.1
gcggcctgtttgttggttggtttttttttttttgtttttttttttcttttttggagaaatccaactcataattgaaccacatttttttgaatccaatgtctatgaggacaacacctattatgagttcgagctcttaaaagctttattttaaaggaagggctgtttttagggggggggctaaaacctccactttttgtccagcccttttgaggagatttgggctcaccaagcaccttcattatagcagtggcagaagtcacaccatgagttccccatcccgttacctttttaacatgctcaggttttgatattccaaaa

SEQ ID NO: 43745 - DNA, 829 bp, Glycine max
  Clone ID: PAT_MRT3847_139500C.1
ggcagaaactggtggaagcttttgatttgttccgagagatgatgcgcaggggtctcccgcctgatgaggttacttatactagtttgattaatgcttattgtgttgatggggagttgagtaaggctcttcgtttgcatgatgaaatggtgcagaggggttttttgcctgataatgttacctatagtgtgcttattaatggacttaataagaaagctaggacaaaagtagcaaagaggcttcttctgaagttgttttatgaggagtctgtaccagatgacgtaacatacaatacgctgatagaaaactgcagtaataatgaatttaagagtgtggaaggtcttgttaaaggattctgcatgaagggtttgatgaatgaagcagatcgagtttttaagacaatgcttcagaggaatcataagcccaatgcagcaatttataatttaatgatacatggacattctagagggggaaatgttcacaaggcatataatctgtatatggagttggagcattctagttttgcttgtcatacagtggctgtaattgctctcgttaaagcactagctagggaagggatgaatgatgagctgagtcggttattgcaaaacatattgaggagctgtaggctcaacgatgccaaggtagctaaagtacttgttgaggttaactttaaagaaggtaacatggatgctgttttgaatgtgctaactgaaatggccaaggatggcctactacctgatggtggaattcattcatctgctccagcaagtacctaatgtcttttgttttgtgtgctaaactgtactatgctaaaataagaacttatcct

SEQ ID NO: 43746 - DNA, 499 bp, Glycine max
  Clone ID: PAT_MRT3847_139501C.1
cggctgcgagaagacgacagaagggcacagtaagaacctaagagattcttgttccactaaattaaaacataatatacaaaagggagctgagttcagtttgcaaggctgaaaagggagttcagtttcccaagatccctcaacttcattcacttttgaatcacgaagtttcattttacaatagtataactactcaaaacattataagtactgggggaaatcatcattggacagagtgtcctgttcctgatatgaaaaaatagcacattagcatatcactattatagcttaatcctgactaaagaaacaattgagaggaaacaggacctcaatcaaagtatcaacaatagaaatgctgataattccccccatctgcttttcaattgactctttcggaagtggaaaaacagtgggatacaaccaaatgttaaagacttgataacttaaaacgaacccaaggcagttaacaagcaacttggaatttcattaacgaagtaacctc

SEQ ID NO: 43747 - DNA, 333 bp, Glycine max
  Clone ID: PAT_MRT3847_139502C.1
ctaattaataaactttattcacggggtattgtgggatttttaagccctgatacctacatatgataactttattcccccaggagctatatctcaagattgcaaaagcggttcttctaacaaaaaaccatgggccgtacacaacctaccgctggaggtattgcaccacaggactaaggacgatgaacaggacaaactacaagagccaggtcacacacaaaatccacttatgtaatgaactaattactgctaccgctaacatgagatactaagcctgaacgtgggacatgtgaacaggtttgtaaacgacatatggaggatgaggcccaccaatct

SEQ ID NO: 43748 - DNA, 530 bp, Glycine max
  Clone ID: PAT_MRT3847_139503C.1
ctcgagccgttttttttctctctcctcagatcactacctccctgttttccagcgatttttcagcggattccctttccaaaatcctaacttcccctaaattccctcccatcgttcatatcttaaatcatcaattctctaccttttttttgccgctcacacattttttttttttgaaaaaaaaatatacgtttgaatttcatattattttgccacaatttgcattattattattattattattattattattatttcatttgggattattagggattaggaatactaatcatttttttattaaatttctatcttaacccgcgaactttggtttaaatattttcgggggtttcttcaacttcaatgaaaggttgaaaaaaggaaaaatttagaaacttgttttttgttctataggttttgaattttaaaatttttcaaactttttttcttgcccaactttcctccgtggggggggggtttctttttggggggtttgttttgagggaaaacaccaaaaaagggaaatttttttt

SEQ ID NO: 43749 - DNA, 188 bp, Glycine max
  Clone ID: PAT_MRT3847_139504C.1
aatttcctgtgggacaggctactactcggaggacgcacttaattttcaatttcatacaagaacactattgtctccttatttgtggaaaatgtggaaccggaaagcccagaggagatcccatataaacgagctggaaacatacacgctcgattgttactaaacagaggatgagactgtcgctggtcggg

SEQ ID NO: 43750 - DNA, 169 bp, Glycine max
  unsure (1)..(169): unsure at all n locations
  Clone ID: PAT_MRT3847_139505C.1
tgngnggagngtgntngtgantgggtcgtggtngtgtgatgangngngattgatgggntatgggggananaangnttggggtggccttgcgaggtagngtggaggagnttcagntgttgggngggtnggntgtgtggcaaggacagattgagattaggnacntgagtga

SEQ ID NO: 43751 - DNA, 1511 bp, Glycine max
  Clone ID: PAT_MRT3847_139506C.1
gaatctaacctcaacttgtagaagggaagacttgtttctgtggaacttgcatcacacagaacatggagcatgcacacatgagtacaagataagacagttcttattgccatgaagactgaaattcataattatagataccatcctaaagggaatctaatatggaagtctcatttttcttttggtacaaagaaatcccatatttaaataagctaccgcttcttgactggtccaattaagacctatagagatgcagctttccagaagccaattagggtgaatgtaattggtctctggaagttgatgtaatgtgatgttttgtgtgtcagtgggtgtgaattttattggtggattcgcattcgcctctggaattcccaaatcatcagtttcagcgaccatggcttccaactccgtccgagttgccgccgctcagatgacatccatcagcgacctcgctgccaatttggccacttgctctcgtctcatcaaagaagcagcatcagctggagccaaattgctttgctttccggaggccttttcttacgtgggtactaaggatggcgacagtgttcgtgttgctgaaccattggatggaccaattatgagccactactgctctttggccagagaatccagcatttggttgtcacttggaggcttccaagaaaaaggatccgatcctcaacgcttgtctaatactcatgttatcgtagatgacaccggaaaaattataagctcttatagtaagatacacctgtttgatgtagatgttccgggtggaagggtatacaaagaaagtagttttacagaatcaggcaaggatattgttgcagtagacagtcctgttgggcgtttgggcctcagtgtttgctatgatttgagatttccagagatgtaccaattgctgcgtttccaacatgaagcacaggtactactggtgcctgcagcattcacaacagtaacaggtgaagcacactgggagattcttcttcgtgcccgtgcaattgagactcaatgctatgtcattgctgctgcgcaagctggcaaacataatgataaaagagaaagctacggtgacacattaattatcgatccatgggggacaattgtaggtcgattaccagatcgtttgtctacaggcattgtagtagctgatattgatttatcatttgttgattcagttagggagaaaatgccaattgctaagcaaaggaaaccaattggcttctggaaagctgcatctctataggtcttaattggaccagtcaagaagcggtagcttatttaaatatgggatttctttgtaccaaaagaaaaatgagacttccatattagattccctttaggatggtatctataattatgaatttcagtcttcatggcaataagaactgtcttatcttgtactcatgtgtgcatgctccatgttctgtgtgctgcaagttccacagaatcaagtattattttctacaagttgaggttagattcatagcatcctagtttcctttttgtgc

SEQ ID NO: 43752 - DNA, 787 bp, Glycine max
  Clone ID: PAT_MRT3847_139507C.1
tacggctgcgagaagacgacagaaggggactctaatcggtaatcagatccggcccaaaccctttgacttgtcttctctctttcactctgttgttcttctcgcaatggaggttcagattccaatccacaccgtttttgacgtaccctctcttctccaagctgtggccgccgacactgttctcgccgctgcgcaatctatcgctttgattggatatctgctgactaatgacactaattcagtgtcaccaaatttgacagcagcgaatggaaggtttcctttagaagacctttttgggaggaaacatgcttatctagaaaacaagaatagtgaaacagaggacgacgacgaggatggagatgaggatgatgaagatggacatgatcaggatgatgatggagaggacgaggaattctcaggtgaagaaggcgatgaaaaaggggatcctgaagatgatcctgaggctaatggtggaggaagtgatgatgacgacgacgacgacaacgacaatgaagaagatgatgacgacggggaagatgaggaggaggaggaggaggaggacgacgaggagacttcacagccacctactaagaagagaaagtgagaatattcgtaggagattgtttccaggcatttgagtcgagcttagttattaggacagataaaatagcaacctctttcagtagacctatcttgctttatttatatgtcaacgatgataattattatattatttctcattgtttctacgacgttaccttctttcagccagttattatcttgtcccggg

SEQ ID NO: 43753 - DNA, 267 bp, Glycine max
  Clone ID: PAT_MRT3847_139508C.1
gatgcaacgaaatcattcatgaaccttaaactccagcttttggaagaactagtttttgacgtgatatcaaggtctctatgacgaagtggtccagatttttctatccttggctcccccgttctcctaagttgaatttcagacatgtattctgagaaaatatttattccccggacaaagaaaaaccatcctgtcttttcacgggcacaactggtgcaggaaagcatctgtggcaatgataagaaagcagtgtaccagcatattgtcaag

SEQ ID NO: 43754 - DNA, 410 bp, Glycine max
  Clone ID: PAT_MRT3847_139509C.1
cacgcgttcgaccacgcgtacgaccacgcgtacgctagaaatattgtgatgaaaatgaacgtactgggtttcttggctgctacaattggggtagcgtggcaatgccatgcgtacgatatgttccctatccgaatgaacactggctatggtgcccgtactttcgaggtgaaatgcgcacgttggaggcttgctatggaagcacacaacatctttggctttgagaccattcttgaagagtgccttgaagcaactcaggaatacattcatggcgaacaatatacatcagacttcaaaacacttaaccaacaagcttactcttatgccagagacctctaagtccattctaaggacacattctgtgttcaatatacatggcacctgcatttcataatattcatactgcatataac

SEQ ID NO: 43755 - DNA, 480 bp, Glycine max
  Clone ID: PAT_MRT3847_13950C.1
aattcggctcgaggcgagaagacgacagaagggggaatagaaagaagggaaaaaatggcgggcaatctggcagtaatagaacactccaacaagaactcggcgaggctgagagagcagtgggagatctgcttcgctcgcttcatcccctatcccactctccctccctcttctgatctccttcccctccctcctcgcctccgcaacctctctccccgcggcaactggatctcctcctcctccgtcgccttcctccgcctctccctctcccacctcctcctcaccgtctccctcaacgccgctctcctcgaggagcactatgtgacgaagctgcatttcacgtggcctcaagtgtcgtgcgtctctggataccctgccaggggcatcaggactgtgatcgttagctacagagattccctaggcgagattcaaaagtttgctatgcgatttccaacaatctatgaagcagggtcatttatcaat

SEQ ID NO: 43756 - DNA, 234 bp, Glycine max
  unsure (1)..(234): unsure at all n locations
  Clone ID: PAT_MRT3847_139510C.1
cagaaagcaagctcatcntagagttttaaaaatggcagcagnctcctnccatggctctctcttccccatccttggctggcaaggcgtgaagtgggcncattcancnccacgaagtcgggagggtcagcatgaggannacgtcacaaagccgggntcctcnggaanccatngtacggccagaccgtgttaaanatnggnccntatntgcnaacccnntnctagtcantnnnnnnt

SEQ ID NO: 43757 - DNA, 277 bp, Glycine max
  Clone ID: PAT_MRT3847_139511C.1
ggcacaacagtattcatcctcaagttggagctgcaattaatccaagatggcagggcttgccttgtgcctccttgtgatgttgagctatgcaagttcttcatatgctcatttgttgatgaatcgaacaagaagagggttcatggtgtctaaagaggcacataggacacaactgactgataatggacttgggcatacacgccacatgggatggaatagatggagccatgtagcctgcgatataaacaaagacttgatttaggaagcagacgatgctatg

SEQ ID NO: 43758 - DNA, 171 bp, Glycine max
  Clone ID: PAT_MRT3847_139512C.1
actcgtccgcccgcgcgtccgataaggcctgcgcttagttgataagcataactgggtgaggaagagaaggtgagattgaagaagatggcgtccagcggagcgttaccgttttggagggcgactgtgattacgtacataacatactctaacatatgcgcgaaatctctcaag

SEQ ID NO: 43759 - DNA, 284 bp, Glycine max
  Clone ID: PAT_MRT3847_139513C.1
gggcacgtgtgaggaacaaggtccgacactggctggtgacatgcaagggcctccctagctgccacgtcgtgagcaccagcattgattatatggggggggccagaccctactactgctgcaggatacacatgaagataagaggggcacgggtgatgactggacgcaggctatgaaagaacgaaagggggaacaactagatactgggctttgcagtggaagagtgcacgaactcttgaaggcacacagagatctaatatagggatccaacaccttcgggcctaacg

SEQ ID NO: 43760 - DNA, 239 bp, Glycine max
  unsure (1)..(239): unsure at all n locations
  Clone ID: PAT_MRT3847_139514C.1
gtngcatgcacgcgtacgtaaagcacggaattcagctcgaggnaaagacnagaaggagtttctgtgncgnnancagcgctngnctctnantnntnnnctgncgctgcaancatgttngatgactgnggggatnggctctgangaggaggantgccnatcgacctcacgctgaccagctgcgccaccaatgccagcatntgtggggacgaggcacgntnnnntgcgcaccganaaagcgg

SEQ ID NO: 43761 - DNA, 629 bp, Glycine max
  Clone ID: PAT_MRT3847_139515C.1
tgaaaacaccttcttctgcagttccgcactgcatttcattccaattccaatcaataatcataatcatcatcagcacaatacccattttccatggcaaaccctaaaacgaaaagtcaccattcgctaggcggcgaggacgatctcgactcgaccgaatcgcggtgggtcttccaggaggacgaggaggatccctccgagatcgaggatttcgacgccgccgatttgcgccaccaggccatgtttgattccgacgacgaggacaatgctgaacagagactcgtccgcaccggtccccgtatcgattccttcgacgtcgaagccctcgaggttcccggcgctcacagaaacgactacgaggatgttagtgtgggaaaaggaattgtcttagcttttcaaactctcggtgttgtgtttggcgatgttggaacaagtcctttgtataccttcagtgttatgtttaggaaggctcctattaatggaaatgaagatattctcggagccttgtcgcttgttttgtacactttaatcctgattccgttagtgaagtacgtccttgttgttctgtgggccaatgatgacggagaagggggtaccgttgcatttgactcgttgatttgacaaaatgctaa

SEQ ID NO: 43762 - DNA, 423 bp, Glycine max
  Clone ID: PAT_MRT3847_139516C.1
gtagagaaccttcgtgtgaggtaactatacttatagctaaaatccacacgacttcttcctctcttcccgtctttctctctttctctctctccctcgatctaattcctcatgttatggtttgtaggtcaacagtaacaataccatgacccctttttgaatcctccatattcattccaatatggcttgtctttctttagggtttggatttggaggcttgtggtcaactaagaaggcaccaactgttttaatttttgtgtactaagagcctgtttttgtttttctgtagagcctcagcaatctggcctgaattcaaggtaggtcagccacaattaactgatccatggagttgatgcaacaagttaaaggtaactattctgatagcagggaggaagaggaggctgcaccatagattattacaatcac

SEQ ID NO: 43763 - DNA, 283 bp, Glycine max
  Clone ID: PAT_MRT3847_139517C.1
attaattaaaaaaatttactgtgcgtattaaaaagttaaaaaaatttttttaaattctactaaataaataataataatatgtaaaaacaaggagtgtgtcagtcttagagaagaaaacatgcaatgaaagatgcaactgtttgaacaattgttggacgccaaaatgtcttctgaatgcagggggttcttatacatttttgggatatgaaaagctaaaataccaatgtagagatttaggcaaggtttttatcttaccaatattttaacattgactcttatgacc

SEQ ID NO: 43764 - DNA, 286 bp, Glycine max
  Clone ID: PAT_MRT3847_139518C.1
gcgagcgggcgaccttttttttcctcatcaaatctcttccttctctgtggtgattttcaaagttcctaactttgctaacccgagatctggtaaagcgaactgaactagatgagggtgctgtacgcgctgatgctgcaactgcaaggcatgccgacggtatgaccgaaaagcgattgggtccacattcgcgacgggtggaacgactacctgaaacacgagtccgcgcggatataccaggtggttgacaactacccttacatcgacgtggacactgagctagcgggga

SEQ ID NO: 43765 - DNA, 518 bp, Glycine max
  unsure (1)..(518): unsure at all n locations
  Clone ID: PAT_MRT3847_139519C.1
ctgaaaacacatcaccgtcttagatttatttatcaagaaaactaggtgagtttcaagtgtttgcatgaaactccacgattaagtttaagcttaaaagttaaaatacatacaaaacctccaagaaagagaaaaagttggaatgagagtgcttagatttatttatagtcagatagactccactccaaaagtccagctttaagttgaagcttaagagtctctttttctgtttttcctttccttttccccccaaaaggaaggtatttatttgttgaagcgaaatcagccagcaactaggaccagattatgatcaaaccctgagagggcctgtaaaatttgaaatctctccaaggaatcaacacanaatggctccacttggtcagcagaacttcctaatccaagtctgccacttgtaccagagccccagacccacaatttccctttggacgtgagagcaagggaatgtgcacgccctttccaaaccgagacagggttttccccatccaatgcatcaatcaaag

SEQ ID NO: 43766 - DNA, 226 bp, Glycine max
  Clone ID: PAT_MRT3847_13951C.1
aaacaaaaagtcagaataccttgactaagatcccattaaaaagttcacaccaatttttttaatggattgccaattattcggcggctgacaaccctcttttaaaagtctacattcaaattcttaacgcattccgtgtttggatattgtttgtgtggtcatacacccgaaagaaaagaagtgaaaaacatttgggggggtcagagggccaaccaggcaaagtcttttt

SEQ ID NO: 43767 - DNA, 385 bp, Glycine max
  Clone ID: PAT_MRT3847_139520C.1
cccacgcgtccgaaaaaaaaaaaaataaaaaaaaaaaaaaaaaaaaaaaaaaaaaaaaagggaaaaaaggataaaatgtaaattgaaataaaaaaaaaaatgaataaaaactaaaaaataaaaaatataaatatgtaatatatatttgaccataataattatatatacctatctatagcaaaaacataactggcagtcatctacatggaccgaactgaaaagtcctttgttgaaggcaacttggattgtaactggtcataggaatcaatctttaagctttttgctgacttgaacattgcacaatttgaacctcatgttgatgttgcctttgcacctccctttctgtatgtcgatcaagtgtgaatactaatcagtgaacggattg

SEQ ID NO: 43768 - DNA, 628 bp, Glycine max
  unsure (1)..(628): unsure at all n locations
  Clone ID: PAT_MRT3847_139521C.1
agtttatctgagcaatcttaaggaacaaaactcatggacacttctcttggtgtctacatcaagaaagagacggaaataaaggagatataagtgagtgatatgatcggtgatgtgatttatataattggtgatgaatatgatagaagaaagagagaggctcgaggagagtgtcaattagctgttttgactgtttaagtgttcataaatcagcatcccaagaaaaaagatctttggacacctctactggagtctacaccaagaaagagatgagagatatgattggtaatgtgatgtaattgaagagagatagagggaaattaggagtatcaatcaggttttagactgtttaggtgtttataaattaacactccttaaggaaaaaaaaagcatggacaccaagagagaaataggaagagaggagatacaatgatttatgatgtaatgtgatagaagagagacatggagagaaattgaaattgggagtgtcaattaggcatttggattgtttaggtgttcataaatcagcactccaatcttgtatggtctgtacatttactaattttgctaacaanacaaataatggaagtcctaatattctccagttccttgatgaaatgaaggcctttag

SEQ ID NO: 43769 - DNA, 447 bp, Glycine max
  Clone ID: PAT_MRT3847_139522C.1
acgaggcatcacaagaagaggagcagaaagaactgagagtgtgatggcaggtggaatgatcaacgatggaaaaagcttcccaaggaggttctctgggcgtccaattccaaagaggggacaagtgaaggttgcaattgttttggggttggctcattcgcttgctgccatcttctcacgcactactacatcatgtgttgcacctcctcaccacctctcccactaggaccctcaacaaaagttttgtacagatttttcttttgtgcctcttgagcaatgacttcggtcagtgtcatttagctgaattttcataattttcttttttaatggattttccggcttctattcttcaagtggaacattttgtgatcggaattttatttaaacatcattgctgtccacaagcggaatctttaatttgaaataattgataggcaacccttcaacaaa

SEQ ID NO: 43770 - DNA, 510 bp, Glycine max
  Clone ID: PAT_MRT3847_139523C.1
gggaaaaaacttaggggaagcataaaaaaaaaaatttttttggtccccgggggtccccggggggggggcatttaaacaaggcccttcgggacccttgggtcaagaaacggcattatcccaaactacttttgcaaaaatttaagggggttgggttgggggggttttattttttggggcaaacccccccccaatttcgaccaccggtttaaattcattggcaggggggctttgggcgggcccaaaaggaatctttttcttcatctttttactttccccccctaatcccccttttaaaccccccccaatcagcccgggcccaattacccaaccaggggggggcttctcgtccaaaaccggaaaaccccccaaggcccccggttaaaaatcattggcaggggggctttgggccggcccaaaaagaatcttcttcttcatctttttacttttaccccattttcccccttataaccccccccacaatggggcgggtccaattacccacccaagggg

SEQ ID NO: 43771 - DNA, 325 bp, Glycine max
  Clone ID: PAT_MRT3847_139524C.1
aaaatatggttttctttatttttacatactcattacatgttcatatcactttatactgtttttggtcttgaaaggggcccccctcaaaaaggggcttgttttcacacaaaaaacaaaaatgcctcccaatatcatactacaaaaatttaaagttatgaaaaaaaaaatatgcctccctattattttttttgggaaaaaaaagccgatgttttagatataaaaaaccccacttggaagggggggggttgaaagaacaatttgcctcaaaataaggggcggggttaaaaatttggatctccccaggggaattctccacaatagagcc

SEQ ID NO: 43772 - DNA, 359 bp, Glycine max
  Clone ID: PAT_MRT3847_139525C.1
cttttacaaaagaaaccttttttttttcaaatatgatccattaaaaataattcgtaattaattatgagatcttcataatcaattatttaactcaataaatttcttttactattttttttatttttcttaaactaaatagtcttattttttactatatttttttttctatttttcatccaacttctttgttttctacgaaacatatatcatttgaatcggtgtaattgggtgatgacaatgattaattattgacttatttagtagagtgcaagacacatatttactatatatgaaaactaaccacatttattttgattaaaaaatgttcttatttatattttttaacataagatctaacc

SEQ ID NO: 43773 - DNA, 249 bp, Glycine max
  Clone ID: PAT_MRT3847_139526C.1
tggatttggaaaccagaacctagtggacaatattcggtaagaactgcctataacatgttgaaaggagtggatgttgaggaggataacatgtgggtgtttgaggagctatggatgatacgagttccacctaaattactattttcgcatggaggttattaaaggtgaggctacaaagacagacaaacttgaggaggagaagggtgacaatcaatgacacattatgcccattctgtgggaattttgaggaga

SEQ ID NO: 43774 - DNA, 1843 bp, Glycine max
  unsure (1)..(1843): unsure at all n locations
  Clone ID: PAT_MRT3847_139527C.1
gagtgaattagaatccaccttggcctagccagctagcgcttcttctctcgcattccgtggagatctagtgctgccaaacctcgctgaaaattagggtttcgtttcggaggtagacgaagatgttcggaagggcaccgaagaaaagcgacagcaccaggtactacgaaatcctcggcgtttcgaagaacgcttcgccggatgatttaaagaaggcttacaagaaagccgccattaagaaccaccctgacaaaggcggtgatcctgagaagttcaaagagcttgctcaagcctatgaggttctgagtgaccctgagaagcgtgaaatttatgacacatatggagaagatgctcttaaggaaggaatgggtggtggtggcggtggccatgatccatttgatatcttcagttctttctttggtggaagtccgtttgggtcaggtggtagcagtagaggacggaggcagagacggggagaagatgtggttcatcccctgaaggtctctctggaggatctttacctcggaacatctaagaaactctctctttcacgaaacgtgctgtgttcaaaatgcaatgggaagggctcaaagtctggggcttcaatgacctgtgctggttgccagggtactggcatgaaggtgtctattaggcaccttggtccttctatgattcagcagatgcagcatccttgcaatgagtgtaagggtactggagagacaatcaatgacagagacaggtgccaacagtgcaaaggagagaaagttgttcaggagaagaaagtacttgaagttgttgtggagaagggaatgcagaatggacagaagattacattccctggtgaagctgatgaagcggtatgttgagctttgatgctgacactgtaccagattatggaaaactattttttgagctattttttgttttgcagcctgatacagtcacaggggatattgtctttgtcctacaacagaaggaacacccaaagttcaaacgaaaggcagatgacctttttgtagaacacacattgtctcttactgaggctctatgtggcttccagtttgtgctgactcacctggatagcaggcagcttctgatcaaatcaaaccctggggaggttgttaagcctgagtcattcaaggcaataaatgatgagggaatgccaaactaccagaggcacttcctgaagggaaagctttacattcatttctcagtggaatttcctgataccctgagtcttgatcaggtgaaggctttggaggctgttctgccatcaaagccaacatcacagttgtcagacatggagctggatgagtgtgaggagaccacactccatgatgtgaacatggaggaagagacaaggaggaggcaacaagctcagcaggaggcatatgatgaggatgaggatatgcatggtggtgctcagagagtgcagtgcgctcagcagtaatgagccacaggagcgctagagtagacatgtgatgatctcgatcatcttattttttagccgtttgtgcgggtctaaacatatttagtgtttgatatctcagacgattttagcaaccaaacactgtagcattattgtccaagaaattatttcacaagacatcctaatacaattttttttccttctgatggcattggtgtttctttcattttttgttttgcaggaaaaaaataattttatctgtttttaaatatagtttaatatgcggtttacttatcatggaattagatgatgaataatattcttatttatttatactttattaaggaatagggaaaatagtgagtttaatttaaatggatcgattcatatatgagaagtctaattttnnnnnnnaaa

SEQ ID NO: 43775 - DNA, 225 bp, Glycine max
  Clone ID: PAT_MRT3847_139528C.1
ggggcgcctagcttgactggggccggcccgtccttttttttttttttcgaaaaaccacatgtgactctcattttagaggtgatatcagatacccagggatccctatatcgtttatactaaaactaaggccatgctttgtcctactctttcaggctaaatattaatgagcggtaatgggatcgccccatgccatcttcgtgatctatgaatattacaggaatattt

SEQ ID NO: 43776 - DNA, 419 bp, Glycine max
  Clone ID: PAT_MRT3847_139529C.1
ggctcgagctccagctatatcattagctgagctgtctgttggtaaaacgcgttataggggctccttgaacacacctacaatgacaaccgacagcgtgtcagttcacggaaggttgcatgcatcacctgttgcgagtgccgcagacagggaccttatgatggggtagctggcactggaaccatatgcagattggcctataaactatgacctacggcgatgatgcccgacatttctcacgcccgtgtgagaagcacatggatcagcatgtacaagaacatccgggatccacatggctgaatagtatgagaaggctcgctacaccggtgcatcttagagccttggaaggttgttatacgagcacaaatacctcatggaggaagatgtattagtacttgctgatgagttaggatcgacagaga

SEQ ID NO: 43777 - DNA, 309 bp, Glycine max
  Clone ID: PAT_MRT3847_13952C.1
tcgtactcacaccatgctagccaaagatctcaatgacggcgactctactctacagatggacgggaatgaacattacgacattgtgatcaatgaacttagaagatcccctgtatacatgatagatatcattaaattttaatatagataacttctaccatatatgtacataatatggttgacatatatgcatagaagagtcactgataaatgtactcttgattattaatagaacaccgcagactccttatgatgggtgtggacatttgatcataccaaatgactaatagtggttgcatagctatctatacc

SEQ ID NO: 43778 - DNA, 254 bp, Glycine max
  Clone ID: PAT_MRT3847_139530C.1
ccggaataacagcgtcgacccacgcgtccggttaaaccatgtttaaaattttattaatactactacctaactagcaaaaaatcttgacccagattttaatttctgtcatgggttgacgaatgagatctgaagcgcattaatgatcaattgttttattgttaatcaatcactgtaatgttgacccttggatcttttttccttactctcatgtgctgggggggctcccctctttcttttttttttggcggtgcaga

SEQ ID NO: 43779 - DNA, 2189 bp, Glycine max
  Clone ID: PAT_MRT3847_139531C.1
aggtgggtatgagaggaacaagaatttggattgtgggagtgacaagtttttgcatgtaaagaacgtgaagctgccggagacaacctatgtgtttgcgaacgggagcatgaacctaagggagtgtcaggatttgtgcctcagggattgttcttgcactgcttatgccaacattcagatcacaaacggaggaagcggatgcgtgacgtggagtggtgaactcgaagatatgaggctgtatcctgcgggtggacaacatctctatgttagattagcagcttctgacgtagatgacatagtaggtggctctcacaagaaaaaccatacaggtgaggttgtaggaattacaatttctgcagctgtaataattttgggattggttgtcattttctggaagaagaggaaactgttcagtatatcaaatgttaagacagcccctagaggttctttccgaagaagtcgggatttgctaacgagtgagaggatgttttcaactaatagagaaaactcaggagaaaggaacatggatgacatagagttgccaatgtttgattttaataccataacaatggccacagacaacttctctgaagcaaataaacttggacaaggaggctttggtattgtttacaggggcaggttgatggaaggccaagatattgctgtcaagaggttatcaaaaaactccgtgcaaggagttgaagaatttaagaatgaggtcaagttaattgtcaggcttcaacatcgaaatcttgttcggctctttggttgctgcattcagatggatgagaagatgctagtgtatgagtacatggaaaatagaagccttgatgccattttgtttgacaaaacaaaaagatccttactggattggcaaaggcgattcaacattatatgtggcattgctagagggctcctttatttgcaccaagattccagatttaggatcatccatagggatctcaaggcaagcaacattctacttgacaaagagatgaacccaaagatatcagactttgggatggctagaatttttggcacgaatcagacagaagcaaacacattgagagttgttggaacatatggctatatgtcccctgaatatgctatggatgggaacttctcagtgaaatctgatgtttttagctttggagttctagtgctggaaattataactgggaaaaaaaatagaggattctattactcaaatgaagatatgaatcttctagggaatgcatggaggcagtggagagatggcagtacattggaactcattgattcatccattggcgattcatgttcacaatctgaagttcttagatgcatacacgttggactcttgtgtgtccaagaacgtgcagaagataggccaacaatgtcttcagtgttattgatgctgagtagtgaatccgcaataatgccacaacccagaaaccctgggttttccatagggaagaatcctgtggagaccgattcttcttcaagcaagaaagatcaatcatggagtgtgaaccaagtcacagtcacattactagatgctaggtagtcaaagaagcataacatcactaacacatttgtatattcctcaaaacataaaaaaatattctgtattctgtaaatcttccttcatctgatatttgcggcatctttgagatctaccttaatcttttttttgtttttgatcttaaccctctagttcatcaggagaaagaaactctaactaatccagagttcaattgggaggtaagtaaaacttgatcaagaattgtttctgctaaggattgaacttggatactacttaaacgattcaaccttaccattggcacattaactatttgttgtccaatcacttggttccttgatcttgttttgatgtaatatatgtaagagatacctttagtgaaaagaaaagcacactccttagcttaaggcttgaaattactttcagccgataatatgtagttttgttatttactcatgcggttgtttgtatgtctagcagtcgcagacttggacactgtcttaaactgagtcaggtttataatctaattggatttaatgctgagtttaaaaatggtgtggcttacacttttgttgaaatataagtgtgaggtaaagtcccattggtgtaatatctctctgcccttatgggcacaggtggtgttttcatttttagggaaacagttactatt

SEQ ID NO: 43780 - DNA, 363 bp, Glycine max
  Clone ID: PAT_MRT3847_139532C.1
ggaacgctggcacgtaccggggtcccgttccggggttgaccgacgcactccacgcgttctcgtgtgtgatggaagagatagacccctgcagaggggtttggaaaggcaagcgaagctgctacatctagcgtcagcacttttcactaccatacaacaacgactgggaagtaccaacgttgatataataccgtgccgacggcgccaccacagccttggtagactggcgtcaccgacgggcgactgagactacacccagatagggaacctacctgaggtcaatgcatgtcggtctctgcgtaggacacgtcagatgacacatggacagccagtgtctgaactggtaccccagctccatacacttac

SEQ ID NO: 43781 - DNA, 383 bp, Glycine max
  unsure (1)..(383): unsure at all n locations
  Clone ID: PAT_MRT3847_139533C.1
gcaaaaaaacaacagaaagggggtctcgggggaagtgtaaagcaagcgaaaacccctatcgggcgccctgcgnttcttttgttccgtgtttttgcattcaaggatgnggagtctcanagtgaaagcaacgcacctttgttgtcaaaagttatgggggtcgtacttggatcccagaggacaaagttgacccangttagaagtgaaagttttttggacgatcaagaaccgtcacatcatgaagaatgtgaaaagacctgtgagagaaggagacattctcaccctactcgagtctgaaagggaagcaagaagattgcgctagatggtctcttttttttggcttgcctccaaattcgaacaaaagcaatatttttcttgatatttat

SEQ ID NO: 43782 - DNA, 354 bp, Glycine max
  Clone ID: PAT_MRT3847_139534C.1
cgcgcacccgccgccgcttgctgtctcctctctcgcgcgcaccggtgttcccatcgccgtctccttatctccctcgtgcagccgctgttgtctcctctccacccttgtacccgccgccgcctcctcttcagatttcctcttcttcaccctcgctgtctcctcttcaccctcgctacggcctcctcaaatcgttgagacaactagtacagttgagacaactggtgcgaggtcggacggcggggaccatgcgaacaagctcgtgctgccttctcggctcgtgcaccctcatctcaagaagtgaatcgcctcaggtgatacacaagggattttcatcaacaagttggtcgccagaag

SEQ ID NO: 43783 - DNA, 443 bp, Glycine max
  Clone ID: PAT_MRT3847_139535C.1
gcttcttaaaccactactgtggaactacgttgccgcatctatttttacaaatatcatgacctcgccactcttgttttatttaataacatatcgaggccatttactttgccacaatatgatttctagctccacttcaatactcttactaataccaatacattttttaatcacaactactatgatgattaatctgattaccagttctgtttctatatattccctattcttacacagttgatttttctatacaaatagtttgaatttcaccttaaaacttttatgatataactaaatcatttacatatttgactattcaaccagtaactattcaaatacatttacaacgttactcatcctactatttttgttttaaatttaacctattctctatccaatccaacaatatcctatgatttatttcacgcccccaacctctcctcttt

SEQ ID NO: 43784 - DNA, 405 bp, Glycine max
  Clone ID: PAT_MRT3847_139536C.1
acgagtctaaggttactttttggtcttgattcaaagtttgtggtggtttgctctcacatattatctagttggcaggtggatacttttgagggctctcgctccactcctgagggtgatttccttgatcgctctgctctatcggctcaatctggaggtcatggccatggtggaggtggacacttcacgtgctatggctgtcagtaaggggagcactatgatacaccagtgtgcacgttcgtctcaaaatcagcagtactcacaaccacaggctcatgcagtgccgcggcctgacattgccactcaatcagaggacaaacctaggtggttatgactgatgacgagtcgtctacaccttcttctacttcttcttcttcaaccacatttgtcctacaccttcatctactt

SEQ ID NO: 43785 - DNA, 753 bp, Glycine max
  unsure (1)..(753): unsure at all n locations
  Clone ID: PAT_MRT3847_139537C.1
gtaaaattgtgtgtgcatatgtgttggtgtatctgcatgacaccaaatcagtggaagatactcacaaaacctctacctcgaactttctcatttacggacgcgtgggcttgggagaaaaattcatatcaagtggccatgatgggggttgatttaattttccttttttcttcctctctcttcatctcctatatctctcttctctgcttcaaaaaaattttcaagaaaaaaatttccctttattagtttctcttctctacttctctgttaggttcaagagaatccaaattcccttgcctttgagttttgagattggggataagaattgagaaggactcaaactgcacgtgggtttttcagaattctgatttaggtgtaaggtttcaaatacaagaaggaaaagaaacactttgagaagaaggttaattatacatagaggttttttttttataagatatggcagcacctttttctgcagcatcgctctttgcaatcagagaagaggatcagaatcagatgaagcagcagcattcctcaacaccatcatcatcaaccactccagctgcaccaccaccccagaagaaaagaagaaaccaaccaggaacaccatatccagatgctgaggtgatagcactatctcccagactctaatggcaacaaacaggtttatatgtgaagtgtgcaataaagggttccaaagagagcanaacctacagctacacagaagaggacacaacttgccttggaagctaaagc

SEQ ID NO: 43786 - DNA, 373 bp, Glycine max
  Clone ID: PAT_MRT3847_139538C.1
ttacgtgacactatcacaatagctatgacttcacatgcactcctacctaagctcggcattccgatcgcggtcctactggcataccaacaatcaggtctagtacccacgaatagaaccgtgtgcaaatggtcagcaatagggccggatcgcgtgaacgggctatatgctgacttctagccataggttccgatccggtgacctgtatctcaaatatcgacgctctatgatatatgtggctaaagcacgacaacgactcttaggactctctgtcgcatttcctgtgagcatgctagtacgctcatatgtattgacgcttccgattacgcgttacctgagtctgtatatgcctttggcaagctattagctatcccat

SEQ ID NO: 43787 - DNA, 463 bp, Glycine max
  unsure (1)..(463): unsure at all n locations
  Clone ID: PAT_MRT3847_139539C.1
agctnggatcctctagagcggccgctcgcnnnnctttttttttttttttttttttatactaatacaaatttaaataccaaaaaaactacagaggtcttatcattttattatacctacaataactcatgggnaattttaaaacatgaattctatcattatctacaaatttttacattaattccacatntattttattcatctaattggataaggcttttgttgttaaaagatttattatatgtcctattatctccaatttgnnccctatgattataaaaagtgtattatccccatatccatgtaaaatcatatgtatgtctccattcctactattttcccttttatttcccatgatttctccacaaattaaaaaaaatacaacactttcaatgttttattatctaaatttggaaaaaaattgtaactatttaacccaaatggttttttctacaaactaaaaatt

SEQ ID NO: 43788 - DNA, 248 bp, Glycine max
  unsure (1)..(248): unsure at all n locations
  Clone ID: PAT_MRT3847_13953C.1
gctctatgatcaacccttaataagtgcatccaaaccattgatgccatgggacaatctctcataatatgaagaattttctcatccacaacttgacagtctttgcangntagcatgctaacccccatgaagcaatacaagtattggtcaaaagtctagtatgctaaagctggcacataaagattctaattncttgaagagatttaggattccatatgagtcttcactgatccgactgctccagttgatga

SEQ ID NO: 43789 - DNA, 139 bp, Glycine max
  Clone ID: PAT_MRT3847_139540C.1
agaagggggttcttttgtgtgattgtatcttgaagaaaaggagaggttttttttaaagtgaggtctggccatgatttcatgcatctaattggagtgactgtatagcctagatcactattgtgataaaccccatttcacc

SEQ ID NO: 43790 - DNA, 1276 bp, Glycine max
  Clone ID: PAT_MRT3847_139541C.1
gactacgcgtcagcccacgtgattttctctctcgatacaaaaacacgttccaacatctatctcacttcttagttctttgtggctctttccatgatggcctctcctacatctccaagagttctcttcttgagtctctttgtaactctttccatgattttacatttgagttcagccaggaagttgtctgagtcagacccccaattgcagttccaataccacagaggccctctcctcacaggcaaaatctccgtaaacctaatttggtacggtaagttcaaaccttctcagaaagccattgttgctgatttcatcacctctctctcctcttccaaacccctcaccgcccaaccatccgttgccacgtggtggaaagccaccgacaaatactacaaaaactcgttccccaaacttgcactctccctagggtcccaaatcgttgatgaaaactactctctaggaaaatcactcaccaccaaccaaatcttaaaactcgcgtccaagggtccacagagaaacgccatcaacatcgttctaacttctgctgaagtggcagtggaggggttctgttcgagtaggtgcggaacacacgggtcctccgtgggggcgcgtgtgaacggtaagaggtataagttcgcctacatgtgggtgggtaactcagagacacagtgccctggtcaatgcgcgtggccgttccaccaacccatttacggtccccagaacccagcacctttggttgcacccaacaacgacgtgggtctcgacggcatggttatcaacgtggctagtcttcttgctgggactgtcactaacccttttggaaatggctactttcaaggacccaaagaagctcctttggaagctggttcggcttgcactggggtttatggtaagggcgcgtatcctggctatgcagggaatctcttggtggaccccaccaccggtgccagttacaacgcgaatggggtcaacggaaggaagtatctgttgccagctcttgttgatcctaaaacctcatcttgttccacgctcgtgtaaaactacgactcaatgttttcatctatgtttagttgttaggcactacgagagattcttttatttgttcattcttttgttatagctttaaaacaaattattgtcttaactcttaggaatgttattacccatttgaagggaccaaaataaagtgatattcagatacttaaaattcaagttacatgtaatttttattcatatatatactatcatggtcattcatataaaaaaaaaaaaaaaaaaa

SEQ ID NO: 43791 - DNA, 441 bp, Glycine max
  Clone ID: PAT_MRT3847_139542C.1
tgttttttttttttttttttttttttttttttttttttttggccgggcaaggagaaaacaatttttttttttttttccggggggaaaaaagatgacttggcttttcaagccccacctatttttttttccccgcccccaaaaatcccaatcagattcgaatcaccggctttttttttacaggtttgctttcccaggggttttcaaaaaaaaaagctcatgctttaaatgggggtttacggggggcatcttcctggtggcaaaaatgattttgaaaaaaaatgccccgcccctggtttcaagggatagtttaacccccattttttgggtggcatttccccctttttggtaggttttccaattccgggacaaaaaagggattcaacaaggggtccctacccgggggtaaaaaaagaagtggaaccttggatcggccccctaaaa

SEQ ID NO: 43792 - DNA, 477 bp, Glycine max
  Clone ID: PAT_MRT3847_139543C.1
ggctcgagcttgtaccattggtgtgattcgaattcacagggatactgcaactcggaggacgaaatcagctagcattgggacaactgcagagattcgacaatttgggcgtctgggggatggttctctgaatgtggttacccgtggacaacaacgatttcgcctaagacggtcctggactgatgtggaaggagtgccttatggagagattcaagttattgaggaagatctgccactcagaattccaagggatgcttttggcaaatcagcaccattgagtaatatgccctgtagccaaggtgtctcacataatttgtctccaaagtattcccatgttaacatgcaaaggtcaaaaaatgaggaaaatgattcagaaccaaattcagaagagagttttgagagtgagctctcactgatgggaaggaaaatccatctattcagttgtggctccaagtatgtgcatgatactatggatgaatc

SEQ ID NO: 43793 - DNA, 818 bp, Glycine max
  Clone ID: PAT_MRT3847_139544C.1
atgctttgatttccttttattaggacagatttttcttactgtatagctatattctagcaagtaattatcaatacaagtttatataatgtgtagcagtccctcattagctgtactgtaattattatagatatctaccagatttcagttcttattttaggtatgtaatcatgctgtttggtctaatgtaacacctcgtatggtttcaaatcatcaaagtgatagtattcagaaattattctgttgtaacgtgtgcagcatgtgcttaatgtgtttatattttctttcctttttttgtagatttaatttgatttattccttattaggattgtttaattgagcttgattttatgaatagagccgtataaatagacccttaatatacactgaaaatcaagaaataatatttcagtgattttccttatatttcaagtcatttctttatgtaaattactttagtacaactgtaatttatgaatttaatattcagacattattctttcaagtaggtattaactcctatctaatgggattctcttttccgctgacatcagccatcatctgtaaccaatctcatgtatccaatcttcacagtaggtcattgtcccttgtgtgcccagtctttataactgggcactttttctgttcaacacgtataaagtctagtctctctagcgaccaaatcataagagccaggtaactttaggcttttattattttgtcactgttagaattagtggtagaatccctaattaagtagcttattagccttagaatcagcattcatatttattttgatttattggaaatatatattatat

SEQ ID NO: 43794 - DNA, 251 bp, Glycine max
  Clone ID: PAT_MRT3847_139545C.1
gtagagctctagcgcgctcatattaacaaggaacaaccactgatacattgcatgctaaccatcacaactacaagcaaacccaaccacattgagctagatggaccgacatgaaagctgcactactgcgcccatttacgggagtccagcatccgtatgagcatctgtgagagccaccccagacgtgaatctgctcatgcccattcgtgaagcatctgcggggaattaaaccgttggtattgacattaccagtg

SEQ ID NO: 43795 - DNA, 262 bp, Glycine max
  Clone ID: PAT_MRT3847_139546C.1
tgaatatggcattttgctcatggagaacggttaatcccatcttttcttgttaccctttgcgttaaagtttctaaattttaccctttcatggcagtgggaagatcgcatgcagagaggactttgtcgctatgatgttaccgcctgtgaaaccaaggtctgttttcttttgtttttgtcttcctatgcatagatatatggattgtatgactcctgagtttgatgtgttttgtggtgattttgtcgtaggtgatcctggtgaata

SEQ ID NO: 43796 - DNA, 410 bp, Glycine max
  Clone ID: PAT_MRT3847_139547C.1
cccacgcgtccgcccggtcagccttggtctgtccccgtaaggaaatggccggggagtttcaggaaacccaggcgccgttgcctcagcggagcccgggctgacgaggcagggcagcgggttaaaccggagcagttccgcgcggggtggggaggccatggcgtccggcagtaactggctgtctggcgtgaatgtcgtgctggtgatggcctacgggagcctggacttaaaagaggagatagatatccgactgtccaaggttcaggatatcaagtatgaacctcagcttctcgcagatgatgatgcaagactgctacagctggaaacccagggaaatcaaaattgctacaactacctatacaggatgaaagctctggatgctatccgtgcctctgagatcccatttcatgctg

SEQ ID NO: 43797 - DNA, 482 bp, Glycine max
  Clone ID: PAT_MRT3847_139548C.1
cttttcctcttcctcccattgaagcattttttcacaagcccgtgattttttcgctatctccatcatcaaatgatccgatgctgctagatcgaatttgacaaaacccacttcgtgtctgatcgaagcaacaactgggttctgtctgaattttgagataagatggaatcggatcttggcaagctcttcattgggggaatatcttgggacactgatgaggaacgtctaaaggaatattttgggaaatatggggaggtgatagagactgtgatcatgagggatcgagtaaccggtcgcgctcgcggctttggttttgttgtctttggtgatccttctgttgctgagagagtcattatggataagcacataattgatggccgcacagttgaagcaaagaaagctgttcctagggatgatcagcaaaacattaataggcaatctggtagtgcacatgtgtctcccggtcctggacgcacaaaaaagat

SEQ ID NO: 43798 - DNA, 333 bp, Glycine max
  Clone ID: PAT_MRT3847_139549C.1
cccactcgtacggtctaacgtatccacaaatcacggctattgattctattactgctgatccggggaagtgcaatctacctgtctatacttgcttagtgcttatagaaattgacaatataccagtgctaaaatccatattaagtgatactatatcctattatgagtgagagatccctaatcgaaactcaacttacctgccaaggatcatctatggctacaaatgatggtgaattcctacaagaaacgatagggatacctgctcaacattaaggatcagactcataggttgagaaacatgactcagatggctcttattataccagatctgcttat

SEQ ID NO: 43799 - DNA, 1980 bp, Glycine max
  Clone ID: PAT_MRT3847_13954C.1
ctcgggccggggtggtgggggagtggtggaggaggaatacaccaatgaaatataggcaatgaaatgaggcgttttgactggcctttttggatctgatcgaatccaaaccctaatctaatcccacaagcctattagtctctctcaatcgaagaagcgagcgagattgtgtctctctcccaggccatgcgaccaccctgttcctccgccatcgccctctccagagaggattcctttttcgttttcgccgatttctccatcgattccaccagccatgactgccgacacccacgccgctcctaatatcaatcccaagggcctcctctgcaatgccgccgccggtgcttccgctggggttattgctgctacatttgtgtgtcctcttgatgtcatcaaaactaggtttcaggttcacggtgtcccgcagctcgcgcatggaagtgttaaaggaagcataatagttgctagtttggaacaaatatttcacaaggaggggttacgtggcatgtaccgtgggctcgcgcccactgtgctggctttgcttccaaattgggcggtttattttagtgcatatgagcagcttaagagccttcttcattctgatgatagccatcatcttcccattggagctaatatgatagctgcttctggtgctggagctgcgactaccatgtttacaaatcccctttgggttgtcaagactagactccaaacccagggaataagacctggtgttgtgccatataggggcacactatctgcattgaggagtgcacatgaggagggcattcgagggctgtacagtggccttgttcctgctctggctggtatcagtcatgttgccatccaatttcctacatatgagacaataaaattttatttggcaaatcaagatgacacagcaatggaaaaacttggtgcacgtgatgttgcaataattgcatcatcagtttctaaaatttttgcatccacattgacatatcctcacgaggttgtacgttccagattgcaagaacaagggcatcattcggagaaacggtactctggtgtgattgattgtattagaaaggtttttcaacaagaaggtgtacagggtttttaccgaggttgtgccaccaaccttctgaggccaacaccagctgctgtgatcacattcaccagctttgaaatgatacaccgatttcttgtttccctttttccttctgatccacggcctcatattttgtgacgattgatcttggtggtcatctgtcttctgtagcagttagattccaaaaaaatatgttgtttgcaggttgtacgttccagattgcaagaacaagggcatcattcggagaaacggtactctggtgtgattgattgtattagaaaggtttttcaacaaggtgtacagggtttttaccgaggttgtgccaccaaccttctgaggacaacaccagctgctgtgatcacattcaccagctttgaaatgatacaccgatttcttgtttccctttttccttctgatccattttgtgacgattgatcttggtggtcatctgtcttctgtagcagttagattccaattcataagctagtccagctgagtaatccttctcttggcgatgcagatatcattctttgtgacttagttgtttatgtatggtagatccccattatattccaacctagcaacctcaactgagcctggtttccctggtcaaacttgtaaatttgagtgataacaacgatgaagatgataaagtgatatgagatgtcctttgcttgcttattttattttgaaactgctgaatcctgtaaaacatccagcacgatctggatttgctgtattgatgagaatcatgcaatcagcgaatctaaattgttatacgaagataagacagtttatattttgttttggtaaattggacatggagaacacatttatgctggaccaccataaatcggctaactaacatacacatgcatgcaaaaggggtggcc

SEQ ID NO: 43800 - DNA, 697 bp, Glycine max
  Clone ID: PAT_MRT3847_139550C.1
agggagccaaaatgagcatgattcatatcacaccaacatagtagaaaattataaaagtagggacacaatgatctctatcagaaacagaaatttagctaggtcccatcactgcccatccaaataacatgtatattgacataatgcttagcaaatctataatgaaaaactcactgtgcggccatcaattatgtgcttatccataatgactctctccgcagcagaaggatcagcaaagacaacaaatccgaaaccacgagcacggcctgttgtccgatctctcatgatcactgcctctatcacctctccatatttcccaaaatattctttgagacgttcgtcatcggtgtcccaggaaattcccccaatgaagagcttgccaagatccgattccatcagttctgtcatcaaccatgcccagttaaccatcaatcactcatttcatcaaacaaatccaatccatccactcttattgaatcaaaattctcatgccaaaccaaaacaaaacaacataacatgaaaaattagaaattagaaattccaaacacacaatctagattctagactattcagtgatgggcaaagttccagtcccagaaccaatctaaatgcatagctgattgaataatgcacaattgagctcaaccccagaaagattcaatttttcaagagcaaaaacaagcaaaacgatcagaaatgc

SEQ ID NO: 43801 - DNA, 1071 bp, Glycine max
  unsure (1)..(1071): unsure at all n locations
  Clone ID: PAT_MRT3847_139551C.1
nnnnnnnnnnnnnnnnnnnnnnnnnnnnnnnnnnnnnnnnnnnnnnnnnnnnnnnacacagccagtcctcatcacacctcccctcctcagcccgtgcccgcggccccgcacccgctgtccccctgatccttccccggctttggtttggcatgaattttgattcaataagagtggatggattggatttgtttgatgaaatgagtgatttggttccctgggcatggttggccaattgaaccagagaaaaaagaaaaagattaaggaagtggaataaccaagaacaagagattttaaaaaaagaaaaacaaattaaaaaagcaagagagagaatagatagaggatgatggtgagcacatcctctgtttccattcccagtttgttcttttcctcttcctcccattgaagcattttttcacaagcccgtgattttttcgccatctccatcatcaaatgattttctggttcgggttttgattgatgctcggaagatccgatgctgctagatcgaatttgacaaaacccacttcgtgtctgatcgaagcaacaactgggttctgtctgaattttgagataagatggaatcggatcttggcaagctcttcattgggggaatatcttgggacactgatgaggaacgtctaaaggaatattttgggaaatatggggaggtgatagagactgtgatcatgagggatcgagtaaccggtcgcgctcgtggctttggttttgttgtctttggtgatccttctgttgctgagagagtcattatggataagcacataattgatggccgcacagttgaagcaaagaaagcgtttagggatgatcaattaataggtctggtagtgcacatgtgtctcccggtcctcactcagtttttcattatagatttgttaagcattatgtcaatatacatgttatttggatgggcagtgatgggacctagctaaatttctgtttctgatagagatcattgtgtccctacttttataattttctactatgttggtgtgatatgaatcatgctccttttggccccctaaaaaaaaaaaaaaaaaccccccccccacc

SEQ ID NO: 43802 - DNA, 2208 bp, Glycine max
  Clone ID: PAT_MRT3847_139552C.1
ccgggtacgacccaccacgcgtccgctaactcgttattccctttcccacacccaacttcaccaacacaaatggaatatggaaaattgggaccctctgacccgggtggctcctcacgccgctccactgttcctctcaccaatccaacctcttcttcttcgtccgccagcagcaaaaagaaactcatcatgctctctctcctcgccgccgtcttaatcgttgccgccgccatctccgccgccctagttaccgttgtccgctctcgcgccaccagcaaccaaaacgggccccacctcgcccacaatcccacacaggcaatttccagaacctgcagcaagacacgtttccctactttatgcatcaattccctccttgacttccctggctccaccactgcctcggagcaagacctcatccacatctccttcaacatgaccctacgccacgtaagccgggcgttctacgcctccagcggcctctcgtttgccgccacaaacccaaaggttagcgcggcttacaacgattgcctcgagctattggaggagtcgatggaggcgctatcacggtccctcgactccgtcctctcgccttcggcgttatccggcagcaccgaggtcaggcccgccactgttggatccaccgaagacgtgatgacgtggctcagcaccgcgctcactaatcaggacacgtgtgcagaggggctccaagacaccagcgggagcgtgaaggaccaaatgattgataacttaaaggacttgtctgaactcgtgagcaattgtcttgcgatattctcggcgagtggaagtggcgatttctcgggggtgccgatccagaacaagagacgattaatggaaaacaaagaagaagaggaggagaatgttaatcgcgatatctcgggaaaatttccgggttggttgaataagcgagataggagattattgagtttaccagtgtcggcaattcaggcagatataaccgtttctaagactggtaacggaacagtgaagaccattgccgaggcgattaagaaagcgccagagcatagtactcgccggttcataatttacgtgagggcaggaaggtatgaggagaataatttgaaggtggggagaaaaaaaacgaatgtgatgttcataggtgacgggaagggcaaaactgtcatcacagggaaaaagaatgtgatagatggcatgacgacattccactcggcatccttcgctgctagtggcgctggattcattgcaagagacatcacgttcgagaactatgcgggaccagcgaagcatcaagcagtggcgctccgtgtcggagccgaccatgcggtggtgtaccggtgcaacattgtggggtatcaagactcatgctatgtgcattctaaccgtcaatttttccgtgaatgcaacatttacggcactgtagacttcatatttggcaatgctgccgtggttttccaaaagtgcaacatttatgctcgtaagcctatggctcaacagaagaacaccatcacggcccaaaatagaaaagacccaaatcagaatacgggtatatccttgcacaattgtcggatcctacccgccccggatcttgccccggttaagggcagcttccccacctatttgggccgtccatggaagcagtattctagaaccgtatacttagtatcctacatgggtgaccacatacatcctcgtggatggttggagtggaatggagactttgctttgaacacattgtattatggtgagtacatgaattatggaccgggtgcagcagtgggccaacgggttcaatggcctgggtaccgggtcattaagtctaccatggaggcgaatcgattcacggtagcccaatttatatctgggtcagcctggttaccatccaccggagtggcctttgcagccgggttatctacatgaattacaccacaaagtatataagaaggtttgacatgctacaaagtccaaccaagcctacccaatggggggaaaaagggaatggcttctacttttatagtccttattttatttttgccaaaatatattattttgggcctattttttttatcaatggtgctagtaataaatataagttgtaaacaggactttatgtagtagcactttgtatttttttcttcctgcctcaaaaccaaagatgttataattgactcaataaattttagtacatgttcttaccaagttctttattggtcc

SEQ ID NO: 43803 - DNA, 246 bp, Glycine max
  Clone ID: PAT_MRT3847_139553C.1
gttgaagatcgtgcagtaaacaggacgttggcaaaggacaagttgcgtaagcataacagattagagaatttaacgccatgtattgctggcgtaataatatttgaagggctttcaccacgcagaacaggagaatcataacatcggcagcgagaatgctccaggacctgatgacagccttaacatgtcaatcactggtattgccgcaggcattcagcatacacgttagtatgctcacgtgttggtgta

SEQ ID NO: 43804 - DNA, 352 bp, Glycine max
  Clone ID: PAT_MRT3847_139554C.1
gaccatacgtagaatcgtggggagcaagtacagatgctagccggcctagttcatctgggctataaaatcaaagggacagtcatggttattcgcattaactggtggtacatgaatagcaaaacccgtgatagctgactgattgatattacaaccttatatagatgatacagactccgtcctattactggatgctttctccgaatcatgccttttcagaactatacatgcttccaaatcaggtactcacagcaaccgtaaaatgccaaaggctaactacatgaactggatcattacttaattagcgaatgttggagcaaacacatctgaattgataaataaaattcactggcat

SEQ ID NO: 43805 - DNA, 261 bp, Glycine max
  unsure (1)..(261): unsure at all n locations
  Clone ID: PAT_MRT3847_139555C.1
ctcaagancagtgttatngttagctatgtagtgtncttccggngatcgttgtggccattcncccagcaaanaaccctttttgcgtgaaggggncngtctactgncacccttgccgtgctggntntcgaganctcagctaccacctacattgctggtgctgagnttatgttncnatgcagagccagggttancaagcnaggttgtgtacacgaagannggggtacnacgnctcaaccggcagcatacncnaangtaacgtgg

SEQ ID NO: 43806 - DNA, 1431 bp, Glycine max
  Clone ID: PAT_MRT3847_139556C.1
gcgaaagcgcagcattacgtattgctgtgttgtgtggtgtgactgagataagatcagatctgggcaattgtagaatcgtgccctaggcctggctatgggaggagacgaagaggaggaggaggtgctcggttcgggccaatccgcctccaccaacaacagcttgccacctcccgtcgataaaactattctcaaattgaaccatctcgacgtacatgctgatgatgctggatcacacgcttctcttgccagtggcaagaagaaaaagagaggcggtcaacgggctgttggacctgataagagtggaagaggtctccgccaatttagtatgaaagtgtgtgagaaggtagaaagcaggggaagaaccacatacaatgaggtggcggatgagcttgttgctgaattttctgaaccaagcaatagtgaattgccccctgatcagcaacaatatgatgaaaaaaacatccgccgaagggtctatgatgctctgaacgttctcatggcaatggatattatttccaaggacaaaaaggaaattcaatggaggggccttcctcgtactactgtgaatgatattgaagaactaaagacagagcggcttgggctcaggaatagaattgaaaagaaaacagcctatctgcaggagcttgagggagcaattcataggtcttcagaaccttattcaacgaaacgagcagttatatagctcaagaaatcctcccagtggaagtgtatccttaccctttatttggtacagacacgccctcatgcaactgggggaatggaaatatcagaagatatgcagcttgttcattttgatttcaatagcactccttttgagctgcatgacgacaattatgttctcaaggcaatgaaatttggtgagagacctctggaagataatatgacacataatcttactgatggaggtgaaggttctagcatgtcaggcttgtgtcagccgcagactcctacaaatcttaatgtgtcaaacaggcctccaacatcacctcctctccctggcatactaaaggcaagagttaagcaagagcattaattgtaaggttatcatatttatgttgccttatgtaaaagcatgtttgtatattttgtagagaaatttgctgcagttgatagaccgtcataatagttattcatcagtacagccaagtcattctgtaggttagaagcagactgctatgtcctctttgttaggggtagacttcggcacattctttgcctatcatccttcatttactaccttaatttttcttttttgttttcccacatattttcactgtaacctttccccccctctgtagtgagagaaatcggtttgtaatagtccatagatcatggaacggaaatacggaatccagcagcataggattaatcttggaagtcaccgatttatagtgtacagttttccagctt

SEQ ID NO: 43807 - DNA, 169 bp, Glycine max
  Clone ID: PAT_MRT3847_139557C.1
actttttctttttcgagtctcaacgaaccaagacattcagtgcgccaggtttagatgcggaaaaaactacataactgtggcagatggaacaatatagagctcaaccatgtcacactgtcttgaaacttgggaaagaccgaggctgttgccacatctgaacacctgtgga

SEQ ID NO: 43808 - DNA, 348 bp, Glycine max
  Clone ID: PAT_MRT3847_139558C.1
ccacgcgtccgggtttaatgataattttactgcattgtatcttggtgatcatggattttagttgtggaaacaacctctctgcttatggtggaggctacatacattttgaccctccccacaccccttaatgatggaagccttgtgcacatgccttccttttatattcatattgctagttcattttttaagttgtagttgtcttagaatctgtataatatccctgcttacctatatatgttttatcaagtaattataagatgatttgggtgccttattcagtcacctgataatgcaattttaatgcttatgtgctcttgtttatgactttatcagagcttatgtctaggg

SEQ ID NO: 43809 - DNA, 382 bp, Glycine max
  Clone ID: PAT_MRT3847_139559C.1
gggttactttggtggagggctgagtgggcacaccaatgtgcatgtcatgcgagaccccccattgccgatcccaaagagactacagtgtgggatatcccacagggaatctctgaagattctgacactgcgggtaatacacttacgccacatgtcaattgtacagaggctactgccagatttcctgaaaaagctgaagcccctgcatgaactggaatctgtgcaccctgtcgctggcccagcagtgtaatttactcccagaaagtaggcatgacccccttggcgagaaaccgctgcctatcgccaaaacttcacaccaatagtaaatgtgcctaccataccgagaagtgggcgttattcaaagggctcccgggataggggcgtc

SEQ ID NO: 43810 - DNA, 532 bp, Glycine max
  Clone ID: PAT_MRT3847_13955C.1
gtcgacccacgccgtccgaaaaaaataaaaaaaaaaaaaaaaaaaaaaaaaaaaaaaaaaaaaaaaaaaaaaaaaaaaaaaaaaaaaaaaaaaaaaaaaaaaaaaaaaaaaaaaaaaaaaaaaaaaaaaaaaaaaaaaaaaaaaaaaaaaaaaaaaaaaaaaaaaaaaaaaaaggggggggccctttttaggggaccaagttttattcccggggggggggaagtttttatttttttttttggggcccccaaattaaatttcctggcccgggttttaaaaacgtggggaggggaaaaccctgggggtccccaaattaaatcgttttgaaaaaatcccctttttcccaggtggggataaaaaaaaaagggcccccccaattcccctttccaaaaatttcccccccttaatgggaaaagggacccccccttttacgggcttttaaagccggggggggggggggtttccccccaggggaccttttaattttgcaggccccttagcccccgccttttgggttttttccctttctttt

SEQ ID NO: 43811 - DNA, 1363 bp, Glycine max
  Clone ID: PAT_MRT3847_139560C.1
acggctgcgagagacggctcgaggtgggcatggattctctactggcgaactatgcctcttcagatgaagaagaagatcaacaacaaccatctccacccaaaacgacttcgttttcctctcttcctcagcccaaatcttctctctttcaatcccttcctcaacccaaatcctctcctttttcttctctatttcaatctcttcctccacccaaacaaccttccagcgaaagcgcttcactccctaaccctaaccctaaccctaaccctaaaccccaaatcgaagaaccacggcccaaacgcgtcgtgcaattcaggcccccaatcatccctctcccaaaccctacccaactcgacgatgacgacgacgacgaagaagaagagcgaaacagaagaaagaacaagttagagtcctccacgcaaacctcatcggtcaaatccttcctcgccagcattccggctccaaggaacaccgccactctcggcgttcaagcaagttccggttcaggccggagatccatcctcgaaaccgaaacaccggcaccggcatcgaattccggtggtttcagcaatgttcccgtcgatcaaagtacaggggattatgaaaattttgatgattaccaatatgccactgaccagtatgctaattattatggcaattttggttcgggtgccgagccagggagttcgggtactgaaccaaaggctggggttgctgcttatggaactgaacagtatgggaattatggtgatgcctatgctgcctatggggattatggacagtatgggaataattggggtgacgtgtcagcggcgacaccggtgccggaagcgtctgggattagtgacagtgtgatgaggattcctgggaagagagggaggcatgagattccaactgaagtgattgaggtgaagcaagaagagttgattaagaatcggccaagagaggatcaggtcaagctaactgggattgcattcggacccacttatcagcctgcttcgacaaaggggaagcctacaaagctgcacaagaggaaacatcaaattggttcattgtactttgatatgaaacaaaatgaaatgaaacttgctgagcggcgtgtaaagggcatgcttaccaaagctgaaacacaagcgaaatatggatggtgatttgagatgatgatattggaaatacttccattgaaacgtgaaatacaaagtggaagtttttatatttaactgcagtccttgtgtttcactgttctgtctaatgatatgtacgtttgctcccttttttcagtgcaaattatgtatttctatccttatagacagtggaatttcatacagtacattttttatgacaaaaaatcatatttcttcctttc

SEQ ID NO: 43812 - DNA, 558 bp, Glycine max
  Clone ID: PAT_MRT3847_139561C.1
cggaaaaccgggtcgacccacgcgtccgcctttctttcgctcgcgtgttcaccaaaattttcaaaatcaagaattcgagctcagaataacaaaaccaaaaaaaaaaaaagaaaaaaaaaaaacccaaagccattgacattgtctctctccaacgctttcctcctcacaccatccccttttcgttcttcgaattcccttcgccgcggttccaacgaccccaacttctccccaaacggttaggtttttcgcgtcctactcggattccttggccgcagttccggcgccgtcgtgtttccccccacattggcaccgtcgagccctctccgctagggagaatccctggaattccgaggtttcggcggcggaacgtgttttctagggtttctttggtgctgaaagtggtgaaccggaggcgaatttctcttctacggtagtgacgttgagctatggggtaggcgattgagcttagcttcgcttcgcttcgttgatttgaaaaaagggttttcatggggagaggttggagtttgctttgttatgggattgggatttgcatatgtt

SEQ ID NO: 43813 - DNA, 1221 bp, Glycine max
  Clone ID: PAT_MRT3847_139562C.1
ccacgcgtccgcccacgcgtccgtgctgcgagaagacgacagaaggggatcctgcattatctttttagctcaaatttttgtgaagcatttttattggtagaaatggagagtgagtccgtgaagcgcagaattcacatgattgctgctcactttgcacccaatgatgatatttcaactaccaacgttctgcctatgaactgcagtggcagtctgaactctgtactccggagatgtgataataaggtgtattttgcacgccaagcatctgcttctcttggttattttatgaggcagacttcaattgaagagggtggctcaacttcctttattgctcctaaaacaaatcatggtgctgctgcatctgaatgtccttctgatgcaagggcaccatgttttgctagacctgcaagggaagaatcagtcttcacaaattcggtgatccaaccaatggctcgggagcagggctctgattttagtacacttgatcctcctacatttgctaggccaaccagacagattagaggagatcagttacattctgaaaagaaaacgggctattctgaaattggtggaattgagtggtctccaaggatggatgttgcagaatcagaaggcaaatatgttatcatggtggaagttccaggtgtcagtatcggtgacataagagtggaggttgatgatctaaagttgtatgttaaaggtagacgctctactagctcttggacagttgcaggttgtccaaatgcttctttttcttcatatcatcggagggaaatactatatggaccatatggggtggtctggccactccctgctggtgtgaacaaggacagaatatcagctgaatttttggatggatttctacaaattatagttcctaaagtttgagtatgactgagcaatattgatttgtggcatatatatgtatacatatacctataccccgtgcatatagattatagatggagaagaaatgggcattgttctgcatgggccatgtcatgccctacatatatatttttaatgtaatgaacagatgatgggttaattttgatttcatatacaacttaattgttgtgcagaaaatgtcctgatgcatcgtgaaatgttttaatttattaagtcaattgcccaactatattacgtttagttatgctttatattatttttatgtgtaccttaaaatttaccttatatatttttttggtggcggcccgtttt

SEQ ID NO: 43814 - DNA, 192 bp, Glycine max
  Clone ID: PAT_MRT3847_139563C.1
actttattagctagatccccgctcataatatgaccatttcttatgctattggcacggctacttcaactccacaatttaaagagtttacttattgtaattctttctagagaagctcttactatatgtttaacgttttgtgtggaggcttctgcttacactgtgactttatcctcacaaccctattattaaccg

SEQ ID NO: 43815 - DNA, 811 bp, Glycine max
  Clone ID: PAT_MRT3847_139564C.1
ccacgcgtcgaggacattcactcgtattaatattgttccaaactcccaagtcccaaccttctctccctgtctttgcttctgcaattactcccactctggaaatgggttcgctacccgattttgacactctcccccctctgagctcgaggatttcaacggtggttccagcaacccctcgagaagatgaaaacggtgcgtttcaactcaactacatggacctcctcgtgaagctccattacatacgacccgttttcttcttcacttccgaagccgttcaaggcctctcaatctccgacttgaagaaacctatgttcccgcttctcgacccgtattaccacgtttcgggtcgggtcagaagatccgaatccggacgcccctttgttaagtgcaacgacgccggtgttcgcatcgctgagtcgcactgcgacagaaccctcgaagaatggttccgtgaaaacggaaacggcgccgttgaagggcttgtccatgatcacgtgcttggacctgatcttgccttttctcctctcgttttcgtcaagttcacttggttcaaatgtggaggattatccgtgggattaagctgggctcacgttcttggagatgccttttctgcatttaatttcctgtccaagtggagtcaaatactagcaggtcaagctccaccaaaatctcttcatgtgtcaagtttccctgaacccaaaatctcacataattccattgttgatgaccctccagtttccattaaaaagacaaatattcttggagagtattggctcgctactaattaccacgatgtggctactcactcttt

SEQ ID NO: 43816 - DNA, 307 bp, Glycine max
  Clone ID: PAT_MRT3847_139565C.1
ggtgaggtaagaaatcagccatcctgtgagaagtggtcaaatgatggttcagtcttctctgcgtcttcatcctcgatcaatcgttttccatggttcgtagtattcaaactgttcgcaaatctaccggtgataaggctcttacgaagcatagcaatatcacagttacaacgctcacggacttcaaatatagttaagtctgaaactaataccccttcataactataactattactctggcacagatgcaacatccagtggtcccatcaagggctcagataacactgctacgatccacctgtaagttgcc

SEQ ID NO: 43817 - DNA, 380 bp, Glycine max
  Clone ID: PAT_MRT3847_139566C.1
aaacatacttggagctttagcctggcgcagtatgtttttacaatccttcaaaaattttgtttctttgtgtgtgtatggtgatgataacttaattagtgttcatgaatatgtcaagccttaatttagaaccactaaagtaaggcttgacttcaacgggtacactatactcgtattggtcaaccttgtctcccaaagttgctgtgaacaaaaagcttggcgatttcatagcatactcggcaagcgcaggtgcaccagtttctgttgcagttgcctcacttgctgccgctgctagcggtgcagattgctcatctctagctgctccggagaaaatgaatgttagaacttcaagaagtgagttattatattttgggatttttttt

SEQ ID NO: 43818 - DNA, 405 bp, Glycine max
  Clone ID: PAT_MRT3847_139567C.1
gcacgagtgggcactttccttaaaccatggaaggcatgcgtgcaaaaacaccctcgactcagctttctcttattcggggagtgagactgagacaaaatggtggcagagtccctcagaagagaatgagggtactgtgattgggcacttgtgatacagatactcctcaaggctcaagctgccgcacaagatatatatagcttcatctgcttgctcttcatcttcgcataatacattagttattaattcttttttgtaaattgaaagacctatctacatctcacattggtcatttcgtctgcctaatcaattttcttttgaaattgtttgtttttactagaaaataaaattctgataaaagtaattaatttcaaaaaaaaaaaaaaaaaaaaaaaaaaaaaaagaatt

SEQ ID NO: 43819 - DNA, 323 bp, Glycine max
  unsure (1)..(323): unsure at all n locations
  Clone ID: PAT_MRT3847_139568C.1
ngcacgcgtacgtaagctcggaattcggctcgagnaggcttcctcgctcccggagaagtggccatccaacatccacgtgtgccatagaggtgcagggcctacgacagctgcttcagctacatgtcctgctccccataccagagtagtattttgtgttaaaggtcacctgtcctcacttgcccagccagccctacaggtgccttctactcccagtgccagagccagaccactggggcttcctgctgcaggaattgggggctcgggcagcaggggctcacaagtctggatgatgggaggagcatgcttagcctaaggaaaggccc

SEQ ID NO: 43820 - DNA, 371 bp, Glycine max
  Clone ID: PAT_MRT3847_139569C.1
tgaaatactaagccagttggatgatccttaacaagcacttcaatgggtgaacagccgcatcataccgtacctacccgagacaaagatcactggggttcaggttgggaatgaggtcttcactgatgatgacatcactctcattgagcaccttgtgccagcagtggtgaacattcacaatgctctagctcaattaggttactcaaacatcaaagtttcaacaccaagttccttagcagtgcttgatcaatcttaccctccttcagctggtagtttcaagagtgaaatctctgggatcatgtaccagtttttgaacttcttgtcaagctccaagtcccccttttggatcaatgcatacccctactttgcgttca

SEQ ID NO: 43821 - DNA, 614 bp, Glycine max
  Clone ID: PAT_MRT3847_13956C.1
ccacgccgtccgaagatgacacagcaatggaaaaacttggtgcacgtgatgttgcaattgcatcatcagtttccaaaatttttgcatccacgttgacatatcctcatgaggttgtacgttccagactgcaagaacaagggcatcattcggagaaacggtactctggtgtgattgattgtattagaaaggtttttcatcaagaaggtgtatcaggcttttaccgaggctgtgccaccaatcttctgaggacaacgccagctgctgtgattacattcaccagctttgaaatgatacaccgatttcttgtttcttattttccttctgatccacggcctcatattttgtgacgattgatcttggtgtaatctgtcttctgtagcagttagattccaatacataagctagtccagctgagtaatccttctcttggcgatgcagatatcattctttgtgatttggttgcttatgtatggtagagccccattatattctatcctggcaacctcaattgagcccggtttccctggtcaaacttgtagatttgagtgataacgacgataaagatgataaagtgataaaaaaaaaaaaaaaaatgctaatttattttgaaactg

SEQ ID NO: 43822 - DNA, 279 bp, Glycine max
  Clone ID: PAT_MRT3847_139570C.1
ttccacacgaccacacaattgttatttgacaactaatgtatattagagcttatgaaaattttccattttcaaaacactacaatacactctctcgtctattcattacttataatccttaactccattccacgaacaatacttcattctccgtctacacattcacttgccgactatctatctgacccttaataagccctatcttactaataattgtaaaaattcatgattccaactatgatatactaactcaagatatgattcctaataaagctaatttta

SEQ ID NO: 43823 - DNA, 187 bp, Glycine max
  Clone ID: PAT_MRT3847_139571C.1
gtgaaaacaatagtttaaagtggaaagaaatgtggtgagaaaaagcaaggattttgatcataaggaggcaaccgggctacatccggcaaaccatatagtggaaagcaaagcgcaaagcgctgggaaaatccccactttttgcatttgggtgaagggaaatcccacacctcttcttgacccccctccc

SEQ ID NO: 43824 - DNA, 465 bp, Glycine max
  Clone ID: PAT_MRT3847_139572C.1
ctttgctttatgtttcacaggactcaacttcctcgtctttatgctttcatagaactcaacatcctcgcctttatgttttcatcagactcaacgtcttcgtctttatgtttcacaagactcaacgtcttatgtctttatgtttccataagactctatgtcctttgtccttatgtttcataggactcaacgtcctatgtctttatgtttcataggactcaacatcctctatctttatgtttcataggactcaatgtcctctgtctttatgtttcataggactcaacatcttttgtctttatgtttcataggactcaacgtcctcgattttatgctttcataggactcaacatcctcgcctttatgttttcataggactaaacatccttgtctttatgtttctgtaggtctcaacatcttctgtctttatatttcataggactcaacatcccctatctttatgttttc

SEQ ID NO: 43825 - DNA, 233 bp, Glycine max
  Clone ID: PAT_MRT3847_139573C.1
tcgcccacgcgtccgaaaaaaagtaagaaaaaacaataaaagaagagaaacagagaaggcgtaagagaaagtataaaactcgtgagcagcggttctgatatacgtgtaccatctagcttctacctgagtccgttccttggcctccagctcccgaatttttcaagatgctccattccacccaccatattgatcgcttctcctccagttacagatgatggcataaaaagccagct

SEQ ID NO: 43826 - DNA, 122 bp, Glycine max
  Clone ID: PAT_MRT3847_139574C.1
cagaagaccacagatggggaccattattaccttgtgaaacatcaattcactaagcatatatatcgtgtacgacggtcataaattccgtgttgtgtcgagataaatggctaggtggtgcatct

SEQ ID NO: 43827 - DNA, 374 bp, Glycine max
  Clone ID: PAT_MRT3847_139575C.1
taaaaatataatgtcccataaggaagctgtgaatgtcatagggctctccatcaaggcagtggatgtcataataggtggggctgaatccacagactatatctgtgtcaaactcacttgatctatcgttccctccactaataactctcatacttacttcactagcaccaacagattttataaccttgacattcttatattcatcattagcgtacagactaacaaccgattcattatagatcttactcatattcaaacttgtaacaccatcttattaactgtcagcaacatcatagtcatcaatataattaacaaccacataccacatacaatgaggtgctcaactaactctgactatattgtcttcttcggtgaca

SEQ ID NO: 43828 - DNA, 513 bp, Glycine max
  Clone ID: PAT_MRT3847_139576C.1
gttctcttatattgtggaaggaagcaaatgctaaaggaagtctatttcaaaggtaaataatctgcattctgcattatagtattatacattttagttatctgaagatcgatgctttgaagggacattttatgaataaaaaagtttctatcgcttcctattttacaaagttggtttgaacttaaattgttattttactgcatatctttcattttagaggtcatgaactcatgatgttcatttcaaaaagatttacgatatttttatactagatttgagatatttgtgtacctaaagtcttaacaatccttgcattaacatttctttttcttacgatagttaacatttctttttcttttttttgtttctttaatagatttccttcagatttgttgacacagctgaagacagattgtctcgtcctgcacaatcatcgtgtgagttttgtattgtcaatgacttagtattacatagtgtgacgcttttactgaatttaaaattttgactggactaatt

SEQ ID NO: 43829 - DNA, 304 bp, Glycine max
  unsure (1)..(304): unsure at all n locations
  Clone ID: PAT_MRT3847_139577C.1
acaaacaaagaggacatgtttttatgtggtcttttaaaaaattacaaaacaacatacaaataacaaaatatgatgaagagtatagaaacacacagattaaaaaacctggaaagttatggatattaaacatattataaaggcaacgctcaaaaaaattcngcatatagcaggggaatgaaataacaaagcctttttccactttaagtgttataccacttcccatagtaagacagggtcatctcttccaaaatatccattaacataatttttcaaaaacctgttaattacacccctcttaatatca

SEQ ID NO: 43830 - DNA, 259 bp, Glycine max
  Clone ID: PAT_MRT3847_139578C.1
taagctttgaattcaaccagatctattttcccagccgcaagtataaggctgctacaactgcgctttcgtcgggggcctttttggaatcgatatcttttttatgcccaggagtcagcaactgccgaaaacacttcataccatcaacctgcctatgcgggacggtattcattaactgatgagaatgctgaatggataggtacttgctcaaaaaaaacaaaaagggcgggcgccgactagcgagctcgccgaccaccaaaca

SEQ ID NO: 43831 - DNA, 468 bp, Glycine max
  Clone ID: PAT_MRT3847_139579C.1
tttttttttttttttttttttttttttttttttttttttttttttttttttttttttttttttttttggggcccttttaaaaaattaaattggttggcctcaaaaaaaaaggctcgggtttcttaataatcccgaccgcaatttaacttacaatttttttccctcaaaattggatttcccgtttaacctaccacatatttttaggggggtttagctgaaacaattgggctacccttactttttgaaattttagaacagaacctgaaccgttttacccctggagataataaaaagggcctaaaaaatgtttttattttttggattccaagctcaagcccccccattttttttccaaatatattttttttttccatcaaaaccccctttaaatactcatttttcgatactaacttatttagcttcaaaaaaaacccttttgaatcaccaagcttttggggccccaatttg

SEQ ID NO: 43832 - DNA, 150 bp, Glycine max
  Clone ID: PAT_MRT3847_13957C.1
tagtataattgtcgcggggacaaatgaaagagacttggaagaacaagaagaagaggcgtggtatacccaccttcgtgtacttaactgaccagtcctctgagcataaccatctatatcgctgatcacagagaggcgttgagcttgcacagc

SEQ ID NO: 43833 - DNA, 400 bp, Glycine max
  Clone ID: PAT_MRT3847_139580C.1
tatataagcttcataacttcttcttttaatgatctagttgaaggctgcttcgctgatatgtatcagtgaaacatccaagaccaagagtactgggatctgatacatatcaactacggatccttgaagcaaactaaagcacaggtgcttcatagagcaccaccaaacaagccactaaaataggaagaatcactaagacaaagcactcacagtagagagggttgagacttgagggagagatgcttaggatcagtcacacgcacaagcactgaagcacagccacaaacacaattcagaaattagaactgagagagatgagaatgagagatgttcgaagaggcatagagaatgggggtgggctgagtgtggctcgtacatgagaataggtctgagaataaatgaa

SEQ ID NO: 43834 - DNA, 593 bp, Glycine max
  unsure (1)..(593): unsure at all n locations
  Clone ID: PAT_MRT3847_139581C.1
gtgagagacatatttataataatttcaaaaataagtttgttggtggaaccttgctaagaaatttgatgatgagggctgctaaggctagctttgaggaggcatgggatgagaagatgaacatatcaaagaggtgaataatgaagcctatgactggttaattaaggttggaactaaattatggcgtaagcacacattttcttattacactaaatgtgatgtattgatgaataacctgtgtgacgctttcaatagcacaatattgtgtgctagggaaaagtggaaattggtttgcaacattgtctggccatttagtctttgaagtctcacattcaatgttgagtgataagtttattgtaaatctcaattcatggtcttgttcttgaaatctttgggaaataacaggtattctttgcagacatgcttgtgctgccattcaagacaacagtcaagaaccagaagactatgttgacnagtattatctaaaggatacttacatgaaatgctatgagcatgcaattacagcaattaatggtcctatcaattgggctgagactcctgctgaaagcatactaccccctgaatataaacaaggt

SEQ ID NO: 43835 - DNA, 232 bp, Glycine max
  Clone ID: PAT_MRT3847_139582C.1
gatttactaatatggaatagactggtacttcactcaagctggacgaagctgcatcattggtgcgcatcgcgcgcacctacaacacccacaagtaggaaaaatgttggccgattgagattgtctcaagtgtaactacattcagagcgctaatgatggagggggtgactgccaaggccaccgcctaaaaatgatatataaataactatggtaatggtacagctcgcaaaaacta

SEQ ID NO: 43836 - DNA, 974 bp, Glycine max
  unsure (1)..(974): unsure at all n locations
  Clone ID: PAT_MRT3847_139583C.1
tacggctgcgagagacgacagaaggggaagatttgttcattgttgggtcaattgaagtctaagaaagaaaacagagagcgaagaaggagaagagatcagaaaaatggcgtccaaagctccaaagaaggccaatctcctcgatcaccactccatcaagcacatcctcgacgagtcagtctccgaggtggtaacgagtcgtgggtttgtggaagacgtgagattgagcaatgtgaggcttctcattggggcaatcatcatcgtcattgctctcttcgcccaattctacaagaagaagttccctgaaaatagggattttctcatcgcctgcatcgccttgtatgtgatcttcaatgggttgttgcagctgatcatatacactaaggagaaaaatgccattctgttcacttatcctcctgttggatcctttactagtaccggtttggtggtttcctccaaattgcctaggttttctgacatgtacacactcactatagcaagcgcagatccaaaatcaatttctgcaaatgatcaagtacatttcaccaaaagtgtcactcagtggttcactaaggacggagtcttagttgagggcctgttctggaaggatgttgaagctttgatagttcaatatactaaagaaccaaagaagagcaagtaatatggagacatgaactttggttttgtggaaaactttttggatgagaaaacatatatttggatatggtttataattctatacttaagacatttaaaatagaactgagggaatcaagcttttaccagctttagagcacaatttattcccatatttcatcagcttatttcgtagaaaaggcttgaacctttattttcatttcaaaaactaaaaaacacaaatgattcccatacaccatcaacttatctcccatattaggggatagaaatataacttttactattaaggaagataagagtcnnnnnagaaggtnnccacc

SEQ ID NO: 43837 - DNA, 204 bp, Glycine max
  Clone ID: PAT_MRT3847_139584C.1
cccacgcgtccgaaaaaaaaaaaaaaaaaactaataaaaaaaaaataaaacataaaatgggacatggtgaaattgaaaaatatgattgtgcatactttcgagctcaccctatcgtactccatctatcatggtagtacctttcatttcaatggccctgctttcaatacgatctacgcatttttacactgccgtatactgacaaaa

SEQ ID NO: 43838 - DNA, 496 bp, Glycine max
  Clone ID: PAT_MRT3847_139585C.1
gcttgtaagttactcacttatttccttgttgctgcatgcaggaccacagagtgagaatcatatactggatgatcccaacctcttgtcttttagtttttggccttgcgttggacttatttggtatgcattctttttaactgtttcttgcacaggaccattgttccactggcatttatattgtttgtagatattgacatggttcttcttgtaggaatgcatataaataaggttctctactcgctcagttacacatgtgtcactgctggtgctgcaggcgtcctctttgtcggaatatacttgatggttagattttaatttctcccttttagaagagctttctaactatatagacaaaaagttattgctctatgtactggtatcgacttaaatgttacatgatttccttcttttgataattatacaatttttagttctcatgaaatttacttcagcatagcatcattctttaatcatcttcttgatacattcttaagtg

SEQ ID NO: 43839 - DNA, 1418 bp, Glycine max
  Clone ID: PAT_MRT3847_139586C.1
tatcagtctctggtttggtggaattgttgttttcacaatgaagacgcacattcacatagccctattcctccttctggtgtcaccgttaatccccatcgccgtcgcgcaggcccaatcccagcccaatgacttctccgacgcaaacctcaaccagttcagcccctccatagccataatcatagtcatacttgtcgtcgcgcttttcctcatggcttttttctccatctacgtacgccactgcgccgattccccttccaccaccgttagccctctcactaccgcacgctcccggagggccgcgcgtgggcttgacccagctctgatccaaacattcccaatcctcgaatactccgatgttaagatccacaaaatcggaaaagaagcgttggaatgcgcggtgtgtttgtgcgagttcgaggacaccgaaacgctgcgtttgatccccaagtgcgatcacgttttccaccccgagtgcatcgacgagtggttgggctcccacaccacgtgtcccgtgtgccgcgccaacctccttcccaccgactccgaggatgctattgctaacggtaacgccaacggcgttgttccagttccggagacgtttacgcgagacattgaagcccaaaacgacgccgtgcaagccgcgccagagcagcagaacgcggaggctgacccagtcttacccgaaccggaagttgtttccctggacaaaacactgaaccggaaccgcacgcgagggtcgcggtcgaaccggccgcggaggtttcccaggacactgaacggctcactttgcggcttcccgaggaagttagaaagcagatattgcagaacccgcaactgcatcgcgcgagaagcctcgttatcttaccgagagaaggtagttcgcggcgggggtatcgaaccggtgaaggaagtagcagagggagatcgtcgaggcggttggaccgggggtttaagtcggaccggtgggttttcaccatggcgccgccttttttggtgagagcgtcgtcgattaggtcgcccagggtggccaataacggtggcgaaggaacttccgctgctgcgtctttgcctccgccgcctgctgtggagtctgtttgagttttgattcccccttctgcaagatttcaatattttattgtatttaccaattatttttttctgccgcgatttttttacgctagaatttgtaagatgtgtataatatttggcacacttgttttgcgtttgaagataaataactgaaataagaatttgtaaaatgtgtataattaataaggtagcatgtttatttttgtaggccggttttagaagaactgggtcatgatttcatattctctttgaggttgttaagctagttagttgacctcggattttaacatacagcatgtgaagaaaaaaaatgcaaaattatcttgttt

SEQ ID NO: 43840 - DNA, 1438 bp, Glycine max
  Clone ID: PAT_MRT3847_139587C.1
gctcactggccgcccgtcgtcctttttttttatatatatatatatctccatttccgttggattcatatctgaactgatgaccaagattatgatttaagaatctatcgtgattcaggatttcagttatttatcttcaaacgcaaaacaagtgtgccaaatattatacacatcttacaaattctagcgtaaaaaaatcgtggcagcaaaaaataattggtaaatacaataaaatattgaaatcttgcagaagggggaatcaaaactcaaacagactccacagcagcgcggcggaggcaaagacgcagcagcggaagttccttcgccaccgttattggccaccctgggcgacctaatcgacgacgctctcaccaaaaaaggcggcgccatggtgaaaacccaccggtccgacttaaacccccggtccaaccgcctcgacgatctccctctgctacttccttcaccggttcgatacccccgccgcgaactaccttctctcggtaagataacgaggcttctcgcgcgatgcagttgcgggttctgcaatatctgctttctaacttcctcgggaagccgcaaagtgaaccgttcagtgtcttcgcccggcaggactaaagaatgaccggtcgagtgagaccgcgggaatcgccgcggccggcccgaccgggagcctctggtgcggttccggttcagcgtctggtttaatgacagcacttgaggttcagtgggaacgggaggcttggggtcttgctgttgctgttcgggctcgacgaggtcgttttgggcttcgtgttgggcctcgatgtcctcaggagcgttgaggattgggattccgtggacggactcgccgggctgagggacgaggttggcgcggcaaacggggcaagtggtgtgggaagctagccactcgtcgatgcactcggggtggaacacgtggtcacacttggggattaaacgcagcgtttcggtgtcctcgaactcgttcaagcacacagcgcactccagagttccctttcccagcttgtggatcttcaccgccgagtactccagcgtcgggaaggtgtcgatcaccgcctgctcgaggccgcgggtgccgcgccgtgagcgtccagtggcggcggcgagattgcggatgctggcggagggggagtcggagcagtggcggatgtagatggagaagaagcccattagaaagagggcggcgatgaggatgacgattatgatggccatggaagggctgaacttgttgtaataggattggttttggttggtggcaggttgcgccgccgcaaaaggaaagaggaagagaaagagaaggaaacagattcctccatttgggttattcattttagggatagagggcgtgggtctgggtcgaaactgggattcggtacctgtacgtgcaggagctttacctatagttagtagtattagagactgg

SEQ ID NO: 43841 - DNA, 691 bp, Glycine max
  Clone ID: PAT_MRT3847_139588C.1
acaaacctacatgcttcacatgttgatataatcaacaaaacaaaatcattttatcctaaccacgcaaactattattggttgaaaatacaaagcattggcaaacaaactaattgcaaaaccagacgtcattacaatttacatatcattttgtaagacattttggaagcctccaaaagtctctgccactcaactagaagggagaagttctttttctccaaatcatcaacacatttctgcaagatgaaaatttgaacatgagcatgtatagctctgtccagttcctcctcatattcctttttcttacaatttgcatcttcttgtagaatatgaatttgtaattccttctcagccaattcatcttcattcaatttcaaaactctggaattctcttccctctcagaatataaggaaactagtagctcttctaccttttgaagtgcagactccctttctccttttagttccaaatgcttcaattccaattcactgtgcagtttctcaagatctttcagtgtttgatgagttatgttcaactgtgaaactaaagtttctttctcttgacagatactggacttctcatggtcaagtgatcgacatgtgtcttctaataccttggacttcacccttaacccttcaagttcagcattcacatcaaatagtgaattttccaataggttgctcttttctgaga

SEQ ID NO: 43842 - DNA, 438 bp, Glycine max
  Clone ID: PAT_MRT3847_139589C.1
ggctcgagattgcattgtactttaaatggttaattggtaaggtaagtgattattcgtctctcctcacaaattattttgttaggatgacttagctggatagtaggaaaaaatgtatgtttctgacgtaatcttgatgtacaatacaagagattgccttgctacctttttatgtagcattgtaattcgcaaatggcacctatgaagtcacgtgttatgtctgattatccatggagtccgagatgggaaccatcaatgatggctgagcgtatttgtgattgtctggcacgatgaggccttgaactgcaagagacaatgcagggagggccaagtctagtagtaacatggccatggcatgttcagctcaatccctatgtcgtgggcatctctagacctgttcattggaaatgtctttctggctctctttgtcaacgcaattta

SEQ ID NO: 43843 - DNA, 309 bp, Glycine max
  Clone ID: PAT_MRT3847_13958C.1
gttgtattggttttcagcctttaaaaacaataggacccctaagggttatggaagaatctaaaaagccttttattttttggaaaaaacatcttcacattggcgcaggttcaaatgaaaatcaaatactcctattccaacaaatcgggtatgttaaacatgtggaacaaaacttagcggggtaaaagctatattaactctttgtacaccagacagtcgggtactaggggattcttcatgggacatgaggttgcaagtgtgttattaaaatgcactccctggcacccgggctaccagggccccatgccgaaa

SEQ ID NO: 43844 - DNA, 684 bp, Glycine max
  Clone ID: PAT_MRT3847_139590C.1
atcagacgtttctagattttgactccacttcttccttccctatatgagcatataattcctaagcaaaatcatctcaaggtagagagacaaagatcacaagcatctaataatgatgaccagttatgtcaacctcaaaatatggcttcttaactttgttaccttgtttagtattctttctttgtcccatggaagaagagcaaatgcaaattttcgagtgagagcagttaatctaggtggttggttggttactgaaggttggatgaaaccttctctcttcgatggcattccaaataaagacttcttggatggaactggtcttcagttcaagtccgtgacaacacgaaaatatctttgtgctgagtctggaggaggaaccatcatagttgcaaatcgcacctctgcttcgggttgggaaacatttgcattgtggaggctaaatgaggacactttcagattcagggtgttcaacaaacagtttgtggggttggatgggattaacgtcgttgctgcttccaatatttgcacttattctgtgacatttcatatagttaaggaaagtgataattctagtcgaattcgaatcatagcttctaatggatatacttcctgctagccaagacagaggatttggccactgctgatggatcagaggtcaacggatggggagatgatgatccatctgtt

SEQ ID NO: 43845 - DNA, 113 bp, Glycine max
  Clone ID: PAT_MRT3847_139591C.1
ggaaacttcacctctccacaccacaccttactatcaacttacctctcgccctgattttcccagactctctttctcggtgagtagcacccatgaatatctttgtacctacatat

SEQ ID NO: 43846 - DNA, 283 bp, Glycine max
  unsure (1)..(283): unsure at all n locations
  Clone ID: PAT_MRT3847_139592C.1
tttctgattaatattatttcttanatttaactggaganananagatanagagagagnntnntccttctncattttttgatanctggattcgagacntgagatgaggccggtgcaactgccancgccttncggttccggggccaaccctgcccccaacaanaacagcnangaccgtctccnagcntcgcnggcanggatctcacgtgccgtggccgcagcggganaccaacttggngtgccgntncatctgncnccatcgacggttctgctgcggggcgcanng

SEQ ID NO: 43847 - DNA, 912 bp, Glycine max
  Clone ID: PAT_MRT3847_139593C.1
ggctcgagcaggaaaggaggatgccagaagctctactgcaatgagcgtgaataagatatctggaggctcttcacggcaccgaaaatctattaatggattttcaggttcaactccatccggagggcaaagggaaactggatcaagtaggaattcctccttgcacaaaaatttaacttcagagaaaatatctcaacctggattaatggataaggcacttgatggaacttctcttgaaggagttacttgcaagttgattgttaaaattccaagccaaggtagaagccctgctcaaagtgctagtgcaggttcttttgatgatcctacaatcatgaatagtcgagcctcatctcctgttcttccagagaagcacgatcagtttgatcactgctcaaaggaaaagagtgacctttatcgagcaaatattgtctcagatattaatactgaatcttggcagagtaatgattttaaagacgtattgactggctctgatgaggctgatggatcacctgctgcagttactgatgaagagcactgtcagattggcaatgattgcaagaaaacattggaggtaccaaaagccgcttcctcgtcatctggaaatgaaaataaatctggaaatttgcaggatgcttcttacacctcaataaatgctttaattgaaggtgttaagtactctgaggctgatgatgttggaatgaatcttcttgcgagtgtggctgctggagagattttgaaatctgaattgttaactccagctggatctccagaaagaaacactactgctgttgaacagtcatgcacaggcaatggtgttgttaagtcctctgaagagaatcttgtccgggatgaatgccactcaaataatggtcttgatggtgaacataagaatcagggttctgtaacaggtgattt

SEQ ID NO: 43848 - DNA, 187 bp, Glycine max
  Clone ID: PAT_MRT3847_139594C.1
tacggctgccaaaaaacaacaaaaggttacgcttccaaaaaaccaccaaaaggtaccgcttccaaaagaccacaacacggtaccgcttccaaaaaaccaccaaatggtaccgcttccaaaacaccacccaaaggtaccgctgccaaaagaccacactaaggtacagctgccaaaagaccacacaatg

SEQ ID NO: 43849 - DNA, 235 bp, Glycine max
  unsure (1)..(235): unsure at all n locations
  Clone ID: PAT_MRT3847_139595C.1
ggcaaaagaagcggcggnggnggcgggagcccnagcanncgcgnggcncgcnanagagcgcgcncncaaacccnnccnngccaaggcacgngccccganngacaacnccgacccgccacgngaccccgacgacgangcccnnccnaaaaccaccacngacgacgnncccgacgccgccganncnaaacccgccggcgacgngccncccgcngcnganaccanaaccaccgacgcc

SEQ ID NO: 43850 - DNA, 242 bp, Glycine max
  Clone ID: PAT_MRT3847_139596C.1
ccttttcgtacggttgggaagaccttcttacatattttagacattctgaagccatgagttgaacactttccaccatatactgtacttttttcttatgctttgctttctacctgtttcattaccttatgcccaatggtaagaccctagcttgatcccaatgctctatgatggctcatgcgtccaatttggtcacagatcgttagatatggcgtttgatcaacctttaaaaatgacaacagtct

SEQ ID NO: 43851 - DNA, 1696 bp, Glycine max
  Clone ID: PAT_MRT3847_139597C.1
cccacgcgtccgacggctgcgagaagacgacagaagggggtgaacaggtgctcgctgatgccactattaaaagagtgaagggagcgagtaacagaatcacgcttcaaatcatctgcattcatttttcttctctctgcgccttcttagggtttgggtttctgcttgtgcttctgtcactcattctggagatggcttcttcggggccaaatggaactgacaacggggattcgttgcctcccccgcctcctgttgtcccatcagatgttgtacctgtcaaagctgagctggagaagaagaaggctttgcggcttccaatagccaggcgtggccttgcttcaaaagggacaaagctgcaacttctcaccaatcactacagggtgaacgttgcaaatactgacgggcatttttatcagtatagtgttgctcttttttatgatgatggacgacctgtggagggtaagggtgtagggaggaagcttctggacagggtgcatgagacgtatgattctgaattgaatgggaaggattttgcatatgatggtgagaagactctgtttactcttgggtctcttgctcgcaacaagcttgagtttacggtcgttttggaggatattattgcttccagaaacaatggaaactgcagcccagatggcaatggagaactgaatgagagtgacaaaaagaggatgaggcgccctaatagatccaaccacgcgtccgggcatttaaagtggaacttagctatgcttcaaagattccattgcaggccattgccaatgctctacgtggacaggaatctgagaattatcaagaagcaataagagtgcttgatatcattttgaggcaacatgctgctaagcaagggtgtttgcttgtgcggcaatcgttctttcacaacaatcccaagaattttgctgatgtaggaggaggtgtacttggttgcaggggcttccactctagttttagaactactcaaagtggactgtctttgaacatagatgtctcaaccaccatgataattacccctgggcctgtggttgacttcctaatatccaatcaaaatgtgagagaccccttttcacttgattgggcaaaggccaagaggacattaaaaaacctgaggattaaatcgagcccatctaatcaagaattcaaaatcactgggcttagtgaactcccttgcaaagatcaaatgtttacattgaagaaaaaaggtggtgatgatgacactgaggaagaagtgacagtatatgattattttgttaatatccgcaagatagatcttcgatattctggggatctcccatgtatcaacgttgggaaaccaaaaaggccaacttacattcctcttgaggtcgtgcctttggtatcacttcatcgattgcatgatccacgacaaaatctacgacattggtacaacagctgctacatgagacaaggagcactagccatacacaaggcaatcccaaatttagttaatgtgtaattctggaatatggcttctgaaacaataaagcaaaaattggtttttactggaagtgaagaaggaaaacttgcaccaattggtcaaagctttgccgaggatattggagttcttgagtgctgaaataagccgaacatcattggttggtattgtcaaatatatatgttagtctatgcttgaagaagtgatttttacaggaggctgcaaatattg

SEQ ID NO: 43852 - DNA, 544 bp, Glycine max
  Clone ID: PAT_MRT3847_139598C.1
gccggcaatttgccgctctacatgtgtagtagtaccacctgctttggggggggggggggggggggggggaacaaaggaaaagtgagagggagagagaggtatatatagaaagcaacgataggattacgcgagaaggttaacggtcatggacgaataaaagtaccataaatgcgggtccccatcaacaaaatagtaaagagagccctgggggtattatgtgaactaccaaggttttaggtaggaatctggagtagtggcctgtgggcgtacgggtgctacgggcagcctagaaatgaaggcgcatttaatgctccacagccaccacaataacgaaggagttgaaattaagtagagaaaacgtaacaaaggaaacgatacgtaactaaagggtgggccctatagagggtacaaacgaaatgaccacaactaaaagtgagcaggtgcacgaaacagggggactttgagagcatgcagttacttgggtattgctaatagagcggactataaaaataaagctagaagagacgtaaactattagggaaat

SEQ ID NO: 43853 - DNA, 719 bp, Glycine max
  unsure (1)..(719): unsure at all n locations
  Clone ID: PAT_MRT3847_139599C.1
cccacgcgtccgacggctgcgagaagacgacagaagggggtgaacaggtgctcgctgatgccactattaaaagagtgaagggagcgagtaacagaatcacgcttcaaatcatctgcattcatttttcttctctctacttcttctgcgtcatcttagggttttggtttgtgctcctctcactgattttctggagatggcttctttcgggccaaatggaactgaaaatgaggattcgttgcctcccccacctcccgttgtaccatcagatgttgtacctgttaaagctgagccggagaagaaaaaggcttcaaggtttccaatagccaggcgtggccttgcttcaaaagggacgaagctgcaacttctcaccaatcactacagagtgaacgttgcaaacactgatgggcatttttatcagtatagtgttgctcttttttatgatgatggacgacctgtggagggtnagggtgtnngggaagaaagcttctggacagggtgcatgaaacgtatgattctgaattgaatgggaaagattttgcatatgatggtgagaagactctgtttactctcgggtctcttgctcgcaacaagcttgatttacngttgttctggaagatgttattgctaccagaaacaatggaaactgcagcccagagggcaatggagaactgaatgagagtggacaaaagaggatgaggcgccctaatagatccaaggca

SEQ ID NO: 43854 - DNA, 384 bp, Glycine max
  Clone ID: PAT_MRT3847_13959C.1
tttttgtctaactggaaccatataagatatattttacgaacattattgatgtctttcgccaactctagaactaagtgtatatactgcttagtatcctgaaaactctcaactgtggtacatgctgaaactgtcaatgcctcacatatgacactacatatgcttcttgcactaactgctccggaaacaaatgatacaatggttcaggacttatactgcacaacatgcttaaacatagctatctccattcataaaagaatcttattatggaatccagttcgtgatcgaacttccatattcactatgacactagtactggagcatatgggctatcgattgctacttgactgccacaatgcaatgataaatgcgtcatatgagattctc

SEQ ID NO: 43855 - DNA, 341 bp, Glycine max
  Clone ID: PAT_MRT3847_1395C.1
acgggccccccacgcttccttttgaaaccctctaacttgtgcacaactcatataggaaaagattatggaccgggggttcctataataggaacgggggcactatacatccccggaggtaattggtcgagggctctatgaccttgaaaaatcatacaattaccatcaagagagttagctgcacccacccatgatatagatcctaccgacgatatagctttacttacatcaattgcatatttctatgctgatctttcaaaaacaaaaaaaaaggaccgggaaatctacagagatccaacgcttacggcacgaccagcatgcccactataatagacgtcttatat

SEQ ID NO: 43856 - DNA, 1241 bp, Glycine max
  Clone ID: PAT_MRT3847_139600C.1
gtttcctttttcattagagccaacctccttaatatatatatatatatatatatatatatatatatatatatatattaattaaggactgtgctcaaactccaaagtcattgcagatgccgtactactaaaaaattctggtgattattaaacgcagaaaaaaattaaaaactaaaaataaaaaccctcaaaacactgtgcatgcctttaaaagcccttgtcatttgaacagaacttcacaccagtggcttcttcattcctttattcattcatctctcatctgaaacacaacaagagaaacaatggaactcttgcaaaatggccacaaaaatttggtcagcatcaaaccctccgagttacccctcttgaatggggccgcgttaactctcctcaactcgctctccgaaactcatgagtactagggcaacatagatccttccagagtttttgtcaccaaagtgaagcgtatcattgtaaaggttggaacagctgttgttactcgaagtgatggaagattagcattgggcagaattggagctctctgtgagcagcttaaagaacttagcagtcaagggtatgaagtcatattggtaacttcaggtgctgttggtcttggcaggcaaaggcttagataccgcaaattggccaatagcagcttttctgatcttcaaaagccacaaggagagcttgatggaaaagcatgcgcggctgttgggcagagtagtctcatggctctctatgataccatgttcagccagcttgatgtgacttcttcccaacttcttgtgaatgatgggtttttcagagattctggctctagaatacaactttcagacacagtgaactcattgttggatttaagggttatccccattttcaatgaaaatgatgctgttagtactaggaaggcaccatatgaggattcttccggtattttctgggacaatgatagtttggctggtctattagcccttgaacttaaagctgacctccttgttttattgagtgatgttgaggggctctatagtggtcctccaagtgacccaaactcaaggttgatccatacatatataaaagagaaacatcaaggggaaattacttttggagacaagtcaagattgggcagagggggtatgactgctaaagttaatgctgctgtttgcgctgctcatgctgcatcccggtcattataactagtggctatgctacaaacaacatcattcgagtgcttcaaggggaaagaa

SEQ ID NO: 43857 - DNA, 416 bp, Glycine max
  Clone ID: PAT_MRT3847_139601C.1
cccacgcgttcgaccacgcctgcgcttacgcgttcagcctcgcttgctgaggcacatagagtgagagtgaataagatggcgtcaaacatgccgagtctcgatcagaaggcttccgaaatgacctacatatccttctaagacatatgcgcgattgtgctcacgaatctgttccaggaactctacctggacgcattcatttctcgctagaagcattattacagcatgtccaactatgacgacgcacaacgtgatcaatctactattcggacttacgccacagagcatgcatctggaatacaatgcaactatttatgcctaagtatgtgagatcctgctgtctattgtcatataagacgtcattctgatgtaatagctctacagtcgaccattttctgtgacgcgtaacattcactaga

SEQ ID NO: 43858 - DNA, 573 bp, Glycine max
  Clone ID: PAT_MRT3847_139602C.1
cgcctggctctacaataggacctggctctaatcatggactagcttcactcgcctatggatatgcgcttctttcacagacatcccagcaaactgtgcggttccgcttgtacctaatacgggagcttgataagacatttaggaactccaaatgccgtgacacagattacattcagtatcttaaaatcactttaaatatgtaacgatcaggttgtccagcatgcgaacccctaccagagcttaactgcacgccgatgcaagcctaccattatcctgagcgtggaatgagtatgactgaccgcacaacaaactcatatgtggacaagttgaacatgtccatagcctccgatcatggctggagcggtagcacacttgccccacctacagagacttggttgtaccagcttaaaatgggacaactgtcgctgcatggcatgaaggatcacagtcatatgtccatcaacgaggaacatctgtgacaggcagaagaagcacagctcagactgaggctactgatagcctgagtcgacatcaaactacgactccgagcaggtgttgctgatgcttcaatatatg

SEQ ID NO: 43859 - DNA, 486 bp, Glycine max
  Clone ID: PAT_MRT3847_139603C.1
caaacacttagcttagaaggacgtttagatgaaaacttaatcattgcttgaaactctaagagcggctcgactggcgcgaaagtgaaagcttctccttgagaaggcgctaacaactgtaagaggcgctctatggcctctcagcaggccatgccctcatccatattgtaatatgcccataccagaaggcccccatcacatatatctgcgtaaatatcaagcctgataggggccaagcatgcacacagggagctaccgacggtgatattttgggaacatccaccatactctggagcatgtctactcagtacctaatgagacaacattgccccattgcgatgactgacttgcagactcgcagctgacgatccaccatggggccgtcttaagggcactacaatctcgtacatttccaggtcccatagacgacagtgcgtatcctgaccctcatacccaaggcgatccataacagtctctacatagccatta

SEQ ID NO: 43860 - DNA, 270 bp, Glycine max
  Clone ID: PAT_MRT3847_139604C.1
atctccgcccgctccgtcaacgctatgctcggcctcgactgggacctgaatacaccgcctctgccagatacggggcaatggttgctcttagcgtcaaatgagacacttccatctccaattgtagagatattacgagctcgaatcattggactgcaccattacttgatgctgtatatgatgctggcttacactgtgctatccgatgctgcgaaagctccaggcctcggattatgtgctacgtacatgtataccatggcagtaggtcgcctt

SEQ ID NO: 43861 - DNA, 1819 bp, Glycine max
  Clone ID: PAT_MRT3847_139605C.1
ggctcgagcaaccccaaatgcaccatttacattgccaacaaccacgccaaatgcaccctctacattgccctccacaaccccagttgcaccctcaacattgccaaccacaactccaaatgcaccctcaacattgccaactacaaatccaactgcaccctcaacattgccaacagcaacttccccctcttctagcaaaccatcagtagccaaacaacaacccgttgtggctgcaactccttccacctcaaagaaaccaccaacagcagcaacttctcccacttctactccaacaacaacagctgcaccctccaaattgccaactgcagcttcccccacttctagcaaaacaccaatcaccactcaggctcctgtgaattcaccagttccaaaagccacatctccaacatcatctgctcctgtgaaatcaccagttcctaaaaccacatctccaacatcatatgttcctgtgaagtcaccagttccaaaagctacatctccaacaacatctgctcctgtgaaatcaccacttccaaaagctacatctccaacaatatctgctcctgtgaaatcaccacttccaaaagctacgtctccaactacatctgctcctgtgaaatcaccacttccaaaagctacatctccaacaacatctgctccagtgaaatcaccacttccaaaagctacatctccaacaacatctgctccagtgaaatcaccacttccaaaagctacatctccaacaacatctgctcctgttaaattaccagtgcccaaagttacaactccaacttctgctcctgtgaaattacctgataccaagcctttaccaccatcatctgctccagttaaattaccagttcccaaggctttaccaccaacctccactccactgaaaccaccagttcccaaaactacacctccaaaaatagctccggtgaaaccacctgttcccaaaactttgcctccaaaaattgctcctgtgaagccaccagtccccaaggttacaccagcattaagtccaaaacccccatcccccaaaatcccacccaagaaagctcccatttcaccccctccactgccattaccaccagctgatgcaccaccattgcctactccaaaagtatccccaacaccatccaaagcaccaacaccagccaaagaaacaccagcaccagcacctgcacacaaaaagaaagcaccactatcatcacctgttccctcaccactaagtaacacaccgacaccagcaccaacgccagcgattgaaacgccaacaccagcaccagcacctgaagatgacacgccacccccccctccccacaggcacaggagaagaagacacaagcacaagcacaagcacgagagacaccatgcactttctctggctccagcacctacaactattatccggagaagtcccccagcaccacttgctgacgatattgctacaaccgattcagaagagacaccatcaccagcaccaagtcccaatgcgaatggtgcacactcatactataggcaagggaatatgtggccaagtattaatattggactcgctattgccattttgttatctgtcatcgcttgacacttgcaacagctgctatagaagtctcatatgaagaacatggattcactctaattaagcggtggtttggtttgcaaaacatataaaatcagttaaatgtataaaactgaataacgaaaagttatatttatccatatttttttatttattttatttcgttctttcttaatttgtattgtgatctttgctcaaaaatattaatgatacgagtttttgaattgttgaaacaaa

SEQ ID NO: 43862 - DNA, 584 bp, Glycine max
  Clone ID: PAT_MRT3847_139606C.1
tgcgtcctttacgagtcaataagaagtacacttctccctacaacgactccagatgctgaacctgtacccacccgccacacacagtgcctggaacggccagccggtctcatacccacccggtacagactcgatcgtgaatgagatctttgaggccaccaagggcacgggcaccaaggagaaggagttgaacaaggcgctgggcggcaagacggccacgcagcgtggcttcattgccaagcgctaccaggagctgcacaaccaaagcctacgcgatctgatggacaacgagacgtcgggccactacgagttcctactcaagctgctggcatcgcccttgcccgaagcagaggctggtatcctacgtaaggccaccaaaggtttgggcacaaaagaggatctcatctaccccgtggtcgtaggccgcactaacgcagagatcaacatcctcaagaagatgtactacgaagcgtacggtgaggatctgggctccgtactggacagcgacctacacggcgacttccaaacggtgattctggcgtcgctgcaggctgcgctagtgccgtacgatgccaacattcacaacg

SEQ ID NO: 43863 - DNA, 392 bp, Glycine max
  Clone ID: PAT_MRT3847_139607C.1
tgtgcctctcctctcgctgcgttttccaatggcggccataacccgcctcctaaatcgcacctcttccctctcttccgtggcgcgtggattctcatctcacgcatcgccgccgcgcaaggaggagaggaatgtccagtgggtgttcctgggttgccccggcgtcggaaaaggcacctacgccagtcgcctctgcaacctccaacggcccccctttcttcccagctatcagaaattgttaatcaaggaaaattggtgtcagatgaaatcatcataagtttattgtcaaagaggctggctgatggggaagctaaaggagaatcgggatttattcttgatggttttccacgaacaataaagcaagcggaaatattggaaggggtaactgacattga

SEQ ID NO: 43864 - DNA, 485 bp, Glycine max
  Clone ID: PAT_MRT3847_139608C.1
cccacgcgtccgcccacgcgtccgtacgggtgcgagaagacgacagaagggggaaatagagtgcgcagagagcattgtaataataccacattaccacttccaccctcaccttgctgtgcctctccctatggcggccataacccgactcgtaaagcgcacctcccccctctcttccgtggcgcgtgggttctcatctcacgcgcctccgtgcaaggaggagaggaatgtccagtgggtgttcctgggttgccctggcgtcggaaaaggcacctatgccagccgcctctgcaacctcctcggcgtccctcacatcgccactggcgatcttgtccgccacgagctcgcctccaacggccccctttcttcccagctatcagaaattgttaatcaaggcaaattggtgtcagatgaaatcataataagtttattgtcaaagaggctggctgatggggaagctaaaggcgaatcaggatttattcttgatg

SEQ ID NO: 43865 - DNA, 1039 bp, Glycine max
  Clone ID: PAT_MRT3847_139609C.1
cggctcgggaaggatcaattgcacacagagcattataataacacaacattaccacttccaccgtcacgttgttgtgctgtgcctctcctctcgctgcgttttccaatggcggccataacccgcctcctaaatcgcacctcttccctctcttccgtggcgcgtggattctcatctcacgcatcgccgccgcgcaaggaggagaggaatgtccagtgggtgttcctgggttgccccggcgtcggaaaaggcacctacgccagtcgcctctgcaacctcctcggcgtccctcacatcgccaccggcgatctcgtccgccacgagctcgcctccaacggccccctttcttcccagctatcagaaattgttaatcaaggaaaattggtgtcagatgaaatcatcataagtttattgtcaaagaggctggctgatggggaagctaaaggagaatcgggatttattctaattcagttatatatggccatggtttgatgatactgaagcagtagtcaaagaaaggcttcgtatatacaatgaaaagagtcagcccgtggaggaattttaccgtagtagagggaaactgttggagtttgacctgccaggaggtatcccagaatcttggcctaagttgctgcaagctcttaatcttgatgattatgaggagaagcaatctgttgcagcataagatatataagcatacaatacaaatgagtatttcattctttgcatgcatgcatgcttgacgattttgcaggaaatagaaccaaagaaggtttacttctctattggtattatttgggtaaataattatatcatgaggtgttggaatctgatataacttcttccctgttgggatttctgctattctaattcagttatatatggccatggtttgatggtttctaacattgtcaggaacagatgatttctgtgagaattgctgattgattagcatttagcaataagcttgtcagaatctggcatataaattgttgtgttgtaactgaaatacgaaatatgaaggaactaatgttattgtatt

SEQ ID NO: 43866 - DNA, 174 bp, Glycine max
  unsure (1)..(174): unsure at all n locations
  Clone ID: PAT_MRT3847_13960C.1
ggagaatcgncaagtgagtcatgaatacggccgctatggatacccaacaactgtagttctgggtgataagggtagtccatagtagggggccgaatcaactgctaaaatggcgtctgcgatgttttctatcttctgcctcatgatggcccagttcccagcttggggacagttcga

SEQ ID NO: 43867 - DNA, 305 bp, Glycine max
  Clone ID: PAT_MRT3847_139610C.1
acttactggagttagcatacgcagatcttgtgaatcgatcatcagatagactgacgaggtagcctctgttgcatacatattgctatctatgtatgtgcaagcagggctacgaatgcatcgcactctagggctgtccggtctgaatacaacgcacagaacttcatgaacagcagtcctgagcttttgcggagctaccgatgtcacaagaagagacctgataggagacatatctggcaaacccagttgcgaatctggattaatggtgcagagcatagctgaggtctgagatgacaagtctgcactca

SEQ ID NO: 43868 - DNA, 713 bp, Glycine max
  Clone ID: PAT_MRT3847_139611C.1
cgggaactcgagccgaatcggctctacggctgcgagaagacgacagaaggggacaccgtgcaggcccaatgaggatttgaacatttacgtttttgctctgtttaatgagaacatgaagcccggcccagcttccgaaaggaactatgggctttttaagcccgatgggacccctgcttacccccttggcttccctctggcttctgtgccagtcgtcgccggtaataacaataccggcgtcgcaagcacgccgccgcagccaacgtcaccgacttcttccaccggctatttgtcaatttcctctgcttcctctctggaaagatgtcgtttactcgggcgttctttatcctttttggtgccgttggtgatggagctgttgattttgaagttttgaggatttgtgggttcagaatccaaagaaagacactggggcatggcaatggggaggaagagcaaaggcagaatgagaacggagtaaagtgagtacacgtcgtctttgcagtgagatgtcgcttactggtctaggaagtaaaggtagttgtttcaggagctttttcactccccacccccgggactaattttatgtactacaggaatagatacattgattggtatttttatcagacattatttcataataatgtgatacgatcacattttgctttgcagtatcaaaaaaaaaaaaaaaaaaaaaaaagcggccgcggccgagtacg

SEQ ID NO: 43869 - DNA, 557 bp, Glycine max
  Clone ID: PAT_MRT3847_139612C.1
ccgattccgttccaaggaagcgtttcccgatcatcacgtgtatgatcgtcgctccattgctttggaggggggggggagggggcgaaaattagagaataccggcgagaacaactgcgtcgcgagcaaacggaacagcctatatcggacaaactatgtgttgtacctacgtaaacccaaagcccatgcaaaagtttgagacctcgtggcgcgaaaggctcaaagacgtgtaccattgtgcgtggagttagctaacaataagaaagataccgcatgctagctaacaaagtaacataccctaagcgacaaaaggcgatttacttccttcgagctaaccaagttgaccggggcgaaaccggatccgtgatagcgaaagtccgtccaaatggaaaaagagaatggaaataaaatattgaacatgtgcgtacccagaaaatgatgagaaaccacgaattatcagcagcagtataggcgtgagtaaaaggctttaaacgtaagtatggtggtggcctactccttgccgcattggcctgttcgccccagtgggtggtgtaatatgt

SEQ ID NO: 43870 - DNA, 276 bp, Glycine max
  unsure (1)..(276): unsure at all n locations
  Clone ID: PAT_MRT3847_139613C.1
tagatatttaaactttttatgtaaaatgtaatgtctagtaatgaaaaaaaaaaggttgggacatgtttattacgtaataattttattttctccaactttttcattttatttttcaccccaccttaactgagtcagagctaccctctttaccntttttattttattattttatatacnaaatctagttcaattttcacctgtacctgtattgtacatacctagttctactaggacagggtcagttaagacatgtttagaaaatgtctataaaaggta

SEQ ID NO: 43871 - DNA, 428 bp, Glycine max
  Clone ID: PAT_MRT3847_139614C.1
gcccccccattccccccaacaaaggggggggggaaaacacccgggggcccccctcccaaaggaaaagaaaaatcctcaattgggggggggatttaaaacggcaagggcaacccacaaaaaaaacctaaaaatattttttttttcaaaaaattttttttaaaaaaaggttagaaaaaaaggccctctcaccaatttttattttaaaccaccctaaaattttttattccgaaaggttaaaaggccctttaacctgagggaggtttaagacccccaagaggctttcttttctaaattttacaaagaacctttcttttaaaagggccggggggaattttttcccaaaaaatttaccctttaaaaaaacttttgggttaaaaacccccttgttggggaacgccccttttttttttttaaaaaaaaaatttttt

SEQ ID NO: 43872 - DNA, 192 bp, Glycine max
  Clone ID: PAT_MRT3847_139615C.1
tgggtcaatatcgcattatgcatgcttgtttcccaaatgctattcctaatcatcaagaagcaatgtctcgctcgttttacaaattcactaatcagtaccattttgctctacttgattgtttgtcactttgggacttcacctttctttatataacgaaaaaaaaagtaaaggctaaatggtgaaattttggtt

SEQ ID NO: 43873 - DNA, 354 bp, Glycine max
  Clone ID: PAT_MRT3847_139616C.1
atccttcgtaaatttatggaaaataatgccgatgaattgacatttattgggattacattgactaacctcaaaacaaaacataagagtcaaatttgaagactgtctaaaatttattcaaagttgaaatttcaaataaggcaaaatctttttgtggttctaacgctaacatataccgattcctcatctttgttagagcttttattttgctatctaaccacggatatgtgtaatactaataccattgatggagcataatttttgtctttcttaggatgacgctgacaccaagttcaacatattttggctctgcactattgcaggatgatctgtaggaggacttttgcaacctcactg

SEQ ID NO: 43874 - DNA, 646 bp, Glycine max
  Clone ID: PAT_MRT3847_139617C.1
ggctcgaggacctctgtccttaaagcttggtggcaatcacattccaagtggccttaccccacagaggaggataaggcacggttggtgcaggaaacgggtttgcagctaaagcagatcaataattggtttatcaatcaaaggaagaggaactggcatagcaacccctcaacttctactgccttgaagagcaagcgcaaaaggtcatagtggtgctgatcatcacatgtaaatggaggaaaactcaagaaccaatccctgactctgtactctgttagtttgtctctgcggtcaatcatggtgcatggcaagggattcaagtaaagccaatcataaaaaaaaaggttcacatttagcttccgctcatggaacgggcctaacacagatgtggaggatcaaaagcctgcagtacggtgatgcatcaaaattagggagttcaattaggaattacaccgctatcaaaatgggtaactccatgggagcatgatttttagtgatatatatatatatatatatacattaatgtttgtgaaatatatataatagtgaggggttgtgggtgtatagtaataatcagagcatttttccttcaataatgctaaatttgtttttgtgcttgaattcttggcctcgagggccaaattcccta

SEQ ID NO: 43875 - DNA, 256 bp, Glycine max
  Clone ID: PAT_MRT3847_139618C.1
aagacgcctgaactagattacaactttatggggtgctatcactattcacgactgatgcacaattacacaggtgcaaaactatcaatggtctaaaatttcttctcttcaacctgactcatctactattctctctctctctctgtaactcaccatttttttttaaaagaactaaacagaaccgtccatctctctcatttcttatatttcacggcatatcttcaaccatacctttccatctttttatcttgctatttca

SEQ ID NO: 43876 - DNA, 343 bp, Glycine max
  Clone ID: PAT_MRT3847_139619C.1
tcgagaacgcgaacaccaacacatagacatacacatatgacaaacacataacaccgaactccctaatctaccacaaaaaaaaaaacagggaggaggagtggaagaaaacaaaaaaacattaaaggatcaacgagggaaagagagcgacacagccacacacacagagactctcaaacaagacaacaagccgtggcttctagatagaaagattgtattgaagagatgaagatatatagacagaaagacagacacacatacaaacagaaagatggcacacacgcacacatgtgagcacgaaagacccacagatacacacaatatcagcacacacacacacacatac

SEQ ID NO: 43877 - DNA, 414 bp, Glycine max
  Clone ID: PAT_MRT3847_13961C.1
gggggccaaaaatctttgggccccataaaaccgttgggaacctttcaggccaaaggggcccaaaaccaaaaaaggaaggggggccccccttttttttgggggaaaaccgtttttaaacctaacctgggggggggttgggggggaaaaaaagcccccaatggcgagggacccccgcaaaccccagttttgcccttgctttccccccccgttaatggaaaccacctttaagggggggtttattctttgggcccacccgaaaacttccatggaaaacccccccctcctaaccataaccggaaaaaaaaaaaaaaagaaccccggaaaacccttccaggaactttttccaacttaagtttttttctttttatttcggaaaccccccttaggaaaatggaaaattcccaatttttgggg

SEQ ID NO: 43878 - DNA, 196 bp, Glycine max
  unsure (1)..(196): unsure at all n locations
  Clone ID: PAT_MRT3847_139620C.1
aacttacaacagnaattccatttaaaaaagaaaggaaggaagaatattaataatagaaatgaaaaaagaaaaaaaacatattaattcatttaaatgtttgtacctcatgcttgctatcagaagtagcaggcatcttcctcatgtttccgcaaccaaactcttttcaataactttcaagaagcaatatgggaagtag

SEQ ID NO: 43879 - DNA, 454 bp, Glycine max
  Clone ID: PAT_MRT3847_139621C.1
tacggctgcgagaagacgacagaaggggtagttggttttatgaaatgttgattgtgaataggccacaacagtgaagaaatcgcccataattggtcgggaaagggatggatatttgagaaccagtgagaacagagtctggatgccggaaattggccagaaaagtcttcacggcagcatgcaacaatgagtcatgctttaaactcgcaggggagtgcggaaaagagctctacagagtctatggctttacttgcaggggcacacaaacaaatgtaagagaaacctaaaacaagtcatcttaaaattgtctgattttccaattttacctgctataaaagcttgaaacagcattcagttgggggtaaaacagtcttcagccccatatttgaaatagtgacaacaaaggtcgcaaactgctgcaattcgcaccactccacatgagacagccagacatgac

SEQ ID NO: 43880 - DNA, 202 bp, Glycine max
  unsure (1)..(202): unsure at all n locations
  Clone ID: PAT_MRT3847_139622C.1
ttttnattttttatttnnnnnnnnnnaaaacaaaaacggggattacttttaaacaaagtaaacaatcatataatatttagggtaaacaaaatatggaggagcactgctttattgaaacaagcaaccaaattaagtgttgtatatccaaactttacaaagttttcttaagaatttttaattcaacatagcctatatatttttt

SEQ ID NO: 43881 - DNA, 653 bp, Glycine max
  Clone ID: PAT_MRT3847_139623C.1
ccggccgggtgctactacgtcgaaataatcttaaattttattagtttctgatatacaaaatgacttttattttagtgtaaaatgatactagtaaaaagtataataaaaaataactaaaatgagtggctttttctagagccaaggactaattagagtgtttctaaagttttaacaactaaaatatccattccatgcaatcttgaggactagctagctcattagtttattctttagcccttgcacttcacgaagacctctggaattaattatgtaatttccacatttatggaagactcacttaaaccttataaatacttttgcagtggattgtatgccttcccatcatcaacacttcttgcctaatcatggaacctgaaaggtactgcatatgatggagctttcacaatgaataaaatactggaatttgtagattacaacaagtttccattagttacaaagctgactgaaatgaattctatcagagtcttctccagccccatcaagcttcaggtcacttttatttccaagtttaatctacattagatattcttgacttgaagttctgttcctattctgactttaactgagatattaagtgtaatatttgagtattttgcaatatggtcagtgcaatgacctgatcaatttaatac

SEQ ID NO: 43882 - DNA, 107 bp, Glycine max
  Clone ID: PAT_MRT3847_139624C.1
attaacacattctatcaaactttatgtaactaacaggaataggtgaattggtggtatccaaactatgtatacatgttgactccaaactggatctactgctttatttt

SEQ ID NO: 43883 - DNA, 1524 bp, Glycine max
  unsure (1)..(1524): unsure at all n locations
  Clone ID: PAT_MRT3847_139625C.1
cccacgcgtccgcccacgcgtccgcccacgcgtccgcccacgcgtccttccacgcgtccgtacggctgcgagaagacgacagaaggggagtgacaggtgtttgcaatactagcgatagctgataagagagataccaacaagaaaagaaaaaaagaagagttgagattccctttgaagaaaagatggcatcccataggcaaagctatgaagctggtcaaactaagggccgaactgaggaaaagacgaaccagacgatgggcaatattggagagaaggctcaagctgcaaaggagaagacccaggaaatggcccaagctgcaaaggagaagacccaacaaacagcccaagctgccaaggacaagacttgcgacacttcccaagcggcaaaggagaagacccaacagaatacaggagctgctcaacaaaagacctcagagatgggccagtccacgaaggaatcggcccagtcagggaaggacaacacccaagggttcctgcagcagacaggggagaaggtgaagggcgcagcccaaggtgctacagaggctgtgaagcaaacccttggcttgggcgagcatgatcaagacaaccgcagaaattactaatactataatttgaagtgctttcttgtagtagtggtttacgcagcatggctttttaaataagctgctattccctacactcctacctaaggagtgtactattatccgcagtttctattctctctagctactttcatgtatgttcaatgctatatatagccttgaattaatgtcaactatgttctaattaatgctatagcttcggtttgtgttaaaaaaaaaaaaaaaaaaaaaaaaaaaaaaaaatagctgataagagagataccaacaagaaaagaaaaaaagaagagttgagattccctttgaagaaaagatggcatcccataggcaaagctatgaagctggtcaaactaagggccgaactgagaaaatgagtaaccttccttatgttttaggaaaagacgaaccagacgatgggcaatattggagagaaggctcaagctgcaaaggagaagacccaggaaatggcccaagctgcaaaggagaagacccaacaaacagctcaagctgccaaggacaagacttgcgacacttcccaagcggcaaaggagaagacccaacagaatacaggagctgctcaacaaaagacctcagagatgggccagtccacgaaggaatcggcccagtcagggaaggacaacacccaagggttcctgcagcagacaggggagaaggtgaagggcgcagcccaaggtgctacagaggctgtgaagcaaacccttggcttgngcgagcatgatcaagacaaccgcagaaattactaatactataatttgaagtgctttcttgtagtagtggtttacgcagcatggctttttaaataagctgctattccctacactcctacctaaggagtgtactattatccgcagnttctattctctctagctactttcatgtatgttcaatgctatatatagcc

SEQ ID NO: 43884 - DNA, 539 bp, Glycine max
  Clone ID: PAT_MRT3847_139626C.1
tgtgatccactatgaagcgggcgaacactcgacacttgaaggaccagtcattaccttaccattcactagattagatgcatgcgccgccacgaggatttgaacctccgctctgagcaatcttcagaccatcttaatcgcctataagggaaatgaccaaacacggtacccggggaactctgatggagtttctgacctacggcccctactaaatttatccttcaaaaagggactcgctgttgcctccctgaatattgaaggtgtcgaatcgggctgaaggatgaattccgctgttcggacatggcaggatccagactgagaataccttgccctccttcgtgtcattgcacgccttatgcagtaaccttttctttgtaatcgtcttgccatgaggacacccgcgagggctaaaaagggtgacgcctgaagctctttctctctgagccctagattctctccaacccgaaggagaacacccaaacccctttgaccctggcttgacccacccataccctgatgatattggcctggtggagaaacac

SEQ ID NO: 43885 - DNA, 584 bp, Glycine max
  Clone ID: PAT_MRT3847_139627C.1
cgtacgcatgcatccacctgggagctacgtaacatagataaacctatcataacccctaagccttggtgtgagccctgctcctcttcttgtgtcctcgcttcctgtttcggttcctcttttgctttcgagtgcatccctcgtttccaccagttccggtcgatccggtggggctggccgcaccgccggttggggacgcagcgtagactggccagttggggtcgttgacggtagaagtggtgggtcgaggtcgtcgtcgtcgagaggatgtggaagagggtgaccagtcaccttgtccactggcggaagttggaccggattgaccattggtggtggtttcgttgactggtgcgggagagtttcctcctcctccggcaccgaaagcaccagtttgagcaccgtttgtccatccccaagcagagttgtaagatggtttggtagcccattcgggagagtaaccgacattgttgatatcgttcgcccaatacatgggttgagtaggaccgtcgatcttcccctttctaggttcgacaggttgagggatagcacccgtggttcccgcctgaacgtacatctgaaagcgtcat

SEQ ID NO: 43886 - DNA, 2887 bp, Glycine max
  Clone ID: PAT_MRT3847_139628C.1
tacggctgcgagaagacgacagaagggggaagagaaaaatgggggtgttagggtgttgattctctgggacgctcttcgcattgcgggacgctgcaccttcctcgcggtattgcgcgcctgtcccactcccattccgtttttccgctcccctctctgtgttgcgaaaataagggttcattggtttggggctaattcttcttccgatttcgagccgagtgaaatcgtggctcgagaaatcgaccgtgcctgtgaaaacagtttatgcatttgagaggattctgactcacaactggaaaggcatcaatttcacaattaacccctgctactgttgctgttgccatcacattcgatatagtttcaaacggagttagggttttgattctcttcaacctttcgcacaatttaggaatgtacgctgatcgtatggatggtggagccaggagatcggtgaaggaacgcctttaatgggaattttagcactgattctactcgccaacagccagcaatcacgggaaagaggcagagggaagatgacaagtggaaacatgatctctatgaggatgatgaaccccagctctctaatcgcaaggtcactgctcaagatcttttttctgaaggaaaagaaagcatcctggactcgagccgaatcggctcgagcggctcgagctcttctgtcggctccgctagcacaacggtatgacgaagagaaaaatcggggtgttagggtgttgattctctgcgacgctcttcgcattgcggtaccctgcactctcctcgcggtattgcctgcctgtcacactcccatcacgtttttccgccaccctctctgtgttgcgaaaattttggttcattggtttgggtttaattcttcttccgatctcgacccgagtgaaatcgaaaagagaggagatgtagggtgttcgtgtggaggttggtgcctggaggcccgttcacgtgcgcctctatataaatttctgcgtctgagtcattcctctcattccctctgaattcttctcacccttcagatctctctcccttccttccatcccaaccacaaggttgctgagaagacataaaaaatggtgaagatttgctgcattggagctggctatgttggtggcccaaccatggctgtaattgccttgaagtgtcctgagatcgaggtggtcgtggtggacattgctgcaccgcgaatcaacgcgtggaacagcgaccacctcccgatatatgagcctggccttgatgatgtggtgaagcagtgcagggggaagaatctcttcttcagcactgatgtagagaagcatgttgccgaggctgacattgtctttgtctcggtgaacacaccgacgaagactcagggtcttggagccggcaaggccagctgatctcacatattgggaagagtgctggccaggatgattgctgatgtatcgaaatcagacaagatcgtggtcgagaaatcgactgtgcctgtgaaaacagctgaggcaattgagagaattctgacccacaataggaaaggcatcaatttcacaattctgtcaaaccctgagtttcttgctgagggtacagcaattgcagacctgtttaagccggatcgagtcctcatcggaggctagggaaaccccagatgggtcaaaaggctattcattctctgaagagtgtttatgcccattgggttcctgaggacagaatcctttgcaccaatttgtggtctgctgaactctcaaagcttgcagccaatgctttcctggcccagaggatctcctcggtgaatgccatgtcggcactttgtgaggcaactggtgctgatgtctcccaggtgtcacattcaatcggcacagactcaagaattggaccaaagttcctgaatgccagtgttggttttggaggatcatgcttccagaaggacatattgaacttggtctatatctgtgagtgcaatggccttcctgaggtggccaattactggaaacaggtcatcaaggtgaatgactaccaaaaaatgcggtttgtgaaccgcgtggtgtcgtcaatgttcaacacagtctcagggaagaagattgctattttgggatttgctttcaagaaggacactggtgacactagggagaccccagccattgatgtgtgcaagggccttttgggagacaaggccaagttgagcatatatgatcctcaggtcaccgaggatcaaatcatgagggatttggcaatgaagaagtttgattgggaccaccctgctcatcttcaaccactgagtccaacttccaacaaacaagtatctgtagtctgggatgcctatgaggcaatcaaggatgcacatggcatctgcattatgactgagtgggatgagttcaagaaccttgattaccaaaaggtttatgacagcatgcagaagcctgcattcattttcgatggccgcaacgtcgtgaatgttaacaagctgagggaaattggtttcattgtttactccattggcaaacctctagattcatggctcaaggacatgcctgcagtggcttaaagggaaaaagcacaatctggagcttcctttagggatgttgaatttgttgttggtctttcagagagaatgcccccatcctcctcttatatatgatgattatcatgctattcttatagtttagttttctgttgctgtttttgtctttgatgttacttttatttgatcaggttttaccccaaggtagagagagcttaattgccaaagtatattattgtctttagctcgctaaaaatccttatttgttgacctggtttattgtaataaatgagtactgagggattttttatacaacggatatcatttgttttaaaaatccttttgttactttctgtggccagtaatatttttttattctctctc

SEQ ID NO: 43887 - DNA, 765 bp, Glycine max
  Clone ID: PAT_MRT3847_139629C.1
ggggtcctaccactgtgtcctcttatccatcccctttatctttctccttcgcatattcttcctctgtacccttcttctccttggcctcctcttcctctcccgcacccacatttggcgccaccgattcttcaattttcggtgcagcaacgacgttgtttgccacttcttcgtcttccacaatgacgatgctgtttgggggaagcaatatcctttgccgtgtcgccttttggtggaatgccctcttccatgacaacgtcatttggtgcaacgccctcagttaaagcaggaggaggagtcatggtcggagacgttgagcacggagagtaggagcatgtgagtgggcttcagtgggaccatgagcagcccaagagcaggaagaagagtgcaaagtctgaattatggcaagactttgtttttagtaatttatatcagcttggaggtgactttatgggggagttatagtaatactgattgttgatgtctttttgttgaccttcttgaatgagtttgtgtttttaattgtttaaaaaaacaatttattgcaagaaaaatgctctagaaacatgagattcatagtcaaacaccctgagctacgacttgtaatagcttcttgaggtgagtgctactctggtttcctttatttgttgcatattcattgaaataggggaaggttctctgatgtagtttttatccctaaaatgatttagttgtttctaggtatttttggttttacggaaaaaaaatttatatattctgtttcattat

SEQ ID NO: 43888 - DNA, 335 bp, Glycine max
  Clone ID: PAT_MRT3847_13962C.1
cccactcgtacggaaatgactatgcaaagtatgctcgggaagatcatgatttggaaagtctggagagagatgctagataacaatctggctggaaacttgtgcatagccatgattttataccgccttgcaacttagctattgtatcagatctacgtcggcacaggagctcagcttgcgatgctgggtctaattgttcaatggctgactattgctgggatgatgtatgcacagcgatcagccatcataactacttccattgcctgctatgctctcacatggtttacccctggctatatgagagtgggcacgcactcacgagaagggcttacacactg

SEQ ID NO: 43889 - DNA, 750 bp, Glycine max
  Clone ID: PAT_MRT3847_139630C.1
ctttatgtgtgcaagggccttttgggagacaaggccaagttgagcatatatgatcctcaggtcactgaggatcaaatcatgagggatttagcaatgaagaagtttgattgggacccccctgctcatcttcaaccactgagtccaacttccaacaaacaagtatctgtggtttgggatgcctatgaggcaatcaaggatgcacatggcatttgcgttatgactgagtgggatgagttcaagaaccttgattaccagaaggtttaagacagcatgcaaaagcctgcattcattttcgatggccgcaacgtcgtggatgttaacaagctgagggaaattggtttcattgtttactccattggcaaacccctagattcaaggctcaaggacatgcctgcagtggcttaaaaaaaaaaaataaagaaaaaagccccatctggagcctcccttagggatgttgaatttgctgttgggcccccccaaagaaagccccccccccccccccccccccccaatccatcctcctgatatgatgatgattatcatgctattcttaatagtttagatttctgttgctgtttttgtctttgatgttactttttattggatcaggttttaccccaaggtagagagagcttaatttcctaagtatattattgtctttagctcgctaaaaatccttatttgttgacctggtttattgtaataaaggagtaccaagggattttttatacaacggatatcattcgtttt

SEQ ID NO: 43890 - DNA, 322 bp, Glycine max
  Clone ID: PAT_MRT3847_139631C.1
gttcgcgaagctcctcaagtccgagaccggcgccgacctcctccgcgagtacgtgcgcggctcgccgaagtgctcggagcttctcgaggcgtggaagcttcgcgagggaaagcaaggcatgaactacctgttcgacctaatctccgccattctcagccaaagtaaaggtaagtacaaccctagcgacatcgaaagcgtgaatattactaaggatttggataaattcgcgcgggtactgatttcccaacccttgagtgatatccccaacgaggtgaataacaaggagtggcggaggcagaaagcggcattgttactcatggct

SEQ ID NO: 43891 - DNA, 402 bp, Glycine max
  Clone ID: PAT_MRT3847_139632C.1
gaaccactagagatgttactatcgctggctgaagacacgtgaatctgctcagagatattaatccactctgcatggtattccatccgatcagtgtaatgattgcctcgcatgtcaatttggtgaagtagatcaagattcaagggatcaacggggatatcttgttgtagtccaaactgtagcttcacccgatttgtttgatgtcattcgacaatcgagaaacaaataattgctgtacatgtaggccaaatctccatgtctctatatgcacgtctaggtaggtgttcttcaagtcctctatatgggacccaagaaaactgaaatatatgtcaacaaggcaacatgttagtatgtatgtacatatttaaggtgcagatcatgatagtattataaaaaaaaaaaaaa

SEQ ID NO: 43892 - DNA, 504 bp, Glycine max
  Clone ID: PAT_MRT3847_139633C.1
actgtccccggcccctttcccccgtttcggcctgtacctttccatctgtgccataaactaggagaaagagccttggcacaaatgtattgctgccatgtgacctagtgatcatggatcacgagttttactggttggagacaccctctccaactcgggtatggctgcatactttaaaacctactcatgcccctaaatggtgagaaccttgtgtattggaccatccttatggcaataactttgccattttaattttttaaaacaaaaaagaagcatatttttaagcatgttcacaacaaaatcaattccatgctcctgagtttttgtggacttgtggagctacttttccaatggttggctgttcggcgtctttagtctccccttttgcacttatgttgacctatatgtgcagatcttaaatgatctgaagcatgcattctggcctcttctactggtgcactccgagcctgcgtccttatttttttgttattttcttttatttgaggg

SEQ ID NO: 43893 - DNA, 609 bp, Glycine max
  Clone ID: PAT_MRT3847_139634C.1
cccacgcgtccgtacggctgcgagaagacgacagaaggggatgtctcaaaagatatccctccctttgattgcatatatctgagaatcacccttttattgattcaaactttggaaatctcaatcttcacccttatgattgaaattaacatgaagcatcaaggcaagcttagagtgtttcttccaaatatgataatacttgtaaccatccttctccattcaacaacatggattagtgcacaggaagttgaggatgaaagtgagtttgattacataaaagggagtgagaagggtccctcacactggggggaactgaagaaggaatgggaaacatgtaagagtggcaaaatgcaatctccaattgatttgtcaagccacagagtgagagtggtgccaaagttaggggagcttaagaagtactatacgcctcagaatgccactatcaagaacagaggccatgatattgagctgaaatgggaagatgcaggatcaataaacatcaacggcaccgagatttttctccatcaatgccattggcattcaccttcagaacataccatcaatggcaggaggtatgacttggagctcacatggttcatgaaagcaaaacat

SEQ ID NO: 43894 - DNA, 512 bp, Glycine max
  Clone ID: PAT_MRT3847_139635C.1
gacaatcagcgcgacacctccaaacctccacatttcacaaccagctcgccagggggcctgcggtattgcgggcgtgcacaccttgccaagtagctaaagattggtaaaaaggcgaggaatctcgtccttgggtccagcggaaagtccagaatgtggagtcatgtcccagcaggctgccagctcgccccctatcccccccaccgtaaggaccctgggactccaagggtaagggaaaaggtgatggaagagcttaagattgcacgattccccgcgcattcttcctcttgacgcgttctgggagtccccgcttggcagctcctgtggtttgctctgggcaatttcaggtgggccctttggttgctgtctggagttggggtgtctctggtgtggtgcttcgtcgcggctccttgccggttcacggtgatttcagccctgagcttgtcctcttggtctccggtgggatcgtcacgctcgcgggccttggctggagcaacatcattcgcgatggtcac

SEQ ID NO: 43895 - DNA, 459 bp, Glycine max
  Clone ID: PAT_MRT3847_139636C.1
ctaattaaatattcttctaagatcttgtgtcagcttagttggtggaactgggacatgcaacaaggatgcatgggttcaaacttcataattcactccaccccttttcccattggggcttcccctggggtttgtctcaatagtgggtcctccctttaactaaaaaaaaaaatctattagggatgtttttacaattctagggcaagccttggtgcgacagtaaggttgctgccttgtgaacaacctctctacttgtagggttaagtatgtgtacatttaccctccctagattccagtaggagagagccttgtggactgggtcatcctgaatgcttttacaattcattttgagaaaaatgattacacactgacaatgtaaaaagatttacaccatcatgcaatcacaatccactgtgtatcgaaaagttgttgacttttatgataattactttaaaagtcata

SEQ ID NO: 43896 - DNA, 438 bp, Glycine max
  Clone ID: PAT_MRT3847_139637C.1
atcagctatgtctttcggcaagaactagcactacaacagggcctcacgttgtgggatggccaccaggttgatcttttggaacgagcgatgatgaatcacacgaaaaacaacggtgtctctctgtacaactcagttcggatggtgtcccttatcattgaaaggatctccagtgattcatgtccatgactaaggactataaaaggctatgaaaaaattgtagtgactaaagttgtagtattaatgcatcttgcaatgctcgagtatgtatcatatacaaatactttcatatcatacgacgtaaattcgcgttcatctcatactacataatactgagtggactagaatgtacataaccatattgacaacaaaggttaaagccaaatgtaaaagggtgtactcctaactgtcccacggaaagagaacctacaagatttaaag

SEQ ID NO: 43897 - DNA, 851 bp, Glycine max
  unsure (1)..(851): unsure at all n locations
  Clone ID: PAT_MRT3847_139638C.1
tccaacgattaacctgccgaacccggtaaaaaaaaagcctggggccaaggcaacaaacttcgtccccggaaagtgaccgtcaaagaacgaaatgacttttgaaagttttaagatttgtgtttggtgaagtacttcagataatgtgaattatcttgtgtatccgaatccaacttaatgttacttgctttttacaaaaaaaaaaaaaaaaaaaaaaaaaaaaaaaaaaaaaaaaaaaaaaaaaaaaaaaaaaaaaaaaaaaaaaaaaaaaaaaaaaaaaaaaaaaaaaaattnnggggggggccccggcccccaatttcccttttaggggggggttttaccccccccccttggcccgggttttaacacggggggagggggaaaaccctggggtttcccaatttaattggtttggaaaaaatcccccttttccccggtgggttaaaaagaaaagggccccccccgttcccctttcccaaaaattggcccaccttaatgggaaatgggacccccccttttcccgcccattaaacccgggggggtggggggtcaccccaaggggacacgttcatttgcccgcgcccttaggccccgttcttttcgttttttcccttcctttttcgccagttggcccgtttttcccgaaaagctttaaatgggggccttctttaaggtccctatttgggttttccgcctcctccccccaaaatcttattgggggatggtccactggggccctccccccgtaaaacggttttcccctttgagcggggaccccgttcttaaagggggcctttttcaaacgggaccaactcaaccctttctgggtttttttgtatttaaggattttcctt

SEQ ID NO: 43898 - DNA, 507 bp, Glycine max
  Clone ID: PAT_MRT3847_139639C.1
tgctacgattccgttccaaggaaggtttcccgtcatcactgtatgacgtcctccttctttgggggggggggggggaatcaaagagttatagaagagagtagagacaacgaagggcggatggggtgaagggtggtattgccgagaaacgagtagagatataatgagtgggggatgcgtggtatacagagacgataaaagtcaccaaggcctaaggacgaaggtgtgttaggtagaaagataaaccaagttattgagattaacgtaaggggaaagagtctcgtgccgacaaaccacgtaaacgaaagtatcgtgggtagtacacactttatatgtagagcagcagggagcaagtaagtaagtagtctgtgtcaaccgtaataatagtcaatggtaacggagtaggtagagacatagcacaatagcgtgtagagaggccacggttagttgtacgtgttgtagccccagcaaagttatcggctgcatacggatcaagcatacatatattat

SEQ ID NO: 43899 - DNA, 110 bp, Glycine max
  Clone ID: PAT_MRT3847_13963C.1
gttaaactgttccaggtcacccatgaggttaaggaaccgtgaatccttcttccaattgatttgtccaggcaactgttgcatggaagggcaggttgctcccccagacaagt

SEQ ID NO: 43900 - DNA, 631 bp, Glycine max
  Clone ID: PAT_MRT3847_139640C.1
gccggaattcccggctcgaccccgcgtccgcacagttcagcagacacagaggcgtggttgttgttgttttgacaatccgaggaaaatggtggtggttttgtcggatcaggatgaattcgacgaggagcccggcgaggttgtcgattcggcgccaccgcagaaggtcggcgaagagagacaattcagcggtttcaagaagaagcttctcaaacgcggacagggttgggaattccccaacttcgacgacgtcgtaactgttcgctgtgttggaattggaacattgctcgatggaacaacgtttgattacactagggagagggatcgacctagaacgtttgctctgggcaaagatgatgttgctgctgggttggaccgtgggatttgcactatgaagaaaggggaggtggcattgttcacgttgcccggagatggtggtgatggtgattttacgcgtgattccgacggctcggttgtgcggtttgaggtggagctcgtttcgtggatcacggtggtggatgtttgcaaagatggtggagttgtcaagaagattatggagaaggggagtgggaacgagcgccccggtgatcttgatgaagtgctggtgaagtatcaggtggtgcttgatgatggc

SEQ ID NO: 43901 - DNA, 161 bp, Glycine max
  Clone ID: PAT_MRT3847_139641C.1
ttttaaaacaaattcccaaaaaatattgtggtgttaggacataggcgaatcggggtatatatcccaaaatcaaactggacacaaatttgcaggaatcacatgtaacaaattattcccgagggtaaacaaattcatattccaacctgcattttgttaagggg

SEQ ID NO: 43902 - DNA, 420 bp, Glycine max
  unsure (1)..(420): unsure at all n locations
  Clone ID: PAT_MRT3847_139642C.1
ttggaaacttcgaccataattagtttagttatattttttcttttgattgcattaacaacagtattcgttgggtcagaatttgcactagtaaaagtgagatcaacgcgtattgaacaattagtagatgagggtaataagagcgcanaaattgtcaaaaaaatgatagacaatcttgattattacttatctgcctgtcaattaggtattacagtaacatctttaggcttaggttggttaggtgaaccgacatttgaaaagatgatgcacccactattcgagttattacatttaccgagtcctttaacaacgacgatttcatttgttgtttcattcattgttgngacatatttacatgttgtattaggcgaattggcacctaaatcatttgctattcaacatacagaacaacttgcacttttt

SEQ ID NO: 43903 - DNA, 256 bp, Glycine max
  Clone ID: PAT_MRT3847_139643C.1
aaattaagcgagagcattccattgttgttatactgtattgtagccggataataagtcacgagatagccgctaataggggaagatgactgaggcatatataaggaacaagcctgggatcgcgatcgtgaatgacatgccggttctccatcacggtcgttcatcactcgggttcattccggtccggttcgtcctgcgcatctttgtcaatgtgcctatcgccgttgccatcttcctcactgttttccgctctttctct

SEQ ID NO: 43904 - DNA, 298 bp, Glycine max
  Clone ID: PAT_MRT3847_139644C.1
tttagctgatgcaaatgctgatgactcgggtgctgggtcaaaggattatgtgcatattcgtgtacagcagcaatatggtacgaaaagcctgacaaccgttcagggattgaaaaaggaattcagctcatacaagatactctaagacgtcaaaaaagagttgtgttgcaatggatcagtagctcaggacccagaactaggacagtgcattcaacttcaacgtgatcagaggaagaatgtgtctacctttctagtccaggctaggttggtgaagaacgatcatatcaagatgcatggtttc

SEQ ID NO: 43905 - DNA, 375 bp, Glycine max
  Clone ID: PAT_MRT3847_139645C.1
atatatataatatacttttattatttcgagccgtgtttactaatgaaagggactcacccttgatatatcagcctataaggacgagcccatcgaaaacgatcttttcttaaactccaataatgaaatcaatatggtagttgatattgggaaacactaaaacgtcgtaatgtgcccggaataaatggcccacaccccatgaggaatccaaccaacacttaaatgcaaacatacttgatcatactttcaaaactcccatgattaatgacccaatggagcgttcaattacaccaccgaaatgatgctcgcccaaaaacatcccagtggggggggacccaccctagggcatcccatttgctagacccttgaacctgctaa

SEQ ID NO: 43906 - DNA, 254 bp, Glycine max
  Clone ID: PAT_MRT3847_139646C.1
cgggattcacacacctaactacgaaagtcttccatagccccccaaaaatgaatagcaccatcttctttgctctctttctcttttgtaccttggggaggtcatacctaccttcacccatccctgatttcgtgctcgataatgaatgtaaccctcttgaaaattcttgcacatactacaccctgtcagacataacaacacttcgtggactcatagctgccccaactggaaattaaacatgccctctcactgtggtg

SEQ ID NO: 43907 - DNA, 324 bp, Glycine max
  unsure (1)..(324): unsure at all n locations
  Clone ID: PAT_MRT3847_139647C.1
tgncnntnnnttttttttttttttttttttcaataaaagaaactcacatttatttagtcggctttagaggaagcatgattactctgttttccaatactgtatggttaaacataaaaggctcacaatctcttgagttttgggattggtcaaatttctccgggatcaagttctttaagactaaacaccattttcttccgggaaccaacatatctttctaatcaacttgactgagaaacacgagatcattacataggcgaactgtttcacgtttcacatgcccacataagcacatagatagatgattctttttctaagccggaaact

SEQ ID NO: 43908 - DNA, 828 bp, Glycine max
  Clone ID: PAT_MRT3847_139648C.1
cccacgcgtccgcccacgcgtccgctagatattgaagcgtcttcagacttttattcaaaggagtgtaattcaacactttctcttttggatgagcttcgccacttgcaagttaaaaattgtgttaaaacaaaagctgctgaagatacagatgttgagtcagaaaaaatctcttgctcccaaactcaactccaagaaatggggaatactgatcctggcagagagaacatgtctttgcatgtgaaccgaacaaaagattggatgcagaagacatcagcacatgtaaataagctgttgagtgcaacatttccacatatctgtattcacccttcacaaaaggtgagaaagggacttgttgatgctataaaaggactcttgtcagagtgcttctacacactgggggaaagtagactgatgcttttggagtgcttatgtgccttggtcgttgatgtatctaatgatgtgtcttcaactgcacaagatttccttgagtgtttgttctcacaaaatttgaaacatgttataaaacacaatgctgctgagatatttatcaggaaccttgaaaagcttcccagagtggtgcttggccatgaggagtcacatgctgtgttacatgctcagcaattactaacaataatattttattctggtcctcgtctgttagtggatcatcttcagtctcctgtatgggcttctataataatttcacatattccttctatagatctataataatttctcctgtatttgttacaataatggtttgttctgtttccttagatgcagttatcttgtagactcatacagaataatagaagaaactaattaatc

SEQ ID NO: 43909 - DNA, 211 bp, Glycine max
  unsure (1)..(211): unsure at all n locations
  Clone ID: PAT_MRT3847_139649C.1
tcgcaacnnnacaaaanaagnccaacccagagancgcgncttaataaacgnacttctctganaacccccatttctnntcttcnntctncttctctntcgcntcttcgatcttcgatcttcgtcgctgaaaatgagagagtgcattcantccacatcggccaggccgggattcaggttggagcngctgctggggnnttananctngnaaang

SEQ ID NO: 43910 - DNA, 316 bp, Glycine max
  unsure (1)..(316): unsure at all n locations
  Clone ID: PAT_MRT3847_13964C.1
tttcctagcacagngaaacaagctcgagtagctctaaattctgttctaactccatttctcaccactaatctcataaagtatgatggttgcatgcacccggaaatccacagactgctcaagtcctataaactcagggagtttgagatgttactaaccaagttagccataccatatcagcttgttgggcagtgggtaacagtcaaggagtatgaacgtcaaggtatccacctcaattgtccagagaaagtgaaaatacctttctatgtgcatggaataccagacaagttgtatgagatgttgtgggacaccatttgta

SEQ ID NO: 43911 - DNA, 1139 bp, Glycine max
  unsure (1)..(1139): unsure at all n locations
  Clone ID: PAT_MRT3847_139650C.1
ggctcgagtaacaaactattgtgattcgtgagtgatatgagtatgatgtctattatgcatgcaatgtcgatcagaagcagcgctttcttttgctttcaaataaattgctccgattcaaagcaaggtcgtggttttggagaaaacactaacagtaacagtaacaggattaagaccaacaaatctgacaagggatcaacaactaaacagtctcgccctctatcttctcaggcaccccgtttaagttcacaacttgacggcaaatctaggaacgactttttggatgttgactttgaggaacggctaaaagcagttagaaggtcagcacttgagcagaagaaggcagaggaggaaacagaatttaaatgcctgttctgtgatgtataaaaaaaactgtatgcatgtattgtaaccctcatggtgcagattggagtaggggtagctgttgcagtcttcggtctggtttttgcttttggtgattttcttccatcaggaagtgttagtcccactgaagacagtgctgtggtcaatagtaagttgtctgaggaggataaagctactcttcaggtatgattttcacccaattatggttatcttctggcaatcagtaaggtactaatgttcttcctaattattttagtcttaaactcttgttctgttcccttatgaagcaaaagttcactgaattgtgattgtttcttttcatggactggtggaaaggtgggatgtttggtagataagaatctggtcttttgttggttgtgttttttattttcaacattattcatctatattaggataaaacatcaggcaagatgaaaagtaaatataaatagcttggatatgatagagctgtattttttgtatcagagaaacttatgtaaagctttccacaagcacagacacacacttataaaatataaagtaatgtgtagaaaaggagattttagaacaatagtctaccaggaatttaagtatgcttaatgcttatagtatagatatgatagacctgtatttcaggtcttgttcccattgaactgcttctgctataaacacatgcacacatacccacccagagcanagaaattataaactgttttttgaagattattgaacatttctgattatgcaatcaagttaat

SEQ ID NO: 43912 - DNA, 346 bp, Glycine max
  Clone ID: PAT_MRT3847_139651C.1
ggggccagggcactaaaaataacatttgctttaaaaaagatgtatcccaacatggggcctttttgtttaagccagaaacagcaataaggggtttaattttaatatacccccaacagggggtgaattattaaaagaatttggacccaaaacacttttggtttaatttggctttaaaccggaccgcaaaaacaactttgggggggcccgggggggcttaaccctataataatattcaaaagccttgggggtaggccttccggatgaaaaaaaacaaaaactctggggaattgagttcataaaaccttttggaaaaatatgcccccattgaaaaggaacttaaaattaa

SEQ ID NO: 43913 - DNA, 361 bp, Glycine max
  Clone ID: PAT_MRT3847_139652C.1
gtttatatttaaacacacttattgctcatagacttgctctttatttatgatgaattacatgttacattcgagtgaacgaatgctcctggacactcattgccctgatctttgagacttttacggtgctcaggatgacgcttaaacgtaagcttggtgagagccgaactcagaaaatgacttgtgctctattacaaacctactaacgcttgcactgagaaataatagctcttttatcgtgttacctgacaacaatttactgcccgccgctagacaaaagcatagactgtatatccactgttgttccccaccttgatagtctttcactaatcccgattctaaaatcatggccaccctttaaaca

SEQ ID NO: 43914 - DNA, 193 bp, Glycine max
  Clone ID: PAT_MRT3847_139653C.1
gacacacactcgatttgtaatgtatcacgatcagttctaggagttgaaagtgagtacggaatgatggcagtgacaccgagaaatgctccatcgatgctctattccgacttagccaatttcagcttccgaggctcagcgcatgatccacttcggcgcagattgactccacatggacatcatggatgcgcaatct

SEQ ID NO: 43915 - DNA, 449 bp, Glycine max
  Clone ID: PAT_MRT3847_139654C.1
tggcttggaacctttgggctgatttatgtgcttgcatggtcgtgagaagatgatagaagggggtagcctaaagtgaagaaagacctgaaatgaagaaagaaagtgccgcgaagaacggtggaagagggataagcgactggcgcttatagtgcagaggagcggaaggaatactctaagaagggagaagagcttaagaaaccgaccgcggcggaccccatcgtcctccggcgtggcttacgttgccctaccgttttaacctccgtagagcccgtcaaaaagccgttgaacgctattccttctaaggcggacgcggacgaaccggagatcgcccttaaggagcggggaaccgaggtcacgttaattccttcgcctccgaaagaaggtaagtcggcggataaggccgcgggcgttaagaaagaggagtcgtaaccgataacagttaaatacgt

SEQ ID NO: 43916 - DNA, 499 bp, Glycine max
  Clone ID: PAT_MRT3847_139655C.1
cagatgcatacaaggtaagattcctgtctgcccctaaaatttggagcttgcagttcttccttctagtttaacattttgatgagtttttcttctctgttttcaggttttgaggcttcttgattttcttgcgagcttgttggagcatccacttggaaagggcctattgttgagggagggcactcttcagatgctaacaaaagtactggatagatgttttgttattgttgatgttgatggaaagcagattcatgatagaagttctgcaaaatgcagctttaatttttttagttggtgtctcccaatattcaagtttatcatgcttctttttcattctgaaacttctcgacattacccccgaagacatgactttaaaaattttgaaaaattgagtgatgaagattgtgccctgattttacgatatcttttgaagagttgtcaggtgactcttctgatactgtctgtatatacttttgaagattgtgccctttcttcagcatgt

SEQ ID NO: 43917 - DNA, 235 bp, Glycine max
  Clone ID: PAT_MRT3847_139656C.1
aatcattgcaaacagaatatcctttttattttttagatccttattgagaaaaaatatatacacaacccaaggacagaatgcaacttgagaagcaaaaaaaggctgggaagacttgaacatgaaggcgtaaagaccaaactctctggttttggcttaacggattcaaagagcacagacgaaaaaaaacgctctccaaaacttgggaagaaccgaacaaagaggtatccagcaattt

SEQ ID NO: 43918 - DNA, 361 bp, Glycine max
  Clone ID: PAT_MRT3847_139657C.1
cattattaatgtttataattttgatgttacatctgtagggctggatttacaagcactttccgtcagtcgcagactccactactgatcaggactacgacgaggattctccatgtgcgtgtaggtggattgtgacaaaaaaaatcgtgaagagcattcgtacgccggcgtacagggagtgcctggaccgacttcaaattccggatgtgtgttggatctcgtatggggattaccgattggtccgggacttccacatcaaatcatgctattctggtctcttgcgctgggggcctgttgctgtttattatcgaccaaaaagggtcgtgcggcagtttggatacacacagaccattcctgctcctcc

SEQ ID NO: 43919 - DNA, 365 bp, Glycine max
  Clone ID: PAT_MRT3847_139658C.1
ggcaacgccggctctcccctattcggcttgggcgcccccgtcggggggcatcacttcatactcacaccacgcctctcccgccggccccgggcttcaggccccccggcgggggttcgagtgacgaatgccgctggggaggggccacatcgtctatggccgcgctgccaccgcttccatgcagcgtggactggctgggatgcgtctggttgcccctgggaacccaggcgaatgggcgccgggcacgcccgagcgagaggagacacccagcgcgatgcagatatatattcttaccagcacccaccctgggatcacctccacctcggctaccacgagaggagaggtcttttggcgcctaaaggacctac

SEQ ID NO: 43920 - DNA, 391 bp, Glycine max
  Clone ID: PAT_MRT3847_139659C.1
cccacgcgtccgtacagctgtgagaagacgacagaaagggtaacttagcgagagaagggacccaccacagcttgacattttaataaagatgccatgcgtttgtgcgtcggataatgccctttactagttctcatgcttcctcgtacagcagagctactacgaggagaaatgttcgagttttgattcttattttcttcccttttggtaaataatatttttctctttcttttataacttagatatgcagaccggagctaaagatcttgagatactatcatctattgaagatttttatagatattgttctatatacacaaataaaggattatgctttttactataaagaacacagtttctgataactatggtctcgcaattgaagtcctttgag

SEQ ID NO: 43921 - DNA, 233 bp, Glycine max
  Clone ID: PAT_MRT3847_13965C.1
gaaagagttagatttaatgaatatggtaactcgtcatataccagatcgatcccttttttcatatgttgtataccctctagattaggtcttatgccatccgatcccgtgaggttttaactctttgctttattctaaagcatgtcaacgttacggtggaattgtttatccggtcgaagatcttggtataatggtctattatgataaattgttcatgacagaattaacaataatta

SEQ ID NO: 43922 - DNA, 1019 bp, Glycine max
  Clone ID: PAT_MRT3847_139660C.1
gatttccatcgcgtaaagcctaatttcccttttctgcatcatatttttgattctcccacaacacaacaccttttccttttcccttccgttggtgccattcgtgcagcaccggatcctctcatttctccggcgataactctcccttttccggcgaattcaccgcttcctcgatatgaatcccgagtatgactatctgttcaagctccttctgattggagactctggtgttggtaaatcatgccttcttctaagatttgctgatgattcatacattgagagctacataagcaccatcggagttgattttaaaattcgcactgttgagcaggatgggaagacaattaaactacagatttgggatactgctggacaagaacgatttaggacaataactagtagctactatcgtggagcacatggaatcattattgtttatgacgtgacagatgaagatagcttcaataatgtgaagcaatggctcagtgaaattgaccgctatgccagtgataatgttaacaaacttttggttggaaacaagagtgatctgacagcaaatagagttgtctcatatgacacagctaaggaattcgcagatcaaattggcatacctttcatggaaacaagtgcaaaagatgctacaaatgtggaagatgctttcatggccatgtctgctgccatcaagaatagaatggctagtcagccttcagcataaaaatgcaaggcctacaacagtgcagatcataatgcaacctctccaacagtgcagatcaggggtcagccagttgcccagaaaggtgggtgctgctcttcctgaccacagttactcagatccattttatttggtcacctttttcatgtaagattttttttattattatatttcgctaaatagtggaccagtgtcagaatttgtctgttggtttggaactgacctagatgatcccattctttgaatatacttaatgatgtggcttgtgcaaagtataatactcatcaatgctaaatacatattcctattc

SEQ ID NO: 43923 - DNA, 927 bp, Glycine max
  unsure (1)..(927): unsure at all n locations
  Clone ID: PAT_MRT3847_139661C.1
ggattgagagctacataagcaccatcggagttgattttaaaattcgcactgttgagcaggatgggaaagacaattaaactacagatttgggatactgctggacaagaacgatttaggacaataactagtagctactatcgtggagcacatggaatcattattgtttatgacgtgacagatgaagatagcttcaataatgtgaagcaatggctcagtgaaattgaccgctatgccagtgataatgttaacaaacttttggttggaaacaagagtgatctgacagcaaatagagttgtctcatatgacacagctaaggaattcgcagatcaaattggcatacctttcatggaaacaagtgcaaaagatgctacaaatgtggaagatgctttcatggccatgtctgctgccatcaagaatagaatggctagtcagccttcagcaaacaatgcaaggcctccaacagtgcagatcagagggcaacctgttggacaaaaaagtggttgctgctcttcctaaccaggtggtgctgcttggtctacacttaccttttgcatgtaaggggcatatgctatttcactaaatagtggaccagtgtcacgtaatccaacctgtggtttgggaattggcctagatgatcccattctttaccatatacttgaatgctatgattgtgcttagtacttgttaatgataaaacttttatatttctgctcatctatttttaccaccatggcctagttttaattttttttacttgtttggtttgaaacacgtgccatcttttgtgattgctccatgactgtcactgaacattagagaacaaaaagttgtgaacaatgactaatggcaaacaatcatggagaacaaggcattgcatggagaatctgttttcctcgcctgattgaataacaaactttatatgatnaa

SEQ ID NO: 43924 - DNA, 327 bp, Glycine max
  Clone ID: PAT_MRT3847_139662C.1
aaacccccatggggggacaaatgaaaaaaaaaaagaaaagggggaagcaaaggaaaaaacaccgcagtatcacaaaagggacagttccaaaaagaacaataacaacggcaacagaaaacaaaggaaagcaagggcaaacaacacaaaaaaaatacgggggcaaaaaaacagccgaatagggccaaatcattacgctgggggggcgataaaagagggggccagaaagactaccataatgtgccccactcctgaaaggaaaaacatcaccgcttggacaagggaccaagttaccaaacgccccggggggcttttaaaaggcccaagggg

SEQ ID NO: 43925 - DNA, 1144 bp, Glycine max
  Clone ID: PAT_MRT3847_139663C.1
acggctgcgagaagacgacagaaggggattctcccacaacacaacaccttttcctttcgtgcgtgcgattctcctgatatccaaggtgaagcaccgacaccggacctatctccggcgaatccccagtccccactttcttccttcgaaatgaatcccgagtatgattatctgttcaagctccttcttattggagactctggtgttggtaaatcatgccttcttctgagattttctgatgattcgtacatcgaaagctacataagcaccattggagttgattttaaaatacgtaccgttgagcaagatggaaagaccattaaactacagatctgggacacagctgggcaagaacgatttaggacaatcaccagtagctactaccgtggtgcccatgggatcattattgtttatgatgtgacagatgaagagagcttcaataatgtgaagcagtggctcagtgaaattgatcgctatgcaagtgataatgttaacaagcttttggttggcaacaagtgtgatctggaagcaaatagagcagtgtcatatgaaacagctaaggcatttgcagatggaataggcataccttttatggaaacaagtgcaaaagatgctacaaatgtcgaacaggctttcatggcaatgactgcttcaatcaaggatagaatggcaagccaacctgcaaataatgcaaggcctccaacagtgcagatcaggggtcagccagttgcacagaaaggtgggtgctgctcttcctgaccacagttactcagatccattttatttggtcacctttttcatgtaagattttttttattattatatttcgctaaatagtggaccagtgtcagaatttgtctgttggtttggaactgacctagatgatcccattctttgaatatacttaatgatgtggcttgtgcaaagtataatactcatcaatgctaaatacatattcctattccttttcatttgggactattttgttttttattccctcaaaatgtgctgtcatagaactgcataaccaatctcttgttatactccactttgcatgtgtaagaattttaaactcacaaatatacaactatgttatgcaatcaacattctttgatgggagattaaatgaaaccaaaccatttatgtt

SEQ ID NO: 43926 - DNA, 1245 bp, Glycine max
  Clone ID: PAT_MRT3847_139664C.1
ttcctaaaaaatatcattacaaatacgtccccatatttgcgcccacgcgtccgggctcgggttcaaaagaaaagaagcaccaagcgaagccagcgaagctgtctttacaccttttccttttcccttccgttggtgccattcgtgcagcaccgagttcttcgtgcgtgcgattcttctgatattccaaggcgacgcaccgacaccggacccatctccggcgacatctcaccgatctccggcgaatccccggtccccactttcttccctcgaaatgaatcccgagtatgattatctgttcaagctccttcttattggagactctggtgttggtaaatcatgccttcttctgagatttgctgatgattcgtacatcgagagctacataagcaccattggagttgattttaaaataccgtactgttgagcaggatggaaagaccattaaactacagatctgggacacagccgggcaagaacgatttaggacaatcaccagtagctactatcgtggggcccatgggatcattattgtttatgatgtgacagatgaagagagcttcaataatgtgaagcagtggctcagtgaaattgatcgctatgcaagtgataatgttaacaagcttttggttggaaacaagtgtgatctggaagcaaatagagctgtgtcatatgaaacagctaaagcattcgcagatgaaaaaggcctaacgttatggcaactgtgcaaaagattcaatgtaggcataccttttatggaaacaagtgcaaaagatgctacaaatgttgaacaggctttcatggcaatgactgcttcaatcaaggatagaatggcaagccaacctgcaaacaatgcaaggcctccaacagtgcagatcaggggacagccagttgcacagaaaggtgggtgctgctcttcctaaccactagtgactccgatccatttcatttggttacctatttcatgttagatttttttttttttataatatttcactagtggaccagtgtcagaatttctctgttggtttggaactgatctagatgatcccattcgttgaatatactttatactaaaaatgatatggcttgtgcaaagtataatactcattaatgctaaatatatattcctatcttttcatttgggaccaaaaaaaaaaaatttaaaaaaaaaaacctttggaagaaaaaaaaaaaaaaaaaaaccaaagaaacaaaagataaaaccaaaaataaagtccacctcgg

SEQ ID NO: 43927 - DNA, 117 bp, Glycine max
  Clone ID: PAT_MRT3847_139665C.1
cggttgttacgctgctgcacattctcacgaaatttgtcgaccctgaaaaaatttgccagaccttccaccctgaaattgttatgtcaaagttgccttacttgttgatcaacactcact

SEQ ID NO: 43928 - DNA, 379 bp, Glycine max
  Clone ID: PAT_MRT3847_139666C.1
ctgacgcgtgcgaggaccctttggagcttgcaaatgatccaaaccaagctggactgctaaaggtgaaggaatttaaaaatggaagactagctgtgtgggcgatgcttgaatcctactttacagcttatgtcactggagaaggtcctgttagataaccttgcacaaaatctaattgaccctgctggcatcaacaaggtcaatgtcgttaatggatctgctgacagagctttaactgtctaaatgattaatcttcatgtgccatttggagcttacttaatgaacaatacatatgagctgacatattaacggattcggctttgttccttggaactgaaccccccttgtatcggtgcattaacttcctttgttgtgggggtca

SEQ ID NO: 43929 - DNA, 485 bp, Glycine max
  Clone ID: PAT_MRT3847_139667C.1
cacacgcgttttctctctctgccgtatacacaccttgtgaatctggtgctgtttcaaaagccgactgattccttgactgacataaaagcagtgtccacttatatgcatgcattcctcttactgtataagctagagctaataactggaggacatcaggatagtcgatgagaaatacttctcatcagatcgaggttggtgcatgaacagtatggaaatgcaccaagagagtgctaccgattatacgcacactagttcgagagaataaccgacaatagtggtaatagtgatgacgctccttctaaggcacgaatcctaagtaacattcaaaacttttacaacactgtgattaaggcacaaatggtactataagtgcacaccgttctggaggatagagaatttgctacagtagacccagatggctattgtgaggatggcacatgtctaagtacgctgtctagtgcaccagcaacacgctgaacggaaat

SEQ ID NO: 43930 - DNA, 366 bp, Glycine max
  Clone ID: PAT_MRT3847_139668C.1
tcggccatgcgggcggggcaaccatatgcggagtggcgattaggctagatgtgccggtgccaacaccaaccaagttgtgagcaacatggaaggaatgacaaacggactttgcgggggacataaaaactagaggcgtgactacacacgccgacagatggcttggcgcacaacgagggggatatgatactaagatggttggagagcagaatgatgcctccctcatgaagcccctataacaggaatttgcaattgcagttgcacagaaatgcgcataagatagagctgagaagaatgactgggccgagctctatgctacaagtatgtttctacactcctctaaaaattgtggatgtttgggactgtatg

SEQ ID NO: 43931 - DNA, 227 bp, Glycine max
  Clone ID: PAT_MRT3847_139669C.1
cattcaagtcgataatccgagatccttcaactcctcgctggcagcaacaggagtactaccagcatccgcgtatgtctgaagtgatcttcgagaattagcgatgggaatttgaagcggatgcttcacgtgagtcaggagcgcacgaatcgtgcggcccaagccgtgagatgcatgtacgcttgcttcagcggcacatttggatcgacccgattccgcgtgtctatgca

SEQ ID NO: 43932 - DNA, 249 bp, Glycine max
  Clone ID: PAT_MRT3847_13966C.1
cggaatttcccttcaatccagaaccaatcacgtaaccctttccgatctcaaaaactctcttatccctcaatcacaccaatccttctacttcaccttcaatggcaaacccctccccgacaaaacccctctttcccaattcccacctctctgtaccctctctctacgctcccgcgtcctaggcggcggcggagacggtggcgctacctgagccgagtcccgcgactgctacctcaacatgtacgccgacaa

SEQ ID NO: 43933 - DNA, 258 bp, Glycine max
  unsure (1)..(258): unsure at all n locations
  Clone ID: PAT_MRT3847_139670C.1
taaactnaagagatgacattacttccaagggtaaattattacaaaaaatcatgtcttgtgttttgctacctttcaagttaaaaactcaaaatatacaaagctagctttggatatggcaaatttctaaaaaacggatacatgaaactagctaaattctgataaaattaacattttccccaaacaattttaacccaaaaaataactaaacctcataaaaaatcacatgttacccgaataaataaaaaaaaagggggaaca

SEQ ID NO: 43934 - DNA, 334 bp, Glycine max
  Clone ID: PAT_MRT3847_139671C.1
aaaggaaactacaaaattttaactaaaatgtttttttccatcataacaaaaccttaatctgtgattttttaataaactattgtcctacccatatatactcaaaactcactaaaatttactactagctcaccaatctaaactaaaacatttcctatccctatgaaatcttatgatatatttaattatctatatttaatttttcaaaatccttttttttcatctcatttataatcatatataaatccttttaacattttatcgtaacatataccaatacatttttcttttaccataaaataaactttatcttttatacatatcaacttattttttt

SEQ ID NO: 43935 - DNA, 255 bp, Glycine max
  Clone ID: PAT_MRT3847_139672C.1
cgccgtggctccgctccgtccagaacaccatttcccggcacggcggctaagtcatgcgcgccaccattacctcttcgaagcgttgtctcctgaagcgactacctcaccgcttaaacacaaccctctccttcgcgtcggaaacttggccggctccggcggcgtccgtcgacgatggattcccgtactccgacgtgccgtcgcctaagcggagaaactcggagaggaagccgtacgtgacgccgatgaaggctctga

SEQ ID NO: 43936 - DNA, 589 bp, Glycine max
  unsure (1)..(589): unsure at all n locations
  Clone ID: PAT_MRT3847_139673C.1
gaatgataaattatgcacaacatattattggcattattcttttaattgtttattcaatcttgtctgctacaaggcgaatcttattcaaagactctttaaatgtttgccatgaaagcatataatgatcttgggatatcatcccttcttcaacaacttgcatggcacgtttgtacaaatgatcaaaacactgaaccgggttgctaatatcaacattgtcagcactgagatgaggtacatacaaacgcttaaaatccctcctccatcttgacaaaatgtattgacatggaatttcctccacacaattgtaattaaggatatacaaggcatgtctgcacaggtaacctnttgaagttaaagcaactacaaatgcagcgtacttctgctccggcattatcgtacatgacttcaaaattcctagcatctcttgcaggctcttccctttcgcgttcttttaccatgtatgtcactatggacccacttgtttgagtctgtgtgatgctgaaacaagaggacatcattaccacctcatcttggaacttcctgaatactgcatnttgtgtacagtttagaagagttgcaactcatagta

SEQ ID NO: 43937 - DNA, 553 bp, Glycine max
  Clone ID: PAT_MRT3847_139674C.1
caagtttaaatccacaatcaactaatcacaaaggcacagttttaccattacgccatacttataataaaattgtccaagataatgccacatgttaacttagcaaggctttgtttcccaatcaaaacctcaacattttcttagttttattgatgagaattaagaatgcatctgactacagtttcgctttaagatttgcgcagcatgagaagctccccaaaatcacaatgaatggggacatactagggactccaaagagttgcattggataagagatgtacactaatacaagtgattactacgataatgcatccgaagttccttgcagtgagggcatatccatggccgtagaggagggtccatgcaataggaatggatctttcgaatgtggcaaacatcgcaactctcaaggagatcctctggttcccgaccacggcaaactacacaagcatttgactgtgcagactcaaagatattatctggcaaattttgatccacggggataaaaataactggggctgaattgtcacatgggaatcgttgggaggataatttt

SEQ ID NO: 43938 - DNA, 401 bp, Glycine max
  Clone ID: PAT_MRT3847_139675C.1
ttaatagtatggttcttctcccttagttatttaaaatttgaagttgtatattcaaatttaaattaatataactttgaacagcagcatttgttggggaatttgaagtgaagggttcagggctttagggaggacataaataatacattaactaatgtgtagaacacaagtggctatgaagtgcgggaatggttgttgaatgccttcacaaacaaaacaagacctgaggcaacagaagcaagaatggtgaagactccctgcctggagcacgaaaactcagtccaagtcaatggccttgtgacctcaacaagaactttctggaactgctgattcaagtcatccaatgaaccagtggtatctataactatattagctttaccccttttaacatccagtgacatctg

SEQ ID NO: 43939 - DNA, 637 bp, Glycine max
  unsure (1)..(637): unsure at all n locations
  Clone ID: PAT_MRT3847_139676C.1
caaggctggagacttacctgtaagtatataaaatccattacaatctgagaggatattttctttctgctgctcatgatgatttgtcatatttttctttcagagtattatatttctccctttcccacaccttgtgctacanttttggctctccatttttaaaattttaaaattaaaatctaaatggaggaccatttgaagttttattatttgtgctcttttggctttgacatttagaaaacattggaacagaagttctgttttggtggtcccccagacttccaagttacttattttctaggctatctgttaaatctgaagagacattcagttttctatatccaccttgaacaaatattctttttgatcttaatactcttgtggaatgttctagttacatgccactttctggatttcatggagttgtatctggtttcttggttggcattaagcaaattataccagatcaagagcttcctttcattaagatgaacccaaagtggttcccattctatcacttctagcttgggactgccaggcacgtccggaaagtacaggtgatagcataacctctaaccacatattcaggcacgtaccatcaaccggaatgaggataacaacaggcacaggaaccaagacc

SEQ ID NO: 43940 - DNA, 318 bp, Glycine max
  Clone ID: PAT_MRT3847_139677C.1
gacgtacgcagacacgacagccgggagcctgtagagcggcacacccgccgcccttttttttttattttttatttttgaaaatccaataaaaaaaagatgcgagaaggggcggaaaacaacaacaaaaacaaaaaaagcagcagacacggcaagcaaggcagggaaggagaataccaggaaggaacaggccatggcgggggagggaggagcagatggaggacgggcggagtcccatcatggacgggcagcgggggcaccacgcaagggaggaccaggcgcccggacgcaaagcaccggcgggagggaacggggggcaaa

SEQ ID NO: 43941 - DNA, 354 bp, Glycine max
  Clone ID: PAT_MRT3847_139678C.1
aaaataatatacaaaagcggggccggccatattgtatctttgcgaaccggaaaaaaaaaaagttcgggtgcttgttgggggcccccttttctaatataatgggcccctttattaaaggggggaaagagagaaaaaaacctggcgtccccacacaaaatgcgacccggaaaacaccccccttttgacaaggggggtaaaaaaaaagagggaaggccggggccccctttgaaaaagcataacaccataagtggggacgggaaaccccccggtttaaaaaaaaaaaaacaggggggggaggtggtaaaacaaaaagggcccactgccggggacaggctataagcgcccggccgttcc

SEQ ID NO: 43942 - DNA, 265 bp, Glycine max
  Clone ID: PAT_MRT3847_139679C.1
gggtagcagttatgatggagaacctaactttggaaatgaaagaccaagtagcccttcttcgtcaagaaaagggaagaagagccgcaactcagacaagccacagcgaccacagagaggtcttggagctgctcaattggagaaaatcatattacatggctatcacccttgtctgcacgctccttacccttctaatttttccaacgaagatccaagagagcatatagcatattcatcggcgccatcatcttcttttgcttactcatcg

SEQ ID NO: 43943 - DNA, 1365 bp, Glycine max
  Clone ID: PAT_MRT3847_13967C.1
cccgttccggatttccgggttcaacccacccttccgcgaccccttggccgttcccatggccggccccgtgggggacttcatctgctggctccaggtgtgatgatagatcagtaaatccctctgctgaaatcacagaagaagatatttcaaaggaaatgacttcgaccaagtctctccaacagccgctccccatttttggagaaaagtctgtttgtgaagaatttggtccagcaagcaagccaaataataggtttgataaagttagcccgccaaaactcatgtgcatctcaactggtgatgaccaattcatggtgaggggaagactgtcatcagtggatgaaactgctcctttgattatttctactaatatttcaagccagaaagttttgcaagaagagaaagcaacagttttacagaatccagcaccagaaaggccagctgttgggcatcttcctccagcttttgatgatgtcattcatgtcatacgccatagcagttatcgcgtggggagtgagcagccagtgaaggaatctctggagatgggagttcaaagtgtagatgttggtaagtttatcaacattgtaagggatgatttagaaatgagaaatgtgagcactcctttgactctgaaatcttcaaattgctctgaagctattggcttgaagtcaaatatttctgataatatggaaatcagaaacttaagtaatcctcctaacttaaaatcttcaagttgcaccgacttgatgaacatcaaatcaagtttttctgatcatcctgttgttaggcaacaagatgtggaaaacactgattctcttgtttcaaaatctgattcctccgagtataccaaacataagactcctacagctgcagagggaacacccccaaaggaaattttggatgttaaatcttccaggcagagagctgaagcacttgaaggactgctagaattatctgcagatttgctgcagcaaaatagattggaggaacttgcagttgttctgaagccctttggaaaagataaagtttccccaagggagacggccatttggttagccaagagtctaaaaggattgatgattgaggaaagtgggggacgcagttaatgggtgttttttttaatccatggtaagtttgctactttgcttctatttgatattttctattactttttccacttcattgcttctcaagtgccacttgaattgagagaacaaacaggctttatcgtttcttctttcattttttgtaattctttttatgctgatgtaaatagtaaccatacgaatgaataccatcaacttacgatcaattgtgtggacatgctcttgccaggccttattaagaattgtggaattgatatgcttc

SEQ ID NO: 43944 - DNA, 564 bp, Glycine max
  Clone ID: PAT_MRT3847_139680C.1
aagatagcacaattaaactttagaaatactgaatttgctaaagcgagttagaagatgaaaagagaaaatacataatgtcaaaaacattttacaagatccactatgacttatgacattaaaacgtgtatagtgcttcaatttcattaaaatgaaaaaaattctcaaaattaattagttaattaattaatattttgttatatttcctttttaaatgaaaagtgattttcacatagagtaaataatgcacgtatttgtatggtaaacatcttttacattattatttaattataaacagtcgtatctaataaatttattaacttttaatctacgctaaaagtaatattaaagaacttttctaattgtttggataatatgtttttttacacctcaaactagaggccactatttacatcttccattttttaattttttttttctagtgtgtaaataaatcacaaataaggtcaaagtaataaaagcccaaatttatttttttgatccccatttcaatatgattctcattgtaaaaagaaatctcatgcttcgttagccatattactcttg

SEQ ID NO: 43945 - DNA, 299 bp, Glycine max
  unsure (1)..(299): unsure at all n locations
  Clone ID: PAT_MRT3847_139681C.1
tcnctaccanacgcaaacgggaagccagcncnagaaacagcaanaaaccgccancanganttacntcaccagancnaccgaaaacaagaccaagctctactgaactncantnatnactcaatttcgtccaacaaccntgntgaccgatcctaaatananaaaaaaccacactcntngacntggcacatactncgtnaatcananacagntccacacacatacaacaancgnacctcnannannncagcantcancannaatnantnngcctcatcgntacaagtntttntaacaaactc

SEQ ID NO: 43946 - DNA, 259 bp, Glycine max
  Clone ID: PAT_MRT3847_139682C.1
gggagggggggaataaaacacgcaagtggggaaaattaacaattcaggtacacaattgttgaagattccatcaaacaagagggggcggaaccacccgcatttttttatgactcctattaaaattaacctcttgactaatttaatgacaaaaaatgcgcatttcatacaaaagccaaggggggaaatattgtattttgaaataaagcgaaaaaagaaagttaaggctattcgggtggtaatttatgtagggaatgctctt

SEQ ID NO: 43947 - DNA, 598 bp, Glycine max
  Clone ID: PAT_MRT3847_139683C.1
caagaacttgtatcagaagataattttgagttaattattgatgctatggagaaggtttattattataatccagatgagacatttgatgaaaaatctgctgccaatggttgtcaggaccttggtagcaaggaagtggtagaagctgtatataactattggatgagaaaacgaaagcaaaaaagatctttcctgcttagggttttccaggtaaattttcaatcatgattttgaatgttctactgtgtctccagagtatgttaattctatatttctagttctatggtgtatgttaaatctatattgctagtttaatggtatattatatttgtatatcaatagttattgtccttagttgattatttgtagtcagaaaatgcagatgacttcaagatctgtggttaaaagctgggtttttcctaatgtttttagatactgtttgtgggtacttttatttgggtataatatttcatgttggggctgtggcattgttgtaatcttcagtagtgtagtgcatccccattatctgtttgacttagttcaattaattgtgtcagggtcatcaatcaaagagagctccacttatccccaagcccttgct

SEQ ID NO: 43948 - DNA, 633 bp, Glycine max
  Clone ID: PAT_MRT3847_139684C.1
aagacaggaaaaaaaatttaaaattatataaaaaatcattcacttattataatcaaattaaacatgtttaagttattgtctgctcactaagcatttcataaaggacgttgctctcgcgtttgattcatagaaaaaatagactaggcttcatcacagaaatggaacttgatattcaagtgcctcttggaccctgaggagtacaatacaaataatgacccggataaaccatttctcactcaatccttgaatctctgaaggaaacaccaaatcagttccttttcctagcaattacacagatacaacacgagccttgtacatgattatatacgccatgtgccaatcacctcctccggatagtctaggtatgtcttcttctagttttgggttgggattggcatcgtcaaactctatccatttcccattttcttgcttgacccaaccaacataatggcctgaatcagcacttctgcccttgtgggttaatacagcaaccaaatcataaattccagtcatctgtgtttccttttcaccctcctccatgggaactacagatggctcccctccattcaatgatccctcagcatcagacatttttacatcactttccttctgaacagagcttttctcattcac

SEQ ID NO: 43949 - DNA, 489 bp, Glycine max
  Clone ID: PAT_MRT3847_139685C.1
gtaaaaattatataaaaaatcattcacttattataatcaaattaaacatgtttaagttattgtctgttcactaagcatttcataaaggacgttgctctcgcatttgattcatagaaaaaatagactaggcttcatcacagaaatgtaacttgatattcaagtgcctcttggaccctgtagatggaaggaaggagattcagggtaccgtgcttcaattcaaatccttatacatcctcaggagtacaatacaaataatgacccggataaaccatttctcactcaatccttgaatctctgaagtaaacaccaaatcagctcctcttcctagcaattacacagatacaacacgagccttgtacatgattatatacgccatgtgccaatcacctcctccggatagtctagttatgtcttcttctagttttggtttgggattgtcatcgtcaaactctatccatttgccattttcttgcctgacccaaccaacat

SEQ ID NO: 43950 - DNA, 770 bp, Glycine max
  Clone ID: PAT_MRT3847_139686C.1
agatacagatcataggccccaaattaataaaccagttatgtaaaggttaaaaaagcaaccaaccaaacgcacaaccaacccattcaacataatatttaattagtagtattaccataaagagaaaccaaatcaaaatgccacgacaaagggtataaaatatttaaaaatatatataaaaaaaaggattcgcttatcataatcaaattaaacatgtttatgtcaagttttcatcctgtattgtatgctcactaagcatttcataaaggacgttgctctcgcgtttgattcatagaaataataggctaggctttcaccacagaaatgtaaatgtaacttgatattcaagtgcctcttggaccctgtcgatggaaggaaggagattcagggtaccgtgcttcaattcaaatccttatacatcctttaaaaaaaatgcaaaaactaaaatcaataaacacttttttttgctcggcaaaataaataaacactgactaatgagagcatcaaacctcaggagtacaatacaaataatgacccggataaaccatttgtcactcaatccttgaatctctgaagtaaacaccaaatcaggtcctcttcctagcaattacacagatacaacacgagccttgtacatgattatatacgccatgtgccaatcaccttctccggatagtctagttatgtcttcttctagttttggtttgggattggcatcgtcaaactctatccatttgccattttcttgctagacccaaccaacataatgtcct

SEQ ID NO: 43951 - DNA, 1038 bp, Glycine max
  Clone ID: PAT_MRT3847_139687C.1
atataaaaaatcattcacttattataatcaaattaaacatgtttaagttattgtctgttcactaagcatttcataaaggacgttgctctcgcatttgattcaatagaaaaaataggctaggcttgcaccacagaaatgtatgtaacttgatattcaagtgcctcttggacccagtcgatggaaggaaggagattcaggggtcccatgcttcatttcaaatccttatgcatcctttaaaaaaaatataatacctaaacgttttaaataaataccgactaatgagcatcaaacctcaggagtagaaaacaaataaaccatttctcattcacaatccttgattctctgaagtaaaacaccaaatcggctcttcctagcaattacacagatacaacacgagccttgtacatgattatatacgccatgtgccaatcacctcctccagatagtctagtgatgtcttcttctagttttggtttgggattgtcatcatcaaactctatccatttcccattttcttgcttgacccaaccaacataatgtcctgaatcagcacttctacccttgtgggttaatacagcaaccaaatcataaattccagtcatctgtgtttccttttcaccctcctccatgggaactacagatggctcccctcctccacttgttgctccctcagcatcagacatttttacatcattttccttctgaacagagcttttctcattcactttcagaccaagctttttgccttcttcatttcttaggatctgtctaggagcttccaattttttcgaagttcgtcagaacaaaattcataaacatccaactccagaggataatctactttccgcaaaatcttagccttctggttggattccctcttccaaaagaaacggacaaactaaaaggcttcacttgtattgggccgtagtgctatacacttgaaggaatcacgcattaatgccctaccaaggtacttgactgttcagtttgtccgtttcttctggttggattccctcttccaaaagctcgagccgaatt

SEQ ID NO: 43952 - DNA, 469 bp, Glycine max
  Clone ID: PAT_MRT3847_139688C.1
ggaatttgctgcacgcggtgacccaattcggtttcagttcatcttctcttttccgcaagcaaaaccccacattgttcttcatgaaccctaggtcggtctttccattccaaatctcaatcacctttctgattcaatctttatctcctcgccaatctcttcatttgcctcgcaaatcaagaaaaaatatgatgtaacatatatgattgcgagatggagatgtaatcaaataaaggtatgttctttacttttcatgcacaaaaggagaattgccagatggagatgatgatgacattgacaccttatcatcaacttttactattcaaacttcttacttttttcatttttgttattgtttataaaaaaaatcctaaacaatgtgcttgatttaccaaattaagaatttctctttttatgctactctgaactcttttttttcttcaaaaattaaatcattgaatgcatcatttat

SEQ ID NO: 43953 - DNA, 493 bp, Glycine max
  unsure (1)..(493): unsure at all n locations
  Clone ID: PAT_MRT3847_139689C.1
cgnttccggaaaaacctagtgaaaacccanntaacacaatnatcctctacgtacctnnctccataacccttccatcgtgtcgcgcgagatcactnnnactttcaaccagccgtgcactcggcacctcgatcaaccgcctcttacgacaacctcgtgaaggggcgaagacactttggacccatctgannatcattggtatttaaaatgnngtttcgtttgggaaatgaaaatgatcggaaagaaagatttggattaagggcttaacgggattntggtatttatttttctcaattccttggggccttaatctnntcttcttttgacccaagggatttgcnntagcaatggggaanaatatacctnnctttgtnnttctggaagggtatcccttgacncaattgngnnactgaaatcncnnactatgcannattcttcaatgannaacgtagtannatttcaaaggggaacccaatnnttcatttgnnngtattgg

SEQ ID NO: 43954 - DNA, 404 bp, Glycine max
  Clone ID: PAT_MRT3847_13968C.1
atcccaaaaaacagatgggaactttttatttaaagaaacaaaccttgttccctcctcggggagaaaacaaaattctctttttatccctccaattggagccctaccaccagtttaaaccaaattacctgctccaccaaaagggcttccccaccccatgactactacaacatgccttggttagcttttaggatcaacaaccctttttttcccctacatgaaactaaaactgggggggttaaaaaaaacctcccccctttttttttgcctggctccaacaattccctcaagggttaattacaacaaaaccctttttctgatacaacaatgctttaaacaccaagttttaaaaagggctcaaacttgggtctctattggccctttgtgcatttcctttggaaaaaccg

SEQ ID NO: 43955 - DNA, 1653 bp, Glycine max
  unsure (1)..(1653): unsure at all n locations
  Clone ID: PAT_MRT3847_139690C.1
gaaacaatatgagggagcgtttcattttgctctttcttcaagccaacctcttcccaactctttgttcctttcttcctctcactctcaccatgattacagtaagcgtaagatggcaaaaggagattttcaaagatgtagaacttgacactaataaatctcctaaagtttttaaaagaaaattggatgatttgactagaatgaatttaaacagacttaaaattattgtcaagggtggtctgttgaaggattatgctgattggtaagtagcccgttcttgaggccgacctcttcacaactcttctttgttcctttcttcctctcactaccaccatgatcacagtaagcgtaagatggcaaaaggagattttcaaagatgtagaacttgacactacccagtctgcttatgtttttaaatgccaattgtatgatttgactggtgtgcctcctgaaagacaaaaaattatggtcaagggtggtcttttgaaggatgatgctgattggtcaacagtaggggtgaaagagggtcaaaagctaatgatgatgggtacagctgatgaagttgtgaagactcctgagaagggaactgtttttgttgaagatcttccagaagaagaacaagtagtggctgttggacatactgctggtcttttcaacttgggaaacacatgttatatgaattcaacattgcaatgcctccattccgtacctgagttaaagtcagctttgactaattattcacattcaggacgaaacaacgatgtcgatcaatcttctcatttgttgaccattgcaacccgtgacttgttcaacgagcttgataaaagtgtgaagcctgtggcgccaatgcaattttggatggtattgcggaaaaaatatcctcaatttggccagctgcataatggagttttcatgcaacaggatgctgaagaatgttggacacaacttctatacactctctctcagtccctcagatcccttggaattagtgaaaatcccgatgctgtgaaggcactctttggcatagaacttattagcaggattcattgtcaagagagtaatgaagaaagctcagaaacagagtctgtttattcacttaaatgccacatatcacaggaggtgaaccatttgcacgaagggataaaacatgggttaaaatctgagttagaaaaggcttcgcctgtattgggccgtagtgctacatacttgaaggaatcacgcatcaatgccttgccaaggtacttgactgttcagtttgtccgtttcttttggaagagggaatccaaccaaaaggctaagattttgcggaaagtagattatcccctggagttggatgtttatgatttttgttcagatgatcttcgtaaaaaattggatgctcctagacagatcctaagaaatgaggaaggcaaaaagcttggtctgaaagtgaatgagaaaagctctgttcagaaggaaagtgatgtaaaaatgtctgatgctgagggatcattgaatggaggggagccatctgtagttcccatggaggagggtgaaaaggaaacacagatgactggaatttatgatttggttgctgtattaacccacaagggcagaagtgctgattccttacattatgtctaggaggtcaagcaagaaaatggcanatggatagag

SEQ ID NO: 43956 - DNA, 208 bp, Glycine max
  Clone ID: PAT_MRT3847_139691C.1
gactttttcctgcctcatggcgaccttgctacaggactttggcacgagtgactagggttcgtacgacatgatcattgacaacgtaaacaatactgatatttatgtggatgcttaccttgaatcgtttacaaacaatgatcctacatagattgttcagactattgagaacaactcactgaagaagattaaggacttgtacaggtaccat

SEQ ID NO: 43957 - DNA, 178 bp, Glycine max
  Clone ID: PAT_MRT3847_139692C.1
ggggatttgaaggataagccagggtggcaaaagatgcaaactcggggagaggtggggtgaggcttcggctagcctcatagtggagtgcgtcagctcttcaggctgggggttaactttggacagtatccagagggaggtgtaagcgtgaagagggcggctattagcaggagattcatgc

SEQ ID NO: 43958 - DNA, 296 bp, Glycine max
  Clone ID: PAT_MRT3847_139693C.1
tgtacgctacatgatctcaacctgcttattcttttgagatcaccaacttcaaaatgcgggtgctgctacttgtgtggcacttgttcttcccaatttatgattgattatttctcataaatctattaagtatgtcttaaatgatacataccttctttaaaggagtcaatttctaacatctgaaaaagcatacgtattatgacttactgcatcaacattacttcttgatggatcccacaccaaagaattttcccatgctcttatgaataccataaggattgcatttcccaacgctcaat

SEQ ID NO: 43959 - DNA, 841 bp, Glycine max
  Clone ID: PAT_MRT3847_139694C.1
tcgaaaaaattttttttttttattaattatttttatatttatttttaaaataaattattaaaaaaattttaaaaaatattaaaaaaattaaatatattttaaaattttatttaaaaatttttatatttttttaaatttttattttagggggggcccttttttaaaaaacaaaatttatcacgcggtgatgaaaaggaaaaatttttttatttttaaactaaaataaaattacttggccctgttttaaaaattttttttttgaaaaaaaattagtttcccaaatttaattctcttaaaaaaaaaaccctttttcaaatttgggttaatactaaaaagccccaaacggaacccctttcaaaaaattttccctcccttaatggaaaattttacccccctttaaacccccattaaacaccaatattttaattttttaaacccaagggaaacctttatttttaaaaagccccaaaggccggttttttttttttattgcccttcttttaagacaaagtggtgcggtttttccccggaaaaattaaaaaaggggggaacctttaaaggttcattttaaaaaggttaaaaaaaaatttttcccaaaaaaatttttattggggttaaaattccacaatttttgggactattccctttttaaaaaacattttttaaacttttttaaaaaaattagacaccaccctttttataataaaaggaatttttttttttccaaaacctggaaaaaaaaattttaaccttttttttgcagaataatatttttaaaataaaaaaaaagaatttttttccacattttccctcttttgttttaaaaaaaaaatgttttttt

SEQ ID NO: 43960 - DNA, 246 bp, Glycine max
  Clone ID: PAT_MRT3847_139695C.1
cagtgactgacttttcgagaaagatacacacaaatgggtttccggcaatccaccatgaacgctctttccaatctccgcttcctcctcttcggttctgcattagattctgcggagaaaactggggatgttacgggtcctgcaaattgggttgaagtataacccggtttcatgggaagttccggaccccaaaggtgacggcttcaaagtacactatagggtgagtaatttcccaagtttgtcttggga

SEQ ID NO: 43961 - DNA, 313 bp, Glycine max
  unsure (1)..(313): unsure at all n locations
  Clone ID: PAT_MRT3847_139696C.1
ggagacctgcctgcccacagaaccactgaggggggggttttaaaaaggataacgaccaaccccggggtgagaacaaacatagggcctctgggggcgacccccatggagggagaagcccaactatggattcttagaggggcaaaacacgtaaataggggttgaccaaaagaccgcgccccccacagagaccccgatatttagggggttcaaaacccgggacaatttcgccccctttaccaaaaaagaccctgggggggggaccccccccgggtgcgcgaaaataagactcttttgncttccttagagggggggg

SEQ ID NO: 43962 - DNA, 260 bp, Glycine max
  Clone ID: PAT_MRT3847_139697C.1
ggcaaacctatacgatttttttcacaagtttatgatacctgccaaacgggctcaggggggatttttcaacacaaggggccaaccatacaaacaagtcacacattaccatgcctacaaaagatcccaatcaagtcgaagatgattttaaacctgcactccaactgtatgcattgtgaaacatcaaaacattcagaaggctcacgtaccttgatctacaaacagcatggtaaactcacatacaactatactaacgtacaaaa

SEQ ID NO: 43963 - DNA, 237 bp, Glycine max
  Clone ID: PAT_MRT3847_139698C.1
gcatgcttggtttgggttgggtttgtgtgcatctgagtactctgttttcaaattttgcaagaggaatgcatgccaattttaatccttgaagtttactactatacttttgttaggctagtgattttgatgactcaggagctgttgtgtttgtgcttttgtactcttgtattggtagatacttaatactctcaacattccgcgcttagttctcaattccaaatagcggggcggagtgac

SEQ ID NO: 43964 - DNA, 333 bp, Glycine max
  Clone ID: PAT_MRT3847_139699C.1
tgcaaataactgtatctaatgagcatctcattaaaaatgctattgcaatagctatatctaatgagcagctgattagaaacagctatgaaaactcgcgccgccaggcgagcactcgaacgcgggctttccacgccttagcaaattttgttgctctccgcgagtacggtgacgaggacgtagttagcgttcatgaatatgtcaagccttactttagtggttctaaattgaaaagctttctagctggtcataatatcaccactactggtggtattgacaaaactagggcaacttttcaatttaaaaaggttgcagattgtgattttcttaagaaaa

SEQ ID NO: 43965 - DNA, 443 bp, Glycine max
  Clone ID: PAT_MRT3847_13969C.1
ggctcgagcgctagcgatgctaagtgtgtggttggaaggcgaagtgccgatgcatcagtacagggcgacatgaaagggggcacggtcaaggcgattcctggccctcctgaaagacctatgagagacgtgaactacaagggggaggagcaacagtgttaccgacaagagagatcctgcatgggtccaatgaacacgaaggagagtggagaggcatatctaggttcgaccatatagaatgcggctgagactgggcctgctaactgcaacgactgacaacgtaaagccaccaacgacgctagtgacatacttgggctcaacgtgcagcgaacaatcaaccagcctaccgagggtggcatggctgagcgggctcgacaacagggccactatgtatggggagacgaatgttatcatcctgatggagatggaggaacctttgatgtaca

SEQ ID NO: 43966 - DNA, 366 bp, Glycine max
  Clone ID: PAT_MRT3847_1396C.1
ggaaaaaggaaaaaataccagaggggtttcccccgatttttatcattaaggaaaaagcttttcaaaccctttaaagggatatacaaaaaggctgtttttaaggttgggaaggaaacaaagggacatgggcaagggaaaaaaaaaaaatatcccgcattcagggctccatatataatgggcccaccctagttaaactacttttttggggggttttcatttgaaggaccagcaaaggctcccctttccatcattttattttttccaagcggaaaaaaagagggggggggggaggactttttgggaaggggaaattagatttcataggaaggtgggtggggaaacataataggtatggggggggcattg

SEQ ID NO: 43967 - DNA, 338 bp, Glycine max
  Clone ID: PAT_MRT3847_139700C.1
gggactctgcactccaatccgcagaaataagattatttcgtaggatggcatttggaattcaagattataactccgactttttaagccccagagagtaatttgaatacttaagaggctatcgtatatctagggtgagtctaaatttcttgtcacacccttgtgaaattaagttagttttagatatgactcttctgaggtgagtacccgaaattgattgtatcatgtttgcttgattcttgtaacaaactcttcttgttttttttccactttttttttattctttgtattcagattattattatactttatgatatatgattgatatgtaggacaaaaaa

SEQ ID NO: 43968 - DNA, 119 bp, Glycine max
  unsure (1)..(119): unsure at all n locations
  Clone ID: PAT_MRT3847_139701C.1
gtcatagcagcaactatcccancanaccctgcctggtgtnggagtctctagtancacacaaactgggtttggnattnctanntcacagccaccttcnnnttcagcntcattgtnanctg

SEQ ID NO: 43969 - DNA, 518 bp, Glycine max
  Clone ID: PAT_MRT3847_139702C.1
ccacgcgtccgcggggagtggaagaacggcgtcattttcggccgtggtacgctcatttgggccaacgggaaccgttacgatggccaatgggagaacggcgttcccaaggggcaaggggttttcacctggcccgatgggagctgctatgttgggtgctggaacaaggaccttaaggtgaaccagcttaatggaactttttaccccgggagcggtgatactctcaccgtcacaatgaggaagcgttcttccgttgacggtgctagagggagcgctgttaagagttttcccaggatttgtatctgggaatcggagggtgaagcccgggatataacctgtgatataatcgatgaggtgtcgttgttgtatcgggattcgagtggaacccggtcagatcgggggagatggtaaagccgtttcgccggaacccttgtctttccggtgaggtgaaaaagactgggtcagactatattccagggggataaaaaatattgatctcatgctttaatccgccaattggg

SEQ ID NO: 43970 - DNA, 330 bp, Glycine max
  Clone ID: PAT_MRT3847_139703C.1
ggagtctacagtgagtactaatcaacagccacccttgaagagtgtagctgcctcagcagaagcttctcagggtactaaagtaaaaaaacttgctataatagctaacagatgcttggtcaaaaacccaaagaatcgcccgaagatgagtgaagtgttggatatggtgactcaggttgtggagtctacagtgagtactaatcaacagccacccttgaagagtgtagctgcctcagcagaagcttttcagggtactaaagtaaagaacaaaaaagtgaccatggatcaaaatccagattgcaattggttaaggatggggaggccaaagctttt

SEQ ID NO: 43971 - DNA, 252 bp, Glycine max
  unsure (1)..(252): unsure at all n locations
  Clone ID: PAT_MRT3847_139704C.1
agagggagannngaangngacaaanaagccaaacccaganggnnccaccaangggnnncagncncagcnncaagnncaacaacaaaacgggngggagcagggancancnagacggagagggacgaaaccnnacccngcaccaacggcncggnnccaggacanngnncgngangcaaaccncnncnggggaacgcnncaagcnnnncacaaaanacngggcaccaaanacaaggnggcnaccgngggaggaac

SEQ ID NO: 43972 - DNA, 267 bp, Glycine max
  Clone ID: PAT_MRT3847_139705C.1
ggtccaatgtgaattactggttcagattctgactttcatgactttgacaaagatcggtcataggaatgcttgaggccaaagcaaatatgggccttgtgtgatgaggaagatgggatgccacgggtgagttgagtgatccgggaggttgaggctgggaatccatttaagaggcacatgaggtgcttgaggtgcaaaactgatggggatggggggctgaggggactgggtgggtggagggtggaccagggggtgggggaatgggggggc

SEQ ID NO: 43973 - DNA, 465 bp, Glycine max
  Clone ID: PAT_MRT3847_139706C.1
aaaataacacacacttttttcattattacgacatttaaaaaattatgggaggtgttttataaacacatctttctcaacatcattgttatgcctaatttccttaattgaattatacaaacaaacaatctaaagaaaacacgatttccatatcattcaaatgattccatatttttagaagatctgacaatatcctgttgaacaaaaaaatctggcataatattattaccaccaatttcaaaattttgagagatttccaatataatatctaaaacttgtgactgtttgcttaatagcattaattaaactcaaattccatgaatattaatttgcccactcacaactccacatttcaaaacctttattacgaccacattcctttattgtgaatattaattcccaaaatagtgattcttattataaccactaacatgcatcaaaatgctctgtactgtttctgtttttaaa

SEQ ID NO: 43974 - DNA, 266 bp, Glycine max
  Clone ID: PAT_MRT3847_139707C.1
ctcttttcttacttatagacacattctaatggcacagcgctttacgtggccatcgtggccgtggagcgtgcccgtttaccgacgttagatcaagtggctatgactccaatgtgacagagaccgatgccaactccgaggcaccctacttgagtataacgaaaagatgatctcaatgaccatactggtacggctggtaaacgacgtaacaatgcacagactagaacagatgtacctgcactcaatcctcactcaagaacaccacatca

SEQ ID NO: 43975 - DNA, 555 bp, Glycine max
  Clone ID: PAT_MRT3847_139708C.1
agttcgaagagtccagaccttcccctttcaccaacttacttccccaaaatgtgtcctctcttccgctcttctctttattctattattcaattccatccccctgtaacctccctgtctaactaactgccatccctagcaagccttacatagactttcttattggtgagattgctgacatattccattgctacagttaagttgctgcggatgttgtcattggggcaatacgcttagggcctacttggtttaatgaaatgttttctgtttctatattacatctttaataataattataaaatgttgcctcttttcacttttgtttcttgttttcactatttctagtacaaattttcaaacacaggaaacaaactgaaaccaaggttgtgctttgtaattattagtaaaaagaaaagatagaatagaggtagaaaacatttccttaaaccaaacagtcccataagttgtcagtctttggacataattggtggtacttcccatctctaaatttcataaacctggacatgcattagtcaactatagttaaatgatgaaagt

SEQ ID NO: 43976 - DNA, 277 bp, Glycine max
  Clone ID: PAT_MRT3847_139709C.1
aacggtccagaattcacgggtccacccacgcgtccgaccacgcgtcgcgtgcgagaatacgacatgatcggggcacaagtgagtctgttcatcaagatatctgtcatcagtgtgatcacgatgaacgtccatgtcatcatcgccgcgataattcaggtaacagggtcctactctacgggtgaaaagtcgcatcgctgaactcacactagcccgtctgtttgtgatccagatctgttccgtacgaggtagcggcatggtattttggcatgtaatatca

SEQ ID NO: 43977 - DNA, 320 bp, Glycine max
  Clone ID: PAT_MRT3847_13970C.1
ggcatatctaagttgattgaatttttgtttgggatggcttgactggaccttatttgcatactattaatgctgatgggtcacctaacgccctgaccttcgctccagtggtatcatgatacacttgctgcacagtctgtatttagagacttacaacatagcttgtttgcgtgtactgaagcgtactacgcttacaggcttgaaagccagcattcgatacatatgagccaaagggcgggaccttgaggcgactggttctgttccatgtgcataccatatgcaatctgtgagaaggggtctgctatggcatcagccatatacca

SEQ ID NO: 43978 - DNA, 253 bp, Glycine max
  Clone ID: PAT_MRT3847_139710C.1
accctcccaatgagtatccccttagttccttaaattggggtttcatatgtaggttcataaccccgaagataaaagtagagccacaaggcatttttgttcttgctacaaagcgccgtccaggggaaagaaaacaaagatcagatctgagtaggcacacttttgtttaaatgttaggggagcctaggaaaaaccacaccttaaataggaggcctcatgtatatgactagccctggaatatctcccatgtcaattt

SEQ ID NO: 43979 - DNA, 235 bp, Glycine max
  Clone ID: PAT_MRT3847_139711C.1
ggtggagtttagaaaaaggttttttgttggaaaaagagtatatgaataggttggtggtgatattgttattgatgaaggatatggaggtgaggtgggaagatatggttttgaagtagggattaggaattatggtggaggttattggagtggtgtgatgttgggaggaagagtggtgaggagagttgaaatggatgaggaggatgaaggaaatgtggagggtactggagaggattat

SEQ ID NO: 43980 - DNA, 308 bp, Glycine max
  Clone ID: PAT_MRT3847_139712C.1
ggcggccgccctttttttttttttttagcacggctgatttggtttgaatccactactaacattaaacaggctcttgggagagtttatactctacctgcccattgtctatgagagcattgaccttttattttcaatttctaactctaaattactcagatcgtgcttatgagaaagcactttattcttttattccccctctttaaaatttttcctcctgggaatccaaaatcccaaatgatgttcctttccactgcgagtaacataaaaaaacccttcttcatacttcttctcattatatatggaagaca

SEQ ID NO: 43981 - DNA, 606 bp, Glycine max
  Clone ID: PAT_MRT3847_139713C.1
gccagaggtaacctgtgaagatggttcgctactcccttgacccagaaaaccccacgaaatcatgcaagtcaagaggctcaaaccttcgtgttcactttaagaacacccgggaaactgcccaggccatcaagggtatgcatatccgcaaagccaccaagtatctgaaggatgtcactttaaagaagcagtgtgtgccattccggcggtataatggtggagtcggtaggtgcgcccaggccaaacagtggggctggacacagggacggtggccaaaaaagagtgctgaatttttgctgcacatgcttaaaaatgcagagagtaatgctgaacttaagggtttggatgtagactctctggtcattgaacacatccaggtgaacaaggctcctaagatgcgcagacgaacctacagagctcacggccggattaacccatacatgagctccccctgccacatcgagatgatcctcactgagaaggaacagattgttccaaagccagaagaggaggttgcacagaagaaaaagatatcccagaagaaattgaagaaacaaaagctcatggcacgggaataaattcagcataaataaatgcggataaagtaaa

SEQ ID NO: 43982 - DNA, 254 bp, Glycine max
  Clone ID: PAT_MRT3847_139714C.1
cgttttactttcaccaagattttatttcatttgtgcattctatgtgtagttttcttggattttgagtacttaaatcattatgtttttggtctgaattgcagcctggttatgaacgtctttgctgcctgaggtgcatgcagccacgtgatcacaattttgccaccacttgtgtttgcagagtacccaagcaacttagggaggagaaggtcatagagtgtgttcactgtggatgcaagggttgtgcaagcggggac

SEQ ID NO: 43983 - DNA, 225 bp, Glycine max
  Clone ID: PAT_MRT3847_139715C.1
gttacaatgacgtttgttggcccaaaaatttaaggcaaactcattacaacggaaagattcatgagtttgataaacaccggactcgctcgatatttagttagggcccgactactatacaggacacaaaggctatactgagacgcaagacctttatatcaagaacagggacgggcccaaatacaagccaaagaaagcgctgggaggcttgaccttgagaaattgacc

SEQ ID NO: 43984 - DNA, 1281 bp, Glycine max
  Clone ID: PAT_MRT3847_139716C.1
ctggaagagagcgatccataatccattgttaacaacaaacaaggacacgcaagacaaaagcacgaaactcataggtatacacagctatctcttgagcttcttagcaaagagaattttgagcagaaacttggtggtggtgttggaagaggaacaatacatcgtccctttggtattccggcaaacccagaatccactgttggcttggatacaccgttgtgtaagctgtgttgggatgaacaagtcaagggttgtgaaaaactgcaagggtttaccactttccatcaaagtgattgggagctcactctgtaatcagccttttgagttgtgaccaaagacagtggaggaattgtcccaatgtctacttgattctaacttcagataattctgtcaaggagtgcttcagggacctagggttatttcctgaagaccaaagaattccttttacttctcttattgatatgtgggcagagttgtatggactagatgatgatggcatagaggcaatgtccatcatcaacaaattagactccatgaatctggctaatgtctcggtagaaagtgacacagacaattacttctacaataacctcttcatcgtccttcatgaccttctgagagcttgcaattcatcaaagcacccaggaaccaattgaacggagaaaaagattgattattgagataaatcaaaataaacctgagtgttggcttggggagaagtcaaaattgcttggctggcgtgttaaacagaagccccaacatgccactgaccacacattgtctatatcaactgatgaaaattgtacttcagattggcccctaatgatgcaactggctcaagttgaggttctgatttttaatcaattcacttggaaataggccttgacagatttcatagaagagatgaacaaactaaaagttctgatagtcacaagttacagtttccatccttctgaaatgagcaactttgagctatttggctcttttccaacctgaaaagaatacgactagagtggatttttgttccttcctttgttgcaatgaagaatcttaaaaagttatccctctacacgtgtaatatgaagcaggcatttgaaaacaatcacatgctaattccaaacgcttttccgaatcttgaagagttaaacattgaccattgcaaagatatggtggcattgcctaaggggctctgtgatatcacctccttgaagaagctcagcattactaattgccacaaactctctgcactgccgcaagaaattggaaatttgatgaatttggaac

SEQ ID NO: 43985 - DNA, 483 bp, Glycine max
  Clone ID: PAT_MRT3847_139717C.1
ataacagacttttatcttttaacaacaggtcgggaccccagggtacatgtatttatttattgctacaacaggaaaccccttccctgagcatgcacaaggaagcttctatactctttttgcataaccccagctgccctgggcctcaaatggtgggtatattaaggatcaagtttcagcctccccatttcagcgtattcttttaagacctttttctttacccttggatgcaggcttgtccgaacctgtttttattggcctctaccgaacatttttttgtaaggttaaaaccctgttggacgagttttttagctttcctggtccaagacccatggatagccattccctccaccttgatggtattttttgacaaatagcatatatttctgcaccccttacaattataactgcttttcttgcttttcaggtcttcatctttgtaccttgtgtttttgtccgtttacctttatgctgactattttaata

SEQ ID NO: 43986 - DNA, 121 bp, Glycine max
  Clone ID: PAT_MRT3847_139718C.1
cgctagtacagtaaagcgtagccgctcctatcactaccttagatctggcgccatggttgtcgtgctgaacaagtgcatccttaaggcgaataatgcttgattaataataagagtctctccc

SEQ ID NO: 43987 - DNA, 265 bp, Glycine max
  unsure (1)..(265): unsure at all n locations
  Clone ID: PAT_MRT3847_139719C.1
ctctccattggtccttaaacantcatcagtcatnaccatggccaagcnnagttntttccctttgttttctgcttttcagtggctgctgcttcgctttnagtncccagagagnaggcctgcagacngaacgagtgccagatgcannaactgcaatgccctcaaaccggataaccgtataganccagaaggagggctcattgagacatggaaccntaacaacaagcnattcagtgtgccggtgttgnnctctntngctgcaccctca

SEQ ID NO: 43988 - DNA, 280 bp, Glycine max
  Clone ID: PAT_MRT3847_13971C.1
aaacatcatgttaatatacatattctactttttttatctaatcacatcataacagtgtgacgtttactaatcacaaacaccctataataaaattaaaaataaaaaattcaaagggcgacccttctacacaatccaagcttacctactcgttctcgctactacctcacctctctcaatagcttcacctaaattatcttcactggacggcgtctaacaaccacttcactgttaaaacccttgcctaacctaacttattcaactttcaccacatccctctttc

SEQ ID NO: 43989 - DNA, 379 bp, Glycine max
  Clone ID: PAT_MRT3847_139720C.1
attgttcttgagggagatttacgcatatcatatatatataaccaagtgtgcccgaagacctttaagaaacactgaaaaaacttgctgcacactccgcaaaaatttttggtaccgagaacaacctcttgtaaccagcttgatccttgccaatgaacaccaccccatcttttgcaattgctaaaattgtgtggggcctgacaactataatctacatgacctgtctttgtccacccagacagaaaatagttccgccttccataaatcacaggtggtggggggaataaaaagattgccgtcgccaccgtagttggagcaaaaccaccctctgcttgtgctgttccaaaaaagggccgttcccctacttcggaatccaacttag

SEQ ID NO: 43990 - DNA, 459 bp, Glycine max
  unsure (1)..(459): unsure at all n locations
  Clone ID: PAT_MRT3847_139721C.1
tatctgatcgaactgtccaaggtcctgtcactatagtgaggccaacgcacaaaaggcgagtacctgtttggagagccaccaacgtttatcggataggcgaaccgactttgagacggagtaataagttagaaccggatacggactaggccttgaatgagctgtagaaacggcttggtcgactatgcagggggtagaagcgaggcagcataaggggcggagtagcgcaggataaagagtgtgcgtacgtgcgagttaagataagtcgtaaagaaaaagccgcggagacgggtataggtacgtggtaccngaacgttaaagacaccgtagcgagacaataaaaggccaacgtttgggcggaataggggaagcacgggaagggagccaggagagggaaaaccggaaaaaaaaaaaaaaagaaaaaagagtgaaaaagaaaaataaaagaaaaggagaaagaaa

SEQ ID NO: 43991 - DNA, 217 bp, Glycine max
  Clone ID: PAT_MRT3847_139722C.1
ccacgcgtccgggtttttttgtgtttgagagaagcatgagcaggagttgggaattccggtgaagctgtcacgaggcttgggcacgtggtgactgtggagctcatgagcggagaactctacaaggcgagatcgagtgcgaggacaactggactgccaactcgtgagcatacctacactgcaggatggcaaaacatttaacttgagcatgtttattcag

SEQ ID NO: 43992 - DNA, 830 bp, Glycine max
  Clone ID: PAT_MRT3847_139723C.1
ccacgcgtccgcggacgcgtgggaaaaaaggaaatccatgggtggagttggtgttcaacctatgaacggtggatttcaaaacatgggtggtgatggtggtccccaggttatgatgtctgggcgtaatgtggggcccatgagcatgccaatgcccaacatccccgccgttcaagggcttccggccggccccgtcaacggcggtgggtactttcaaggcgcaggtcccgaagccatgcccggaaacccattccaccagcaacagcagcagcagcagcagcaacaacagttacagcaacagcaacagtacatggctgcgatgatgaaccaacaacgcgcaatcggaaacgacagattccagccaatgatgtacgcgcggccccctcctgctgtcaattatatgtaccctccatacccttaccctcctccagatccctacacccactttttcagcgatgagaacacctcaagctgcaatgttatgtgagtcatggatccgatgctggcggtgcaagcttctgatttctaatgcaaatgagtttttaaattctattatgattttccatttttccttcatcccctttattcctctaagttaaaattaggggtttagttcaccatagggggactagtttatagattttatgatactatcattattattattgttataagattttgagtagtagtagtactgtgataaggtaatatgtctatatgtgtttatatgttgcaaacagaaataaaaatcatttcagaatagttcaaaagagagagagagaatgggatgttagctcgattcccatctgtattgcacagttatcttcggaagc

SEQ ID NO: 43993 - DNA, 390 bp, Glycine max
  unsure (1)..(390): unsure at all n locations
  Clone ID: PAT_MRT3847_139724C.1
acactatgttcaaaccactgggtgatgtnnnnccgtatgacttgaccatgctatacctaaatcgagctgtcgattctttactggtaccgttatgtatattcaacgagagagagatgcaaaggcttttttggctggccgagatgacaaagcatccactatgcattgccaggtgtctcacgctgctgagcccaacagttctgcacagtgatcacctgtttccacaaatgatgatggtttaaagggtgctgggtttgtgacgaacccgaatcatgaaacaggctgatgatcaccattccttctcaaagcgtagaaatatggacactcgaaatgtttgacatcagtccagtagttaaacctatccgggaaccacgcgttgttgttcaaactttt

SEQ ID NO: 43994 - DNA, 242 bp, Glycine max
  unsure (1)..(242): unsure at all n locations
  Clone ID: PAT_MRT3847_139725C.1
gccgcgtacgtagctgattcggctagtagaagggggactggtgttcttatttcgggataaaagatgaatatgtttagtaagtttttggtaacataaaaaaaggttgagtgtagaaaagtggtnncccccccnnnggnnnnnnnnnnttttnnnnntttttttnnnnnnnnntnnnnnnnnnnnnnccccccccttttntnttttttttttttttnnnnnnnnnnnttttttcccccccccac

SEQ ID NO: 43995 - DNA, 568 bp, Glycine max
  Clone ID: PAT_MRT3847_139726C.1
gaacaattcttcttctcctttcaataaatctccgtggctattgccttcttcgccggcgataaacctcttccaccaccaccaccaccaccacgataacgacctcccggaaaacggcctcattggatccctcgtccgcaaggagggccacatatattccctcgccgtttccggcaacttgctatacaccggctctgacagcaagaacataagagtgtggaaggatctcaaagacttcacgggattcaaatcaagcagcggattggtgaaaacgattgttatttccggcgggaaaatcttcaccggccaccaagacgggaagatcagagtctggaaggtttcgtcgaagaatccgagcaaccataaacgcatcgggagcttgccgacgttcaaagagtacgtgaagagttcgatgaatccgaagaactacgtcgaggttcggcggcaccggaacgcggtgaaggtgaagcacttcgacgccgtttcgagcctgagtctggacgaagaggaaggcttgttgtacttcgggtcgtgggacaagacgctccaggtgtggcgcgtggcggattca

SEQ ID NO: 43996 - DNA, 326 bp, Glycine max
  Clone ID: PAT_MRT3847_139727C.1
aatttattgggagtattttataatttatttggggtttttttaacactaagtctaaggtgattatgaaacaatgccacaaacaaaacaaatttgtacaaaccaacaaaccaaacttgaaattaatattcacttcaggaaaacaatactcatttttatcattcccactataaatcaacacaatctttggacaaaacaacaatccaaattcgggggggatttaaatgtactgggagaagatagagcaccaaaaaaacaaactggtaaaaatactaattgaaaaagttgaaacaaaacattcaacactgaatttaatttccaaacccctt

SEQ ID NO: 43997 - DNA, 556 bp, Glycine max
  Clone ID: PAT_MRT3847_139728C.1
gtccggattcccgggtcgacccacgcgtccggtgaaacccaacatagacgtactaaatgtaagcatgcaattccttcgacaatactaacccgtctgcgatggcaatacaacatgcaaaggcctaatactattaaaacgaatggcctgcctacgcctaagcagaaacaagctctctcaactaaggtcctctgccgtgaaatgcagcttacaaaattaaaggaagagctaaagcgggctctttgttacgccattcgagagatgtgactagacactggaattatgggttcaacaaatcactgctgctctgaacgagtgtacagcaggcaacgctgaaacctatagtgagcaactgctcatcaaaaagtagcattctcattcttacaacaatgtcatacttcgtgaggctgctctaggataagccaaaccatatggcgaatcatcaatattcagcataaactttccaacttgcatggaaatgatatagctagtagaataaggacttaatggtggtctaaaaaactgtggaaacctctttcaatgaaatagtagtacttga

SEQ ID NO: 43998 - DNA, 429 bp, Glycine max
  Clone ID: PAT_MRT3847_139729C.1
cctcagttcccaaagcataaaacatgagagaagttatcagtatccacgttggtcaagccggtatccaaatcggtaacgcttgctgggagctctactgcctcgagcacggtatccagcctgatggtcaaatgccctctgacaagactatcggtggtggtgatgatgctttcaacaccttcttctccgagactggtgctggtaagcacgtccccagagctgtcttcctcgacttggaacctaccgtcgtcgatgaagtcagaactggtacctacagacaactcttccaccccgaacaactcatctccggaaaggaagatgctgccaacaacttcgccagaggtcactacaccattggtaaggaaattgttgacttgtgcttggacagaatcagaaagctcgctgataactgtactggtctccaaggcttct

SEQ ID NO: 43999 - DNA, 515 bp, Glycine max
  Clone ID: PAT_MRT3847_13972C.1
attatgggttgttgtataatatttttatggtgttttattatgtttttttttttattatttttttgttaaaaaaaagcttcttaagaggtatgaataaaaaaaaaagggggaagcccaaacccaagaaaaaaaagaccccgaagtagggggggaaaaaaaaaaaaaaacattttttaaagcccccaagggaggggatctcccaaaacaattctgtggtgctgcctgaaaagaggacccctatttttttttttgtgggggagaaacacccactcggggaaaaaatataccgcaggaatataaaaacaccgacgagtgtgttcccccctaattaaataaatatggggcgccaccacgcgagtgattcaaaaaaaacgctgggaagctccccttccctggggcgataaaaaaaaggggggaaaaaatagtgacccccaaataaaaagggaaaaggggatcttttttttttttacccccctttttagggggagtctccctttatgaaaagagattttttt

SEQ ID NO: 44000 - DNA, 503 bp, Glycine max
  Clone ID: PAT_MRT3847_139730C.1
ttttttttttttgtacgctatccttcaagaagccccaccaagaaactttggatatcatgtatatatgccatttaggtcccttgtcgctggtatgaaagttccagtgtcaatagttcatgcagtggaattgaactcacctattgcaatttggcttctgagatctgaccattcaacaatttcatttgaccattttatgtatttggcactagttgcatgagaatgtccttctttgagccattgtatatgatatgtggataaatatatacataactttttctcttgactcatacattataagtgtcccccagttggatcaaaaaatgattccgctcgcagaatgtgacttttcttaacccaagaaaattttgtacacaaagaaaatcaaacacaatttttttgataaaaaaatcattttaaatatttttttggctggaattaaaaccacatgtgtttcttacttcatggtcaaagacaaattcactctaaggattattttttttatc

SEQ ID NO: 44001 - DNA, 285 bp, Glycine max
  Clone ID: PAT_MRT3847_139731C.1
gcgagaagacgacagaagggtaacaatacacactgacgttcaataaccaattctaaccagtcaatttctcaacatttgcagtaacaagtgagttatggattgatttttttgaaataattttatttaacgatacaattgttttattgtaaaaaatattattcaaaaaacaattgtctggaaaagttttgtcttgctgacgtttttcaagtggtgtaaaaatcttcaaaataaaaagggcaactataatttttttcaaaaaaacaatttggtctattggatattttg

SEQ ID NO: 44002 - DNA, 214 bp, Glycine max
  Clone ID: PAT_MRT3847_139732C.1
aaaaaaagaccttattcattgaaagaggaatttttataacatggggcaaacatgatgtttttaaaaaggctttgaatcaaaaagccaaatgttttacattactaccattaattcaaaagttaattttatcactttgctaaaaaaattaaaataggtccacattttttgtttatttggagacttgaaggaacaatgcttaattccaagacagttt

SEQ ID NO: 44003 - DNA, 631 bp, Glycine max
  unsure (1)..(631): unsure at all n locations
  Clone ID: PAT_MRT3847_139733C.1
gggttttcataggtctttttttcttcaaattttctttgctaaaataaaggttgctgatcacaatattgatttgttacaagctgatatatttttttacttcattgaaaagaaaacataacatcactagaacctaacatgacatcaactacaaactaatggaaatttaattgcatttgttattgcttaagctccctggttctaatttcattttgatatctatgtcaatcatttatcaattccatgccaatgatatctagccttcatatgcagcagtttgtccattcttgttctgagttggacaaaattcagcttcagcagttctagcttcctctctgaacttcttgtatatatcacctttatagaactctctagtccttaacaccaggatgagagacacaagtgccccaaacaagctaactgcagtgattataatgaaagccattttgtaaccttcactcccattgcaatgcaactcctccccaggcctgctctttagtcctaatgctgccatttgcctagnggcttccttgtcatacaaataccctgcaagccttacactgaaaaggtgtgacccaattggacttgccactgacccaacattgtacaaggttgagtaaaatttaagaccaaa

SEQ ID NO: 44004 - DNA, 268 bp, Glycine max
  Clone ID: PAT_MRT3847_139734C.1
tcgtgctatggtacctatcttcaaccacagaatcaatctctatctaccacccattgtctcatgtctcactacgtatcccatcatccatttctcacattcttaatcttactatcaccaccattattatcattatcatctccaacctctatgctctcgtaaacccttaaaaccttgctctcaagccacatgaaatgaccctcatgtgagaacatgatttcccccttaatacaatgtcaactgctacttcttattcacaaccaacctcaca

SEQ ID NO: 44005 - DNA, 2124 bp, Glycine max
  Clone ID: PAT_MRT3847_139735C.1
aaaagaacgcgcttcttcccgcgttcttctgcgcttcttctctggtctctggcttccttggtacgggaagaactcaatcttgtccatttccctttggtttttctctcttcgatctcttcaccttccattcgaccaccctcttatcacagctcgcgttaacttaagccctctccgttgagggtttctccaggtgtggtttgattttcagtttctgatgctgaagaaataaaaaagcttgaaggctttgctcttctgtgtgaaaaatgttggaaggtggtgcgaaattcccgggaataatagatctcaacaagaataataacaactactatgatttctctcaaggcttttaccataagctgggggagggtaccaatatgtcaattgacagcgttgggagcttacagacaagtaacggcggaggatctgttgcgatgtctatcgataatagcagtgttgggtccaatgattcccatactcgcatgttggaccaccaagggttacggaggcgtgccaatgataactactctgttgcacatagtgccaatcgtcggggaagagtcacccatgctttgagtgatgatgctttagctcaagctctaatggacaatagttctccgactgaagggcttgacaattttgatgagtggacaattgatttgaggaaactgaatatgggtgagccttttgctcaaggagcttttgggaaactctacagaggtacttacaatggtgaagatgttgctatcaaaatcttggagaggcctgaaaatgatccagcaaaggctcaattgatggaacaacagttccagcaggaggtcataatgttggccacactaaagcattctaacatagttcgtttcattggtgcatgccgcaagccaatggtatggtgcattgtaactgagtatgccaaaggtggttcggttcgacaatttttaatgaagcgtcaaaaccgctcagttcccctcaaattggctgtcaaacaagctttggatgttgcaagggggatggcttatgttcatggccttttattgatccacagggacttgaaatctgataatcttttgatttttggtgacaagtcaattaaaattgctgactttggagttgctcgtattgaggtgcaaactgaaggaatgacacctgagactggaacataccgttggatggctccggagatgatccagcataggccttacacacaaaaagtggatgtatatagctttgggattgttctatgggaactcattaccggtatgcttccatttcagaacatgacagcagtacaggctgcatttgcagttgtcaacaaaaatgttcgtccaatcatacccaacgattgcctacctgttctccgtgacatcatgacaagatgctgggatcccaaccctgatgttaggccaccatttgctgaaattgtaggaatgcttgagaatgcagagaatgagatcatgacaacagttcggaaggcccggttcaggtgttgcatgactcaaccaatgactgctgactgatcctgtgaaagcaaatgcaaatgcaaatgcaaatgcaaaaaagtcataaaaacatagactggaatatttgggggcaagatgaaactctggtagtgaaggggtgactatattatagctttgtgtatctgtgtgttttatttatttcttctgaagaaaaaaatgaaaatcttatctggagaccttttgcttattcggtttctgtttactgaatgtctgttctgaattagtaaaaagaagatgctgtatgtaatacatgcatgttttacagttatgtatagcttgagttctgaagtcagataaaatgagattatgggcgaaaacttttgctttgtatgatgtatgcttgccgttgcagttgcaccacaactaccccggggattgacatactgcctggtttggttcaactggggcttaaatttagcaagtaaaagaaaataaatcagagttatccaatttaaaaaaaaaaaaaaaaaaaaaaggggggccccccaactagtgacccccccgcccggggaattattcccggccgggcacttgagggggtccccctttccccaaaggggggccgtttaagactttggggaaaccagggccaaagcttttccctggg

SEQ ID NO: 44006 - DNA, 2493 bp, Glycine max
  unsure (1)..(2493): unsure at all n locations
  Clone ID: PAT_MRT3847_139736C.1
gtagtttggggtttttttnttaagcacaagaaattctgcttcttattgcaagagcatgatctaccaacgaagttgaaaataagaattacaatggatcccnncttattccaacacacatactacaaccataccatatgggatcactcatatgcagccagacaccacatggcatagcataaccattggcccattgttcaccataatcaaactcgaattaaaccaccttcagcaacaatggttaacatccaaaccaatacatcttacatcttccctcaaacacaatccactgttcttcctgatccctccaaattcttctcctcaaaccttctctcaagtccactccccacaaactctttcttccaaaactttgtcctaaaaaatggtgaccaacaagaatacattcatccttacctcatcaaatcctccaactcttccctctctctctcatacccttctcgccaagccagttcagctgtcatattccaagtcttcaatcctgatcttaccatttcagccccacaaggtcccaaacaaggtccccctggtaaacaccttatctcctcctacagtgatctcagtgtcaccttggatttcccttcttccaatctgagcttcttccttgttaggggaagcccctatttgactgtgtctgtgactcaaccaactcctctttcaattaccaccatccattccattctctcattctcttcaaatgactccaacaccaagtacacctttcagttcaacaatggtcaaacatggcttctttatgctacctcccccatcaagttgaaccacaccctttctgagataacttctaatgcattttctggcataatccggatagctttgttgccggattcggattcgaaacacgaggctgttcttgacaagtatagttcttgttaccccgtgtcaggtaaagctgtgttcagagaacctttctgtgtggaatataactgggagaagaaagattcaggggatttgctactcttggctcaccctctccatgttcagcttcttcgtaatggagacaatgatgtcaaaattcttgaagatttaaagtataaaagcattgatggggatcttgttggtgttgtcggggattcatgggttttgaaaacagatcctttgtttgtaacatggcattcaatcaagggaatcaaagaagaatcccatgatgagattgtctcagccctttctaaagatgttgagagcctagattcatcatcaataactacaacagagtcatatttttatgggaagttgattgcaagggctgcaaggttggtattgattgctgaggagttgaactaccctgatgtgattccaaaggttaggaattttttgaaagaaaccattgagccatggttggagggaacttttagtgggaatggattcctacatgatgaaaaatggggtggcattattacccaaaaggggtccactgatgctggtggtgattttggatttggaatttacaatgatcaccactatcatttggggtacttcatttatggaattgcggtgctcactaagcttgatccagcatggggtaggaagtacaagcctcaagcctattctatagtgcaagacttcttgaacttggacacaaaattaaactccaattacacacgtttgaggtgttttgacccttatgtgcttcactcttgggctggagggttaactgagttcacagatggaaggaatcaagagagcacaagtgaggctgtgagtgcatattattctgctgctttgatgggattagcatatggtgatgtacctcttgttgcacttggatcaacactcacagcattggaaattgaagggactaaaatgtggtggcatgtgaaagagggaggtactttgtatgagaaagagtttacacaagagaatagggtgatgggtgttctatggtctaacaagagggacactggactttggtttgctcctgctgagtggaaagagtgtaggcttggcattcagctcttaccattggctcctatttctgaagccattttctccaatgttgactttgtaaaggagcttgtggagtggactttgcctgctttggatagggagggtggtgttggtgaaggatggaaggggtttgtgtatgcccttgaaggggtttatgacaatgaaagtgcactgcagaagataagaaacctgaaaggttttgatggtggaaactctttgaccaatctcttgtggtggattcatagcagaagtgatgaatagaatggatttggttattgaacatgacaacactgctgatttggttgttattattattgctactattactatgccaataaaatcatcaaatatgtcttacatcataataaaaaaattattactatgccaataagtcaatgatttcgatatgttatagaagaagaaaactataataaagttacaacaatatcatgatctataacatgtctgtttcttaaaaaaaaaaaaaaaaaaaaaaaaaaaaaaaaaaaaaaa

SEQ ID NO: 44007 - DNA, 743 bp, Glycine max
  Clone ID: PAT_MRT3847_139737C.1
atccgtttttttttcttctgcgcttcttctctggtctctggcttccttggtacgggaagaactcaatcttgtccatttccctttggtttttctttcttcgatctcttcaccttcctttcgaccactctcttatcaccgctcgctttcttaactagagccctctccgttgagtgacgagttcgtgaatattcgcttgagatttgactgcgaagctggttttagagggtttctccaggtgtggtttgatttacagtttctgatgctgaagaaataaaaaagcttgaaggcttttgctcttctgtgtgaaaaatgttggaaagtggtgcgaaattcccaggaataatagatctcaacaaaaataataacaactactatgatttctctcaaggcttttaccataagcttggggagggtaccaatatgtcaattgacagtgttgggagcttgcagacaagtaacggcggaggatctgttgcgatgtctatcgataatagcagtgtcgggtccaatgattcccatactcgcatgttagaccaccaagggttgcggaggcgtgccaatgataactactctgttgcacatagtgccaatcgtcggggaagagtcacccatgctttgagtgatgatgctttagctcaagctctaatggacaatagttctccgactgaagggcttgaacattttgatgagtggacaattgatttgaggaaactgaatatgggtgagccttttgctcaaggagc

SEQ ID NO: 44008 - DNA, 303 bp, Glycine max
  Clone ID: PAT_MRT3847_139738C.1
gaaaagtgggtctcggttgcatgagggtcctatctggccacttgcatcttttcttaaccgttggtcctcccatacctacctcaacgtctctacatgccgcccgtgcttgctcttagaactgctggaggagaggactgcactttcatgatttacatctgttttccgacggattccataaactttacgagtctcgggtgaagaaaactttatcgctacattattgcttgagagcgcaaataggcgtccgcttacccccttacgaatgtgacttggcgtgttatatgcacccttaatgaatgtcgg

SEQ ID NO: 44009 - DNA, 718 bp, Glycine max
  Clone ID: PAT_MRT3847_139739C.1
attgctgactttggagttgcccgtattgaggtgcaaactgaaggaatgacacctgagactggaacataccgttggatggctccggagatgatccagcataggccttacacacaaaaagtggatgtatatagctttgggattgttctatgggaactcatcactggtatgcttccatttcagaacatgacagcagtacaggccgcatttgcagttgtcaacagaaatgttcgcccaatcatacctaacgattgcctagcggttctccgtgacatcatgacaagatgctgggatcccaaccctgatgtcaggccaccatttgctgaaattgtgggaatgcttgagaatgcagagaatgagatcatgacaacagttcggaaggctcggttcaggtgttgcatgacccatccaatgactgctgactgatctgatcctctgcgaaagcaaatgcaaaaaagtcataaaaacatagactggaaaatttgggggcaagatgaaactctggtagtgaagggtgactatattatagctttgtgtatctgtgtgttttatttatttatctggagaccttttgcttattcggtatctgtttactgaatgtctgttctgaattagtaaagagaagacggtgtatgtaatacatgcatgttttacagttatgtatagcttgagttctgaaggcaacataaaatgagatcatgggcgaaaacttttgctttgt

SEQ ID NO: 44010 - DNA, 786 bp, Glycine max
  Clone ID: PAT_MRT3847_13973C.1
atccacttatctgaaattctgaacagtacagttcttgcgttgtttcggaggatcaattgtttgattaagcaaaaaacttaatagtagttaaaagcaaatggggaatcttttttgttgtgtgcaagttgatcaatcaacagtggctataagagaaggatttggacgatttgagaaggtacttcagccaggatgccattgcatgccatggttccttggaaaacaacttgctggtcatctctctcttcggctacagcaactggatcttcgatgtgagaccaaaacaaaggataatgtctttgtcaacgttgttgcttctattcaatatcgtgccctggcagagaaggccaatgatgctttttacaaattgagcaatacaaagacccaaattcaagcctatgtttttgatgtaattagggcaagtgttccaaaactaaacttagatgatgcttttgagcagaaaaatgaaattgccaaagctgtggaagaagaacttgagaaggctatgtcagcttatgggtatgaaattgttcaaacactgattgttgatatagatccagatgagcatgtgaagcgggccatgaatgaaatcaatgctgctgcaagattgaggatggcagctaatgagaaggcagaggcagaaaagatcttgctaattaaacgagccgagggtgaggctgagtctaagtatctctctggactgggtattgctcgccaacgccaaagcattgtggatggcttgagagatagtgtgcttggattctcagttaatgtaccctggacaactgc

SEQ ID NO: 44011 - DNA, 749 bp, Glycine max
  Clone ID: PAT_MRT3847_139740C.1
tacggctgcgagaagacgacagaagggggtaaaccaaattaaataaaagcagaaccttaagttgacttgtgaaagcgggaaatgaaaaatttccatgagagttaggttcccatagcggtttaaaattccagcagtagcacccacgaaattgccgtaagtttcactaaataactcattgacgcacccactcacaccacaacaactaactctcgtctttcttccatgatgacgacgacgccaacaacgttggagatatgtgttgtgtccgccgaaggtctgaagcaacagtcctcctcctatttcagctgcatcagaacccttcatcacatctcaccagagctcccagcgcacatggtctaccaccactacgacgaaggaggaacaggggagcaggtgttccgcgtcccagtggatcccaccttcttttccgacacatattcccgcctacacctccaactctacaacaagcggcgctttgcggggctcacgcaactcggttcgtgtctgattccgccctctgacattgccctccaaccttatcattccgtacgctacctcagctaccggctacgggcaaaagacggttccaggacccacctcaccgtcaacctttccatccggttgcacggatcactggatctcgacacgtgtcaacctgtcattgggatacccgtcaccgcggttcgcaaatttcgcaacgctcattccagttcgggcagcacaagctgcaagatggagacggaatttca

SEQ ID NO: 44012 - DNA, 571 bp, Glycine max
  Clone ID: PAT_MRT3847_139741C.1
gcggctcgacctgccgccctttttttacacgtgggttttcctgtttttcaaccctggaaggtctgaccagatggtagaagctaacaaaattaacactgatgatacaggaatacacaatgctgacgagacctacataaaatctaggtgtgctaaaaaaaattaccgactcaaccccacacaatttaatagacaccatgcatcgtatcacgttcatgaacagggtatggaccaaacacacctatatcccaggcgtgggattgtctccaccttgaattagagaaatatctaacccgccgctaacagcctggataaacattacgcgagcttggcatgttgatacaaatgggaacccccaaaagaaggcaatgggtaccaagatgaccatccccataccagcgtcatagagccgatcaatcgaactgacagatttccataggccaaaccttttaatcaccggcttccaggcagcacgaattgacagaattccccaaccagatggaacaaaagctgacatagaatcaaatatgttcggctaagacagattacgcaatataactgctacaactaaacc

SEQ ID NO: 44013 - DNA, 492 bp, Glycine max
  Clone ID: PAT_MRT3847_139742C.1
aaaaagggaattggcagattttaaatacggaggaaaggaaagggtagttcaaaatggccatgaaaggggcccccaacaaagggtcttattaccgggagcagggcaagaatcatgacaaagcattcaaggccagcgggtacaaaagaagaaattccccccccatctttactggggggtatatcaaaaaccacaggacatccttcatgaataccaactagagatccctcaagggccgggataggaaacaaaagaggcaattcaaagggcccctctataaatgctttgaaagaatggcccaccccaattttaaattcacccaagggaaaagcagggcaattcagaaaaaaaataagcttcaacggaccctttaagaagggactggggacttgacgggctttcaagaaagggtaggggggccctttttccttgcaacgaaaggggcttgcctattgcccccaggggaatctggatcaattttggggaaacttttct

SEQ ID NO: 44014 - DNA, 403 bp, Glycine max
  Clone ID: PAT_MRT3847_139743C.1
aggcctactcgttctgtaacaagcataagcattgaggaaacgtccattagttattgtaaagtgcgaacgctgcttttgaatgtgattctacgtttacctttcatcactggaacagcattacgtgatcaaatatatttcgagctatctcatgaacctctgctatcaacaattgacttgttatccactctactctcatctaaaaatgccagcttcactttggactctatgctttgtaaaccgaagcaccattttaacttgaacgtatttgatcagacttagacactgcaagccagatactcctcatctagacgcacacaactgggctcatcttgttcctaaaataacgggctaaatagtgcggtctattcttcaagtggctctacatgatcacattaaatttttt

SEQ ID NO: 44015 - DNA, 145 bp, Glycine max
  Clone ID: PAT_MRT3847_139744C.1
aattgccggatgcacccacgcatgcgtccacgcatgcgtccacatcgctcatgccgaatgcggatcaggctctctgcgcgcattacggcgggatgtgcaacggactaggtcaggcattgtcactgaatgacagccttcaacgagt

SEQ ID NO: 44016 - DNA, 564 bp, Glycine max
  Clone ID: PAT_MRT3847_139745C.1
gacaacaactccttgatgtacataacggttcattactgcatacggcttttcaacaattccccttttggggtaaaagaggacacgccccaaaggccaaagcataacagtagaatctggcaaataactaatatatctcagtcctgaaacaagagttctcataaacaactaccagggaccgacatttagcctgggagccttggctgatcttcaagcgagtgtggtattttatagaggagaagacctccacacgatatcggtaagagctgcacgaagctctttgctacagaactgtctatactcgaaggtgtcaccgttgaactccttacactccaccatcaaaaaccacgggtgccaggaggcaatccctcatcattgggggagttaacttttcccccgttttcgtggggcttgaaccttaacctaatctgggtacttttaacggttaagtttagcggctttgccctatttttcaaacttcaaaggggggtttctgcggggagggttgaaacaaaacgggactttttgggatcctttttaccttacccggacaaacgggactaaaaa

SEQ ID NO: 44017 - DNA, 368 bp, Glycine max
  Clone ID: PAT_MRT3847_139746C.1
tgggttgtcttatgtatatcctcgtctgccgttcttactttattataaccacttctaatatccattttaaaaaaataacatgccccatttaattcattcaacaatacctatattagtgacataagaaacctatttttgatggaaaacgcattaactctcctgaaatctgtgcaacacctccaaaagtcattcttctttcttacgaacacctactaataagcataataactactccttctccttatatatcctgttaccaataaatcctgcacttgattatcaatctcttcttttgggacattaagatatctataggctttccatcagacagatgtgtcattgattatatcgatcttatcatcacattc

SEQ ID NO: 44018 - DNA, 495 bp, Glycine max
  Clone ID: PAT_MRT3847_139747C.1
acttggcccggttcaactgccatacactttgctagagcccaccggggagggcaattgacaagccccggctaaacggggatccactttgctttattttaaaaccgaggaagggggaacccttaggggaattccaaatagtatctggatctaagggagcgggtggtttactctggggacgccacacctcccgcatgtggacctttcaaaaaaaaacacgcgccactctaaaaacgatagatcttggaaattacccaaagaggcaacccccccgccctggaaggaaaaaagaaattgagcggacagttagcccgggcctagcaaatacccccaccggtgagcactaaaaaaaggggggggggttgaacccggccaaagggattgccccgaaaaaacggaaaattggtcccccccaaaaggttttcccaaaatggcctgcgccccaaatttcgagctttcccccccgggaattaaaaccgaaaaggtcttagaggggcc

SEQ ID NO: 44019 - DNA, 278 bp, Glycine max
  Clone ID: PAT_MRT3847_139748C.1
cgtatgcaatgcattgtattgattccgctggtcagtctccaacttcaagatctttttctttgctcagaaagcagacgcagcatcaatgtttcttgtagagtgtatactcatcacttcgagagccgggcggcggattgaaataaaagctaatgaccaaggttcatcccaggcattctttactttattccaaagaaccttgaagaaatttggttgtccttgcatgtttgtggtgtcttcagacgttacaactcgtcagatgtgaagcgtcgcaatcctac

SEQ ID NO: 44020 - DNA, 136 bp, Glycine max
  Clone ID: PAT_MRT3847_139749C.1
ctcaaatctcaagtaagtatcgctctcgccccatggcagacgcaataggcgcgcaacactgcaacagctgacttcgtttcaatttcaacgacgcccttaaccagtttcagggccaaccagctgcagctccagcatc

SEQ ID NO: 44021 - DNA, 1748 bp, Glycine max
  Clone ID: PAT_MRT3847_13974C.1
gtagatagttttagactaataaagtcgtctttggttgtccagcacttcggaaatccacttatctgaaattgtgaacagtattgttcttgcgttgtttcggagggtcaattgtttggttgagcaaaaatctgaaattcaatttcagttgaaagcaaatggggaatcttttttgttgtgtgaaagttgatcaatctacggtggctatgagagaaggatttggacgatttgagaaggtacttcagccgggatgccattgcatgccatggttccttggaaaacaacttgctggtcatctctctcttcggctacagcaactggatcttcgttgtgagaccaagacaaaggataatgtctttgtcaacgttgttgcttctattcaatatcgtgccctggcagagaaggccaatgatgctttttacaaactgagcaatacaaagacccaaattcaagcctatgtttttgatgtaattagggcaagtgttccaaaactaaacttggatgatgcttttgagcagaaaagtgaaattgccagagctgtggaagaagaacttgagaaggctatgtcagcttatgggtatgaaattgttcaaacactgattgttgatatagatccagatgtgcatgtgaagcgggctatgaatgaaatcaatgctgctgcaagattgaggttggcagctaatgagaaggcagaggcagagaagatcttgctaatcaaacgagctgagggcgaggcagagtctaagtatctttctggtctgggtattgctcgccaacgtcaagcaattgtggatggcttgagagatagtgtgcttggattctcagttaatgtacctgggacaagtgcaagagatgtcatggacatggtccttgtcactcagtattttgacactatgaaagacattggtgctgcctccaagtcttctgctgtgtttattccacatggacctggtgctgttcgtgatgtagctagtcaaattcgagacggacttcttcaggcttctcatcagtagcctctactccacctagatcttgtatttggtttgtatgggagtatgtttgaagctatagcgcctgtggttgtatacctgtatttctgtgcagtgtgttttgtgattttgttttagaataaactgcaaaattgatcttccaaagattatggcatcacctcattaatgtttttaagatttttgttatcaaattagtcccacaaatatctaaaatgttaccacatttgttcacatagaggactaaagaagtggtaacacaaaataatttagtatttgatttgtatctctgtgggattgatttgttgaccaaaatctttggaggaccagttcaaggacttactctatcgatttatactttcagtttcaggcagtcaagtaatactgtatattctgttgtctatattgtggatcatgcataactaaactatcaagtatccctgtatatacaagttgtctaaattgtgaaagttacatatacaagaaatttcctaaggggggggcccccccccaatcccccgggtccccggggggaaaacccctcggccggggcaggaaaccttcaaaaaattgggtgggggggaacccttttttcccccaaaaaaaatttggccccctgggaaaagaaaaattttgggaaaccaaaaggctttcccctttttttcccctatttgtgccccccccccccccccccttggcttgccccggggaccaggatataaagcccccccgagatcccccttg

SEQ ID NO: 44022 - DNA, 307 bp, Glycine max
  Clone ID: PAT_MRT3847_139750C.1
gccacgcttatgaacgcctttattctccgtatacgctgccttcacgaagttcgaatattcatctctgaaaatgagatagtgcatatccgatccacattggtcatggccggtatccagatcggaaatgtttgatgcgagctctactgacttgagcacggcatcgagcccgatgggcaaatgccaagtgacacaacagttggcggaggtgattatgctctcaacacttcacacagagagactggagctgtaaaggaccagccacgtgctgcttatgtcgatatgaaagccactcgagatgaactagtga

SEQ ID NO: 44023 - DNA, 335 bp, Glycine max
  Clone ID: PAT_MRT3847_139751C.1
attacatacacatgccttcgattatccaaatttattatgatctaatggacatggccacagaggtagaacaccgatttacactaattgaggcttccaacctacaaactcacttgatgtataaagaactgtttaaggcattatattaattgatgatacatattgcttcttggtcttagaagacaccagacacgatatggctatgcactagctcattacatatgaagaaccaaatcgtaacactcaagattgcaagagcttattgatgcttttatcgattctcagaggcgcggcggtaggtgcatatatgcccacaacctatccttttttgtttacta

SEQ ID NO: 44024 - DNA, 417 bp, Glycine max
  Clone ID: PAT_MRT3847_139752C.1
tgcgagaagacgacagaagggaactgcatgaataactctcatgtcgcatgtgtagcatgattgaggggggccaagtgaaacaaaatcaagttaaaattatctttattggtatcattttaaggtgaagtatatttgaaattccaaatttaaccttaaacttttgaaggaaaatttttcaaccatgtatattactttatataataagattacaaatttaaccttaaacttttgggggagaaacttttcacccatgtatattactttatataataagattttacaggacaaatttaatgcacccaaaggtggaaggcctcaatcaaacaacaaaggtacgcttctgtgagctatgaggtgacatgcgaatgaaattcatatttattcacatcgggtgataaaaaaacttccactggatta

SEQ ID NO: 44025 - DNA, 340 bp, Glycine max
  Clone ID: PAT_MRT3847_139753C.1
aaaggtggaggggtatgagaccccaagtgctgatattatcataggccttgaagcctatactaaattatatccaatgtggtatataaaactatgtgtgtagaccgacggatagtaacgccagagacactatgagcgacgtggagatgagctgacggagagatatagatacgtgaggggagctcatttgaggattacaactacgatattgcagctggggacagggatcccaagtatgggaatgtatgtatgttgctgtgcatgttggttgctaagaaaattatgtttcagactaaagagaggggatatatgtattaccgatgaacggaacatgagaatgaaa

SEQ ID NO: 44026 - DNA, 332 bp, Glycine max
  Clone ID: PAT_MRT3847_139754C.1
tctttcacgcgtcctggacaaaatcggaaccacatttttgggaattgatcttcccaatacaggtgtgtggtcctaacaatggttttgaaatgtggagttctgagtgggcaaattcaaacttcatggcacttgagtttccttattgacaatcccaaacagtttacagtttttgacattctcttgggaatttcccatgattttgaaatcgctggttatatttttatgcccgttttttttgttccacaggctactgccagatcttctgcatatgctccatccctctcgatgatctggaatttgtatctttttctatcgtccgcttgtttaatttc

SEQ ID NO: 44027 - DNA, 360 bp, Glycine max
  unsure (1)..(360): unsure at all n locations
  Clone ID: PAT_MRT3847_139755C.1
nntttgcgctttatnnngnatgcnggcccctcatgacattcanntntnngcangcttncttanncnaatnngnanganntntgcctgangacanntcnngtgntncaatcggnngnactnananaatcgtcgcaanganggctnngttccngnnctcnganggcctnnnnnctgtnanatggctttcnnnanncagggtntttncgnngcnnnccaaggttcnncnatgctngtganangnnantggngagnngtnngcncncgntctgnngnnctnccacanngngggnngctncncctnttnngncagtnccgnctntcaagngattnagnntcnangatcgngnnncntgaantccn

SEQ ID NO: 44028 - DNA, 791 bp, Glycine max
  unsure (1)..(791): unsure at all n locations
  Clone ID: PAT_MRT3847_139756C.1
gatttatgaaaaggcagtgaaaattcttgagacatactggatggaggaagacgatgagactatgccgccaggggatgcttctcaatcagggttcaactttggtggcgctcaacctcctgctgtgccttctggtggattcaacttcaattagaaggagctttggctggtctatcagtaaagtgactaaagtcctccagtttgacagtccaacagttgggggtcaagtcaatgtccttgggtcctacaaggtccagccttggtaaatagagggtggctggaccggcttgggtttttgaaatggctggttttacgtacatcacggggacagatgggttgtggcttgattttcttggccacataaagagttatatttatatatactagagtttgctttctgccaagtgatcattccgagtgatttggcttttataaaattgttgttgagttttgtgattttttctgtcatagattggaatcaggaagtaccatttgtgattctggatgttttgggcgaaataccaaatgctactatctttgcttcatattaatagttacaaggtggaatttttcttttacccttcctttgtaagttttttgaagtttaccgtgaagttctattcattatgttcttcaggtgaggtcaggttcgtagtgtaatgttttactaatctggtctgggaagaagtcttacacagaagatagtatgcaactatgtcttttgttctcgggcattgtattttgttgcactgtgggattttctcttccaaaaaaaaaaaaaaagggccnccccc

SEQ ID NO: 44029 - DNA, 370 bp, Glycine max
  Clone ID: PAT_MRT3847_139757C.1
ccggtccggattccccggttctttcacgtttccgttttcgcgctgtctcctatacggtataggacatgggaggggggacatttctattcctatatcttccttcactctctattactcactgatccgtattgccgaacaaagtgggcctaatctgataaacacctgggcgttggtgcaaaagtttgctttctcaatcctctcttggagacaacaggcttcactgagaaaacactcttaactcgctgagatttggacatcttggatgcatattatacaatttgcaacctcaatttaggaaattttcttccccattacattaggtggcatctgtataccattgttgaccaacacttcttacatctttcacaca

SEQ ID NO: 44030 - DNA, 508 bp, Glycine max
  Clone ID: PAT_MRT3847_139758C.1
tgacccacttcaacagcgtgccatacagcatcacatcgcttatctaggacaaacaccatcccaacttttgactgttcctctcttgaagaaaatgccattaccagaagttctgcatttgctgacaatattccgcatcccaaaagaagtcaaaccgtatgcctgctccattgccagaaacgcatccttcatttctggaactcccattcatgcatcttctgatactgatgtggttgttgatacagatgcgccacacgctcatgtatcacaacacaagtggcaactcaatacacctgatgggctcggtactccattcctctctcaacatagaaaacctatattagcctctgctcggggtacaattatgcgcatgtataaagcaccgtctgctatctggtggggactggattgacaccagacacttgcatacgctgtctctggaattctaagctcagcatttgtttctatgacaagcatcacagaaaatattactgatgggcatgctcataat

SEQ ID NO: 44031 - DNA, 372 bp, Glycine max
  Clone ID: PAT_MRT3847_139759C.1
gccaggcgtacgctcatacacccgaaattacaatatcagccgttccattaaacctggctgcctgaacaaggattaaaataatcatccgcacacttatacagacagtatatcatctgagaaactgaagtaagatagtgagactaataaaggtatatccatagcgctagatccacgcatccggaatctggaatgaaatactagacgtgtatgacgtatcatgctatactgaaagagtagaacatggagaaaatcatacatgccatatacactaataaacttatgaagataccagccaagagtgtacgtgtgaataaagccatctacaactcaaaagatgataaagctagacctaatgagagattaacagagaga

SEQ ID NO: 44032 - DNA, 3051 bp, Glycine max
  Clone ID: PAT_MRT3847_13975C.1
ccacgcgtccgcggacgcgtgggctgtttctctcttttgttcaccgaaacctcacccaccccttactcttactctctctattgttctttctttaacaagtttcttacttcctttccacaatagaaagaaaaacaaggaaaataaactctacctcgaatggccaacactcaccgccgccgatgaagatctccggcgactccacccgcccgctgcgcccattcccgccggccattgcagccccctctccggactccgatctccaaccgcaccggagggccagccgccgccatccccgaactccggccagccgccttaggctggccggtggacacaccggaaaacggagcaggccggaaacccccttgtccaagtggaagatccacgacggcggaagagagaggaacatcattggcggcggcggcggcggcgatccgctcgaggaccacgtccggaagaaggaggctccgccgcatgccgccgtgtcggcgaggaagctcgcagccgggatatggcggatgcagctgccggaagcagcggcgggtgatggcggaaggcgaagggtttcgaggaaaatcggtgaagatcgtttgggagttcatcatggaattggccatgtataacaccaatttctcagacttcaaagtggcatgcatggttctgctatgcagaatccatcacgaaagtccccattccatttaaagcactgagaatataatctttcactcccttgtgtcaatgcctcacttatatttatcacgaccggccttgcttcattttgtgtagtatcctataaaagttatgagaagcatgttgcttgtattgtatcatttaagtctgaggccaaatatgcagggaaaccaaatcatcataaggtatagatgatagtagcattacgtgcccagccccctgcttttcctccttagtccttgtggctctggctttgtcctcttcggctctagccttctttccagttttcgagtaccgcaatggagggggcaacaaagtgggatcctgtttgtttaaaaacatcagacgaggagcatcatatctacagccaaatgaaacttctcgaccaaaaggttagcactgtttcttctgtatcagctcttgaagctgaactagagcaggctcgtgtgcagatccaggaacttgagactgaatgccactcctccaaaaagaaacttgaacatttcttgaagaaagttagtgaggaaagggcctcatggcgaagcaaagagcatgaaaaaattcgcgcttacgttgatgacattaaatcagagttgaatcgtgaaaggaaaagtcgccagaggattggaattgtcaattccaggttggtaaatgagttggcagatgtcaagttattagcaaaacgctacatgcaggattatgagaaggaaaggaaggccagagaattgattgaagaaatttgtgatgagcttgctaaggaaattggagaagacaaggctgaaattgaagcactgaagagggaatctatgaaacttagggaagaagtggaagaggagaggaggatgttacagatggctgaagtatggcgtgaagaacgtgttcatatgaaattgattgatgcaaaagttgctcttgatgagaagtactcacagatgaataaacttgtagcggatttggaaacctttctcaaatcaataaatgtgaacccaaatgcaaaggagatgaaagaagcacggtcacttcaacaggctgcagctgctgtagacattcaagacatcaagggattttcgtacgagccagctaatccagatgatatttttgccattttcgaagatttaaattttggcgaatccaacgagagggagattgaaccatgtgttgctcactctccagtgagtcatgcctcaaagattcacacagtgagtcctgaagccaaattgattagtaaggataacttgcaaagatgttctgatgtatttatggatgacaatggtgatatagaagaagatgaaagtggatgggaaactgtgagccatgttgaggatcagggatcaagttgttcgcctgaagggagtgccctattggtgaacaagaatcgtcgagagagtgatgtttcagggaggagtgtgcttgaatgggaagaaaatgcaggtttagagaccccaataactgaaattagtgaagtctgttcagtaccagctaagcaatcaaagaaggtatcctccatggcaaggctttggaggtctggcccaaacagcggggataattacaagataatctctgtggaggggatgaatggtaggctttcaaatggaagggtatctagtgggggcataatgtctcctgattgggaacttggtaacggtggactaagcccccaagaccatctgtaccagttgagttcgcctgagtcagcaaatctgcataatcgaggcatgaaagggtgcattcctcgcaccgtgcagaagagtagtctgaaagccagacttttggaggctaggatggaaagccagaaggttcagttgcgccacgttcttaaacagaagatttagatgtgatgtgagcatagacagagattcctcacctgtataactgaagaatgaccctcaagcagcagatttgttttgaattgtgaaagtataaatctactgctgctagaaaaactgctcagaaatgatgggggtcatgaataaatgcacctttcctgcctcagactttggccatgttgcagttcttcgacatcactcatatttaaagcattgagaagataatctttcacccccttgtgccaatgcctcacttgtatttatgacgaccggccttgcttcattttgtgtagtatcctataaaagttatgagaagcatgttgcttgtattgtatcatttaagtctgaggacaaatatgcagggaaattaaatcatcataagttatagatttatcttttcagcattttgattttctatcttagtagatgcggcttagaatttgtcaaatagattgtagaccacgaggatgatttctggtcccaggactgaaaattcataacagtgataaaacttaatacttaaaggttgggatggacc

SEQ ID NO: 44033 - DNA, 484 bp, Glycine max
  Clone ID: PAT_MRT3847_139760C.1
gtcgacccacgcgtccgcccacgcgtccgactgctgcgagaagacgacagaaggggacggtcttgcactccacagtccactcactcaccttgcacatccaatccacccactaactcactggagtcaatatatgtctctgtatctgcgcgctacaaaaacaggcgaaaccgacatgctgactctacatgccctgcagcagagaggtatacagcaggatcggggcccagctcttgaaatacgtggctccaacaaccgtcgagaatttccgaacactatgcacaggggaaaagggcctgggccgcaacaccggcatgccccagcactacaagagcatgcgatcgcaccgcgcgatcgaagggtacatgatgcacggccgcgacatctacgctggggatgggaccaggcgcagatcgacctatggagcgaagttcgatgactagagatcgaagatgaagcacgaaaagaacgggaccctagacatgga

SEQ ID NO: 44034 - DNA, 1636 bp, Glycine max
  Clone ID: PAT_MRT3847_139761C.1
atctgcatcaatcaaccatcatcataatcatgtcttgctgtttatcttgctgcgcgtctttgacctgtggtctctgcacctccactgcatcttgcatctcccaaaaatccgctagaatcggttactgtggtctcttcggtgtctctctcgtcgtttcgtggatcctcagagaagttggagcacccctcttggagaaattcccatggataggtggcacatccgataccaacacaacggaatggtatcaagcacaagcggttcttcgagtgagcttgggaaatttcttgttctttggtatcttagcccttattatgattggtgtgaaggaccccaatgatagacgcgattcatggcatcatggtcgttggactgcaaaaattgtcatctggcttttgcttgtagtgtttggttgggagcaaacctctccttgaagaagcagaagaaggaaaggcaaaggaggaaaaggaagcacaacccgttatctattcgtattcattcttccaccaaatatttgccctggctagcatgtattcagccatgcttctttctgtatggaaccgtaaatctgagctggcagatctttattgattcgggtgataattttactggattcgactcacactcgggtgggtccctgcggggtggtagatctgcatcgtgggtttgctgcgctctctcatattactgtattttatgacattcttgctggttcggggtctggcatcctttgctttggttcaccctctccggctacgtgtggggccgctgtgtcttccttgcaacacatgatattatgtatagatcccccccttcatgcgagatgtaatgcattttatatctaccatagttttgctgtttgataactttttttgtccaatataattaaaataaaattgtaacaattcaattttaatgactatgagtgcaatggtctcaacaagtccagagcggtcagcacaggcacactcgttcttggcatgctaacaacagtgctatcggtgctgtattctgctcttcgggctggatcttcaaccacattcttatctccaccatcttcacctagattgggtgggagcaaacctcttcttgaagaagcagaagaaggaaaggcaaagaaggaggaaaaggaagcacgccctgttagctactcgtattcattcttccacctaatatttgccctggctagcatgtattcagccatgcttctttctggatggaccagcacatctgagagctcagatctcatagatgttggttggacctcagtctgggttcgaatcggcactgagtgggtcactgctgggttgtatatctggagtctattggctcctttgctattccctgatcgtgaatttgtttgactctctcatcgctagattactatactctatgacattctcgttgttggtgttttggtattgtaagttatgaccttcaatgtctacatcttggaatcttgtgtgttgcttgcaatacatgatatatgtatagattcaccacttcatgtgagatgtaatgtaatgcattttatatctactataattttgctgtttgataactttttttgtccaatataattaaaataaaattgtaactattcaattttataaaaggagttgcccaaaattaaattgcc

SEQ ID NO: 44035 - DNA, 566 bp, Glycine max
  Clone ID: PAT_MRT3847_139762C.1
ggctcgagcttggttttgtccttgtggacctgtgtattgatttagttttattattgaaaaaataaataataattggtgtgcaaaaacaggtgaatgggagcttgttgccttctgctgtgatttctctttactgtgcttatgtgtgctctacacggggctttctagtgaacctcgtgactatgagtgcaatggtctcaacaagtccagagcggtcagtacaagtacactcgttcttggcatgctaacaacagtgctatcggtgttgtattctgctcttcgggctggatagtcgaccacattcttatcaccacaatcttcacctagaatggttgggagcaaacctctccttgaagaagcagaagaaggaaaggcaaaggaggaaaaggaagcacaacccgttatctattcgtattcattcttccaccaaatatttgccctggctagcatgtattcagccatgcttctttctggatggaccaatacatctgagagctaagatctcatagatgttggctggacctcagtttggttcgaatcggcaccgagtggtcactgctggattgata

SEQ ID NO: 44036 - DNA, 576 bp, Glycine max
  Clone ID: PAT_MRT3847_139763C.1
cccacgcgtccgcccacgcgtccgatttcattgtctccttctcacaacaaacaaacaccgttcttcttcttctcttcttcctctgcaactctctctctctcatcttacgtgtttatcatcgtcactcaaacgacgccgtctcctctccgattcctaagccacgtttatcaggtttcttggtgctgtttgtgcattgtacattattatttctacatgttctggttgtgaattatttgcagatctgattcaactacagtgtctattttgacacccaagattgcaagtggcagttatggggcatagacagttccataacacatcttcattgttcgagggtgagcctgaccagaactggaatcatatgcatactgatcaacaatgtgtgcaccttggtaggactagcacttcagagaatggttcatttatttatcctgctgaaaatatgtccatagataacatgtctttcccttctcattggaattcttccacaacgtcaaatggatatgcatgctctagtaacaacattgatgtacctcctcaccagtcagatgcatcatgaacttataatgatcattt

SEQ ID NO: 44037 - DNA, 2673 bp, Glycine max
  unsure (1)..(2673): unsure at all n locations
  Clone ID: PAT_MRT3847_139764C.1
cgacttccgtttattcgtttccctgcttctgtgagaattttgctgacgatcatacgctttctctttctttggctttcggtttcttggtgctgtttgagtgtttgtgcattgtacattattatctctacatgttctgatgttattttccttgcaggttgtgaattatttgcaaatctgattcaactacagtgtctattttgactcccaagattgcaagtggcagttatggggcataggcagttacataacacatcttcattgttcgatggtgagcctgaccagaactggaatcatttgcatactgatcaacaatgtgtgcaccttggtaggactaacacttcagagaatagttcatttatttatcctgctgaaaatatgtccatagatagcatatctttcccctctcattggaattcttccacaaggtcaaatggatatgcatcctctagtcacaacattgttgtacctcctcacagtcagatgcatcaggcacttataatgatcaatttcatgtatttgtctaggacggtaagcctgtttagagcgtcggaaaattatttacaccaaccttcttcctccaattatgacagacaaacatttcatgttgatgctggttttattgatcttacaatgggaagtggacaagggcatcacaagcgtaagagccctggaattccttcagtctacgagggaggcagtactagtagatactttaatgctgggagttcaactgatcttcctatatcttcagaattgtggcaggagaagccaaatattgattctcaatatatgccctgggatcattttactatgacacccacattcagaggtactggcctttcaattaagggtgagggttctttgcggaatgtgaggagccgttctacacttgatttggattccaatctgtctaggacccatttatcaagtaatcattcacacaattcctaccctactgtcccaccagttgaccattctagcatggcggatctttctggtcagacttctggtacattaacaagggattggagccaaatgaacatgtctccagctaatggaagggtgttattatcagatacaagttcttttggtcttgaaacaagtcacttccttgttggaagtggtgctactgctagcaatgcttctgtagatgttgggggcttccatcatgaatttggtgcaagcagaaatcctactgctcctcaaagttttcataatactcatactcagaccgctaggggaattcgaagcaactattctcagagatccacaccaacttttagggcttcttcaagcttgcgcttgggacatgtgacatctgatgatggattgcctatggtagctgaaagttactcttctagacatccaaggccattgagcaccattggctggaggaatggtgatagaaatgggaggtcaagaatttctagtgaaagatatcgatcattgactgaggagagtggtctccatgatcgattttcctctgagggtttcatggttgttgagcgtgcatcagtgtatggttccaggaatatgcttgatcagcaccgagacatgaggatggatgtagataacatgagttatgaggaactacttgcacttggtgagaggattggctatgtgaacacaggagtctctgaggatttgctttccaaatgtttgacggaaacaatatattgttcatctgagcaaagtgaagacgaaggaaactgcgtaatatgtctggaagagtacaagaatatggacgatgttggaacacttcaaacttgtggacatgactaccatgtgagctgcattaaaaagtggctatctatgaagaaattatgtcctatctgcaaagtatctgctttgcctgaggatacgaaggataaataacttctgtaatataaattaatcccattttgtgtatatatttggacatccctaaaaaatgaggaaacgaacctgtttttggaaatgttataacaggaatgctactctatatcaatgtatttgttttcggcttcgatctcaattactcgaagccttgaaatgcacttggtgaaagaattggctatgtgaacacaggaatctctgaggattcgcttaacaaatgtttgacggaaacaatatattgttcatctgagcaaagtcaagacgaaggaaactgcgtaatatgtctggaagagtacaagaacatggacgatgttggaacacttaaaacatgtgggcatgactaccatgtgagctgcattaaaaaatggttatctttgaggaaattatgtcctatctgcaaagtatctgctttgcctgaggatacgaaggataaataactactctagtataaaattaatctcattttgtgtttatatttgaacatccctcaaaattgaggaaacatattgcttttggaaatgttgtaacaggaatactgctttatgtcaatgaatttgtttccggcttcgatctcaataacgcgagccttggcgctctctctcaagatgtggatgaattctacggactctgcgatccagataaggagaacttgtgcctctatggacatnnnnannaaacatgngaagngactttgncggagaggaagttccttcggagctttcggagcctgcactcggaaataattttgctagggatggcatgaaccgcaaggactggctttctctggttgctgtgcac

SEQ ID NO: 44038 - DNA, 2180 bp, Glycine max
  Clone ID: PAT_MRT3847_139765C.1
ggccggattcccgggtcgccccgcgtccgcatttccctacacctttcttcttcttcttcttcttcctctgcaactctctctctcatcttgcgtgtttaagatcgtcactcaaacggcgccgtctcctctccgattcctcagccacgtttatcaggttgtgaattatttgcaaatctgattcaactacagtgtctattttgactcccaagattgcaagtggcagttatgggtcataggcacttacataacacatcttcattgttcgatggtgagcctgaccagaactggaatcatttgcatactgatcaacaatatgtgcaccttggtaggactaacacttcagagaatagttcatttatttatcctgctgaaaatatgtccatagatagcatatctttcccctctcattggaattcttcctcaaggtcaaatggatatgcatcctctagtcacaacattgatgtacctcctcaccagtcagatgcatcaggcacttctaatgatcattttgtgcattcgtctagtgctggaccatcattgtttataccgttggaaaattatgcacaccaaccttcttcctccaattatgacagacaaacatttcatgttgatggtggttttattgatcttacaatgggaagtggacaagggcatcacaagcgtaagagccctggaattccttcagtctatgagggaggcagtactagtagatactttaatgctgggagttcaactgatcttcctatatcttcagaattgtggcaggagaagccaaatattgattgtcaatatattccctgggatcattattgtactatgacacccacattgagaggtactggcctttcaataaaggtgagggttctttgcggaatgtgaggagccgatctacacttgatttggattccaatctggctaggacccattcatcaagtaatcattcacacaattccgcaaagaaccctcacccttcattgagaggtactggcctttcaataaagggtgagggttctttgccgaatgtgaggagccgatctacacttgatttggattccaatctggctaggacccattcatcaagtaatcattcacacaattcctaccctactgtcccaccagttgaccattctagcacggcggatctttctggtcagacttatgttacattgacaagggattggagccaaacgaacatatctccagcttatggaagggtgttattccacgcgtccggtgcttttggtcttgaaacaagtcacttccttgttggaagtggtgctactgctagcaatgctgcttctgtagatgttgggggattccatcatgaatttggtacaagcagaaatcctactgctcctcaaagttttcataatactcaaactcagactgctaggggaattagaagcaactattctcagagatccacaccaacttttagggcttcttcaagcttgcgcttgggacaagtgacatctgatgatggattgcctatggtagctgaaagttactcttctagacttccaaggccattgagcaccattggcaggaggaatggtgatagaaatgggaggtcaagaatttctagtgaaagatatcgatcattggctgagagtggtctgcatgatcgtttttcctctgagggtttcatggttgttgagcgtgcatcagtgtatggttccaggaacatgctagatcagcatcgagacatgaggatggacgtagataacatgagttatgaggaactacttgcacttggtgagaggattggctatgtgaacacaggaatctctgaggattcgcttaacaaatgtttgacggaaacaatatattgttcatctgagcaaagtcaagacgaaggaaactgcgtaatatgtctggaagagtacaagaacatggacgatgttggaacacttaaaacatgtgggcatgactaccatgtgagctgcattaaaaaatggttatctttgaggaaattatgtcctatctgcaaagtatctgctttgcctgaggatacgaaggataaataactactctagtataaaattaatctcattttgtgtttatatttgaacatccctcaaaattgaggaaacatattgcttttggaaatgttgtaacaggaatactgctttatgtcaatgaatttgtttccggcttcgatctcaattacgcgagccctt

SEQ ID NO: 44039 - DNA, 549 bp, Glycine max
  unsure (1)..(549): unsure at all n locations
  Clone ID: PAT_MRT3847_139766C.1
ggctcgaggggaaaagcaatgttttctcactggagaaactatgatgatttaaatgaatatttttggtcagttgattgttttcggctaggttggcctatgcgtgttgactctgatttcttctctgttcctttccctcagcaggaacgtcaagttaacaaagacgaggaaaacagaggtcctgcttcagaccggtggagtgggaaaactaattttgttgaaatacgcacattttggcatatatttagaagttttgatagaatgtggagcttttatatactctgtttacaggcaatgataatcattgcttggaatggttctggcgaattaagctcaatatttaggggtgatgttttcaagcaagttctcagcatcttcataactgctgcaatattgaagcttgcacaagccattctggacatattccttagttggaaagcaaggaaagtcatgtcgcttcatgtccagctgcggtatatatttaaggcaatnttagctgcagcttgngtcataatttaccagtcacttatgcttacagtgaaaaatcatctg

SEQ ID NO: 44040 - DNA, 318 bp, Glycine max
  Clone ID: PAT_MRT3847_139767C.1
ttgacacaggaaccagtatggctgacgttcagatagaaggtgtgctactcacagccaccattgctacggtgttacaacactcggcgttagcgcatactaggcacatctgtctctgtactggaaggtaaaccggtcgaatcagcctattgcctaaacaaaatggtgagcgattcataaagcttcaattatttacgcaggatgagcctttgaagatactcatattctagatgggaatctaattgtatatctatggcgacctcagaagtttctcaaacaaaatgaactatttgaaggaacggacacagccaattttgaggt

SEQ ID NO: 44041 - DNA, 501 bp, Glycine max
  Clone ID: PAT_MRT3847_139768C.1
ggggggaagggggggctataaaaaacaaccaattagcatctaaaacccttcaacaggggagccccgggttttattaaaaaaaaaagggacccaaaaacttacaacccaaaaggggaaaaaaaaaaaggcccggggcgggggaaacaaaattataaaaaggatccaaaccccagggggggaaacattactaactccccaaaaaaacagggggaattttccgggggaaaaaacccttaaaaaacaggggaaaaaaaacccaaaattccagggggggaaaaaaaagggaggggggcccctcatgccccaaaaggagctttggcattgggcccaacaggcttgattttacaggcaaaggcaaatccccttgaaaggaagaggggaaaattcctttttttttttgattcaaaagctaaaacaaaaaaaggcccctgttttgggggccaaaaaaggggggggggagggggatttccccccccgggaaccccaaaaagggggattgaa

SEQ ID NO: 44042 - DNA, 383 bp, Glycine max
  Clone ID: PAT_MRT3847_139769C.1
ggcgaggatttaagaactcttatagcggattccgagagatctcgaatgactaaagatctccgggggaataggggacagagtaatggggggagggcataacctcttacatcaagattttggctaataatataacacgacaagagttatgaggaggaccatgagcgatatttccttcagatgggaacagaagcttacaaaagtggggaagttcaggttgtatagaagcgtaggctattcatgaacaagggtctagttatatagtagagactacagcatgatgtctcatgtttgacatttcaagacctggggctgatgctgttacttggtagaagtgaaggtcactgttatcacatgccggggatcatcctcatagatctttccgt

SEQ ID NO: 44043 - DNA, 293 bp, Glycine max
  Clone ID: PAT_MRT3847_13976C.1
ctccttttttttttttattttttcttttgggggtttttattaaaacattccggggtttacacaccaaccacttttaaaacacacgggaatcacaagcacacgggaacaccaaagaaaggggaacacaaaaccccaggcaaaacaaaacaccaaacctataaaaaaaaaaaaaagtgaaataacaaccaccccgtagttagcgcaaacaattatttaccaggcaacaaaaatattaagcccccccaagaatcccatggtcgaaaaaaacaaaagggaaaaaagcacgaaagcga

SEQ ID NO: 44044 - DNA, 754 bp, Glycine max
  unsure (1)..(754): unsure at all n locations
  Clone ID: PAT_MRT3847_139770C.1
cagtgttaattataacactctttcttcccattctctaggcaccccacctagcccgctctctctctctctcccctctttttcccttcactctgccccttgtttcccccaaatcgtacgcaccaaacacacggatactggaggttgcaagaatcacaatgagtctggcatgtcttgtgtgccatagtgtggatagtccatcaccgtcacattctttcaggagttactctgtttcaagtgcagaaaatgaaggaagatgtcatgctgttgcaacctgcttaaccaggaaattatctcttccaccctctacatttcactcttttcttgcaccatcatcatcatccaaagtgaccccacaacctactggttcaagtaacaacttgatacctggtacaccgcggcttgtacgaagccgtgcagtgacaagggaccgagtaagaaactggaattttgatgaaattgcaatggagtcctagtctaaactataagatagaataagactagggaattttcttgtgggatagtttatagcatgttattgctattttgcccctttgaattttgttatgggtgcaactaatctctttctctagttttctagtaaaagagtatgacatttgtagccatgaaaaaaattctacagtgtgattctactttatctggcattttccttttgattcacgaccggctaaaactaaaaaaattggtctaattataaaagggatacttatgtcaagtgtcaaggttgacttaanat

SEQ ID NO: 44045 - DNA, 243 bp, Glycine max
  Clone ID: PAT_MRT3847_139771C.1
ggcatatctacagccatgctaagagaaagaacctcggttttggtgcaacccataaggagcaggctgagctgagctgagtctcgttctatctctctcttaggccgcctctatatctgtgtcataatctcacgccttcccttcttcattttcattcagatagattgcagtgtccagagagcccggctcgacttcggaaccccatagtaatctctctttgacattcataggaaacacacgccatgg

SEQ ID NO: 44046 - DNA, 267 bp, Glycine max
  Clone ID: PAT_MRT3847_139772C.1
aattcggctcgaggacagtgatcattttttgcatgctattatagacattctaaaaatttattcaaatactcaagctggagctacactgaccacatatgaatcagctccgggcattgtccaacaaatatcatctcttcattcagatatcgatagccttcagtcgtaccattataattctctttcataagacagatatagccgtattatctcaaatcgcaatcgtctacatattctgtccaaacttcaacattcggatctaataattgc

SEQ ID NO: 44047 - DNA, 271 bp, Glycine max
  Clone ID: PAT_MRT3847_139773C.1
ctagatccaagcaaagcaattgctttaatggtaataaacaaatgggttgaagacccgtaaggcaacagaattaacagttagctacaaatggcaattgcatcagatttcacaacaaccaaagctccaacattgttttgggtcatcgatttaacagcatcataaacggtatcatctgtggtgcaccaaagccaggagccatcagcacccttgcctttatcattcaagatgtctgaaattgtggtgctctcaaaaccatgctcggacgcgtggg

SEQ ID NO: 44048 - DNA, 675 bp, Glycine max
  unsure (1)..(675): unsure at all n locations
  Clone ID: PAT_MRT3847_139774C.1
cggctcgacccaagcgtcaggtgtgattagtatattgtcggtactatggtatcttaattcatgttgtaacctatgtattaggacaccatagtcctacctaaattggactctctgtaatcattccggacaacttgtactgctatatatataatacaattctacttttgctgattaaaaaaaaagtgttaagacttaaatatctttttagctcttgtaatttagtgtcatttttgctttagtcttgcaaaattattctttttatttttagtccttgcaaattatgtttgttatttttcttccttatgatgctttagataacattttttttactgatctaagcgctatctaaggtgttttaaggactaaagataaaacaaaaaaatttgcaaggacaaaaaaaagcaaaagagcactaaattgtaaggaccaaaaatatatttaaacattaagttaaaccatgctcaaattactgtcagttggtgtataatagctatgcattcattataagtacaaggttgtgattgtatttgagggctactgatttcacttgtttagggttttcctgatgtagtcttttatggttgtaggattctgagtttgagccaaagttgcaaagcttgntgaattggatttgaaagaatgcagntatacaagctcttcaatatttcatggaat

SEQ ID NO: 44049 - DNA, 202 bp, Glycine max
  unsure (1)..(202): unsure at all n locations
  Clone ID: PAT_MRT3847_139775C.1
atttccctttcacacttcacaaaaaaaaatacttaaatgatttgtcagtagccaagccaaaaacatgttccaagcaagggggaaaaaggaaggatagncaggaaagggattcattcaaaccaaccaaccaaaccaggccaaccaaaggatacccttccttncattggggaagggttggaaccgaattccatttcatatcata

SEQ ID NO: 44050 - DNA, 393 bp, Glycine max
  Clone ID: PAT_MRT3847_139776C.1
catgccttctattatggcagtagaagtgtcttcggtttgcatcattcattcggcatatggaacggggcaccacagtacatgcttcttggatctgtgaatctctaaaaactaaatgagtcacggttcataaacacacaacctttaagtagttacgtcctttttttagtgagtgaatggttcaatatattcattggattgttgtttgcatataatgtggattgaacacactttatctgctatttttatctttatcatttaaatgtgtgactttttatgtttatctttattagtcttgtgtaatttactattttttttttgttcatgtatgtattttatatgttgttattttatttgtaatataatttttatttgtatttttcattattttctttt

SEQ ID NO: 44051 - DNA, 1421 bp, Glycine max
  Clone ID: PAT_MRT3847_139777C.1
cttatttactttttaaaataaaaggttttaattttaatttttttaaacaaacttgcctaaacgagacgagagacgtccgctggtgggctttgatgaattatttctctctggcatcatagtctctttctatcgaagaagaagatgatgatggtgatgaagaaggaagcaacatactcctccattctcacactcctcattgccacactctccctagccctctccgacgagttcggcgacagaggagagaatgtcaccgttgacccttctcttgtcttccaaaatgaccgtctcagaaacgcttatatagccttgcaagcttggaagcaagccattttgtctgatccccgcaaccagacaaccgattgggttggatcccaagtgtgcagctacaccggagtgtactgtgctcccgcgctggacaaccccaatatccgtaccgtagccggcattgatctcaaccatggtgacattgccggttatttaccccaagagctcggtttgctggtggatcttgcactcttccacatcaactcaaatagattctgcggcaccgtgccgcacaagttcgataggttgaaactgctctacgcactggatctcagtaacaacaggttcgcaggaaagttccctgaggtggttctgcgtcttccgtcactcaagttcttggatctcaggttcaacgaattcgaaggaacggtgccgagagagttgttcgataaggatctggacgccattttcatcaacgacaaccgtttcgtatttgatcttccggacaacttcggcaactcgccggtctccgtcatcgtcctcgccaacaacaggttccacggctgcattccggccagcttggggaacatgtccaacttgaacgagatcattttgatgaacaacgcattccgatcgtgcttgccttcggagattgggcttttgaagaacctgacggtgttcgacgtcagctttaatcaacttcttggtcccataccgaacgccgttggaaacgccgtcagcttggagcagctcaatgtggcgcataacttgctctctggtcaaattccagccagcatttgtatgctgcctcaccttcagaacttcacttattcctttaacttcttcactagtgagcctcccgcatgtctcgcattgccagcgtttgatgacaggctcaactgcttaccggcgaggccggcttagaggcctccggcgcaatgtaaggtcgttcttgtctaaacctgtggactgtaactcctttaagtgtaaacattttgttccttcacctccatcaccttcaccatttccttcacctacagcaccggtaacaccttctccatcaccttctacgccttcaccatttccttcacctacaacaccggtaacaccaccttcaccctcacattcccctccatcaccttctacgccttcac

SEQ ID NO: 44052 - DNA, 760 bp, Glycine max
  Clone ID: PAT_MRT3847_139778C.1
ggtgaacttgaatcagttgttcaggtcttgcgttgaattagttggagctaggtctacaaatgagctgaggatgccccctgcccccaaacagcagatgcagggtaaggtcatcaacggcatgtggccatatatttttttacacgtacagttctgtaatgggtcaggatcaggtgtgcctgaacacagaccaccatgctcagtttttttgcatgccctttcagtatccatggagctaaatccacttcaaagtgtctaatctttggattttctgatatttatagggcttcaataggtcagagatttatttaactgcaaccaagggtattatcaaatcaaacccaggattggttgcactgttgtatgtttttagcattgatgttggctgtatttgccattgctagagatctcaaggtgtttgtttgcattacagctgatgagaaagaaaactaagaaagttttgcagggatactgttatgtagctgggatcaaggaactatgacttgtataggagctgcagggtcgctccgtatgtatttttaaaatccgaggattgattgaaattcaatatcaataacacattaacatctattgaaaatttcctggtcattttagttttatggttgtactccctgatgtccaaattcatcaataccgaaagtagtgtttttgttttctaatattgtgtagatttgtaacttcactacttttttagtgcaaattaatttggtgacctgagtgttattttcaataaaatgtgaga

SEQ ID NO: 44053 - DNA, 626 bp, Glycine max
  Clone ID: PAT_MRT3847_139779C.1
cagacccatattagccatccctaccaagtaccaagttcagcaaccaattatcttcctcccaaggaaaaaaaaaaaaaaaaaaccttctccatttcatcaacccatttctgaataaagtcacagatttatctttagacagcgagggcaaccaggggtacagctcttttaaactagagttttaatttttgaccatataaaatctaaatactaaagatactttattgataccccttattttctctctctatcatcttatcatgttatatgtgtaatcatattaattacttatttttctttcctttttgtttttctttggataaatattttgaacaataatttttttatctaaaacactttaaagacaaaaaataaaataaacatttttttaaagactaaaacaaaaaaaaaaattataggaatttaagtttttttttaacgagcctttttcctttaaaacccaaattgcatatccacatatgccaaaacaacgtgcttgacccattcctttttttcttatatgttcctttagagaactgttgggaatgcatagaggaatcataatcattagagcacatattgctccacaaacaatatgaattcttaaccacctctctatgctagctcct

SEQ ID NO: 44054 - DNA, 411 bp, Glycine max
  Clone ID: PAT_MRT3847_13977C.1
cccacgcgtccgtttgatcctcgaaccgtcaagcaacctggtttatcatcaatgaactacgtagttttatatgtacaccataaaaaaaaaaaaaaaaaaaaaaaaaaaaaaaaaaaaaaaaaaaaaaaaaaaaaaaaaaaaaaaaaaaaaaaaaagaaataataaaaaaaaaaggtcggactctataaaaggtgaaaacattacttatgaatgtatgaaacgaataaaactttccaatagtaggcacaaaaataaagggggggggtttttgggatttcaaacttttcattgggcacagccggggttaaccttatttattggggtggccaaaataaaaacctggggccagttttttaaatattgaaggtggaaaaaccagggggctctccaaaattaaagggctttcccaaa

SEQ ID NO: 44055 - DNA, 544 bp, Glycine max
  Clone ID: PAT_MRT3847_139780C.1
atctaattccataccttctatatttcttgtatatatattttcttttcttaggaatcaaacaggtattaggtttataacaactcaaacaaactgctaaataaaactccactagaccttggttgaatatatatacatgtgttttattattttctcatataataactatctgtctaagtttccaaatagggttattgcaggatttgtcaagaatactaatggaccttgcaaagggaaagtggaagcaaaacatgattttcaaggcgtgggagggttgccgattaacttcaagaaggccacacttgaaactaaaatcactgtcggagaatgatgatgatgatcatcatgagaagaagaagaagaagaatagtcaaatagcccctcatggttgtttttcagtgcatgttggaccagagagaaaaaggtcgttgtgaagaccaaatacgttaaccacccactctttcagatgctgctagaagagacagaacaggaatatgggttcgagagtgatggtcccatttggcttccctgcaacgtcgatttgttc

SEQ ID NO: 44056 - DNA, 265 bp, Glycine max
  Clone ID: PAT_MRT3847_139781C.1
ctggtaaatgcagaagaggcagtcactgtcattttcttcatgataatcaaaatcacgaggatggttgggaagataagtacagggaagatggagctcccagatattctgctccccgcgagggtagagactattctcttaagagcggtagatctgatgaagcttgtattaattttccaaaaggaaggtgtagaatgggagcatcatgcaagtttgtgcatcataacaattctgatgggcacagtaaagtttctgtggatggattaac

SEQ ID NO: 44057 - DNA, 264 bp, Glycine max
  Clone ID: PAT_MRT3847_139782C.1
tccaccaccaaaaagtattttccttctgaaaaggaaaggaaaaaaaaaactcccaagtgtctttgtctgattgacaaattgtttttggaactgtttttataaaacttttacttgctctgagaaaaataaacttcctttttttttttttttaacacctacggtttttttttttgctaatccaccttttttggatggtttaggtcccccctcccattggctgagggaccttaaatggaacccccagggcttaattccaataaccct

SEQ ID NO: 44058 - DNA, 387 bp, Glycine max
  Clone ID: PAT_MRT3847_139783C.1
aaagccaagggggaaaaaaacgggcgaggggggggaaaaagaaagccaaaaaaaccttggttacagaggcctcaagccctaaacttaaaaaggggctttttacagggcaccaagggttttgagaccaaaaacaacccccaccccaaggggggggccaacaaaaccccaggccaagggggcaaaaagggggaaaccagaaggggcaccaatctggaagccgggggcccccacccccagctttaaccctggagggggtttcctggtgggggagggggccaaaccaaacctttcaaaaaacaagattggggggtgagaagcccccctaatcagaatagggggggaacccagggaggcccattgggcccccaagggccccttccccttggg

SEQ ID NO: 44059 - DNA, 1621 bp, Glycine max
  Clone ID: PAT_MRT3847_139784C.1
aattcggctcgagcacgaacgcacagatggcgatgaggtgtatggatgatagcttgacatgtgaaactcagagatcaaaatcacagcgttagcaacccaacgacaaccgaaacagcgtcgctttgaaataaaccaaacctcgccacatttcttctcttcattcttcttctaagctttctagaatcttcacttcagaaccgaagccatggcggatcggttcttccccaacccgatgcccgagttcgtacccgaaacgacgccgtccactcctcaggaagaagaagaagccctcacagtgggcgactcgctcccgaagctcctcgccatgccccacgcgccactcttggagcgtctcaaacgcgccgctctcgacctcaaagaaaccatagtgatagaaacgtgggggctgtccgggcagcaggtgcgcgacttcactctctattgcggcgttctgggcaccgcgtttctgctcttcaagtcttaccgagtgaccggcaacgggaacgacctgtctctctgctccgagattgtaaaggcttgcgatgccgcttcggctcgttccagggacgtcacgttcatttgtgggcgtgctggtgtgtgctctctcggagctgtcgctgcgaaacacgctggtgatgacgagtccctaaagtattacttggctcagttcaaaaagattaagctgtcaaaagatcttcctgacgagttgttatatggaagggttggttttctatgggcgtgtttgttcttaaacaagcatcttggtctggggacagttccttccaattatactgctgtggttgtcgatgaagtcattaaaaatggaagggcattgggtaggaagggaagatgcccgttgatgtttgaatggtatggagagaagtactggggtgctgcgcatggattggctgggattatgcatgtgctgatggatatggagttgaagccagatgagcttgaggacgtcaggggaactctcaagtacatgataagcaaccgctttcgcagtggaaactatcctgttagtgaagatgataggaagagcgatgctcttgtgcattggtgtcatggagctcctggaatggcactcacacttgtcaaagcagctaaggtttttggagataaagaattcctggatgcagctatagaagcagcagaagtggtttggaatcgtggtctgcttaagaaagttgggatatgccatggtattagtgggaatgcatatgtctttctgtcactgtaccaacttaccggggatgtgaagtacttatacagggccaaagcttttgcttgctttttgcttgacagagctcataagctgatatctcgaggggaaatgcatgggggtgatagaccatattcaatgtttgaagggctagggggcatggcttacctctttttggatatgagtgatccttccttgtctaaatttccagcttatgaactctgagaatctacatgttttggaaaggagactatgtataaccgtatctcatatgaccaatgtaaatgttgtcaaaataaaatgagtcagtcttggtagggatatatatatactttttatgaagtttgagttatgtgagaaccttgtgctttttaagcaattgggtcaatttcctct

SEQ ID NO: 44060 - DNA, 425 bp, Glycine max
  Clone ID: PAT_MRT3847_139785C.1
gttgattccatccctttttaataaaacagggggattgaagggttaaccaggttttccatcagggaggggtcaaatgaggttaaacctgtgaaaaccaccttcagggagggtgaagggcctggctttaagggagaggaaaggcgtggcgggacttaattggagtccatggtggatttcgccattaccaacctgggaggcaacaatgttgatgctgtttccccagaagggccaaaaaaggatattgggttccaccagtttccatgggccccaggggttaaaaggttggttgaggccaaggttagggttgggggtaacagggggaattcccttaatgcagggtttaatggccccaaatcagaacccccaaaggcctatcttgtccaatggaagggtgctgttggaagcagggtcaaagcagttgcagg

SEQ ID NO: 44061 - DNA, 301 bp, Glycine max
  Clone ID: PAT_MRT3847_139786C.1
ctcacgcgtacgacctcgcgtccgcccacgcgtccgcccatgcgtacgtccactcgggcgggggctacttcgtcggcgtctgctgagcgcttgaattcgaagcccgtcgtggaaccggtggtgccgataaatggttgcgtgagatcgaatcaatgtctgtggcaataaatccaatgtagttgctgttggtgtaccaatattcaataactaccatcaacattatttatagattaatatcttaaaattcacattatttatctttcataactgttaatcattattgaagaatttcaattataat

SEQ ID NO: 44062 - DNA, 477 bp, Glycine max
  unsure (1)..(477): unsure at all n locations
  Clone ID: PAT_MRT3847_139787C.1
gcacgaggacaagaaatatactgattgcttactacttattttgttgctttgcttaaatagtatttgacctccattgctccaatatggtttattcattttctctatgcatnctttttttataaaaaaaatctaaaaaaggtgttcatttcaatatggatgcttcaggcccacggattcaagtatagctggattttgaagtaccaccggtgctcctatgatctcctctatgacgaggacacctttgaaatcctgctcgaagtaactatcaaaacctgatcaatgcaaatctgctcaacaccctcatcgatcctattagcaaaggttcttgcacaacaaaaagaaagttttattacaatccagacgagatttatgacaatatgtggcaaaagccagtcaggaattgtacaatagctagcgtcaaattgcattcccatagccaactcatcgttgtaacagtattaaaaaaaccttacacaa

SEQ ID NO: 44063 - DNA, 224 bp, Glycine max
  unsure (1)..(224): unsure at all n locations
  Clone ID: PAT_MRT3847_139788C.1
gcgcgcgtacgcggggacccaccagagggccgcccacccctcataaataccccaccaccccccgccgggaaaaggggacctttcaagganagcgcacaaaggtcccaccaacccaaaaaaaaggggaacacgcagggagccggaacaaaaaacaggaaggaggagaatccataaagcaaggacacaagggcggaacacacacacagccccctgcccaaaaggaa

SEQ ID NO: 44064 - DNA, 271 bp, Glycine max
  unsure (1)..(271): unsure at all n locations
  Clone ID: PAT_MRT3847_139789C.1
agaccaagccccactcaaccancacaccantctactctgctcttcttctacctttcaagtttctaaagtatnaagatggcagagacattcctattnacctcagagtcagtgaacnagggacaccctgatcaagctctgcgagccanatctccgatgctgtcctcgacggcttgccttgaacaggacccagacagcaaggttgcctgcgaaacatgcaccaagaccaacttggtcatggtcttcggagagatcaccnccaaggccaacgttg

SEQ ID NO: 44065 - DNA, 178 bp, Glycine max
  Clone ID: PAT_MRT3847_13978C.1
gtcatatgctccaagtgctctggtttcggttttaactctgatgcttcgattacggtgactggctgtcatcgaactggcattaaggtgtctataagacatcttggcccgtccatgattcatcatatgcatcatgcttgcaatcaatgcattggtactgcagaaaccatcaacgacagat

SEQ ID NO: 44066 - DNA, 313 bp, Glycine max
  unsure (1)..(313): unsure at all n locations
  Clone ID: PAT_MRT3847_139790C.1
ctngaagtnatncaagagctatacattgctaatcnanacacanantagggggganaaccgggggaggatgtggggaccatggggggcctcaaacaaccaccaccattaggaaggcgaaagcgggcggggggagacaggaaagaagagattacagagacaaatcggggccggaaggaccatacacagtcactaccagccggccggaacaagggcatagccagggggagcgaacgagaaagctgaacaacaccaatggacaagctcggaaagatcggttaacgctgccaaaaccggctgaacggaccgcaagaac

SEQ ID NO: 44067 - DNA, 1321 bp, Glycine max
  Clone ID: PAT_MRT3847_139791C.1
ctccgcagaaaaataaaaagtaggtaaagtgcatagtagcactagctaaacagtacgtagtgatcataagcaagcatactgatgattaatatggcaaccatggaagacatgagcaacatgagtggtgaaattacacttccagggttccgattccacccaactgaagaagagcttctggatttctatctcaaaaacatggttgttggcaagaaacttcgttacgatgttattggtttcctcaacatctatcagcatgatccatgggatttgcctggtttggcaaaggttggggaaagagagtggtacttcttcgtgccaagggacaaaaaacatggaagcggtggaaggccaaaccgcaccactgaaaaagggttctggaaagccaccggttcagaccggaaaatagttaccttatctgatccaaagcgcataattgggttaaggaagaccctggttttctatcagggaagagctcctaggggatgcaagaccgattgggtcatgaatgagtaccgtttacctgacaattgcaaactacccaaggaaatcgtgttatgcaagatatatcgaaaggcaacttcgttgaaagtgctggagcaaagggcagcactagaggaagagagagagaagaagcaaatggttgataattcccctgcttctcctccttcctccacggacaccatgtcctttagcagcccacaggaagagcaaaacgtgcccttgcccttgttgcagcatgttcttaagaaagagtctgaaacaactgaagacatggtagtgtcaaaacaagaaaaaacaacgaaccaattgaccttaaaagacaccaaaagcacttgtggcacatcacttcaaatgccctttgggaaagagaagctgccagaccttcagcttcctatgctctcggattggacccaagataccttttgggctcagttgaatagtccttggctccaaaactttactcccaccaatattctaaacttctactgactccactctatgtgcatcattactcaaatataatatatcaactgcaacttaattagtcaatattacctatttattttggaatgtatatgcagtgaattagtaattaataacgtttttattatattaactcaattaactagacatgttttcatgcacatatatgttttttcctatcaagttcagtctagctggaacttgttgtcaaccctttacccctgtcccttgaagatgtttcactctttcaatgaatgttcaagaagtaaaattcatcagcagattcacagcggaagcctctcggcgggggcaacaaaaaaaaaaaaaaaaaaaaaaa

SEQ ID NO: 44068 - DNA, 911 bp, Glycine max
  Clone ID: PAT_MRT3847_139792C.1
tgagacgccaaatggaaagccaaagaataagcgtcctcttcctcaggaggatcctgtaattgatcctgttgctgctctagacaaaagcaggctgaggaaggtcactgaacgtgttatgccccccagagcaccaaaggaagatggaagagaatcactgttagaaatgataagatcgaagtcattcaacttgaggcctgctgcggttcaacgaccacccaggattcagggtccaaaaacgaacttgagggtcgctgccatcctggaaaaagcaaatgcaatccgccaggcattcgctggaagcgatgaagatgatgcagatagttggagtgattcttgatcttactggggaatgaaaagtactggagcgagccatacttccctgtaatgaataggaaaactacgtgatacagtcatacaaaagattctttgtcctacactatgttcatagtatatgatgatatacttcagacagcatatgtttttttgctagtcctcccaattcacacatagatgcacgaacattggagcaggcatacagcgtagcatccattcagagcctttttcgaatatgataatactctagacagcatacgttctttccctagatcaaccaattcacacatagatgcttgaacatttttttttttatacagcgtagcatcaattcggaggtgaaactcacttcagttagactcaggttcaatatcaaacaagaccaacaaacaacctatcaacaattttttttttctcttcatataagaacgtgtatatttgtgttgtggttgtcaagtttttcagttatcaattttgtaatcaggtgatgtagtggttttttcataattgcctcatatatcatgtagctcatctgtttgtgtccaatacaatagtatatatataccctcgtgtgtaaa

SEQ ID NO: 44069 - DNA, 740 bp, Glycine max
  unsure (1)..(740): unsure at all n locations
  Clone ID: PAT_MRT3847_139793C.1
tacgggggaattcggcgtgagctccgcagaaaaataaaaaaagagtagctagcactagctagctaaacacagtacgagtagtgatcataggcaagcaaaagcatattcataatatggcaaccatggaagacatgaacaacatgagtggtgaaattacacttccaggcttccgattccacccaactgaagaagagcttcttgatttctaccttaaaaacatggttgttggcaagaaacttcgttacgatgtcattggtttcctcaacatctatcagcatgatccatgggacttgcctggtttggcaaaggttggggaaagagagtggtacttcttcgtgccaagggacaaaaagcacggaagcggaggaaggccaaaccgcacaactgaaaaagggttctggaaagccaccggttcagaccggaaaatagtgaccttatctgatccaaagcgcataattgggttaaggaagacactggttttctatcagggaagagctcctaggggatgcaagaccgattgggtcatgaatgagtaccggttacctgacaattgcaaactacctaaggaaatcgtgttatgcaagatatatcgaaaggcaacttcgttgaaagggctggagcaaagggcagcactagaggaagagagagagatgaagcanatggttgggtcccctgcttctnctttctncacggacaccatgtnctttagcagcccacaggaagagcaaacatgcccttgc

SEQ ID NO: 44070 - DNA, 392 bp, Glycine max
  Clone ID: PAT_MRT3847_139794C.1
tttttaataagaggagaaaattcgggatattgaggcacaaaagcgatgatcttattacttggagcgcataccagctaggacgtatttaacggaatactttataaagcacacaactccgaatggttacttgaaactaagcatatacgtgtactactggcatgatctgatttttttacataacccaacactcatacttatctggaagccgaaaagaaaatttatctggacattcgacaaccacgaatatggctcttaaagccaacagaccttctgaaagttactgtttcatgacaaaatctaattggggaagtaaaccacccgcaaccatgcgaatggcctcaacatattatgccaccgcccaacacaaattttggtgcacttttaccattgat

SEQ ID NO: 44071 - DNA, 811 bp, Glycine max
  Clone ID: PAT_MRT3847_139795C.1
tactaaaacaaatcgcgcctcagccgcgtctgccgaccttggccaagttatgtgcagaaatgcttcccgcagctgctgatggtatgctcaatatgcaagatgcaactggacagtccgttctacaggatgcttttcaaattctcggctgtaaagagatacgcaattcagccgctcgtgcatcatccgagtcagcagatgtagaggaggaagggggagaaagtggatctgcagctagaggaaagactataactcaggcagtcaagaagggccttatccaaaatacagtccccatcttcatagagttgaaacgtttattggaaaccaagaatagtcctctcataggttctctcatggagtgcctccgcattattctaaaggactataagaatgagattgatgacatattggtagctgataagcagctgcagaaagagcttatttatgatattaaaaaatatgaagcagcaaaagctaaagcaacagtagctgaggctgtgggcaccaaaccaaaatcaggttcaaatcaatcacctgatgcttctaagaatctgaccaagacgcaagaacaaacagttggacaaagcagtaatgagcttccaagtgattcaagagttgcttcagcaatggcagatactgcagctgcagcaacagcccgttctgtgctcagggaaataaacaaggggaccgctacaccaccacttagttctttgagtgttcctaaagtcaagtcttgtactggtatgtgtcattccaaagataagcgcatggatgtcatacaatctataaggaaaagacagcctttcgattctga

SEQ ID NO: 44072 - DNA, 302 bp, Glycine max
  unsure (1)..(302): unsure at all n locations
  Clone ID: PAT_MRT3847_139796C.1
ggaagaagtaaaagctaggatctgaaccgagaggaaaagagcgaaacccgnaaaacagcccgagatgagaagttctgaaccggctatttggggagggaaatagtttattacagtagcctctttggggatggactgaaagatgaatgtcttgccccttgtttcaggccagacgaccaactataaggaaaccaactttgtagttagagtccttattgctgttgtaacaggaagagttttgatatattattttggaacttgcgatttataaattataacacataaattaaaaaaaaaaaaaaaaa

SEQ ID NO: 44073 - DNA, 978 bp, Glycine max
  Clone ID: PAT_MRT3847_139797C.1
tcccagcatagtagtttagcagtatcctcaatctgccgttgctcctcctcaagctcatcttcaggacgttgccatgcttggaagctattcttccagttgataggaggaccagaaagtatccagtaaccaccaggtctaagaacccggtcaacttccttcatgtactttccatcatttgcaccccattgaatcaagcagcgagaacaatgtgccatgtcaaaagctccagaagggaagggcagcattattgttccaagaacaccaatgattgctggaacacctctttccaaagcaaattgaacttgagcttcatgagagtcccttggggcaattgacattgcaacaacatttttcttaaacaggtatgcaccaaaactagcaaccccacaaccagtatccaatgcagttctaaccatcccattgtccaatggaataacagatgcaagttcatcaatataagcatcagctcccttgggaaactgcgttccaccacctgggaacctgaaaacatttccttcatattgtatccaattctgcacagccttctcaactgtcaagctcttgtaaggcgcatttgcataagcggacgcgtggcgccacttgggccatgaaaatggtgttgaatatcctctgagggcaggtatgagacaatacaatttttcatcatcaggaggacaatgcctttctctataagccatattttctcggggaaatgtcattgctcgcgcttgatcatgacaaggcgtgtaatcaatgtagcgatcatcacacggcttgaactccctgacttgtgtgtcagaactgttaggtgttccagaatcatcatcatggtgggtctcatagtttagatcagagagaacactgcaatctgtatgtttagtaatctcaacagctatgctgtctccctttccaaaaccgcttcgttgccacaaacccaatatatagaagaaaccacacaaaccaactatgatgaaaata

SEQ ID NO: 44074 - DNA, 159 bp, Glycine max
  Clone ID: PAT_MRT3847_139798C.1
cagaaatgaaaaacacgagtctacttaaacagatggggatttgccacgtatgaaaattagttgtggacaaaatgcattgactcgaagaggcaaaggtcgaaaaggttacccaagccgagagataactaggacacgttgttcttgcaggtaggtgcagct

SEQ ID NO: 44075 - DNA, 294 bp, Glycine max
  Clone ID: PAT_MRT3847_139799C.1
ggctcgagagacacgttcctgtacacagtaactttacctaccatacttcatggaatactactgtgggcggtacatccacaacctccgaatgagaacgaagcaccgtgtccctaaccactcacacattgtgcgaaacttcactatcaaagaaaaactattcacacttcacaagcgacctgtgctgtatgatattgaccgataccgcacttgaactttatacaagaacagaccgtcgtggcatgctccactgcaaccgtttaactattattaaagacccgagacacttgaattgct

SEQ ID NO: 44076 - DNA, 494 bp, Glycine max
  Clone ID: PAT_MRT3847_13979C.1
aaaattctttcttccttccttcttctccgcactctcccttctggtgtcttccatgaccactaacatgcgccgccgtcaccgatgatctcttcggcaccaacgacgtagccctggcaagctctccaacccaccacaaagattagtcggaaaccaccgcaccaccaccatcacgagatctactagaaccttccacaatatatgttaacacactgcaccaccagccacgcgagctgctaatgtaggtgtttttccaagaagaacactgttcaaacccatggtggttaatagtgacgccgacgacggtccgtgcggtggacaattcgtcaaagagcatcgcacctctcaaattcttccccgatgatcctctttccctcaatctcatcattgttgttatttatattagcttttcaatttctttttgctttcaaattttgatccattcttatcgccgatgttgattgtgattacggttgttttgatttcaataaaaaaaa

SEQ ID NO: 44077 - DNA, 217 bp, Glycine max
  unsure (1)..(217): unsure at all n locations
  Clone ID: PAT_MRT3847_1397C.1
ggcttgggtcacacctgatgagcaaacttataatnttggtgattgacctgtatgctcgacgcatgaggtgggagagggctaagattgtgttctacgagatgggaacgagcaatgtgcaacctaattcttatgtttgtagcagaatcttggcgaattattgcgaccaatgggaggggcagaaatcgtttcaagttctgaaggatattaagagcaatgg

SEQ ID NO: 44078 - DNA, 341 bp, Glycine max
  Clone ID: PAT_MRT3847_139800C.1
gtataattttttttcatttgggtgttttttcgtaattttttttgttcccttccaattttttgaacttttagcaagctgacccaagctcaccccttcaagaaaaaaaaaccgccctctccggggacaaaaaaaagaactttctcacaccaaaccaaaccggggcgggggccggaaaaaaaaaaaaaacaattcccggccctcttggggaacccgaccccatgcacattgcgatttacacacaaaaggactaaaggggcccccggagccccaccaacccacaaaataattcacacagcgggctacccttccccccccccgggaggggggggggggtttatttt

SEQ ID NO: 44079 - DNA, 2259 bp, Glycine max
  Clone ID: PAT_MRT3847_139801C.1
cccgctcgtcttatctccctcctcactctccattcaacttcttcacttcagtgcctagaatactggttcaactttcaagtgttcaaatgggggcaatttcaataccccttgtgttggttcttctattttgctgcctggtttctgtttcacaagctgaatacttgacttacaaagacccaaaacggcctctgaatgttagaatcaagcacttgtagaagcgaatgactctggaggagaagataggccacctggtgcagattgaacgaagtgttgccacccctcaagtgatgaagaaatacttcattgggagtgtgctgagtgggggagggagtgttccagaaacaaatgcatctgctgagacttggatccaaatggtgaatgggatccaaaatggatctttgtctacccgtcttgggattccaatgatttatggaatagatgcagttcatggccacaataatgtctacaaggcaaccatttttcctcacaatgttgggctaggagttaccagggatccagtgctgataaagaagattggagatgcaactgcccttgaagttagagctactggaattcaatatgtgtttgctccatgcattgcggtctgcagagatcctagatggggacgttgctatgaaagctatagtgaggaccctaagattgttcaagcaatgactgaaattattcctggtttgcaaggagacatcagtgacaattccagaaagggggttccctttgtcgctggaaagaacaaggttgcagcttgtgctaaacactatgtaggagatggtggcacaaccaagggcattaatgagaacaatactgttgtcagctataatgggttgcttcgaattcacatgcctgcatatcatgactccattgtcaagggggtttcaacagtaatggtctcctactctagctggaatggccaaaagatgcatgctaatcattttcttgtcactgattacctcaagaacaaactgaagttcaagggttttgtcatatcagattggctaggcattgacaggattacatctccttctcatactaactattcatattcgattcgcgttggatgttgcggctggaattgatatgttcatggttccctttattttcaccgaattctggtgtcagcgctggaattgatatgattatggttcccttcaactacactgagttcattgatgaactaacccgtcaagtaaagaataatattataccaatcagcaggattgatgatgccgtggcaagaatcttaagagtaaaatttgtcatgggcctatttgaaaatccatatgctgatccaagcctcgcaaaccaactgggtagcaaggaacatagagaaatagcaagggaagctgtacggaaatccctagtgttgctaaagaatggtaaatcttacaagaaaccactgcttcctcttcccaaaaagtccacaaaaatactggtagcaggaagtcatgctaacaatttgggttatcaaatgtggaggatggacaattacctggcaggggcttggcggcaatggtctcacacaatgaaaatccagacttgatgctgtgaaacaaaacgatgatcctgccagtgaagttcactgtagggaaaatcctgaatgcagaaacatttggtgatagtttgaatctgactatatcggagccaggtccaagcaccatcaccaatgtatgtgggtctatacaatgtgtggtagtactcatcacccgccgaccagttgtgattcagccatatctatcaaaaatagatgcacttgtggctgcatggcttccagggactgaaggccaaggtgtaactgatcttctctttggtgactacggattcactggcaagttggcaagaacatggttcaagacagttgaccagctcccaatgaatgttggcgataaatattatgatcctctatttccatttggatttgggttatctacaaaccccacccggtactaaaaccattaatgagattactcaaaggtttcacggttccttttctacaatgagactcgcaattgtctttttcaaagtgaatggttaacacgtgtacctttgtaatgaaagcgttagagaaactccatttagcactagaaaataagcatgctatttaaaatataatttactctggagccttggcaattttatcttataaacttggctttctaattggtttggtaacctcattcattatccttaactagggcagacttttcattttgattactattgttaaccctgttgctttttgct

SEQ ID NO: 44080 - DNA, 519 bp, Glycine max
  Clone ID: PAT_MRT3847_139802C.1
atcccataaagcggaagcgctttatgaccaccccctattttagcagcactacgacattcttatacatgggccacgcagggcctatgatcctttaggagctcacactcgtgctcattaacgtgattaacttaaaacatgggggatcctggctgcatgcagggactaattccacttaaaagcacgaaggccacacctagagagcaattttttttggggacttttttgccttttgcttaaatatacctatcttgactctgctagaggcttctcctttggatgtttggaagcataatgtagtcaacctgtgtggattttgatttacaagttgggccttgcacatggtgcaaaccactttgatgccaacggctctgtcctgtgagctaaaagcccttttccttctgattcctctctgcgttctccttgtgcgctttgatcttctgatttccccggggcaacttctatctatctttttctcagcgcacggggccaccttctgtgcgtttttcgcactcttacggt

SEQ ID NO: 44081 - DNA, 253 bp, Glycine max
  Clone ID: PAT_MRT3847_139803C.1
atcaccttcgaaagaatcgaggccacgcccatcattgaaactttgcacagaaaagagtggagtacacacctagtatgcaagaacacatcttgctagacaccttatcgggaagggaaagggaaataaaacccctttttccggatatataacacgtggcccgtcctaaccagttttacgaggactaatgaaccccgtaatgtgagataggagggaagagctgaatagtatttacatcccgaactttggtctcaaa

SEQ ID NO: 44082 - DNA, 232 bp, Glycine max
  Clone ID: PAT_MRT3847_139804C.1
tagaccaaaagttcatctatcatgtagcctgtgacagaaaatctgatcaataaaatttgctagctttggaactccagcacgttcttgtggaaacttccatgaacgaaactggtatgctcacaaatgttatgatgcctttgaaatgaattgagttgcacagaactggtgcacaatgacactgtcacctgaacgttttggaagacatccatgtccaagtggcttcacgaaactc

SEQ ID NO: 44083 - DNA, 130 bp, Glycine max
  Clone ID: PAT_MRT3847_139805C.1
aaaataacacacacttttacacattttttacgacaatttaaaagaggggggtggaaaattttcaacataggcgcgagcataactcaacaaagagggttcttgcctaaattcccttttattgtatttaaca

SEQ ID NO: 44084 - DNA, 326 bp, Glycine max
  Clone ID: PAT_MRT3847_139806C.1
tcttctattttagccataacacacgagcgagagagatgaagacgactgtatcctggagggtgagggggcaacagggtggcacggtgcggatataggtggaataatctactggcttgtgtctgcttcatacctcaacgtgactcggatacttaggtctctcttacaaccttgggtgactcatcacgttgtgactcaaacccgtattattctcatgatccagaggtacgggtttgggctcctggatgcacttttctgtggggtgtctagcgccgcttatgtgcccttctacactgcttttatccctttgctattctggagtggacatg

SEQ ID NO: 44085 - DNA, 393 bp, Glycine max
  Clone ID: PAT_MRT3847_139807C.1
ttatttaaattctactttgattgaatcaaaactgtaataacgtgcctaagacttgggctgaacatgaaaatttgtgaactgaagaactaactcggggccaccaaaatcatttgacaaggcacgcgtcgcgaaggctgatcaaccttttttgtgtttcaagaagatgatgaacactcgcaacagcgtgctgggcttttcatacaagttcacatttgggtgtctcggttatgttcagcaagtattgagaccttgacggcttcatatttttaacccagcataccgcccttctgttttgggaattgcatgtacctcattgtgccggtcaaaaaggcatctgaagctgtaagagctgatgcagagtcactctgcatttcggtcatgaacaaggctata

SEQ ID NO: 44086 - DNA, 453 bp, Glycine max
  Clone ID: PAT_MRT3847_139808C.1
ccatgcaagccccacttaaccaccacactttttttttgtttacgctttcttttttttgtttttaaactagaacactctttttttgatattgagattaaaagaacattggtagggccttcctacccacagagggggcgtgtttttggctggccccgcgaaaaattcccaaagagcttccctctaccctagtcgggggagggggggagaaaccccccttgttagaaaccgggcacgttatggattttggacatttttttgggggaaccctcaaaaaacttccccctttgacccggggaagataatttcttgggccttctcccacttggggggggtgcccacttcccgtgggaagggagggcgtttctttccaaggggtccttaaggaggagctttaaaaaaccggtttttttcaccccttttgagaacaaggttggaggaaaccttaccaagccg

SEQ ID NO: 44087 - DNA, 243 bp, Glycine max
  Clone ID: PAT_MRT3847_139809C.1
ctttgatgcccaatgcaacgacgacgcccaaatccctaaaatgtggaaaccctaaacctaaacatttcatctcctaaaagcttcaatttaataaatccggcgatgaagctcctcgaatcgaagaaaagagccgaggcatggccagagtcatcggaaaacccttcagacaccggtccaccgcacaagaaaactagggatttgcttaacatgaccgaatgccacgtgtgtggcttcaaggttgac

SEQ ID NO: 44088 - DNA, 289 bp, Glycine max
  Clone ID: PAT_MRT3847_13980C.1
cgtacagtcagactaggaatgcggcctcgacgctctaactttcacgacactgtcagcgagctagagcactcaatggtaaaactcggattccatctacacactttgcaggactaaaatttaatccgaaaaaaaaaagatcccggtcaattaaggaaaacccttcttatataaaaccgataagaagaatattttctgtggagagattgatggccctcatggttaaccttaatttttgaaaccagattccaaagggggggcgacccacacggaactttgtggctcttttttc

SEQ ID NO: 44089 - DNA, 329 bp, Glycine max
  Clone ID: PAT_MRT3847_139810C.1
aggaatatcaaatctttcattgaagataatgggggcacataaaggtgcaacactattttgcgtgttcaaaaggatatcacataacacatcgggaaacggatcctaagtaaccatcatactagaacctagaaatgttcttacctaaacaattaatacgactggcctgcaattattgattctaaaaacacaatggcaaagcaagactctagtttgtgtctatgaatcatttctaatttgcttcgccgagcctctgccttagtatggtggtctagaagaggaggcatgtgagattctctcactctgcttctattttaatgatgcatccaggc

SEQ ID NO: 44090 - DNA, 669 bp, Glycine max
  Clone ID: PAT_MRT3847_139811C.1
tggtaattggtttcatcacctatggccgaaacagtgtcgcaaaaaagtaggctcatctaaaaaaggtgtaaataaggaagaaatgaaaccagcgccctttcttccgaaaattacaatggttggtctctctactgaggaagcaggccaaatgagcaaagctaatttgaagaagccaatggacgatttgacaagagagttggagaagacagagctagatattatgacagatggtggcagtaaagagtgcaaagtagaagatagagatcccctatttgtggcaaatgtgggtgattactattctagtttgggaaaaccaggatctggtcgctggataagaggaggatccaactaaaacctttttgtcacaaggaatttttcatttgcaggttgtggcggatatttattggtctccaaatagttagtgttggagctggaaataacctcatttgcggtgtatactgaaagtggatggatcaagctttagattttgtctgatcaatgttgtaaatgattatatatgtaattcatcactggtgcccattttgattttactttgggaagtttaataaaactgtggtacagaatgattagtaactatgtataaacctgattatggggaaagaaatcgtcatcactcttatctgaagttagggactattattattggtc

SEQ ID NO: 44091 - DNA, 378 bp, Glycine max
  Clone ID: PAT_MRT3847_139812C.1
actttggctgtttatgtgcttgctggtcgtgagaagtgatagaagggagccggtatcgaacacgaaatagctaaaagatgaacagatgaagccgagggagtcgccgcgaaaccagcagacatcaacgactaatcgataaaggactccgaagagagtgttttgctctcgaataggtagattctggccgagccggaaaagagcagatatacttagagaaaaagaacaattgagtaggtatgaaaaggcctcgaatagacaggaaggccgtagcccgaggcgcagaatacctaacatatcccgtcgaaaccggtcgacgagagtaaagggaagagtacacctatcggaaaactagcggctccgtccacggatcccacctat

SEQ ID NO: 44092 - DNA, 437 bp, Glycine max
  unsure (1)..(437): unsure at all n locations
  Clone ID: PAT_MRT3847_139813C.1
atatactactcattaaaccttacataatataaacaacataaataagttcatcagaaccttccatttgcttgttctctcctcattagtatcctactaagtcttcctgccttccatttgcttgttctctcctcattagtatcctactaagtcttcctgccttccatttgcttgttctctcctcattagtatcctactaagtcttcctgccttccatttgcttgttctctcctcattagtatcctactaagtcttcctgcctgcacaaagcnnagaaanttagttcagcaggctaatttcaagtaaatttaacttacaattgggtcagtgaagattatcgattgcttatccnaagttgaaaccaaaagatttgtgttatccttgtttagagccagagctcnnatatctgctcttctcctagcttcaatacatgaaatacc

SEQ ID NO: 44093 - DNA, 799 bp, Glycine max
  Clone ID: PAT_MRT3847_139814C.1
tacggctgcgagaagacgacagaaggggtcccgtgaacaaagaaattaattggggtaacaaattctcttcaatcggatatatttaagtacgtataaagtgaaaaaataaagataaatatatataatactacattcttcattcctgtcttttttttgaaagataacactacccttcagggctaggaaaatatacataattttgaagtcacaaaaagtaaagcatgctgactagaagtcaaatatcacacattctatgtatctgctactggtagctcaaatggcgtgggagttgcaagtttgaggtctaaatctgggttcgctctctgaacagtgcaattagttgaagttgaagtggtagcccaattcagcactgaatgaggatgaagagaaagccactgtatgtcaaagaaaaatccaatccaattggtacttaagtggctgtagcagtttatgtatcacattgaagtcaaactagtaaccaaaaataaattaaatgaggttttactttcatttccctctgcgaaaattttcaagattaatagagaaaatgcttattccatccaatccataatgagttaaaaccgatcgactatctagccaaatagtaaaaactaatgtttgtgcaacaataatttaaagttctaccgaagacaaaatgggactcaatatctaaatgaaaatcaaacaaaggagaaatattaaggtggtctagcgcatttgaataaaatgagttattataaatttttaatactatttcaatcaattcccgaaaaaaaacaacaaaaagaaagaaaggaaa

SEQ ID NO: 44094 - DNA, 453 bp, Glycine max
  Clone ID: PAT_MRT3847_139815C.1
gcgtcgtacttcacagtagcattcctgtgcttattgtctgcaatgctagtttgtttacatgataaaatgagaatagttgcattgctagtttgttttatggttcacacatccagtcccatgtggcttttgcatattcagtatcacttgcgagcagaactttcttcctttggctatttatggtgtgaaaaatatggtagcttcttaccgggcttgtccccagatgggttttggagggcatataattcaacaaatgtactttgacacttagtggtctaattgtgttatatatagcctgttaataaaggatttccttttttgttatcgtccttacaggttagtgtccggtatttgttggttgtgaatgccctcttgtctaatattggacaatctttgagacggtttcatagaggatgaacttaaacttccatcagttatttaaatcccctgatgtct

SEQ ID NO: 44095 - DNA, 560 bp, Glycine max
  Clone ID: PAT_MRT3847_139816C.1
gagatactgtaattcttactcttattcatcgatgtcctgcatgtcgtccaaccattagtttcagggttttctcatcgagaattctaccaatcgtctccgcttcacatccttatcgggtatagttcgcactgaatcaatcacgtgacatatttcagatgatcgcttgtcgagaggtccgtcatctcactcaatggtattcagttcctggaccatgctagagagacagtactgactacgttctacgttaccaatgtaggtaagattgccagttcagttagcggacacgcttagttccaggctaaacccctcaagatcatcagtagcggaggtatttatcgttggccgttgactacactattcatctccagtctcgactaattttgctaagcagttgatttggtgtggtatcacacagtacgacggcatttaataaatgggttcttgatgacgaggcattctcactgacaaagactcttaaaatgtacaaaaaatcgtttgctctcgggatcaggattgtattcttatcagaagaaccactgagtcctagggatgtaacagcc

SEQ ID NO: 44096 - DNA, 242 bp, Glycine max
  Clone ID: PAT_MRT3847_139817C.1
aaggatcacttaaggggtatactacttgactgaatattgaacacgattttgtacaattaatcataatttaaaaaggattcaataaacatttggaaatgatttatacctctaagattgttaacatcttaacgaggatagtgttgatcatcaaaagccctcatctggacaaaaaaaaatgcggctattcaagatgattcattactcatttagtcatgcaagctaattcatcctccaacatgtca

SEQ ID NO: 44097 - DNA, 281 bp, Glycine max
  unsure (1)..(281): unsure at all n locations
  Clone ID: PAT_MRT3847_139818C.1
atttgtnttcttgtgaaatttgtcaatttgnacaacatcatcgttcctcttattcncctaaggattatanaacnatctagtccnttcnccttnatttcaaaagtgncgtttggggacctngttgggacccaacagccaaatggaaaancntggtttnaaaaccttcatagatgctcanagtccgataccntgggttnncctgangaaancanatcgnnggtggaanagcatatccacaacttttngncanngntagcaacnccatttncaggtggaantcc

SEQ ID NO: 44098 - DNA, 700 bp, Glycine max
  unsure (1)..(700): unsure at all n locations
  Clone ID: PAT_MRT3847_139819C.1
ggctgcgagaagacgacagaaggggggtgaggaaaccatcgtcagcgacgggcaaaggcaatagccgcttcctcactgtcttcccctgttctctcctacaccaaattctcctcccctactccgcgcttcacgaactcaaaaaattccatctttgccctctcgtgttcttctccgaagagcattccggtgacggagaaggaagtgctccaagccatagccgactccgacggcaagaacctcccatgcgtcagaacctacgacaccgacctgtctcagctcactctcgtcggaaccgtcgatttccaccaagctctgacggccgccgccgccgacggcggtgaagtcgccaccgaccacatcgacgccggcttggacgccatggtcgtcgaaaccgtgttccctgctccttcatgcgaccacgccactgtctccactcgactgttcttacctgctaggaaagttaaagaaaaagccgctaagctcaggaattctttccctaaagatctattttccggctctgggtctaagaatgtacttgctatgacctttaggcaagtagttttgcagcagatttggagctttgacctaactgtctttcaaccgggagaggaacggaagatggttgatcttgaaacaccgagagaggtcctgcatcttttgctctcagctcanctgatgaatatcttatctcantgcttgc

SEQ ID NO: 44099 - DNA, 355 bp, Glycine max
  Clone ID: PAT_MRT3847_13981C.1
aaaatagctaccaaaactaaggcttttttcctttcttcctttttcaatatctgatatatttttcaatgtattcatagtctattattaagaccttgttgcaaaatttccctttctgctgctgttgttgaatccccaaaaggccacaaatttattgtttcagttcagatttagcattccattccatcatcagttgcaagtttgcttagaaaacgtctacattttccattgttcatctgagacttgagggaaaggctgaaaacgcttcctttttttttttttgtctctctttaaatttgggtatcaggagagtgatgcatattggagctgccaaaacaacaagagatggcaaatcttg

SEQ ID NO: 44100 - DNA, 535 bp, Glycine max
  Clone ID: PAT_MRT3847_139820C.1
ctcgagccgctcgagccgatctcggtgcgcaattcgccgacgtctgtctccccggatccgcctacaccgaaaagtccgccacatggatcaacacggaaggtcgatcgcaactcggtcgagtcgctgtcgtcccaccaggtgccgctcgagaagattggaagattatccgtgccctctccgaagtcgtcggctcccctctcccctacgacgacctgatccaattgagagagcgaatgtgggatgtctcacccaccctcgtccgatacgactctcgtgaagagccctcctccaccatcctcaaactcggtctcaccaccctctccaaagcctctgcacccgccgcatcatctacccccttcaaaaagccaatcaccgacttttaccgaaccgacccaatctcaagagcatcagtcaccatggcgagctgttcaaaagcctttacaaagaaggagtatgatgtcgcacaggtagatgacagtggaacggctcaagcgagctacgcataatgtgacgagtatgtatattgtatcagtaa

SEQ ID NO: 44101 - DNA, 800 bp, Glycine max
  Clone ID: PAT_MRT3847_139821C.1
ccacgcgtccgcaaacgactcgaaatgaatgttgcatttttctctgagaaaacaatgtctttctcttccattaggaagacgcaagaaacctcaagaattctctctatactttcattctctctgaacctcttccccgtttccccaccctatttcctacctcaacctcaagtgtcgtaccactcatttgccacacaacaaatcccttagcacaatgtggattcattcccttcatcaccatccaatcactaccattacgcttcactactcgactcttgtatcgctgcaaaggcgttagagcccgggaaacaactccacgcccgattgtgccaattgggtattgcttacaatctagatttggccactaaagttgtcgatttttacagcgtctgcaactctctgtggaatgcccatcacctgttcgacaaaattcccaaagggaatttgtttctgtggaacgtcttgattcgggcttatgcgtggaacgggccccatgaggctgccatttcactctaccatcagatgcttgagtatgggcccaagcccgataatttcactctcccatttgttctcaaagcatgctcagcgctctccacaattggagagggaaggatcattcacgagcttgtgatacgatctgggtgggaaagggatgtgtttgtgggtgcagctcttgttgacatgtatgccaagtgtggttgcgtggtggatgcacgtcacgtgtttgataagattgtcgagagagatgctgtgtgatggaacttcattctggcagcttatactcagaatggacaccctgatga

SEQ ID NO: 44102 - DNA, 641 bp, Glycine max
  unsure (1)..(641): unsure at all n locations
  Clone ID: PAT_MRT3847_139822C.1
ccacgcgtccggtcttatgatgtgatagagagaaattacagaagctatgtaacaaggcatttgccaaacgactcgaaatgaatgctgcatttttctctgagaaatcaaatgtctttctcttccattaggaagacgcaggaaacctcaagaatcctctccatactttcattctctctgaacctcttccccgtttcaccttactatttcctacatcaatcttttgccacacaactaatccctcagcacaaagtcgattcattcccttcatcaccatccaatcactactattacgcttcactactcgagtcttgtatctctgccaaggcgttagagcccgggaaacaactccacgcccgattgtgccaattgggtattgcttacaatctagatttggccactaaactggtcaatttttacagcgtctgcaactctctgcggaatgcccatcacctgttcgataaaattcccaaagggaatttgtttctgtggaacgtcttggattcggcttatgcgtggaatgggacccacgagactgccatttcactctaccaccagatgcttggagtacgggcttaagcccgataatttcactcttccttttgttctcnaagcatgctcagcactctccacaattggagaag

SEQ ID NO: 44103 - DNA, 324 bp, Glycine max
  Clone ID: PAT_MRT3847_139823C.1
atgatataggagagcctcgtgcatgcgccctagaatataagatcgttgctagcatataacaatgcgttttcatggacatagctgactggtgggagatattcccatacattcacaatgatatagaatgtactaacatctagactaaatagcaaagtgtgagcggcttaaggagtgtgctatatgacaacatcagacttgcaattaacttccattatccatccgcgctatctatagtgccaccactatgatggaatcaggccaccttcggaggatgcacaatgtacatttgtgctctcttagaattgcctattcactaactctatg

SEQ ID NO: 44104 - DNA, 364 bp, Glycine max
  Clone ID: PAT_MRT3847_139824C.1
ctgttatgacacgtatttcaaaaagaattatcttctcctaatgacagggcttctgcaaaattgaatatctttgtactgacaggtcctgaaaacctatcacgaaggtgtagaattagcgtgaccggcgacacataagagagcttcatgcatcattgcacatgctttagaatcctgttctgttctagtggcttagaccctcaaagttccttgacttcgcactttggattgcacattcatgctgactctttcttacctaacactgtttgattcgcagtctgcgcgactgtgctgggaacaaaaccttggattgaaatccacggctgtctaagttgcaagctgaatacatgcactaggatctgcttgt

SEQ ID NO: 44105 - DNA, 260 bp, Glycine max
  Clone ID: PAT_MRT3847_139825C.1
gctccgcaactcacccacatttcataaaaatcatagtttggcacataaaatattatgggtttttttgggtggggaaagcgggggttgatattaaataagggaacataaacccatagggatttttcttttggggggcacaatcgcaaagggaccaagcggctccttatgtctctgcggaattaaccctccatcaccagcctttttccctgaatgtggccgcgctcttatttcgccccttattaaccccgcccccccctgac

SEQ ID NO: 44106 - DNA, 282 bp, Glycine max
  Clone ID: PAT_MRT3847_139826C.1
tttttcgcgagggcaaacgcgtggggtagagcctagatctcagactgagcatacttaattgattgcacttcacggctggacacattccaggcttctgccaatgttagggagctctgacgctggcctgattctgtgtattttaaccagacgagcgattcagtctcatatagcaggcaatgcgcatggtgaacatacaaggatggacgctagaggaactatgccttaataggaacaagagagtccgtcagtatcgctggacgttgatatcatggagccgcgcac

SEQ ID NO: 44107 - DNA, 453 bp, Glycine max
  unsure (1)..(453): unsure at all n locations
  Clone ID: PAT_MRT3847_139827C.1
acgaggcgtttcttgcgtgttgaaccttggtgcaacttgacattgtggcagaagttaattcaaaggccttatgagaatggtgatccaagatccctggagttggccaaggtcattttgaggatgctgatgttaagaagaacaaaggaaacgaaggataagagaggccgatacttttctcccgcctccaattgatatccagttgattgagtgtgaacaatcagaatctgaacgggacttttatgaagcccttttcgagagatctgaagcaagttttgtgccacagcttctgatttgtgcttggatctgaataacaacctgtttcacttttatcaattttgataaagtctaaaaatctgttaatagaaaccgttctcaaacctagtttgttctagtaactgttaatagttntatgtttggcacgttaactgccatgcaactcttgaacttactatc

SEQ ID NO: 44108 - DNA, 433 bp, Glycine max
  Clone ID: PAT_MRT3847_139828C.1
aaacccaaactggggttttaaccaaattattttaacctcccaaagaacaaatttggaaattaaaaaaaccccccattccttttatttttttggggtttttggtgggggggattgaaaccataaagggggctattttttcccataaccttgttgggcgaaagggccccccttttccccaaaattggtattggtggcgcaccaagaaggctttttaaaaaaaaaaattttgctcttggccccccggaaaggtttggggggaacctaaaaaaaaatagggggggttgttttaaacaaaggtttttcaaatatgattgctcctggattttggctgtcaaaaccacttaggggaaaagggtttcctttttcccacttcatttggaaaggattgggcacccttgggccccaaacccctcacccttgttaacctctttgg

SEQ ID NO: 44109 - DNA, 323 bp, Glycine max
  Clone ID: PAT_MRT3847_139829C.1
ggtttttagagaaataataattctatgcaaatttattatgtgaaacatgataccacacatgtgaccactctatgaccttccacaaccaaggcatttaacaatgtacgaagaaagggtcaaaaagactagatttctttcacagaaattagttggactgaagagctgtactggactctacagaggctttattgaaaaatacttcaggactggaacatggcggattcccactacgtaccagaacactgtatacttgttctgaatacccctattgtagctagcccaaacagactaagaatgctcttcatgactttgagcaacaaaaa

SEQ ID NO: 44110 - DNA, 538 bp, Glycine max
  unsure (1)..(538): unsure at all n locations
  Clone ID: PAT_MRT3847_13982C.1
ctccgaagtcattatctcantccccnaatnncnnnnnnnnncnnnnnnnnnnnnnnnnnnnnnnnnnnnnnnnnnnnnnnnnnnnnngnnggnnnnnnnnnnnnnnnnnnnnnnnnnnnnnnnnnnnnnnnnnnnnnnnnnnnnnnnnttnnnnnnnnnnnnnnnnnnnnnnnnnnnnnnnnnnnnnnnnnngggngnnnggggggggnnnnnnnnnnnnnnnnnnnnnnnnnnnnnnnnnnnnnnnnnnnnnnnnnnngggggggaaatttttccaaccccccaacctcttatttcaccacttctaaaactaaataaatttaattctcaaaatacattaccaattacaatttcttccccaaacaaaacaccccccaatcttccaacaaaacccattcaaaataatcccatacccctaataaaaatatcccaatcatttaaaggccttcaaggaaaaatttgcaagctaatggcctatctactccctcccccttttaccctttgttaaaaatttttccgcaactttctcttcaaacaa

SEQ ID NO: 44111 - DNA, 1148 bp, Glycine max
  Clone ID: PAT_MRT3847_139830C.1
ccacgcgtccgattttcctccatctgttccccacttctctctctccttcaatgcccttgtccctctctcttcttcttcttcttcttcttctgcgtccgtctctgcgtgggcttctcttcatgatatagcttcttcaccttttttttctttcttttctttgttaccatatataagtaaactagattccataactgtcccaagcccttccttcaaaagggtcctctcttttcaacccaaaacagatctacaccttcatcttccaccaccactctcactgaatccaagggctcaacctcttaagctttttctctatccaagaacctcttaagagagagaaagaataagagaaagagaaagtgagagagccaattctacatttgttggtggtggtttttgaggcatgtgaaatatgcaagccggtattatgatgattccggcgagaaacatgccttcgatgatagcaagaaacaacaacgttgtagggttttttggatcatctgcacttttcactcttgcccagattgagaaactataagcctctccggaaccttaaaagatctatagcaataataatgttccagccgaacctgatggacgcgttggagatgggtcagaacacttccgagagtgaggttcctcgaatcctagaagacgagttcgacagtgccaccaagtccggtagtgaaaaccatgaaggtgcctctggtgaagaccaagaccctcgtcccaacaaaaagaagcgttaccaccgccacacccaacaccagatccaagaaatggaagcttttttcaaggagtgtccgcacccagatgacaagcaaaggaaggaactgagcagggagttagggttagagccattgcaggttaagttttggtttcagaacaagcgtactcagatgaagacacagcacgagcggcatgagaatacaaatctcagaaccgaaaacgagaagcttcgagcagataatatgaggtatagggaggctcttagcaatgcttcgtgtcctaattgtggtggaccaaccgctataggagaaatgtcattcgatgaacatcacttgaggcttgaaaacgcaaggctaagagaagagattgatcgcatctcagcaattgctgcaaagtatgtaggggaagcccgtggtgaacta

SEQ ID NO: 44112 - DNA, 168 bp, Glycine max
  Clone ID: PAT_MRT3847_139831C.1
ctttctttcatctcctgctagctttcttccatttttgtgtgatagatcttgcatttctcgtgtgggggaaagtgagtgagtgcataagatgtggccattcagcacaaaagggtcttctgggttttcatcatcatccactgcagtagcaagtctctgccagaattgatg

SEQ ID NO: 44113 - DNA, 3238 bp, Glycine max
  Clone ID: PAT_MRT3847_139832C.1
ctttgtcgacccacgcgtccgacctcttttgccctccattcaatgcaattgcaccctcttaatacgctctgcaattactcttcgctgccacattttcctccatttgttccccacttccctctcctccttcaatgcccttgtccctatctcttcttcttctcctcactttctctctgtaacacctcttcatgccatagcttctttttcttttctttttttccttataagtaaacattttttttttcaaaactgtcccaaacccttccttcaaaacggtcatctcttttcaacccaaaacagatctacaccttcatcttctactcccactctcactgaaaatccaagggctcaacttcttaagctttttctctatccaagaacctcttaggagagagaaagtgatatatatagagagagaaagagtcaattctacatatacttgttggtggtggtttttgaggcatgtgaagtatgcaagccgttattacgatgattggggcgagtagcgggccttcgatgatagcaaggaacaacaacaacgttggagggttttttggatcatcttcatcacctttcactcttgcccagattgagaaactataatcctctctccggaaccttaaaagatccgtagcaataatcataatgttccagccgaacctgatggacgcgttggagatgggtcagaacactcccgagagtgagattcctcgaatccgtgaggatgagttcgacagtgccgccgagtccggtattgaaaaccatgaaggtgccttcggtgaagggaatgaccctcgttgacccacgcgtctacgtaggctcgagaaggaactgagcagggagttagggttagagccattgcaggttaagttttggtttcagaacaagcgtactcagatgaagacacagcacgagcggcatgagaatacaaatctcagaaccgaaaacgagaagcttcgagcagataatatgaggtatagggaggctcttagcaatgcttcgtgtcctaattgtggtggaccaaccgctataggagaaatgtcattcgatgaacatcacttgaggcttgaaaacgcaaggctaagagaagagattgatcgcatctcagcaattgctgcaaagtatgtagggaagccagtggtgaactattcaaatatttctccttctctccctcctcgtccattagaactgggggttggtggtgctggttttggaggccaaccagggattggtgtggacatgtatggagctggggatcttcttaggtcaattagtggacccactgaagctgataagccaataatcatagagctagctgttgcagctatggaggagctcattgggatggcacaaatgggtgagcctctttggttaactacccttgatggcacatccactatgctcaatgaggatgagtacattaggtcttttcctcgagggattggtccaaaacctagtggcttcaaatgtgaagcttcaagagaaactgctgttgttatcatgaaccatgtcaacctcgttgagattctcatggatgtgaaccaatggtccacagtgttctctggtatagtctcaagagccatgactctggaagttctatcaacaggggtggctgggaactacaatggtgccttacaagtgatgacagcagaactacaactacctacaccacttgtgccaactcgcgagagttattttgtgaggtattgtaagcaacatgcagatgggacttgggcagttgtggatgtttctttggataatttgcgcccaggtccttcagccagatgtagaagaaggccttctggttgcttaattcaagaaatgccaaatggctattcaaaggtcacatgggttgagcatgtagaagtggatgatagaggtgttcacaatctttacaagcagcttgttagctctggacatgcatttggtgcaaaacgttgggttgcaaccttagatcgacaatgtgaaagactcgctagtgccatggcaacaaacattcccactgtagatgttggcgtgataacaaaccaagacgggagaaagagcatgatgaagctggctgaaagaatggtgataagcttttgtgctggagtgagtgcttccactgctcacacatggacaacactctctgggaccggtgctgatgatgtaagggttatgaccagaaagagtgtggatgaccctggaagaccccctggcatagttctcagtgctgccacttctttttggcttcctgttccacctaaacgagtctttgacttcctccgtgacgaaaactctaggaatgagtgggacattctttccaatggaggagttgtccaagaaatggcacacattgcaaacggaagagacacaggaaactgtgtatctctacttcgagtaaatagtgcaaattcgagccagagcaacatgttgatattacaagagagttgcaccaattcaacaggctcttttgtcatttatgctccggtggacattgttgcaatgaatgtggttctaaatggtggagacccagattacgtggcacttcttccttcagggtttgctattctccctgatggaaccacatcgcataatggaagtggtggcattggcgaaactggccctagtggttctctcttaaccgttgcgtttcaaatattggtggattctgttccaaccgcgaagctttctcttggatctgtggccactgtgaacaatctcattgcatgcactgttgagagaatcaaggcttctttgtctggtgaacctgcttgatcagagcttcaagacttttggattctgcgttgcagtttacaagaaggatcaacgggacgcattgcattgtggaaaattaaaaagttggtgttgaacctcggcttatattacaaagacggggagaagtcaagagcgcaccttgcatgattccttctcagtgccccaaaagagttatgagaggattaaggttcgggaattgacttccctagctagatatagtaaacgttaagagcacattttaagatcttgctaccctttaccatttccaagactaaaatatatatatagctagctaggattaaccttttgagtaactagggtttaacattaatgtaaaactcttgtctttttcaatatctgattttgtgtgatttagaagtagtagcaccggcactagttggtgggaaaatttgcatttaaaaaacagaaaaatttctcaccaaacctccttttttaaaaggttttgcaatggatttttcct

SEQ ID NO: 44114 - DNA, 2754 bp, Glycine max
  Clone ID: PAT_MRT3847_139833C.1
gcttgccagctttactcggcaatggtggcaacatatataggcagcaacccataaaatattattacgaaaaggggttgattaaagtaacggggttgattgcacatcctttttgctttctgggttggaagaatttttgcgataaaatattttttcacccaaaaaaaatggtgttggatccaagactggtgctggtgctgttcatcggcacttgcattttggccatcaatggtgacacagatccaaatgacgttgcttctctaaaggttttgtttcaaagtatgaactcaccatcccagctaaattggaatggtgatgatccttgtggacagtcgtggcaaggcatcacttgctctggcaatcgagtcacagagattaagttacctggtcgttcactttctggatctttgggttaccagctagaacccatgtcatctgtgacaaacctagacttgagtaacaacaaccttggtggcaccataccataccaacttcctcctaatctgcagtacttaaatcttgctaataataatttcaatggggcaatcccctattccctttctgaaaagacttcgcttatagtcctgaatcttggtcacaatcagctccagcaagcacttaatgttgattttcaaaagctttcttccctctctacattggatctctccttcaattctttgacgggtgacctgcctcagactatgagctcactttctagcataagaaccatgtatctgcaaaacaaccagtttactggcaccattgatgtccttgctaatctgcctcttgatactttgaatgtgggaaacaatcattttacaggctggataccagaacaattgaaaaacataatacaaaaggatggtaatgcatggagctcgggacctgcacccccacctcctcctgggacacctccagcagtagcaagaaaccgaaatcacaaatctggtggacatagcccatcagatggtggctcaagtgacggtggaggcaaaaaatctggtataggaggtggtggcaattgctggaatagtgatctccatcttggttgttggggcaatagtagtattctttctggtgaagagaagacccaaaaagtcatttaatgatgttgaaaagcttgacaatcaacccttggctcaaaatgaagtgcacgaaatgaattccatgcaaacttcatctgtaattgatttgaagacatttgatacatctgcgtccccaataagccttaaacctccaccttttgatcgtcacaaatcatttgatgaagacgagttttcaaacaagcccgttatagtcaataagcccactaaagtcaagaagaccgtaacagctcctacaaatgtaaaatcatattctatagctgacctgcagattgctactggatccttcagtgtggagcaacttcttggtgaggggtcttttggacgtgtataccgtgctcaatttgatgagggaaaggttcttgccgtgaagaagatagattcatctgtccttcccaatgatatgtctgatgattttgtagaactagtttcaaacatatcccaattgcatcatcccaatgtgaccgagcttgtaggttattgttcagagcatggacaacacctactagtctatgagtttcataaaaatggatcacttcatgacttccttcacctacctgatgagtatagtaaaccattgatatggaattctcgtgtgaagattgctttggggattgctcgtgctttagagtacctacatgaagtttgttcaccatctgttgttcataagaatataaagtcggccaacatattgcttgatacagattttaatcctcatctttccgacagtggattggcaagctatattccaaatgcaaaccaggtattgaacaataatgctggatctggatatgaagctcccgaagttggcttgtctggtcattatactcttaagagtgatgtttatagctttggagttgtcatgttggaacttcttagtggacggaaaccatttgatagctcaaggccgaggtctgagcaggctttggttcgatgggcaacacctcaactccacgatatcgatgccctggctaaaatggttgatcctacattggaaggattataccctgtgaagtccctttctcgatttgcggatgttattgctctgtgcgttcagccggagccggaattccgaccacctatgtcagaagtggttcaagcgctggttcggttagtgcagcgtactaacatgagcaagaggacgtttggaactgatcaaggaggatccaacagagggggtgatgatcaagatacacaagacatgtaaatgggaacaaaaaaggcttgtgttgatagaatggcagaaaaggaaatgatattcttcagatttttatcacttctttctaacccccttcagccagtttatgttctgagttagaggattgcacctttgattattgaagctagagacaatttcttggtgtatgattttgcgctatttcttctattggtggtataaatttcaataatttaacctttttgcgaaattgaagctgggttacgattgatggttgcaatcttgttgtaataactaggaatcataacaagctttttcatcgtattttgtgattgtatgggtccaatattttgtattagtctaaataaatacacctgtgttggggtcattttactcctctgcttaatcttcatcagaatataattaacgaacttataagttttcacactaagtaccaacgatagatgacaataaaat

SEQ ID NO: 44115 - DNA, 2211 bp, Glycine max
  Clone ID: PAT_MRT3847_139834C.1
gttgaacttcaagaacctcataaaaccctctctctctctctctctctagatctggtcaatggaagaggaaattgaatatgaagaagtagaagaagaagaggaagtggaagagatagaagaggaagtggaagaggtggaagaagaggaggaggtagaggtggaagaagaggaggaggaggaggaggaggaggaggaggaggaagaagtggaggttgaagaggtggaagaagatgatgccatgcaaaatcatagcagtgatgaagcaaaggtggaagatgaggatgagaagagaaaacatgctgaactcctttctcttcctcctcatgggtctgaagtatacattggtggcattcctcatgcctcagatgaggatttgaaatctttatgtgagcgtattggtgaagttgcagaggttcgaataatgaagggaaaggattcttctgagaacaagggctttggttttgtgacttttacaagtgtggaattggcttctaaagccattgaggagctaaataatacagaattcatgggtaaaaaaataaaatgttcgaaatctcaagccaagcaccgtctttttattggcaatgttcctagaagctggggtgttgaagatctgaagaagattgtaactgagattggacctggagttactggtgtggaactagtcaaggatatgaagaacaccaacaataaccgtggctttgcttttattgactattataatcatgcatgtgctgagtattcaaggcaaaagatgatgagcccaacatttaagctaggtgagaatgctccaacagtgagctgggctgatcctaaaaatgccgagtcctctgctgcatctcaggtgaaggcggtttatgtgaagaacctgccaaagaatgtaactcaagagcagttgaagaagctttttgaacgccatggaaagatcacaaaggtggttcttccaccagcaaagtctggtcaggaaaagaacagaattggctttgtacattttgcagagaggtcaaatgctatgaaagcacttaaaaacactgaaagatatgaattagaaggtcaacttttagaatgctctctggcaaagccacaggctgatcaaaagtctggaggatcaaacacacagaagccaggaccaggattgcttcctagctatccaccacatgttggctatggtttggttgggggtgcctatggtgcacttggtgcaggatatgctgctccaggtcttgcacagcccttgttatatggaggaggtcaaactcccgctggaatggccatgatgcctatgcttttggctgatggacggattggatatgtcttgcaacaaccaggaatgcagccacaagccccaccctcacatcatagaggtggcaggggcggtggtggcagtgggagtggcaacaggaatgccggaagttcaagtaagggaaggcacaacaatgatggcggccatgggcgcagataccggccatattagctggtcttggtatagatagtagcacccccccttctctcaaatgtatttagggcttttcaagctcatttaattcatcaaaatgtgctacatatttttttcatcaaaaaactgttgtacaatcagtcttgattacatacatgatgtcagggcgtttgtaagttgaattcttcctatgttgataattaatcagttttatacttgaggaccctttttcccatgggtttttttattaaaattttattgatcaggctattaattgtcggtgaatggcttttgtaaccagtgttgtgtttacagttgcggttaataacagtggttagtgtgacaaaagctcaagtaggtgggtaagaggatttgctaagctagtggcaaattgtgtattattggaacctggcatgagaggatgccctgtcaaaaactgggtattacccattactgagtgctttcagattaattctggttttgggagccctgaaacattgttgagacctttaaaaagtttaatattggcttttatatgccaaatagttattgggttcagtttgggtttctgttttccatttgcagatttattctgtcattacatgttttttgtattgtagttttataattgaatgttttagggatgatataccttggtatggacatgttccttccttatgctattatcctatggcgaatgctcatcggtgtcttcagggcactgactaaggaattcaaaatagtaacttttcatt

SEQ ID NO: 44116 - DNA, 685 bp, Glycine max
  Clone ID: PAT_MRT3847_139835C.1
tattggctttatctgccagatagttattgggttcagtttgggtttctgttttacatttgcagatttattctgtcattacatgtttttagtattgtagttttataattgaatgttttagggatgatataccttgatatggacatgttccttccttatgctattatcctatggcgaatgctcatcggtgtcttcagggcactgactggctcgagcaaaatagtaacttttcattaaagtgtcatgaatatatctctattctgtactgtgatttcgaatgcattttcaatttggattttaataaaaactttttggattccttaatcagtgccctagggttacttattagcaagacccttgtgctatcagtttaccattataggttctcttatagattgtagattagttgtaggaatctcaacatttgctgctcatattatgccatatggttcttggtggtgccggtttatccacaattgcttgtcgctaggattttcatggccattgccgttgaagactcgaagtcctaaccaagcttctggagcctttcttttgatagagtcctttgtcttttttcaattgttaatttcatgaaactatgtagatatgggactgaaatggtatttctgctgggtatcttctgattttcatggattttcagcattgggtacaatgcacattttcaagt

SEQ ID NO: 44117 - DNA, 378 bp, Glycine max
  unsure (1)..(378): unsure at all n locations
  Clone ID: PAT_MRT3847_139836C.1
gctcacttcggagcccccaggaaggacgaaagagcgaagcccaaaccaganaagacgcacgcaacccaaaganngngnggagggacaannacacnncgaaaagaacaaacaggncccagaaagaaaagaagcccaacncnacaaaagccacaaccnngnnagnggaaaagcccggaaagacgagacaacggaggaggaaacaggcagagacgaacggccaaagggaagancagcagaaacccaaaaaggacgaggcccgaacgagacaaagaaaccaaccggcaaagaaaaaggcgcaggcccagcaagagacaccgcgggaaaaaccgcagccggaagaggccaaaacgaacaaaagagacaggccggacccaaaaa

SEQ ID NO: 44118 - DNA, 360 bp, Glycine max
  Clone ID: PAT_MRT3847_139837C.1
cggatagacactgataagatagcggaggtgaataaggtatggtatccattgcaattgcatgccggagatctggacggcgtactcttcaaactgaagcgccggagaaagtcaccgattgcacttgtccaagccaaacagagtctacggagcacaacagactcataccttctctataaatccaattttcattcctttgctacactgtgtatagcaaggtcctattatggttgacaatgaaacgcaagcgtatacataacatagggaatgcataaggctccactaaccatggaagcagcatggcttatgctaattctaaggaagaagaaacctctggaatggatgatcaagatcactgtgaaa

SEQ ID NO: 44119 - DNA, 212 bp, Glycine max
  unsure (1)..(212): unsure at all n locations
  Clone ID: PAT_MRT3847_139838C.1
ttttatatccacacataccnccncaacaccttaatctgatccaaataatctatttacctcatccaattacaaatgcacgtatgtacagtactatttttgaaatttttctaatatatacacatcctaaaccttcctggccacttttctattctttaaaattgaaccagtccttaccattttcaactggccaaatttgcctcccattatcatta

SEQ ID NO: 44120 - DNA, 2039 bp, Glycine max
  Clone ID: PAT_MRT3847_139839C.1
cccgcgtccgcaggattgcatatgctaaatttatatagttgttctatgcagtggtatatgcctctatttgttttagctcatgggttatcaactattatatgtatagctgcagttgccgttactgatgtgtgcatttcttgcagggtagtgtgaccgtggctcaagtaggtgcatgagaggatttgcaaagctagtgacaaattgtgtattagaggaccctggcatgagagggatgcattgtcgaaaactgggtattattgtgcccattattgagtgctttcggattaattctgggtgaaagccctgaaactttattgggacctttaaaaaggttaatattgggttttaactgggttttcgcgactattgattacaagtttgacctcatgtatgcgccaatggcatttgttcattggtatgtgggtgaaggaatggaagaaggtgaattctctgaagcccgtgaggatcttgctgctcttgaaaaggactatgaagaggttggagcagaaggcgaagaagaagaataagaagaacacgacgattactcgaaatagagtcaatcattcatcaacattttcaccagctaccttacctacatctcccttcttttctctgtctaatgtctgtccttgtccattgaattttaagcatttttctgttgtgtgctagctctgttcttactattgtttcctattatgagcagcagtgatatccctggattcctagtgaggttcgatgcatcaagtatgagttttaagtgtagtccaagatatagaaagtacatggcatgctgcctgatgtatcgcggagacgaagttcccaaagatgtaaatgcagctgtttcaaatatcaagacaaagagaacagttcagtttgttgactggtgccctactggattcaagtgtggtatcaactaccagcctccaacagtggtaccagctggtgatcttgccaaggtgcagcgggcggtttgtatgataagcaacaacactgctgttgctgaggttttcgcgcgcattgattacaagtttgacctcatgtatgccaagagggcatttgttcattggtatgtgggtgaaggaatggaagaaggtgaattctctgaagcccgtgaggatcttgctgctcttgaaaaggactatgaagaggttggagcagaaggcgaagaagaagaataagaagaacacgacgattactcgaaatagagtcaatcattcatcaacattttcaccagctaccttacctacatctcccttcttttctctgtctaatgtctgtccttgtccattgaattttaagcatttttctgttgtgtgctagctctgttcttactattgtttcatgttaaagtgttaagtgatacaattgctttcctcatgagcagcaatggtttatttgtaagtttcagtgaaagagcaaaataaaggacagcgtaggaatgctgcaattttcattactttactcgaaatagagtcaatcattcatcaacattttcaccagctaccttacctacatctcccttcttttctctgtctaatgtctgtccttgtccattgaattttaagcatttttctgttgtgtgctagctctgttcttactattgtttcatgttaaagtgttaagtgatacaattgctttaaaaatgagcagcaatggtttatttgtaagtttcagtgaaagagcaaaataaagcggaaggtaggaatagcgcaatctcaacaatgatggtggccatgggcgcagatatcggccatattagccggtcttgatatatagatagtagcacccccttctctcaaatgtacttggggcatttcaagctcagttaatttatcaaaatgtgctacatatttttttattaaaattttattctgcagaattacatacatgatgtcagggcgtttgtaagttgaattcttcctatgttgataattaatcagttttatacttgagaacccttttttaaaaaaaaaaaaaaccaaaacaagaactaatacaaaaagatcaacatacttaataaataacttcaataaaaacag

SEQ ID NO: 44121 - DNA, 231 bp, Glycine max
  Clone ID: PAT_MRT3847_13983C.1
gaatctcacaaacaacttccttcttattagctctgagaatggttttcttataaacatacactccattccataagtacatcctcacttatcaatgaggagtataggacttttgctaccactgtcaccacttttgttcctcttccccctgtaaagcaatcaccattgcacaaaacactccatccaataacatattctatctagaccctgattctattctccacactaatcaac

SEQ ID NO: 44122 - DNA, 424 bp, Glycine max
  unsure (1)..(424): unsure at all n locations
  Clone ID: PAT_MRT3847_139840C.1
gtgttttctttattttttttttttcttcttattttatatttcttttttttttcctttttaaaaaggggaaggtcccttttttaagcgcgcatttactattgggggtcacgcccagcaaaaacactctgattcccaaaacacttggccttgggaaaaaactcaaaagaaatacgttggcccgcccaatccccttgttgcaaaaagaaaataattatattgcgtaggagacccccaacctcctttggggcaaaataccaaagcggctatatagggcggccggcccctaagaacgggcaaaaaactgcgagcttccangctctgaggctgcgcccatttggaaaagaagcaaccaaactcttattttttggggggctgaaaaaaggtaaaaaaacaagccaaaatgggtgctcaaaccaaaagattt

SEQ ID NO: 44123 - DNA, 543 bp, Glycine max
  Clone ID: PAT_MRT3847_139841C.1
gtttaacatcattttttgaaggaagaagacatccccccacgtctacgtcttttttagagaaaggaaaggaagaaaagaactttggttttaagagaagttgaaagagatttgttaaactttcagaaaacaaattcaatttgagagaagcatttttttttaattacaatccgttaaacaacatgagtcatcatccaccaggcgcagtcccaccacccggagccttcccaccaggcgctgttccaccacccggtgcacacccaccaggtgctttcccaccaggtgctcacccaccaggctctatgccaccaggagcatacccaccacctggaactatgccaccacccggagctttcccaccaggctcgattccaccaggagccttcccaccaggttcattgccaccaggctctatgccaccatgtgctttcccaccaggcactatgccaccaggcgcttatccaccaggcgccttcccaccaggtgcttacccaccaggtcatgatttcaagagctacaagaagcaattcatggatcaaaaagatc

SEQ ID NO: 44124 - DNA, 531 bp, Glycine max
  Clone ID: PAT_MRT3847_139842C.1
tatgacgttcgctgcccgcggccgtgaactcggaattcggctcgagacaaaatctaatcaggcattctcttatttcagggatgttccaaccaccaaggggcgggtgtgatctcgaaagataatgagtccttacactactatacatgatgcggaacctcgagctgaaactctagcagcgatgaactttctctggacttggtgatcaggtcacgaactctagtttataaggtggcaagagctgctaacaaaaaaggacgaacatctagcatacgagacacctttgcctactctggatatgcccatgtgaaaaatggatatgtgacctgtgatgggcaccacaagtgcaacgaagatttgcacctgatgctggcaacagggcttgaggcctataaattttctatataatgggcgatattgcctccaactggcgcaggacccgttaatacaacagagtacagtactacaacaatatgctgaacgaacttatcagccttggaaatcaaacacatgccgcgcttcacaaatattatc

SEQ ID NO: 44125 - DNA, 474 bp, Glycine max
  Clone ID: PAT_MRT3847_139843C.1
cggctgcgagaagacgacagaaggggagccgtgctacatcaactttttctctataactgaataatcaaatcaacaatagaagctttatataatggggaagaggctcaagatgttggaggtgctaggacataatatcgacatattaaccaaattaagaccaagaatgaaccaatcttaggtaaattaagaccaagaatgaaccaatcctaggtaaattacacatgttatgggctttgcatgacaacatattgtccacacagtctattttttataggtaagacgacatcttttccccctatggatgcacgtcattccattctatgaccccatttttgcttttctgactctacctctatctatcactccaaaggactaaaatgcccttcggtgctaaaaaaagcttttaacatttaactattttaaatactaaccgtatatattttaattgatcattacctcaaatattagttgaac

SEQ ID NO: 44126 - DNA, 517 bp, Glycine max
  Clone ID: PAT_MRT3847_139844C.1
aatcaatctcctcttctcttccggccatggcctccttgctccgctctctccgccgccgtgatgtcgcttccgcctccctctccgcctatcgctcggtaccatgtccacctcttctatgcttccttctttttctttattttgaatatacttgtgctggttactccatgttacctaggttttctcgatttgatcctattatgccttaatccagttatgtcttgcttttgttcggattttggctcgagttgtttagaattttagtcttctaattttcgtaattgattttctatttctagtgttttagagtggggttttaataccaaaagcgttaagccgttgctgtagtagctcaagattttgctagatcattgtgaagtcacttagtagctactctacgatattgcttttattacttctaatataagtttttcatgggtcacttttctagcttctataattgctttatcgtgcatctaaccttcctatgctctttaatcctggggacttaacgaagtac

SEQ ID NO: 44127 - DNA, 213 bp, Glycine max
  Clone ID: PAT_MRT3847_139845C.1
cggacgcgtgggcggacgcgtgggaaaaaaaaaaaaaaaaaaaaaaaaaaaaaaaaaaaaaaaaaaaaaaaaaaaaaaaaaaaaaaaaaaaggaaaaaaagatctaaaggatcacaaaactaacaaaacgcgggcatagcagacgtcttaacttcttctttggtgccgccttactgtcatttctttgtgccgcctttttgcggggtccgagat

SEQ ID NO: 44128 - DNA, 258 bp, Glycine max
  Clone ID: PAT_MRT3847_139846C.1
gaccacattcggaaatacaaacacattacattgggcgtaccacttttgtctcggaatgtgctcatttgcattaggggaaacttaatgggtacaagtgtgggtttgatgtccctggatggtatgaattgaccaatgaaagggggaaccctttgattggagaatggtttcgttgaacctttaacgggtttaacctaaccggttcaagggtggaaattttccaaaatcttgttgtaacgggtttaggaaaattctgggttc

SEQ ID NO: 44129 - DNA, 283 bp, Glycine max
  Clone ID: PAT_MRT3847_139847C.1
tcgagtgctggtcttcatacaaatatcaccccttacttaccctttttcatctccttacttagaaatcaaattcaaccctgcactgttaatacactatacctgactcgggtaaaaacataacctaacactttttttttttttaattatatatttaatgcattatttactccatccatccaatcgattctttttataaatttacaattattatcattcaacattataataatttattctttcactctgttaaatatacatatatcattttacacaaaaatatatt

SEQ ID NO: 44130 - DNA, 515 bp, Glycine max
  Clone ID: PAT_MRT3847_139848C.1
accttataaaaacctttaaaaaaaacaatgggcccccccccctaaagacaaattttaaacaaaaaaaataaaacaaaacttacaaaggaaccccccggggatttttttttttttctttagccaaaaaaaaaaaaaaaatgggtaaagcctataaacttaaggcagggtctctaaaaagggctattttaaaattaacccccgggaacacttatttacggccccccccggtttttttaggggggggggcagggcccccggcgggggacggaaaatttccataggggcaaattccacgccgggggggctttggttcccccgggaaattccccaaattaaagaaaggggggggggggttttttcggccccaccgggttttttttttgggccaaaaaagcccttccgggggggggggggctttaacgcggttttcaccccccccggaacaagagttaccggagggggggccccaggccccgggccttttatttttcccccggaaggatttttttcccaaa

SEQ ID NO: 44131 - DNA, 551 bp, Glycine max
  unsure (1)..(551): unsure at all n locations
  Clone ID: PAT_MRT3847_139849C.1
cttggctctgggagcggncgcccttttttcttttttttcttcnttngcntggnntttttcttttttgtgctgntctgccngcttactagcgtngcccgcttactagcgtagcttttccgggnnntgaaccatgatctgatttgacacacctgcacaatggnngnttttcctctcatttggtggccttcatggtttctttctcccccccactggttggaacttgttttgcgttctcctctccctcctggcgaagctttgctctctctgtctgantgtctgacgatgactgacttgtggccccgaagtccttcaattttgntccttttgtctctgccttgatcttcccagcttcctttaccgctgcgtcctaaaactctgcccccctccccgagtcctcctccgcnnatccccttcacgtccgagccggagttccccttctgctccctcccgggcccatcgctgccccctctcctggctctgtgtttttgttccctgccctgcgacctggttccccctccttctggactctggcgccgtcccttcccttgctc

SEQ ID NO: 44132 - DNA, 505 bp, Glycine max
  unsure (1)..(505): unsure at all n locations
  Clone ID: PAT_MRT3847_13984C.1
gatcctaagctaggttctgcttatgatgaggaggaaatggagtntggtgctgaaanttgggtctctttgtgttcacaatacataagctgagtattagaccttctatgaaacaagtggctaggtacctaaactttgatgactctcttcctgatatctctgattggagatactatgattctcaaagcagcacaaatagcttaagtttcttagaagccatgtctacggggaaagattgcatcttcatacagtttatcttccattggcagcagaagtacactgccaataaaaaccggtagatagcagaagaatgttcttctaatttgttctttctttagactatattcccttacttgtttgtacctactagagtagtagagttttacttcataattatgtgggacttggtacctctattttgtaagaattaatgatttttttaagagtttaataattatgcatcatggtaaaataattttatattattgtttaattataaattatttgt

SEQ ID NO: 44133 - DNA, 452 bp, Glycine max
  Clone ID: PAT_MRT3847_139850C.1
gggggaaaaattgcaaataagcttgaataaaaatttttacaacatcaattttaccctggcaattttatttttcttttgcctgcttgcaaaggataaaaaatgaccgcgtttgtctaaatggcttttttccccccaaatagaactacccaagggggggcttattctagcccctaaataaatcaggaaattttctttgcttccagtttgccccaatttacccttttttcaaaagttggggtttgtctataagggaaattaatctcaaactaccatgtcggtttttttaaaagggggggggatccccacatccagccgcatgggcgatttatactgttctgggaggggagcccccgcctgaaggcacatttccacttttacatgcgcctggccataaaaattcctaagctttcgttttagcagggcatttacatcaggaacatgccatacaaatt

SEQ ID NO: 44134 - DNA, 346 bp, Glycine max
  unsure (1)..(346): unsure at all n locations
  Clone ID: PAT_MRT3847_139851C.1
attgggctcaggaccaacctaaatcacacataatttgnctggtatcacaccaacanaaacaaggggttgtttttactgaagcaccggaagcccctacttttctcttacataattgtcttcgttcttagaatatcttccaatgaacagaataaattttttgctcacataccataataaaaagtgccatctaccacacttattccttatagatatgcaacaacaatttgatacattgatgcatatattgccacctatactattctctaccattacacatcatctaatatatttgatcagccaatcattaacatatcatcatctaccaatggaattataaaacctttaa

SEQ ID NO: 44135 - DNA, 593 bp, Glycine max
  Clone ID: PAT_MRT3847_139852C.1
gtttacggtgcacaaccacttaatgtacataaggattacaggctgaaatctcacagacttcaaggcaacttgacttaacattgagctcaacacatgtacacaatagatcaacttctggcacaagagcgccattcttaagggatctgacagaacatttcattaccatgatgcattatgagactacaaatagcctgtcattcacatgctagaaaaagaatggagaatccaggtgtctaccaatgtctgcgctaagagacccacaataatttcttcgacatcaaaattcttcgcaaaagaaaaaaaactcactcccccaacttgattccttcagtgcgtaaaagagcggaaacttcctgctcctcaacacaactctcatttgcctcattgtcaccatcgcttaccatactttcctacaacttaaaacttatctaaccctccttgaaatagagccaactgagcctgcttataaaagacacgtgatccttaaaagataaaatcttattcacctgggcaaaataaccagccaacttactccctcgtgcgacagctacacctgttatagcgtctcctacctaccaatgactagcggttcc

SEQ ID NO: 44136 - DNA, 1311 bp, Glycine max
  Clone ID: PAT_MRT3847_139853C.1
gcattgaagagacagggtgctgaccttctctgatgttttgtgggacggagtcataccttgcccctgaggtactcagcaatcttggttatgatggtgcagcagctgatgtttggtcatgtggagtcatcctatatgttctaatggctggatatcttccttttgaggaggcagaccttccaacactgtatagaaggatcaatgctgcagaatttgtttgcccattctggttttctgctgacacaaagtcattcatacaaaaaaattctggatcctaatcctaaaacacgggtgaaaattgaagaaataaggaaagagccatggttcaagaaaaactattttcctgtcaaactcggggaagatgagcaagtgaatttggatgatgttcgggctgtttttgatgatattgaggaccaatatgttgctgaaaggtcagaaattactgagggaggtcctctgataatgaatgcatttgagatgattgctttatcacaaaggttgaatctttcaccactatttgataggcatcaggattatgtaaagcggcaaactcgttttgtctcccgtaaaccagcaaaagttataatttcttcaattgaagctgttgcagagtcaatgggtcttaaggtccattctcgcaattacaaggtgaggcttgaaggcgtttctgcaaacagggttggacaatttgcagtggtcttggaggtgtttgaagttgcgccatcccttttcatggttgatgttcggaaggccactggggatacttttgactaccacaagttttacaagaatttttgtggcaaactaggaaacattatttggagaccggcagggactatgccaaattctaatctgcgcaagcaaatgactttataatccaattcttgcgggtatgatgcaaatctaattagaagagcactgaaaggctgaaagcttcagctggtccccgaacatactaaaaagttagcatgcttcttctagctatcacaatgcacagcatacgctgtcaacttacaacatggcttaataatcttggaagaaggaagtaaaaaacctattgcaatgcatcttgtagcaaatctacccccacaatggtatacgaaaacaatccattatttggttggggcagaaatatatactaaggaataacagaaaagaaacgatgatattgtttttcatatccccagttctgtatgtaaggagcgtgtttgggagttattcaaattctcaaacacgcgtgtttgagaaatgctgttttgtattaaaaaaaagcgtgtttgattgcaataaattaaaattaagtctgttcttttc

SEQ ID NO: 44137 - DNA, 519 bp, Glycine max
  Clone ID: PAT_MRT3847_139854C.1
ccacgcgtccggtcttttgctccattctcagccgccgccaatccctggccgtgctccgcaaccgctgagtgagaagaagagatggccgggatgggcgatggcccggctatcggcatcgatctcggcacgacgtactcttgcgtcggcgtgtggcagcacgaccgcgtcgagatcattgccaacgaccagggtaaccgcaccacgccctcgtacgtcgccttcaccgactccgagcgcctcatcggagatgcggccaagaaccaggtcgccatgaaccccatcaacaccgtctttgatgccaagcgtctcatcggcaggaggttcagtgatgcgtctgtccagagcgatatctagctgtggcccttcaaggtcatttctgggcctggtgagaagccactgattgttgtccagcacaggggtgaggagaagcagtttgcagctgaagagatctcctctatggttcttatcaagatgcgtgagattgctgaagcttaccttggtagcacgatcaagaatgct

SEQ ID NO: 44138 - DNA, 301 bp, Glycine max
  unsure (1)..(301): unsure at all n locations
  Clone ID: PAT_MRT3847_139855C.1
agggnaagaagcaaaatatgaattaaaatttgtagttacagccatgtcttggctttcttacagagtagttatccacttttggttttcagcaccaaggcaggatttaaacttggtttgccccagttaccaagaagaaaatctcaacatacaaaccactagccaatgatagggaagcagttaactcatgaaagaaactcattttgaatcccttagaagaactaaaaagaatgctgtcagggcgccaaaaactagaaggggaaaacaatggctcacaaacatcaaccttcttaaacttcattat

SEQ ID NO: 44139 - DNA, 184 bp, Glycine max
  Clone ID: PAT_MRT3847_139856C.1
catgactggagcgacgagcactgcatccagatcttgaagaactgcaggtatgcaataccatagactacaggctaactcataatcgtggatcacgatcttcgatccgatagcaaccgaatcttcagagatcgttggcatcgcatccgagatgatgcttctcgatcataacgccggtagcaaagag

SEQ ID NO: 44140 - DNA, 414 bp, Glycine max
  Clone ID: PAT_MRT3847_139857C.1
cccacgcgtgcgtccacgcgtatgaaaataaaaagaataaaaaaaaaaaaaaaataaaagaaagaatgaaaaaaaaaaaataaaaaaataaaaaaaaaaaaaaaaaaaaaaataataaaaaaaaaaaaaaaaaattaaaaaaaaaaaaaaaaaaaaaaaaaaggtgaaaataatagatggctttacattaatcttcggtgttgtaataaagatctgtaactttttaaaagagatagatggatagactgaactctttctttaaaaacctaagatactggataaaatctgtgtttatctatttagatgattttgatatctatataaacttataatatttgtatatatcattaaatgatttgatcaaaaccatttagtaaagaatgttgaaactttataagtgtatgatgaatgtca

SEQ ID NO: 44141 - DNA, 265 bp, Glycine max
  Clone ID: PAT_MRT3847_139858C.1
cacatgcaagaatttgtaagatctttctttttcaaaagggaagtagagaataaattgaatgaagcacttatatgaagctcggtttgagccaaaatgtttgaggttaagtgttttttgtctattatatgtcagctttttaatctttgcttccactatattgaacaagtagtaattacattctcctgattattctgttaatatagttcaggttgttttttctattagctttgtacatcaaatggttttatgattcaaaataggtttt

SEQ ID NO: 44142 - DNA, 572 bp, Glycine max
  unsure (1)..(572): unsure at all n locations
  Clone ID: PAT_MRT3847_139859C.1
ggctcgaggttttgatgaacaagtttttctttataaaatccatggttagtataaatagacacgaaaaatatttatcatggtaggaaaaatcctatggtgttgcttgtacttatcaacttttcaatgtctgtatagtataattgcagattttgctactcctattctatcattaagaaaagaaaagctccaaaaggagtatgaagaaaggaatctaaattcactggccatttgtgggaagaacagcttgggattgcatgttgactttgaggattttacaaagaaaatgtttcattttgtgaggatgatatggtacatatggagaaagtataacatagactatttactgatccttccattttggtgtgttgtggctatgatatgcttcatgctgatgttatattgcaattggcttgctttatagatcgagttacaatcacctccttggattttatcaatttgatacatgaacatattagtatccattggtaatccattntaattattactaattactaacacccttttttgttgccatctagatttctcgcagagtatagatttgatgtctcaaa

SEQ ID NO: 44143 - DNA, 534 bp, Glycine max
  Clone ID: PAT_MRT3847_13985C.1
taaccccgcgcgcgaccagtctcctagtcatgtcggccgcccttcttttttgtttgacatgctagcatctgcggtatactgggcttgcgcattgtttagagcatagcaccactctcgaatcggctaggcttaagaaccattgccagcaaaatgtacgagcttcataccagatcttatcggtgcttttcaacgctacggaaaactatgggtgggctttgtttgaaaaccccttgacagctcttctgctgatgggactgccattactgactatcatatgacttctctgggatagcgaccaatgaaaccactcttgacgtgtacggtggcgagatatttacagggggtgatcgcttttgactcgcgacaacggagaccacttctgaagttttgggggggctatcttccactgactgatcatatgtgttacctttgccggccctagcttaggaccccttcccttgacttatatactggtaaatctgctgcctggctgatggacgttttacttttggaattggagcaggaccaggactc

SEQ ID NO: 44144 - DNA, 1039 bp, Glycine max
  Clone ID: PAT_MRT3847_139860C.1
cccgcgtccgtgaagactgaagttataaccggtgaagttggttgtcctcacgccattcattattgtaccaggctcttcatcaatgaactccaatggttaccctgcttcctccttcaaaatccccaccgtcaagttcaccaagctcttcatcaatggacattttgttgattcactttcaggaggagaatttgagacaatagacccaagaaccggagaggtgattgcaaggattgcagagggaaccaaagaagacattgaccttgccgtcaaagcgtctcgtctggctttcgaccatggtccatggcctcgtatgcctgccgtagaaagagcaagaattatgatgaaatgggctgacctaattgaccaacacgtagaagaaattgcagcactggatgccattgatgctggaaagttgtaccatatgcttaagggtattgaaattcctgcaacagcaaatactatacgttattatgctggtgctgctgataaaattcatggagaggtattaaagccggcacgggagttccatgcatatactttacttgaaccagttggtgttgggggacatatcattccttggaatttccctagcatcatgtttggtccccacgcgtccgccttccttggctgctggttgcacaatggtcctcaagcctgctgaacaaacacctctctcgggcttggtttatgctcatcttgctaagctggctggaattccagatggagtgcttaatgtagtacccggatttggccaaactgcaggtgctgcaataagctcacacatggacattgataaggtaagctttacgggttcaacagaagtggggcgtgaagtaatgcgtgctgcagctaatagtaatttgaaaccagtttcacttgagctaggaggcaagtcacccgtcatagtttttgatgatgctgatgtagataaagctgctggacttgctctcatgggcatcctatttaataagggagaaatttgtgttgcaggctcccgtgtgttggttcaggaagggatctatgatgaatttgagaagaa

SEQ ID NO: 44145 - DNA, 677 bp, Glycine max
  unsure (1)..(677): unsure at all n locations
  Clone ID: PAT_MRT3847_139861C.1
attcccgggtacgacccacgcgtccggtgaagttggttgtcctcacgccattcattattgtaccaaggctcttcatcaatgaactccaatggttaccctgcttcctccttcaaaatccccaccgtcaagttcaccaagctcttcatcaatggacattttgttgattcactttcaggaggagaatttgagacaatagacccaagaaccggagaggtgattgcaaggattgcagagggaaccaaagaagacattgaccttgccgtcaaagcgtctcgtctggctttcgaccatggtccatggcctcgtatgcctgccgtagtacgttatcatttactacctccggttctctttttacaagaaacaagttttaatgaaagagcaagaattatgatgaaatgggctgacctaattgaccaacacgtagaagaaattgcagcactggatgccattgatgctggaaagttgtaccatatgcttaaggctattgaaattcctgcaacagcaaatactatacgttattatgctggtgctgctgataaaattcatggagaggtattaaagcccgcacgggagttccatgcatatactntacttgaaccagttgtagtgtgggacatatcattcctaggaattncctagcatcatgtttgtctccaagttagcccttgcttggctgc

SEQ ID NO: 44146 - DNA, 747 bp, Glycine max
  Clone ID: PAT_MRT3847_139862C.1
ccacgcgtccggtgcggtggtgttgagttattttgtttctctgaaaattcacagaactcgcacacacacacaacgcaaaaactcgctcccttcgcatcagatccgaatctctcttcgtttcgccgattcggatctccgattgatctccgcctccgattccttctcctcgcaattggatccgatttgagcttctcgccgtacacaatcaccgtcaatcatgaacccgttttcttcaggaacgcgtttgagggacatgattcgggccatacgtgcttgtaagactgcagcagaagaacgagctgttgtaagaaaagaatgtgctgccattcgcgctgcaataaatgaaaatgataatgactatagacatcggaatctggctaagctaatgttcatccacatgcttggttaccccacacattttggtcaaatggaatgcctcaagttgatagcatctcctgaatttccagagaagagaataggttatcttggcctcatgttgcttcttgatgaaagacaagaagttctaatgttggtcaccaattctttgaaacaagatcttaatcacacaaatcagtatatagtgggacttgctctttgtgctttaggaaacatttgttcagcagaaatggcccgtgatcttgcaccagaggttgagagattgctgcaatttcgagatccaaatattcgcaagaaggcagcattatgctctataaggatcataaaggaagttccagacttggcagaaaa

SEQ ID NO: 44147 - DNA, 1070 bp, Glycine max
  unsure (1)..(1070): unsure at all n locations
  Clone ID: PAT_MRT3847_139863C.1
ccagccaaatatccgtacttccacttcagcggctacacgcagaatagtagcttcggcccatggtcgacccattatttgcaagcctattgaaagtctttctttatcgtacccaaccgggacagaaatggaagggaatcccaaaagatttgcaggaacaacgaactgcataaggttagctggtaaagaagctttgagttaacatatatgaagagataagttattacataatagnaagagttgtaatcatggcatgacattttacttaagagttagatcggtcatgaatgataatgttctaataagaaaaaacaaatcaagagatcagggtctcgatacagatccaatccaaaacttttaacgatgttttgtgctaaggctatttattgttagaaaaatcatccacatgacatcttttgatttgaaaactttataacaaggacataagcaacttgatttgatacttttgatattgttttccaatcaaaattacaatttcacctcagtaacttttaaggtccacattaaaagttagaatttgagggcgagccctggtgcagcggtaaagttgtgccttggtgacttgttggtcatgggttcgaatccggaaacagcctctttgcatatgcaagggtaaggctgcgtacaacatccctcccccataccttcgcatagcaaagagcctctgggcaatggggtacgaagtttttataggttattgggttggctcaatttaagatgatcataaagtttacagaataaaatttgacttgtggcgacctctaacatttggccactacttgctgtaaagcacatagtctttaaaagggtttccctagcagatttgttgagattgggtaggctttgcttcattgatattttctttgctctcttttatatgtgtcttgatgaaataaaattattcctttataataaaagaaagttgcctttacatcaatctgaaaagaaaaaagtactttatggcaattcttttttctctcttgactgttcaaagggaagaacttaccagaaatggctgcagtattcttccaaccacaagaaagctggctaac

SEQ ID NO: 44148 - DNA, 377 bp, Glycine max
  unsure (1)..(377): unsure at all n locations
  Clone ID: PAT_MRT3847_139864C.1
tcgaattgagccnncnnngngcgngngngnagagagagaagatttaaaggggccctccatcaccacacgaaacaacaagggagtgccagggaagccccacaagaagaagcacgagtggcacccgcaccggccccagtggcgacgctgccaccccccggcaagggccacccaaccccaaagaacgaggtcgcaaaccgaggggggtgccaccacaacccggcggagagccacgagagccccactgacggcccacctccaaaagcccaaaaggcatggctggaggcccttccggactcaaattcccacaccttccgccctccggtcaagcactccgactgcccgccggacaccaaaagcgaaaccctgagctcccacac

SEQ ID NO: 44149 - DNA, 408 bp, Glycine max
  Clone ID: PAT_MRT3847_139865C.1
caaatccttatcaataaaaccatgaggccaatttaaaatttttttagtccccacccaaaagtttttcaaaggaaacttccgggaatgtaggccgaccaaaatcataatttaatgaaattctaccccatcgttatttaaatttgaggggaattttgatgtatccgtcgcacacgttttacctttaaaatgaaattcccggggcaaggtttcaagtaccttaggacaggacgtaaaaaaaaacttgataaatggagtagatagctcgggacattaagtcacttaactcttgacctcttttaaggcatttgcaacggccaggattgttggatcagcagcgcctgccttggggtaggctaagaccacgccagcatcataacccttgctttcaccaacaaaaaattggaaatc

SEQ ID NO: 44150 - DNA, 226 bp, Glycine max
  Clone ID: PAT_MRT3847_139866C.1
caagtggtatggacctgacataaagatcttcttgcctgagggactcttggaccgatccgaaatcccacattacttgaccggagaagtccctggagactatggatatgacccatttggtattatcaagaagccagaagactctgccagatctctggcctttgtagtgatacatgccagatggacaatgtctggcgccgcaggatccatgatgactgagtcacttagc

SEQ ID NO: 44151 - DNA, 566 bp, Glycine max
  unsure (1)..(566): unsure at all n locations
  Clone ID: PAT_MRT3847_139867C.1
ggtccggnaatctcccggngtacgaccccacgancgtcacgattgctctatgttataactaacttacgagtctaaggagcggaaggggtcggggtcttgaataaataaaaaaataaaaaagtgggaagagggtttgtataatcgattatgcaaattttcatatgaaaatttgtataatcgattatgcaaattttcatatgaaaacacgtacgtggatcggtggatcggtggatcggcggatgcggtgggaattttatttggaaattttttgcgctcctctctcatggtcactgttttaaaaaaaaaaaaatgcaaaagctcatattatttcacttaggataatttcaccactacaacttgggatatacttaaaaacatgagggttaatatactctgttgatgtcctatctaaaacatggtcacggttaactttatcagacttttgccttatttttggatgcattttatgtgttgtggtgctttctgtctgttttgctctctctcttcctatccctgaaacggagcctgaccacgctgctgattggtatcaattgcttctggggatg

SEQ ID NO: 44152 - DNA, 270 bp, Glycine max
  unsure (1)..(270): unsure at all n locations
  Clone ID: PAT_MRT3847_139868C.1
caggggcattatgagntgcgactgttcttgaatanttagacaaggctcttaaggcnaaggatcgnacaagatctttagcnnattatttngatgtgatnnnaggaactagtactggtggcntcatgactgctatgtnagnagcnccaaantcatctantgccaanagtcctctctttannccctcggaagtcgtgcnnttctataagaannanggtgctaaaatanttgaacctagagcntngtangatcttgacaaatgtccnnnatttc

SEQ ID NO: 44153 - DNA, 435 bp, Glycine max
  unsure (1)..(435): unsure at all n locations
  Clone ID: PAT_MRT3847_139869C.1
cggaagccgggtcgagagatttactgtgtctagcgttatgctattagcggcctataatgtacattggaagttgcttttgtcttgctcatagatttgagtacagaagatcgctggttaatagttagttagtcgtgcgtgttttagcggtatttatgtggttgatattttgaaatgattattactgaatttatcaaataacagtgacttctcaattgtttcaactcaaataactctgtccttcccattaggtgggattggttaaatgcaaagatagacaatttaccccgtaatccctcttaattggtttaacctataattttcttggctctccctttacctttaactattggattatttttcatctagttgccctcccttactggtgcttctatgagttntgtccacacatgcccaaagccccaaactatctaaaga

SEQ ID NO: 44154 - DNA, 803 bp, Glycine max
  unsure (1)..(803): unsure at all n locations
  Clone ID: PAT_MRT3847_13986C.1
gcttgcatgcctgcagtacgcgcaaattggaccttctttgcctgtacgcactgtgatttctgaacccgaccgttgatcacttgtcacttgtctttctctctcccatcattcatgtgacgtgccaagacacttacttgatcatttcttccatccacgtacctccctcgtgacaatgctaaatattcggaactaaaattgctatgtactagtagtatcttcttatacactcctgtctcttattttttatacttcaaagttatgaaattaatttaatacgtaaagattttttaagtagattctgtttctcaaccaaagttttttttttatatatatatacatacgattgaaaatcgaactcctattaacatgacagaactttgttggtatatactcttctctttcaattaatcaatgaacatataaaaaatagtttatcttattaatcttattgaggtggccccatgtcccttcgattctcataaatgtgtatggtcatagcccttccgtcgtttttgtgtctgaggcactttgaacaaaccccacacatgcgatcctatgtaggctccacgtaccttcttctcatttaatcctagccatgcttatgaatacttatttgaaattgaagactaaaaaagaaaaggagtgatgtgatggagaggtgaccgtggacggtggtggtggtgaagttatattgtctggcanagagagagagagagagagggtgatggttagtggccaccacttcaccccctctcatattcctaagtttgaactntgatctttcacttcngatttgttcatgc

SEQ ID NO: 44155 - DNA, 564 bp, Glycine max
  Clone ID: PAT_MRT3847_139870C.1
ggagaacaatagagttttattttatttttgctaatttttttaaaaaaaacaatgttacattatttattataacccttacacgtcaatatattgatagtaatatatgatggattgttgaatttattttttaaaatattttcatattaaactatttattttaatcgttactttatttatatgatttatctatcattttaattttatagttcaagatattttaaccattatactaatctataaatattaataatgtaagatattttaaccattatactaatctataaatattaataatgtaaattatttcatttgatgttcatattttattgaacaattttagccttaaatcacttgtctaaatttcaattttttcttataatctacacgcattaactttccattacttttatattattagttttttttattatgtcatttttaattaactatatttaacttctatattttttattattatttaaaaaatttagaaaagcactttccctagtcactgtaatgacgtgttgtctgtttaagtgtatgctatttttgcactttcctcgt

SEQ ID NO: 44156 - DNA, 491 bp, Glycine max
  Clone ID: PAT_MRT3847_139871C.1
ttttgtttttttttaatttttttggggggttttaaattttttttttttttttttttttttacaaagcaaaaccaatctttttttaatttattgggggccccccccaaacaaaatttaaaaactttagagctcctttccaaccccaaaaattctgcggggcccgtttttatttccaaaagtttttaacccccatgggcccctttatctcccttaaattaaaatggcgaaattttttttccccaaacccccaaaggggaaaaatgaaacttcataaaccccctactttttttttttatataaaaatcatggccccaaaaaaaccccataatgggtcccattggggcccctcccataaaacccggttctccccggaagaaattttttttttaaaaaatcccaaaaaaagcccctggaaaccccccgaggaaaaaatttggtaaaatccttttttttgtaaaaggtcggctcttttttaatggcaaattttgtta

SEQ ID NO: 44157 - DNA, 144 bp, Glycine max
  Clone ID: PAT_MRT3847_139872C.1
tttattatttttatattaacacgccattatatcaatcgaaatgggggtaattctttggatatttagtaaaatcatccctagttccaccgaattcaaaaatgtgtgggggaagaaagtgaattttactggcttatgctcattcag

SEQ ID NO: 44158 - DNA, 250 bp, Glycine max
  Clone ID: PAT_MRT3847_139873C.1
gagctttcaatatcggcggccgcccttttatattcttgggtgggttttttttataatttgttccggctaactccatcttctcttttccttctctcttcttcatatttttaaaaaccaagcagcagcttcctcaggggctccaaatttaaaaccccaaccctgggaaaccagggcgcggacccattcacccaatattcgggggagacgggccacatctaacaaaaatacggaaaacaggggggggggaggc

SEQ ID NO: 44159 - DNA, 376 bp, Glycine max
  Clone ID: PAT_MRT3847_139874C.1
cccacgcgtccgaccacgcgtgcgcccacgcgtccgcccacgcgtccgacggctgcgagaagacgacagaagggttcggctgccagatgacgacagaagggttcggctgcgagaagacgacagaagggttcggctgcgataagacgacagaagggtacgggtgtgagaagacgacagaagggtacggctgcgataaggactacagatgggttcagctgccagaacacgactgaatgttactgatgcgacaagactacggatgggtacggctgggaaaagacgacatatgggtacggctgcgagaagacgacagaagaagccatagattctctatgaattgctttggatgaggagaatgcgtgtgcttaggcggctt

SEQ ID NO: 44160 - DNA, 308 bp, Glycine max
  Clone ID: PAT_MRT3847_139875C.1
ggaagaagaagaagaagaaagagaagcaaggagaaagagaacggttagaaggccaagaagcatggcttcactcaagaacaagaaaccctaatacccgcttccgttaaatcccaaccaataccaactccttatcaaaagggtaaaatattctcctcctccaagagaccgcagagaggtacattttccgctcttttctcggaaaattgacgctttgtgctcatattgtgcgcgatatcacccaatttaccctgtgcaggggttttatatcttcacactgtagccttttctctctctctctctatctctct

SEQ ID NO: 44161 - DNA, 378 bp, Glycine max
  Clone ID: PAT_MRT3847_139876C.1
cttaaccatcacttatgaaagctctctttaacgattttcaccaatgtcactcacacacgaatcagggttcacacccacattccaacgcattctgtctggattgcatcccaccatgtagcttaaagggcctcaaattaaggcacccattatggtccttaaaacggtccttgttctaaccagtgccacagcttatgacgtcaacgctatataatcacggaaactcgatgagaccactcaagggtctgacagaaaccgtgctgaagaaaagtgagacatcatgtgctgataccgcttatgaggcgtcacctgctactgatctacgagcagaggctccacaaccgactacgacagataatacacctgcatctcagtattgtc

SEQ ID NO: 44162 - DNA, 483 bp, Glycine max
  Clone ID: PAT_MRT3847_139877C.1
tggaatgattaccgaaagagaaaaaggggaaaagaaaattatagcataagctgtattcataagctaaagaaatttcatttcggtgttatcaatttgctgtgtgttcttcttctgtatcgaatcaccgtcgcgcgattttccatctccacgacttcgaggtacacgacgatggttcataatgagaacccactttggttttgattattgttgctgttgttgttaacttgttattgtatgttctagggtttagctggtttgaagcttaagaaacgaaaccctagcttgcaaaaagtggttgttaaggaatggcctcttacaggcccttccctcctcaatcgagtcaaattccaaaccctatcccaggtgggaatcatcagtataataataatcaaaatcaaaattggggtgcttatggagatccctctacttcttcattcccccaaacccctcccaattccaagatcatcaaaatcaacaacatca

SEQ ID NO: 44163 - DNA, 110 bp, Glycine max
  Clone ID: PAT_MRT3847_139878C.1
ggttatggttcttaaccatatcggcctccgtgttgtcttggatgttgtctacaatcatttgtaatgaagtgggccttttgatgaacattctgtccttgataagattgttc

SEQ ID NO: 44164 - DNA, 506 bp, Glycine max
  Clone ID: PAT_MRT3847_139879C.1
gaattctttctgataagaggaagtcagatcgcgaggtagtggatgtatttcgttaattttaattttattcttcatcaaattcaatttcctaaatcctcgccacgaggtttgacagtgttccgaacaatttaatgattctcctcgtaaatgccgtgaattgttctcaatgatgttgaaattttattgtggtttcttccaagcattttgaagtcaaagcttttagtgtgttgaacccagaagttttcataccgtcgtcagcatcatggttcttcagtgtaggagttattcaagactttatactcgttgcgaaagtaaggtgaagtatacgcccttagcaaagcatccattgaaactggcaaatcgagtcgggtctggaggaaaaggaccgagtcaagcttactgtttgcaggaaatgttcaacatgttcagctgtctgaagaaaaacgagttcagccaaagtccttgtagtaatgagatcactacttttcaaacgtgtgcggagcaac

SEQ ID NO: 44165 - DNA, 463 bp, Glycine max
  Clone ID: PAT_MRT3847_13987C.1
aattaaggggaaacaggacagggggccaaaaaaattaacacagcaccccattatgggaagccccttaaaaaaaaaaagggtttggaaaaattcttcccaaaccaaattaaaaacaaaacccctttatttaaaaacatgggcatttcggaaatcccaaaaaaaaaaaaaaaccccccccaaccctcgggataaaaaaaagggccccccaacaccattatttttattattaaatccacagaggggcgggaacccaaaacaccccaattttacaaaaaccccgcggggacccattacaaaaaaaacttccttgccccggggggaacaaaaaaaactggaacaaacaagcccctaaaggaaacttaggcccccaaccctaaagttcccccggggaaaacaaaaagggcccaaggataacaaggggggccccaaaaacaatggggggttaaaccgggggggggaaaaa

SEQ ID NO: 44166 - DNA, 433 bp, Glycine max
  Clone ID: PAT_MRT3847_139880C.1
ggagtgctaacaatatatttttttaacacccttgataaaaaaatatattctccgacaccgccttaaagcaacatatgtgatattttgatcaacgtgcccccctttctatttaactgtgtgtttccttctaattgtcttaaaagttaaaaaatgattttggtacttgttaattgaaaattttgttttaatgtaaatgtatagttaaagggttataaggttgactttgtgtggagcaagaagggagggaatgagagattataagttcgaatcatttcgttaataaaaattaaaaactaatattgatcgataaaaaaaatataattttaattaatttaaacatatattttaatcaattaaaattaaactaactagaaaaagttataagggcatgtcaattatatctttcacatgagaatgtaaatttggaattacc

SEQ ID NO: 44167 - DNA, 163 bp, Glycine max
  Clone ID: PAT_MRT3847_139881C.1
gcaggattttgctgtgtcaataaccgccgaaaaggtggcgaagtcatgacggtgttggtgatcaccaacacacttcaggtgaccaattgcccttgattcgatgaaggatcccgtgacagttgtaacagggatgaccttatgatagggagagagtgcagaggtt

SEQ ID NO: 44168 - DNA, 1323 bp, Glycine max
  Clone ID: PAT_MRT3847_139882C.1
gtccacgtgtaccgcaacttcgaccgcgggatccacggcaagggcgtcgccgtgaaattcgccggagatggttcgacaccgaacaaggctttgttgatgcgcgcagaaacgaacatgatgctgatgagtcccttaaacgacggaaagccccacgcttcgaagcttcaccagctcgacattgaaacggggaagattgttacggagtggaagtttggaaaagacggtgctgacttaacgatgagggatatcaccaatgacaccaaagggtcgcagttggacccttcggagtcaacgtttttggggctggatgataaccggttgtgccagtgggacatgagggataggaagggaattgttcagaacattgccacggcgagttcttctcccgttttgcattggagccaggggcatcagttttccagagggactaactttcagtgctttgcgaccaccggtgatgggtccattgttgtggggtctcttgatgggaagataaggttgtactcgaagacgtcgatgaggatggctaagacagcatttcctgggcttggttcgccgattactagtgttgatgttacttatgatggcaagtgggtgcttggcactacggatacctacttggtgctcatttgtaccttgtttacggataaagatgggaggacgaagaccggatttagtggtagaatggggaacaggatacctgctccgaggctcttgaagttgactcctcttgattcgcatttggctggcgcgaacaataagtttcacggtggccatttctcgtgggtcactgagaatggtaaacaagaacgccaccttgttgcaactgtgggcaagtttagtgtgatatgggattttcagcaggtgaagaacagtgctcatgaatgttacaggaatcaagaagggctgaagagctgttactgttacaagataatattgaaggatgagtccattgtagaatcgcgatttatgcacgacaaatttgctgttagtgactctccagaagctccgttggtggtggcaactcctatgaaagtcagctcaatcagcatgtctggaaagcgacatggttaaacctctgtttacattttttctttaaaggtttcaaatttctagtgttaggagtgtctttgaagtttgaacaatatacttgcttgtatccaagtttgagatgctgttatttttctgtaaagcacgttttaggttgccctgtatgtattttcttcttttttgtgattagtttgggtttgctgactgaattgtccttttttattacaaataataaaataattgcttatgaagaagaggcaattccacccttaa

SEQ ID NO: 44169 - DNA, 337 bp, Glycine max
  Clone ID: PAT_MRT3847_139883C.1
ttttgttttatagtacttaaattatcttggttgttttggttgcattcttgaatttgatcattatctttgagaaattttgtacaacaggcaagggggggggcataaactactatgcaaaaacatgccctaatgtggagtacatagttgtcaaggaaatttaggatgccaaagctagggacagatctgttacagcagcaattctgcgaatgcactctcacgattgttttgctcgggggtgtgatgcctctgtgctgctaaaggcacaacgaagcaagagatcatgaaaagactggccaccaaatgtaagtttgcatgccctctatgctagtgaggcacc

SEQ ID NO: 44170 - DNA, 436 bp, Glycine max
  Clone ID: PAT_MRT3847_139884C.1
aaatttctatttttgatttggagatttgttttaatgttctacttacttttaggtttcatattctcttacaacaccttagaagtgaatcactgaatttgcttcgcactgaaaaatactatgttttttatgccctgggtgcacttctattagaggaccttgtatgtctcccgctgggtgctttctgagagatattgagccttacttgttactcggctggcttagaagattaagaccgggccacatgtacagaatttatatatcattggctggcgatgatttctctccggcgtgaaacacttcccccccaaagctgaaggctaaattttcgggctccctttttacaaacttggaacgggagcccccggatgaatctccacccccactggaatggcagttgcaggaaacagtgcaaccccagcctggactttctaaaaac

SEQ ID NO: 44171 - DNA, 233 bp, Glycine max
  Clone ID: PAT_MRT3847_139885C.1
gtgggaacatatttattgtatataggacagcgcttgaaagaggggaaagaaatacaaaagaccacaaagacaatgcaaaaagacgaaattgaaactaatataacagacaataacaagaaacaagaaaagggaacaggagaaggaaagcgaagaaagaacggccaaaccaactctaacggccaagataggccctcgaggaggaccaaggacaaggagcaccacacgtggagcaa

SEQ ID NO: 44172 - DNA, 416 bp, Glycine max
  Clone ID: PAT_MRT3847_139886C.1
aattcccgtttcgacgagctcacttttttgcggccgccctttcttttttttttgggggttttattaaaaaattattgggtttatgcatcaaatgacttattgcaacaagataaaataattgtactactctattctatccggaacttagtctacagtcacaaaataaccccaactataaccaaccatagattcaccactgagtcaacacaaaaaattgaaaggttttcaattactagatcaaaacaacatacaacttgttctacacaagaacataattttctccctgcaaaaaacatgaagacgtacgctacccacacgtgcctgagaataaaataattaaaccactttattgactaccaatggccaacagtatgatatataatatttcgcgcatatataattgcccctagactttt

SEQ ID NO: 44173 - DNA, 175 bp, Glycine max
  Clone ID: PAT_MRT3847_139887C.1
ttgaaatcataactgggaacaaaagctatactttttttgctggaataataaactggaaaaaaagggcgccttccttttttgccaatgtttgaatccacctttaataaaaacccatgtccgggaatctttttttttaaacccatttttaaccggtcaaaataaagtaccttaaaaa

SEQ ID NO: 44174 - DNA, 1594 bp, Glycine max
  Clone ID: PAT_MRT3847_139888C.1
cgcccttggaccgtctctctctggtggccgagcgcccccccagtgcgtttgccacacgaagacgcctacggctgcgagaagtcgaaagaagaagatcttgagtaagtaatatctcccactcattcacttactttgacattcacattcagaacacaagcagaatgcagagaggcacgccggtgagaaagccacacaccaacacctccgatctcctcacttggtcggaaactcctccgccggattccgccgccgccgccaccactcgctctggccagccttccgatagaatcagtaaggttctccacggcggccagctcaccgacgaagaagctcagacgctagccaagagcaaaccatgctcagggtataaaatgaaagaaatgactggaagtggtatatttgctgccaatggggaagattctgcatcagaagccaattctgcaaatttgaataacagaacaagcatacgcatgtgtcagcaagcgatgaatggaattagtcagatatcattcagcactgacgaaagcatttctcctaaaaaacctacctcaatacctgaggtagcaaagcagcgtgaactgagtgggactatgcaaagtgattcggacacaaagagtaagaagcaaatatcaaatgccaagaccaaggagctcagtggaaatgacatatttggccctcctcctgaaatcctgccccgttcagtggcagctgcacgcactttggaatcaaaggaaagtaaagacatgggagagcctcttcccagaaaagcaccagttgagaagacggcaaagaagcctgcaggtggtcaaagtaacatcttatttggtgaagcatccgttgagaagacagcaaagaagatacataaccagaagttcgcggagctgacaggcaataatattttccaaggagatgttcctccaggctcagctgagaagcctctgagcagggctaagctcagagaaatgactggcagtgacatatttgctgatggaaagacagaaatcaaagaccctgtgcgaggtgcccggaaaccccctggtggagagagcagcattgccttggtttaagttatttttaatttacaaaaaatactagcaatatattctctaatatttattttttctgacatactttctattgatagaaattcgcgtgagtcttgctaaatatgtgactctcatccacaaacaagtgaaactcacatgaatttcagtcaatgaaagaaagcagataaaaaaagtattagaaaatgtgttgttagctttcctctttaacttatcccctttgacataggaattctataaattcgtctgaacttccatgtttttctgtagaagggtcagtgtgttcgattatcagcattgtaagtttcaactttcaatgaacgtggcataacctttacatttgaatgatgaaacgcggtttttgtgttcatttatgcctgggcgggggtcggaccgcgccgggagaggtggcgggggcgacaagtgcgtcgtgggggggcggggcggtgggaccggccgtgttgcgggcggctgtccgacgtagacttgggactagaacattcttccatgaaatcggcccctcttggacc

SEQ ID NO: 44175 - DNA, 537 bp, Glycine max
  Clone ID: PAT_MRT3847_139889C.1
ttcttttttttttttttttttttttttttttttttttttttttttttttattttttgtaatgggcttatatatcattttattgcaaaacattaacagggtcctttttaacagtggggggagggggaaaaaaaaaagcacccaaaaataaggggcaaaaaattaaatttaaagccttaggcactggggcttgggcggatggaaaagaacatcaaacccctaaaaccgaaaaaaaagcaaaaaaaagagggggccccggtttaaaggaaccccacgccaaatttttaaaaaccccaaaaaaaaaaggaaccaaagaaaacgggggggaagaacccttccctcatttcttttaaaagaaaaggaacggaactcccccccccccaaggttctcagttcaaaaatcaaaagatttcttttgatgaaaggcaaaaagaaaaaacattggaagaagcaaaagctgcccttccgaaattaatacaaaaagaaaagtgtacaatttgcagaaataacatgctggacgggaagacctcttctccttt

SEQ ID NO: 44176 - DNA, 510 bp, Glycine max
  Clone ID: PAT_MRT3847_13988C.1
gaggagacacagtgcgggagtgtgcgagtgtggctgtgcgtgggtgcgtgtgtgaccgggatgtcttcatatcaggtgttaccttgtccttaaacttgttatgttgctttctttagtgttttgctcagggctgtcttttagcggagatgctattggcttaatatctgttttggtgaatctcttatcctatccacctctcaattagagttactttttcatttataaattcaaatttcaacaatttgtgtccttcctcctgactctagaatcctgataaaagtgctattggttgtgttttactttttctagatataaattgaagtttgttttatcaaagtcaattctaaaataccgagttagctccaaaaatttattgtattaatggaaaatctttatgttgaattcaaattttctggctattgactcttgtttccatgattaaattgaaagtctttttcttttaacttggacaatgcagtgaaggaaattctcaagctctgccctcctgag

SEQ ID NO: 44177 - DNA, 356 bp, Glycine max
  Clone ID: PAT_MRT3847_139890C.1
ccctaatgtcaagacgatttcacttagaagtttgattgaccgctcaattattgagagttttggggagaaagggagaatttgtattaccagtagagtttatccctcgatgtctatagacaaaaatgcacatctttatgtgttcaacaatggaagccagagtgtggtgatctctgaactgaatgcttggagcatgaagcaagcagaatttagttaagaagaaagcataaataagctgtagctaagttggataatcctttaacattttatcttgatactttaatattgtatgtgatattctctgtgattgtttcatatggagaataatttgagcaacttgaacttttacaacttaaaaa

SEQ ID NO: 44178 - DNA, 278 bp, Glycine max
  Clone ID: PAT_MRT3847_139891C.1
gggggaggttcattttttttgtttattatttatcttttttttttttttgaaactttcactatttctttttcaaaaaaacatatcaattgtttgacttaaaatgcaggacctaagacaaacaaataaagatagatacactgtctctttttggcctacaaaaaaccagccatacccaaaacttccacagtttgcatccaatttactaaaaaaaatcggccaataacaaaaaacccagagcaaaaaaaaatgtaatgcccacaaaaaaaagaccccaaaaa

SEQ ID NO: 44179 - DNA, 1585 bp, Glycine max
  Clone ID: PAT_MRT3847_139892C.1
cgggatgtgtggcccaaataaacgaaacaggcgttgggttgagaatggaggggggcgcgtaagaaaatctgaagcccgaataaatttaaggaggagggatcagagaggtgttgacacttccattttacgaaaactcaattaatgtgaaatcaggtcaacacctgatttcagttcttttgtattcaacagagggaacgaccgagcaaagcaaatggggtgctcattctccggtctgaatgccttatacgactccgttaacggcggaggcgatgtttggatcaacgagaaccgtttccgcatcgttcgccagctcggagaaggtggcttcgcctacgtctacctcgtcaaggagactcctaatgattccgccgtcgctgctggcctctccaagaagctcaaaggctcctctcatctctccgatgacgggacttatgctatgaaaaaggtcctcattcagaacaatgaacaactggagttggttagggaggagatccgtgtttcatcactgttcaatcatcccaatctgctgccacttcttgaacatgcgatcatttctgtcaagcctacccaagaaacatcttggaaccatgaagcatatttgttgtttccagttcatttggatggaacattgctagacaatgccaagataatgaaagccaagaaggaattctattccacctcagatgtgcttcaaatatttcgtcagctttgtgcaggactcaagcacatgcacagttttgatcctcctcatgctcataatgatgtcaaacctggtaatgttctcataacacatagaaaaggacaaccacctcttgccatactgatggattttggcagtgctcgtccggcgaggaagcaaattagctccaggtcagaggcccttcagttgcaggaatgggcatctgaacattgctctgctcctttccgagctcctgagctgtgggattgcccaagccaagctgatatagatgagaggactgacatttggtcgctaggatgcacattatatgcaataatgtatggggtatctccatttgaatatgcacttggagagtctggtggaagcctgcaattggctattgtaaatgcacaggtcaaatggccagcaggacccaagcctccatatccagaagctcttcatcagttcgtgtcatggatgcttcagccaacggcttccatgcggcccaggatagatgatatcattatccatgttgacaagttagttgcgaagttctctcaatgagttactatggaagtgagaagtggggcttgagatttttatgttgcagtcgtttaaaaaaattcgtgtgcatttgccgtccagttatatgttaatggatagaaaagcaatagcaattcctcgcctgacggagttaaccatatatttatatgtatcttcgattttggtggtagtctaggtagtcgggcgttggctttaaagtattgtttgtcatttctacataattttgtttcttgtaatttatgaaatggccaatctccctgtgtcttcagaatttatcagcataaatggaatatcatttatttattggggtaaaaaaagcaaaaaaatgaaaaaaaaccccaa

SEQ ID NO: 44180 - DNA, 305 bp, Glycine max
  Clone ID: PAT_MRT3847_139893C.1
tcgatccgttgctagaacataacgtgcatacgatttccaaatatgatccatgtctgagacctaaaggttacccattactgaccattcaaaggatgcactgatcagatgtctatcatcatctatggatataatcataatctaatctgatgcgtatgatccacacaatgttctggtacatcaactacctcttcaaatttttcggataatatcctatccaagtcttatgattggatcactctctagttcaacgagctctgttaacgattatgcatatggtctggtactattcagactatagtaattac

SEQ ID NO: 44181 - DNA, 510 bp, Glycine max
  Clone ID: PAT_MRT3847_139894C.1
ggacaagaaaaacttcaattttactaatttactattaaaacaacccctcacaaaaaaaactttgacggaaaggaagggaatattaagctaaacactggtcccataaccaaaaaatgtttttttttataaactataattaggcaatcaaaaaaaaaaaaaaaagattttcctcaaagcaaaaaaaaaaaaaaaacctttccccccccccaggggaaagggcaaaattttgttagtgggaaaaaaaaccacgggaaaggattggcggggccatcccccactgcaaagggaatggggaggggaagttcaggaggtaaatgacgggaaaaagaatcaacgggagaagaaacaccattttatttttggataaactttgccacttccatggcccgggattttaccttgggcgggggcatgaatttaagggaattggaaaaattctcaaaactggcctgaaatatgggaatgggagcgggccctacccctttctgatttattctatccccccaaaaa

SEQ ID NO: 44182 - DNA, 484 bp, Glycine max
  Clone ID: PAT_MRT3847_139895C.1
cccacgctaacgcccacgcgtccggccacgcgtccggcggggcgttcgtgtgtttgaagatgcgaagatgacttcaccctacattaaatgtacaggctctttcttaatagcatttggaaatatggctgatgacaccattaatgttgagggtcatccccacaagctggtgcagttcggagagattcaggaaaaagttgtattgaagtattcacaagaggaatttcttacagcttggtcaactcatgtgcgtcctgcaacaactctgtaggctgatgggcgtacatatttgtatgctatggtgcatgatagcacagtgtctacaataccaggtgattgtgtcattggtgttaggatggcaaccataaacaatatgtgtgcatatgggctcaatgctggaatttcaggtgtctgactggtgggcaccattcatgagtccattagacagcaaacctgtttggaatcaaatggcaacagtgagaacacc

SEQ ID NO: 44183 - DNA, 396 bp, Glycine max
  Clone ID: PAT_MRT3847_139896C.1
cttgggggggggggggggggggggggggggggggggggggggggggggggaaatcccaaatcactaggataaggtagttagtcctgaataagtggagagaatgaagtgagagggaaattgacacaaacgaatgtggtgccttaaggttaattataggcctcggggggtggtaaaaggtgggcccaaaaaaagttccaggttaaacaattattagaagaggaaggaaaatggatcggattaattaattaattcacacccggtgatggatattaagtagttaaccccttatatgtatgggtaatttattaaaaggtggggggttgccctttaaggtagatgtaaagctggagatacagaccacacatggcacacctgatttataattaaaaaggacct

SEQ ID NO: 44184 - DNA, 283 bp, Glycine max
  unsure (1)..(283): unsure at all n locations
  Clone ID: PAT_MRT3847_139897C.1
gggtaacnttcctcctttggtggttggtggtgttggtttttcctcctcaactgaaaatggcntgcngcggtgggaactgtgggtgcnggaggcnctgcaaatgcngcaaanggtgcngaaggctgcaagatgtaaccaagacttgagctacaccgaggtcnaacaacaaccgagaccttggtcatgggagtggcacagttaaggctcaattcgagagtgctgaaatgggtgttcccgctgagaacgatggctgcaaatgtggagctaactgcactgcaacccc

SEQ ID NO: 44185 - DNA, 254 bp, Glycine max
  Clone ID: PAT_MRT3847_139898C.1
tctcggctgcgatcagatcacatacgggggcacacgtttgttgagactaacttggagcaatactttggagatggtagtggctgttttgattgttggctacacttctggttgcacatgactgccgtggctcttacgaccagatgttccctctgctagtggcaacttggattattaagcaatacatccgtgaggcgtcatgtgccatttggaggcttagcgtggaagcctactacgtagtctggtgtgcacactgt

SEQ ID NO: 44186 - DNA, 331 bp, Glycine max
  Clone ID: PAT_MRT3847_139899C.1
ggctaggggattgaagaaccatctcaagaggctcaatgctcctaagcattggatgcttgacacactgggagattcattcccacccaaaccctcatcttaacctcacatatctaaaaaataccttcccctcatactcatcctactaaaccttctaaattatactctaacttaccataaaaccatccctattttaatacacacacatcttcttattaataaaaaactcaaaactaacaatacttaccctactaatttcataaattttatttcatttcctacaaccaatcataacttccatctactctttaacactaaacacctattccatcta

SEQ ID NO: 44187 - DNA, 442 bp, Glycine max
  Clone ID: PAT_MRT3847_13989C.1
ctaccagccggcgcaaaaaatgtggactcatagcggaacatatatgattgtatttgcaaataccagcctgcaaattgaaagcttgtatgctcgctggattgattaatacatggcttacttgggggtgcatgaaaacaatcctataggataattgtgtctaaaattttacctgtgctttttggttatatgcacagggaacattcgatcttgaaaaatatgagttaaaaagaaactttttaactccatgatttttaatattacttatgagcattacttcatttgcatttatgttaaatttaaaaatatcagctaatgtaattctaaataaatgttcttatatttagtgcgatttttaggaaattcaattccaaagctaccagaaaaagaagctgctgttggaataattactatgggggatgtcattgaatagctattacaggga

SEQ ID NO: 44188 - DNA, 472 bp, Glycine max
  Clone ID: PAT_MRT3847_1398C.1
ataaacaccgcgaggaaaacgaaggaccccgggggcctttaagagacaagtcccgtagcaccccaaggccagccggccgaaaaaggaccctctccgaaagaacactggctaaggtgcccggactccggaggagaaatgcccaagctggaggcttgctgaggaagcacacaacaatctgggctaagagaccaaacctgaagagggcgttgaagcaacaaaggaaaacatccatggcgaacaatatagaccagactccaaaacagttaaccaacaagctgacttttatgccagagacctcgaagaccatcccaaggacacacttgggatcagaatagagggcaccgcaccaactaaaaaggcatacgaccaaaaacatggatatggggtggagaaaatgaacacgaccctgtaggatgaatggagaaacaagggcaatgcacccgcactgcccgagactatgaagaaaaacaac

SEQ ID NO: 44189 - DNA, 302 bp, Glycine max
  Clone ID: PAT_MRT3847_139900C.1
cacagggaaaacaaaacaaaaatactggaatttctacgtaaatcctgggagattgataggagaactgaatggtcaatatggatggtgtactcaaaggttgcaatgcctcgtcaaaatatgagcaatggagttgaggggacatcattgtcccatggcatgcatagaagttcaataattacaaggaggtttactgatgatcctattcaaactgcagcaatgcgtgcagaacttcacaggcgaggaatagctcaaatgaggatcaacaatcggtcacttcaagatatgtatatatttggagatcc

SEQ ID NO: 44190 - DNA, 281 bp, Glycine max
  Clone ID: PAT_MRT3847_139901C.1
tcaacacactccacggttctctcaaccctgtttgccacttaggcctagatccatggcctccttcagcagcatatgccactctcggtgagagtcaactgcaaccctataccactcttcagcctatggctgcttggacaatctgcaggagcacaatagcaaattggaaatccagtttcacaaggatcttaggatcagggtattgtcgtaaatttggtagcttgtatctcttctggattgcaaagtagcaggttttccacctggagaattgtcatgctgtgcaa

SEQ ID NO: 44191 - DNA, 317 bp, Glycine max
  Clone ID: PAT_MRT3847_139902C.1
gtcgcatgcacgcgtacgtaagctcggaattcggctcgagaggcgaatgtatcatacctgtcttactttgcttctctcttgatttaccacagtttgttcagttacgttttcatgaattaccaggagtaaatttgaacaaacacatgtgaataacttcctgtaaatgtgttttataacaagagtgtgctaaactattttctaaaattacttgtgcactttggggatttttctgtagctgtgttttgtatgctctggattcataactggactttggcaaatagtaaacctgttatcttgttaaaacctaaaatttaaga

SEQ ID NO: 44192 - DNA, 368 bp, Glycine max
  Clone ID: PAT_MRT3847_139903C.1
agttctaatccattaattttcattgaagggggaaaacagaacccaaaaatgcgggatgatgaaatttaataaagcaaaaacaaatgggaatggtttttaaatacaaacaaactaaggggggtggcgggtacaaatgcttagcaaatttatcacacttagaagcctgggggcttgtaagcatttgaatctgaagtactgtacttggcaaactttgtcttattccattatccggcttaagccgttggggtgttcaataattagccttttgaagttcacttaacaccggctaacgtttagtgcaaccaaactttggcagttttcacataggttcagtagtgttcttcccctaatcctggcgacctggtgtg

SEQ ID NO: 44193 - DNA, 387 bp, Glycine max
  Clone ID: PAT_MRT3847_139904C.1
gcccttgcttggggggaacacccaaatcattcaataatttcttgcataactgcaccgtatgaaaaaaacatagatatcaatcacatcatcagcctcagattttagatggggaatagacaaagagagtataaataaatacctgtttatacacagaaccatctccatacgacttccttaattctactacatacaatgatggacttatttcaaacacctgttatatttgaaatgaagttagtttcttagcatcagcaaattatgcagacattgagattagtttacgatcgattagctcattctaaacatacattacctctactaccactgagaggcagccgagagttttgtgcaccttgttctctcgcatcactttcctcgagccgaatt

SEQ ID NO: 44194 - DNA, 187 bp, Glycine max
  Clone ID: PAT_MRT3847_139905C.1
ggccgtttccccccgtattctatcaaagcagaatctcacttctttgtcttctcttggcccatacaagacatccacgaacaattacaagatgctcttcaccataacaagatgcagttcacggaactagagcatggagtgtggccgctagtgctcgaattgcgtaggccctgcaactccaaggcattag

SEQ ID NO: 44195 - DNA, 357 bp, Glycine max
  Clone ID: PAT_MRT3847_139906C.1
actagaaaagagacaccacgtttcggagtggaaccaacacttacaacatgtgaccccaggagcggtttaacataacacctcaccaatgcacctcaacgtggtaaactttaatggagtacatctcacttaaactaattgagaagagaaaccgccgccaattcaagcgagtaaagctctttctatcactccagtgcaaaatgtcctgactaacctgatagaataaaacatgggtcttattcgctccaatgtatatcccacccgggtaaaggaaaccgtgcgactcaactggttgaccctgctgcaatgagctcttgatcctccatggctccaagcgagaagcataatgctccccatctt

SEQ ID NO: 44196 - DNA, 1365 bp, Glycine max
  Clone ID: PAT_MRT3847_139907C.1
gttggatcggttcaccgagatggagtatgagcattgtgtgaaggcctttgattcttatgttagtgctgctaagatgatggatgagttggtggggttctatggttggtgtaaagacacgggaattgcgaggtcttctgagtaccctgatgtgcagagaatcactgataagcttttggggactcttgagggtttcttgaaggagatgagttgtaggccaaagagtcctgagaggaagttagaagtgaaggtaactgtgaatgaatcacaaccagaggcagatatgaataaggtgaaggctcttccagcacctgagactgagagttttacacctccaccacccatgtcggttgcacagcctaataagatagctcccaattctcaaaagcagacgagtgatttggtggatctaagggaagatggggtttcggcggatgagcaagggaataagctagctttggcattgttctctggggctgcaactgtgaggacagaaggttcctgggaggcatttccatcaaatggggaatctgaagtgaaatctgcatgggagacaccagctgctgaagctgggaaagcagattgggaattggcattggtggagaatactagtaacttgtcaaggcaaaaggctgacttggcaggggggtttgatccacgttactgaatgggatgtatgatcaaggggctgtgaggcaacatgtgagcacaactcagctgagtggtgggagtgctagtagtgtggcactgcctggacccgggaagagcgccaccccggttctggctttgcctgctccggatggaactgttcaagctgtagggccgcaggatccgtttgcagcatcactgacggtgccgccgccttcatacgtgcaaatagcagacatggagaggaagcagcatttgcttgtgcaggaacaacagctgtggcagcagtatgggagggatgggatgcaagggcaattgggcttgtctagagttgctggtgctcctggttactatgctcctgccccgcaacctatgatgccttatggaatgccacaatttggaggcattgggcaacctggaggctattaccctgcaccttattattgaattgaagtgagggaggaacttgttttgagccaaactgtgttttttcatggtcttcaagctctccggaagatcggactctatttttctgtctttgcgtttgggatataaatgttcaaaatatgtttgaagagtttcatacttcgcaagttataaatgatatgtagtatatatgaaatatttaagtccttatttttggtcgttcatcactccctgccgtgtaattttgacacaaatctgatattctaatatcaatagtggactttcggataaaaa

SEQ ID NO: 44197 - DNA, 196 bp, Glycine max
  Clone ID: PAT_MRT3847_139908C.1
tttgtatttagctaccctcagtgagggtgtagctcaccccttcatgagctttgctgttcctttttcaaagaagagtaagaagggattggtattagtcctttgccgtatctgcttcacttgttagcgattaatacatgtcactccacctactaccaaacccctgatatgtttcattcccagtaatgcttatttcctt

SEQ ID NO: 44198 - DNA, 145 bp, Glycine max
  Clone ID: PAT_MRT3847_139909C.1
gggttaaattctttaataaaataatagactgtgtacttaatttcagtgcaataaatacccaacgcgagaatgggaaacaaaccaactaccctgcttattgaacaaatggagcggaccctgctgaacccaaagcgatgctttttta

SEQ ID NO: 44199 - DNA, 562 bp, Glycine max
  unsure (1)..(562): unsure at all n locations
  Clone ID: PAT_MRT3847_13990C.1
acctctagagcggccgctttntttttnnnatttttttttttttntncccttccataaaaatcaaaactacttaaattttggaacagtaaatagtttatctgttaatagtgtaaagtgtttttacactattatccaataacaaattgatatggtaagtttgttgatttttacataaactatcttaaaagtcattcctaccaggctaccatctatttggttgtcagtgtaagaaaatttaaaatgactatataaaaataaactcttttagaagcttttcaaaaaatgtgtttgactcgactccttttaagttttaaggagaagaaaaatccaaaaaagctaagctaaacactatctaaatttgcatcaagtaatagcatcccagccatacaaccacatcatacgcctacaggcatggcattgagtcatcatccaactcttttcattccatcctatgacaatatacaacaaatactattccaataattaatgtttttcatagaaattattaatatgatattatatataggaattgggaaagggaaaccatttttttttcacaaaa

SEQ ID NO: 44200 - DNA, 491 bp, Glycine max
  Clone ID: PAT_MRT3847_139910C.1
tacggctgcgagagacgacagaaggggacgtataatactactagtttgtgacccatttctggacaaagacacatctttgaatttcattggattcaattcatttgggtatcaatcaagattgaattgttgttgtcgtcgtcttggggatgggatcgtgcctgtagatgacgggggcacgggtgtgacgttgctgaagcagggacaggaccttgttattgtgaatgtagatgactccagagctgtattagctgcccaagatcgtagcaatggttctcttattgctgtccagttgagcactgaccacaagccacatcttccaagggaagcagagaggataaggatttgtaaaggaagggtcttcgccattaagaacgaaccagggattgctcgagtatggctccccaacattgattcccctggccttgccatgtcacgtgcttttggagatttttgtctcaaggactttggagtcatctctgctcctgatttct

SEQ ID NO: 44201 - DNA, 2293 bp, Glycine max
  Clone ID: PAT_MRT3847_139911C.1
gttcattactcattactcaatgagtttcactgcttgaatttttctaattttctgcagagaatctgaactctgcatcttgttgtgcaaatgaaatcaggtgtttgggtttgtgaagtatagaatagaattttgattattcaggttcttcaaaggggctgaatagaatagccagtgattgggagacccttttgatctaaatgtgtgctccttacttgagatctattttgaatggtttattcatattagttgaatttcaatatgggggtttattatgctacttgggaattgattggattatagtcaaacatgttttattgcaaatgagactcacctggctattcctgaagcattggtatttaaccatgccgaatgacgtggtgtggtccatgtagttgacctcacctagcgaaataaggctttggtggtgtttttattgaatgttggtactcacctgagacacgcacacgtgtaaactcgagccggccggggcggggcggggggactcacacactctttcttaagttctcagaaaccttaaaaacaacaacgtaggagtgttcggaaaagatggctaagcaggaagtggtggaagggttcaagttcgagcagaggcacgggaaagaacgcgtgagagtggcgcgcgtgtggaagacgaggcaggggcagcacttcattgtggagtggcgcgtggggatcactctcttttcggattgcgtcaactcgtacctccgcgatgacaactctgacatcgttgctactgataccatgaaaaacaccgtgtatgcaaaagcaaaggaatgctctgacatactttctgccgaggagtttgctattctgcttgctaagcactttgtatcattttaccagaaggttactggtgctattgtgaatattgtggaaaaaccatgggagcgtgtcactgtggatggtcaacctcatgaacatggtttcaaacttgggtctgagaagcatacaacagaggcgatagtacaaaagtctggttcacttcagttgacttctggtattgaaggattgtcagtgttgaagacaacccagtctggttttgtgaatttcataagagacaagtacacagcacttcctgatacccgtgaaaggatggtagcaacagaagtaaccgcactgtggaggtattcgtatgaatcgctgtatagcctccctcagaagccgctttactttacagaaaagtatcaggaagtgaaaaaagttctggctgacactttttttggcccaccaaaagggggagtctatagcccatctgttcaaaacacactctacctgatggcaaaggccacactgaacaggtttcctgacatagcttatgtcagtctaaagttgccaaatcttcatttcatacctgtcaatatctcaaaccaggatggccctattgtgaagtttgaggatgatgtgtacttgccaacggatgagccacatgggtcaattcaagctagtttgagccgcctttggtcaaagctgtagaaactgcagaaactatggtgctcatcccttctggtggattgctagtgcagcctaaactagcaaacctggcctcagataatgctttccattaatgtgtcttgtaattctggtttttgttatctttatcttttgttttgtttcatgaagaactattatgcatgaataacttccaggagggatattctgtgggttgcaccaatgttaagcttttgatttcctgacatagcttatgtcagtctaaagatgccaaatcttcatttcttacctgtcaatatctcaaacaaggatggtcctattgtgaagtttgaggatgatgtgtacttgccaacggatgagcctcatgggtcaattcaagctagcttgagccgcctttggtcaaagctgtagaaactgcagaagctatggtgctcatcccttctgtggtggattgccagtgcagcctaaaataccgaacctggccttagagatagtgctttccattaatgtgtcttgtaattctggtttttgtcatcgttgtatttgtttcgtggagaactattatgcatgaataacttccaggagggatattctgcaagttacaccaatgttaagtttttgatgtcctaaattccaataaattcctagtgtccttattatggaaactgaattatgtcttactatgacgttgatgcaatgcttttttatggtcatactcatacattatagtcaagatttataaacccagagttgtcaccaaactggtaaacacgtggtttatggtttaatacccagtgaaaaaaatttaatatatattttt

SEQ ID NO: 44202 - DNA, 301 bp, Glycine max
  Clone ID: PAT_MRT3847_139912C.1
ctttcggtaacgcatatacgttgaaattgtttttgggtattcactttagttaactgtcgtaagttaatcgttttcacgtgaaaatacgtgttcgggagagcatatagcagttcttagaagaacaccatggaattaaaaagagatgcattagctcaatggtatatttagatgcgcatctggaataactgcttctttatcagatgatatacattttgcttgaactgaattttacatgcttttcagtatacaacatgattatgaacgagaacattcgccattattcatatgaatcaatatctta

SEQ ID NO: 44203 - DNA, 1603 bp, Glycine max
  unsure (1)..(1603): unsure at all n locations
  Clone ID: PAT_MRT3847_139913C.1
atcaggtgtaggggtttgagaagtattgaatagaattttgattattcaggttcttcataggcgctgaatagaataaccagtgattgagagacccttatgatctaaacgtgtgctccttacttgagatctattttgaatggttgatccatgtcagctgaattccattatgggggttaattatgctacttgcgaattgattcgattatagtcagacatgttttattgcgactgagactcacctgactattcctgaagcattggtatttaaccatgccgaatgacgtggtgtggtccatgtttttgacctcacctagcggaataaggctttggtggtggctttattgaatgtttggnactcacctggctatcaaaatgcttttattgttctaagaaaccttaaaaaacaagtagtgttccgaaaagatggctcagcaggaagtggtagaagggttcaagttcgaacagaggcacgggaaagagcgcgtgagagtggcgcgcgtgtggaagacgaggcaggggcagcacttcgttgtggagtggcgcgtgggcatcactctcttctcagactgcgtcaactcgtatctccgcgatgacaactctgacatcgttgctactgataccatgaaaaacacagtgtatgcaaaagcaaaggaatgctcagacatactttctgctgaggactttgctattttgcttgctaagcactttgtatcattttacaagaaggttactggtgctattgtgaatattgtggaaaaaccatgggagcgtgtcattgtggatggtcaacctcatgaacatggtttcaaacttgggtctgagaagcatacaacagaggcaatagtacaaaagtctggttcacttcagttgacttctggtattgaaggattgtcagtgttgaagacaacccagtctggttttgtgaatttcataagagacaagtacacagcacttcctgatacccgtgaaaggattctggcaacagaagtaaccgcactgtggaggtattcgtatgaatcacagtatagcctccctcagaagccactttactttacagaaaagtatcaggaagtgaaaaaagttctggctgacactttttttggcccaccaaatgggggagtctatagcccatctgttcaaaacacactctacctgatggcaaaggccacactgaacagatttcctgacatagcttatgtcagtctaaagatgccaaatcttcatttcttacctgtcaatatctcaaacaaggatggtcctattgtgaagtttgaggatgatgtgtacttgccaacggatgagcctcatgggtcaattcaagctagcttgagccgcctttggtcaaagctgtagaaactgcagaagctatggtgctcatcccttctgtggtggattgccagtgcagcctaaaataccgaacctggccttagagatagtgctttccattaatgtgtcttgtaattctggtttttgtcatcgttgtatttgtttcgtggagaactattatgcatgattaacttccaggagggatattctgcaagttacaccaatgttaagtttttgatgtcctaaattccaataaattcctagtgtccttattatg

SEQ ID NO: 44204 - DNA, 144 bp, Glycine max
  Clone ID: PAT_MRT3847_139914C.1
tttgtgtattgctttagaacttgttcattctgtttcgtctctgtcactttgctcctccgttgtccctttctattctacttacattcttgactgcaacaaccgccacaggtacgtctcatgctcattctccgtgttctcatagtt

SEQ ID NO: 44205 - DNA, 293 bp, Glycine max
  Clone ID: PAT_MRT3847_139915C.1
gaaagaaatacatgcatcaactccattaatggcaatcacaattcaatctttcatttctaacttaatattttggactttaactgataattgtagcttctgctcttcaatatcttttaaaaccgacagcaagttggacctatagacttcacacttccttcgagctcggtcaagttgccgtgtcaacttctcaattgttctatcttgagcatccttggatgaagattgttgggaaccaataggagaatggctgggacttggaggtactatattactctgatgaagggcttcttaca

SEQ ID NO: 44206 - DNA, 351 bp, Glycine max
  Clone ID: PAT_MRT3847_139916C.1
aaaaaaaaaatttttttttttttttaaaaaaaaatggggtgttacatattctacaaataaccaacccttattaagaagcttggacatggagggggtcaatttacacaatgccaccttttattatggggaggggtgacctcccatttaggttttacttgatccaaaactaaactagatttttaactcctgggtcttttgccaaaactcatttttacgtgttagatcttccccccctttaaggggaacccttgggggattcttaaagcctttggtgggcctttagagtttctccttaaaaaattatttccataattgggaacttcttttttcaaccagcttgaaccacttttt

SEQ ID NO: 44207 - DNA, 1059 bp, Glycine max
  unsure (1)..(1059): unsure at all n locations
  Clone ID: PAT_MRT3847_139917C.1
cccacgcgtccgcccacgcgtccgcccacgcgtgagataacaagcatcatcccctctccccaacggggataaagagagaagaagagagtcccttcacttacacatagagaaaaaaatggcagcatcagtttcatgctcatggctaactcttccgtcccaaatgaggaaactttccctcacatcctcttcttcttctctttccatctccaattccgcttctctcagtttctccagaaacctctcacaccctctcttctcacaaggtaactgcttgtcgctgagcacagtgcagaggcgcgcgtctgtggtttgcgaggctgcgccgaaaaaggtggattcggctgtgaagagagcgcgccaagccgagaagcgccgcgtgtacaacaaagctcggaaatcggagattaaaacacgcaccaagaaggttttggaggctctggaagtgcttaagaagaaacaagatgcgcaggccgaagaaatcctctccattgagaagttgatcggagaggcatactcgataattgacaaagctgtgagagtaggcacactgcacaggaacactggagctaatcgcaagtctcggcttgctcgaagaaagaaggcagtggagatccatcatggctggtataccccaactcctgaagccagtgtctgaaactatccacgtgctagtttacattgagtaaaatgaagtgccagtgaagactatctgcagattttttccacctctgttcaaacattgtatgaagtcttctttggtgttggttcaaattggtttacagttccagacttcatgtgtactatcatcatgtagagccattgattttaacagcatcttcgtaattagcctttattgtactttttaccatattgttgtataatgcaatgcctccttaaacataataataaatccatcgtcataataatgtataatgcaatgcctccttgctcttaatagcaggtgtatgtgaaaatcacaataatataaaaaanaaaaaaaaananannaanaaaaaaaaaaaaaaaaaaaaaaaaaaaaaaaaaaaaaaaaaagggggg

SEQ ID NO: 44208 - DNA, 2884 bp, Glycine max
  Clone ID: PAT_MRT3847_139918C.1
gcgagatattgtgtgcttgcttagagaggttttggttccgcagaagattctgaattctgatgctctagtgcgattccatgggagaggtggtcatcatgagtggagagaagaagtcagttagagtggagggggtggagaaggaagatagtggtggaagtgggagcaaggctggtgaatttaaggggttgatgaggtgggagaagttcttgcccaagatggttttgagggtgctgttggttgaagcagatgattccacaagacaaattattgccgcgcttctcagaaaatgcagctacaaaggttatgtgatggggatctgggttcaatgaaagtctaaggatctaatggctcctttccacttgctttaagagtcttggcagtctggaaactacaggcttacatgatagtgatacaattattttcttacatgatatgattattttcagttgtctatttgccataaagaatttctattattgacctttgttcttgtatgaaacttttaatgtgagaaaatgaagtacttgaaactaatttacacaatattagaacttcaaaataactttgctcatctgctttgagcagtggttgctgttcctgatggcttgaaggcatgggaattactcaagggaagaccgcacaatgttgatctaattctgacagaagtggatttgccatccatatctggctatgcacttctcacattaattatggagcacgagatttgcaaaaacatccctgttataatgatgtcttcccaagattcaattagcacagtatacaaatgcatgttgagaggtgctgctgattatcttgttaagcctattagaaaaaatgaactgaggaacttgtggcaacatgtttggagaagacaatcatcaaccactggtattaatggcctccaagatgagagtgttgcacaacagaaggttgaagccactgcagaaaataatgctgctagtaatcgttcaagtggtgatgctgcttgcattcagagaaatatagaactaattgagaagggaagtgatgcacagagctcttgtaccaagcctgactgtgaagctgagagtgaccctgtcggtaacatgcaggaattttctctgctgaaatgtggggaagcatatccaagtggaacagagacacaacaggttgaaacaagctttcgcttaggccagacattaatgatgcatgactgtcatgctggaggattaaatgtgagtatccgcaaaaatggtgaggcaagcacgactaatgacaaggatactgatacagagcattttgggaatgctagcatcagtggtgaggctcatgacaatccctatgttcaaattaactcttccaaggaagctatggacttgattggagcatttcatactcatccaaactgttccctgaaaaattccacagttaattgcacaggcaactttgaccattctcctcaattggatctttctttgagaagatcttgtcccggaagctttgagaataaactcactgaagaaaggcacaccctgatgcattctaatgcttcagctttcaagcggtatactaccaggcaattgcaaatatcaatgcctgcagtgttaattaacttctctgatcaacaaagagaacagataacaaattgtgagaaaaacatctcacacatcgctactggcagcaactcagatagttcaacacctatgcaaagatgtattgtgtctccaactacagtccaatcaaaagaatctgaacttgcaacctcacaccccccgcaaggacattctctcccaattccagtaaagggtgtaaggttcaatgatctatgcacagcctatggttctgtacttccttcagtgtttcatacacagtcaggtccaccagcaatgccaagtccaaattcagttgtgctccttgaaccaaactttcaagtaaatgcattttatcagtcaaatatgaaagagagtagttcagagcagctttatgaatctcgtggtccaaatggaaacaccacccaaaaccacattgtgtacacacaggagcacaaatcagaacatgcagaagatcgaggacatatctctcctacaactgatcaaagtgtgtcaagtagtttctgcaatggaaatgcaagccatcttaacagcattggttatggaagcaactgtggaagtagcagcaatgttgatcaagttaacactgtctgggcagcttcagagggaaagcataaagacctcacaaataatgcaaactctcatcgatctatccaaagagaagcagctctaaacaaatttcgcttgaaaaggaaagagagatgctatgagaagaaggttcgatacgagagcagaaaaaaactagcagagcagcgtcccagagttaaaggacaatttgttcgtcaagtgcatcctgatcctcttgttgcagaaaaagatggcaaagaatatgatcattcagatttctgactcactggagaggagagcatgaattccttagagtatatagttgcttcaaaattttgttttcctgaatccttaaataccagaagcacttaatctgtatatgctttctaaaaccgtttttcttatttgcccttactgtagatcgtgatatataatatacctgatgtattatatcattgtaattttacagtcttatagggatcttcgtgcatcattatttatttatttatttatttataaggagttgtttacttacaacttacaagttacaaggaccgactgatttatcttgtaagagtttttacatagtaccatagcattatgattttttataataactgccactaccagttaacttttatattttattcaaaatttgcacctttattttcaagggagggggggggggggggggggggggggggggggggggggggggggggggaggg

SEQ ID NO: 44209 - DNA, 374 bp, Glycine max
  Clone ID: PAT_MRT3847_139919C.1
ggggtttctcttttgtattctttttagctttctctttctctgattttctcagtgggaaactcaaatcttttaccttttaaaacaagaactaaaccaaattggacaaacttgaaaggccccattagagcccctaaactttttttattttgggcaaggggcgttacaatttacatttaggagttaactcttaaaacggattggaaggcccctttggccaaaaaaatttgggttacttgtcttaatgcggtcatattttgattcattcttccctgaacaaatttcctttttcaatctagggatctaaataaaacccaggggttaggggctccataaataaagccctggaaaaggaccccccctgtaaggggggggcc

SEQ ID NO: 44210 - DNA, 347 bp, Glycine max
  Clone ID: PAT_MRT3847_13991C.1
aaaagattgtttttggcttttttacaatgtggtgaatttttctaaccaagacgaatccgccaaacctctgcatgtatatatttgtggcgccagcggctattttgatcaagcggacaaacgagttttagtgcaacgtgaacaacttaagaagccaaccgaggtttaatccaaatatggagccattactctatggccccctggcaggtaaaacttggacatgaaacaagcccaagaatattgcgtgaagggaggcaaatcccgcccattgtttatggacgccccaaagatacatcccttaaacaaagggctttttaaacttttaaacacgttagccccgcttccgggaa

SEQ ID NO: 44211 - DNA, 1354 bp, Glycine max
  unsure (1)..(1354): unsure at all n locations
  Clone ID: PAT_MRT3847_139920C.1
ttgcttgcatgcctgcagataaaatgctgctagaatcgttaagtggtgatgctgcttgcattcagagaaatatggaattaattgagaaaggaagtgatgcacaggttagttttccagacctataattttttttaatattattgcagttatttgaagacatttgtagcaaagacaaagaacaacaccatcaagtacattaggtatatcacttgactagccaggggctgtagagcttcgatggaatcatctaattatcattctatttccttttcttggttaattcattgcaaatgagaatgtttcttctaagatgcttggataatatgatactacattcgtaatagtctccaatgttgacacttttgcatgctaatctctgttaagcttggaaattctatcatatcaatgtctgaaattgtccaccagttatttcctatgcagtttttctttttaactgctttggaatactaccaaaagccaaacacctttgggaatggcagcagtcctctaaaaatttacatttagtcagtatacgtcaaatgcataatgtttgccagtagatatttatgtatttttataaacctcttatagttaaaagaaattttctttcagtatgggttgtctatatgaagttttcatgtagagactaaatgattgctttctgttgcagagctcttgtacgaagcctgactgtgaagctgagagtggccctgtcgataacatcgataacatccaggaattttctccgctgaaatgtggggaagcgtatccaagtggaacagagacacaaacagttgaaacaagcattcgcttaggccagacattaatgatgcatgccagtcatgctggaggattaaatgtgagcatctgcaaaaatggtgaggcaagcacaactgatgctgatccagagcattttgggaatggcatcagtgttaattgcacgggcaagtttgacctttctcctcaattggatctttctctgagaagatctcgtcccagcagctttgagaatgaactcactgaaaaggcacaccctgatgcattctaatgcttcagctttcaagcggtatactaacaggcaattgcaaatctcgacgcctgcagtgttaattaacttctctgatcaacaaagacaacagatagcaaattgtgaaaaaaacatctcacgcatcgctactggctgcaactcagatagttcaacacctagtatgcaaagatgtatcgtgtctccaactacagtccaatcaaaagaacctgaacttgcaacctcacactcccagccagggcattctctcccaattcctgtanagggtgtaagggtcaatgatctatgcacaacctatggttctgtatt

SEQ ID NO: 44212 - DNA, 1507 bp, Glycine max
  Clone ID: PAT_MRT3847_139921C.1
ctcagattcagcaattttctattttcttctctcatggcttcagattccaaaaaggatttccctgctgaacaataagggggtaattgctttacacgttgtggttcctcctgattccttccatctcatttgcttctggaaaaaaagtttgcatttgtgtgtaggcatgacaaagaatgacaaagctggaacagcagagaataaagcatccaaagatgaaacgtcatctaaagattctccagcagcacaaagagctactacagctacttttggacctagacctggacctgctgggcttccaggcaacccttttgatctctcagcaatgtctggtctgctcaatgatccaagtatcaaggaattggctgaacagatagcaaaagatccatcgttcaatcagatggctgagcagcttcagaaaacttttcaaggagctccacaagatgctatccctagctttgataattcaacaatatttttcaaccatgcaacaggttatgcagaatcctaattttatgaccatggctgagcgcctgggtaatgcattgatgcaggatccatctatgtctgccatgcttgaaagtttttctaatccatcaaataaagaccagcttgaagaaagaatgacacgcatcaaggaggatccatctctgaaacatattttggaggagatagagactggtggtcctgctgctatgatgaggtactggaatgatgaggaggttttgcggaagttgggacaagccatgggtcttgcaaattctggagatgtaggtgcctctgctgaaaattctggggcagatgagacagaagatttgggaaatgaagatgaatcaattgttcatcatactgctagtgttggtgatgtggagggcttgaaaaatgcactagccgctggtgctgacaaggatgaagaagattcagagggaagaactgctttgcattttgcctgtggatatggtgaggtgaaatgtgctcaagttctccttgaggctggagcaaaagtggatgctttggataagaataagaacactgctctccattatgcagctggttatggcagaaaggaatgtgtggcccttctccttgaaaatggtgctgcagttactctccagaatatggatggtaaaactccaatagatgttgcgaagctaaacaatcaaaatgaagtcctgaagctacttgagaaagatgcttttctgtaattgcaatgcatgatgccatgctgtcaccaacaagcaaagggggaaactgaggggaagaaggcatggtgacttcgttattttctcttttggtttcttccagccatttagtgtgttaaactaaattgattagcgttgttggatgtgagtcaccatagaatttgttatctatgttcttgtaatgcatttattgtcacactgcatgattttgaagattagtgccgtcatgattttattcatgcttcaattttacttgtactacattgcttcgtggcaaaattctggttcaaatggtttcgtccaagaat

SEQ ID NO: 44213 - DNA, 201 bp, Glycine max
  unsure (1)..(201): unsure at all n locations
  Clone ID: PAT_MRT3847_139922C.1
gttaatcttttttgaaaatgaaaagttatccatagaatactttcaccatatggaagccatcacccttcctccctctatacaaggaccgcagcagatatagataacaaatctgcctttttttcagccagctacctgatggtaaggtgttttgagaaaagggtcaaaaagaccaaancaaagaaagcataaggccaaaagcca

SEQ ID NO: 44214 - DNA, 390 bp, Glycine max
  Clone ID: PAT_MRT3847_139923C.1
gggcaacggagaaggcccatgaattatgaatccaccaatttgctcttaaataaaaatttcggggaaaaaagaaaaagaaaaagtggaagtcctatcttagctccaaacagaaatgggagcagttttgacttttgagttttgagtcctagaactagaacagaattccataagttttttttttcttttccaactgggttctgaactgaaagaacccaccaaaggacaacgggttttaacatctataaacctatatcttgaagttgggaaggccctcaaataatatattggaatttttctccagaaggtgtgctatcccccaaacattgagctccaaatcatatcccccccctggttctgagaggttactgggagcctggccagagctttgga

SEQ ID NO: 44215 - DNA, 248 bp, Glycine max
  unsure (1)..(248): unsure at all n locations
  Clone ID: PAT_MRT3847_139924C.1
acgagtatacttgcaaaaccacagacttttatgaatttaagtggcgaatctgtaagtctgctatccggataatattcaaatgttgggaccatagtttcatattacaagattccagtgaagcaagtacttgtgatcgttgacgacttggatttgccttttgctaaattgcagcttctaccaaagggtggacatggaggtcacaatgggtgggtgttgggggtgtacataantttttggaggagggtgga

SEQ ID NO: 44216 - DNA, 1657 bp, Glycine max
  Clone ID: PAT_MRT3847_139925C.1
ccacgcgtccggtgacgtgtgacgaggcccatcatcaattcatcgtatttttctcccttttgtatatatgtatatttctctctgtgtgactcttatgatctgttgattttgggtactttttcgatgtttcctatgtaattcttcatggtccaaatttgagcttggttttcctgttctgagctaattatcagctatccttttgccatttgtttatcttgtttgcatttgtgtgatgaattaagatctttgtcatattaaagtgttttgtttttattttaattttttttgctcatcattttgtgctcatggtggtgaggtttaacccttcatgtctcaccctctctcataatcctcaccacactacatatttctctaagcaagtgacagttaggagcagttatgggaaacacatgaaaaggggtggccttggaagaaggcctcagatagtgtcttcagttttggggaacagtaacactgaaggggtgagtgtgtttgtggtgtctgacttgcacactgactatgctgagaatttgaagtgggtggagtgcttgtctaatgtgaagcacaagaatgatgtgcttcttgtggcaggtgatgtggctgagacatgttccatgtttgttgtgacaatgtctcttttgaaagagaggtttgagcatgtcttctatgttcctggaaaccatgacctttggtgccgtcgcgaggggcaaaattatgttgattctcttgaaaagctgaataaattgcttgatgcgtgtgagagaattggagtggagacaaatccaacggttatagatgaaataggaatcattcctttgttctcttggtaccatgagagctttgacaaagagaaggacatacaggctttcgcatcccgtctttggagatggcatgtaaagatttctatgcgtgtaagtggcccgagggactttcaaatggagatatgtcactggctttatattttgatgccatgaatgataaacaaatagatgtgataaaggagattcagatggcatgcgatcacatcattaccttttcacactttgttcccaggcaggaactttgtccagagaagaggatgttgttctatcccaagcttccaaaaataattggttcagactctcttgaagatcgaataaggtctattcatggtgctgagggaaggaaggatgcgtcgtcttgtcatgtgtttggtcatactcacttctgttgggatgctgttgttgatggtatcaggtatgtacaggcacccttagcttacccaagggaaaggaagagaagaatgaatggaggtgaaaattggctaccgttttgcctttatgctgacaacaaatttgctgatagactcaacccttgctattggtctgattattactctgccaaccccaggacaccccataatactaaacttgctccttgggtagccagattttataagcaaacagaaactgtggatgtatagtattcactattgactttattgagctggttttatttgttgataagacattcctatattgtgttgtcttttttacattaaatcaataaataacatgagtcattttgcaaaaaaaaaaaaaaaaaaaaaaaaaaaattaaaaaaaatataaacaaaaaaaaataaaattatcattattattaaaacatatttatatat

SEQ ID NO: 44217 - DNA, 1340 bp, Glycine max
  Clone ID: PAT_MRT3847_139926C.1
tcggtcccctaataaacaaagaccaagccaaccctttttatttgaaagcttgtaaaggggcacacccctttctctctcctccttccccctttaatttccttttccttcttaattgtcttaatttcccttgtattctggtaatctagctaaccctttttatttccattagccacgatatcatcaccatcgccaccttctaggtgggatccagggtcaacaatatcacactcagcacagttaccaactccaaatctcaagaaatggatagtaagttcagaaaaaacaaccgcaactcatataccagtgaacaagatcaagacactgatcatgatgtagctcaagaaaacattgccgagtcccctccttcttccactgtgttcaacatcgatggcttagtcccatcccccactccttcatcaaagagaaggagggcaatacagaaaagggtggtgcaaatcccaatgaaggagacagaagggtgtaggctaaaaggagagagcaacaccccaccctcggattcatgggcttggagaaagtatggacagaaacccatcaagggttccccttatcccagagggtactacaggtgtagcagtaccaagggctgtccggcacggaaacaagtggaaaggagctgcgtggaccccacaatgctagtcgtcacttactcctccgaccacaaccatccatggccaccttctagaaaccacgccaggcccaccaagaagcctgaaccggttccggacccggtccaacccgaaccggaggagaagttcgcggacctgggcggggacgactccatgataaccaccgcggaggaattgggctggctgggggagatggaaacgacgtcatccacggtgctcgaaagccccattatggccacgggctaccacgctgacgtggcgctgattccgatgagggaggaggacgagtcgctcttcgccgacctcggggagctgccggagtgctcggtggtattccggcaggggctgctgacggagcggcggcggtacaccgcgccgtggtgtgggaccacaagttgagggcaaaaaagtcaacaaaaaaaaaaagaaagaagaaaaactagaggtgcctgtttgacacgttcttcgtgcggcacaagagaaaaagatagcagcattattttttaaaattaaaaatattaatttatgttattttagtttgttgagagtagaaaatggaaaagagaaaataggaaaagtagggttggggatgaagaagaataaatggaagtttggggggaggagtgagagaatatgtgtatgttgagaagtggttgtaattagcgtaactttgaacagcttgcccaacaagat

SEQ ID NO: 44218 - DNA, 155 bp, Glycine max
  Clone ID: PAT_MRT3847_139927C.1
gcagtcactgctttgtgtagagcagaaccagatcgtgttctcttcttccattggcaaacatggcaactcaaatgagcaagcagagccagcatgtggcggatggagtgcacctcgccggaccgaacgagggactgacacgagagttggcggaggac

SEQ ID NO: 44219 - DNA, 369 bp, Glycine max
  Clone ID: PAT_MRT3847_139928C.1
ggccgacattttttttattatattttttttttatcatgaaaataaaccaaaaaattaattaaatggtaaatgggtgaggagtacatgacccttaacatacccccgacatatttcatatctattaataaagctaaagcaaaggtttttgttattaaatggacaaaaatatttatttccaactatttgcattataaggaaaagacctttgtttgcaagtagttttaagtgagttagcttttttattctcattaaaaattttacccccatatacattgtggactgagagaatgatctttattacttggacttggaatttcttcctaatgatttatgaaatttactggagattttttttttttagcattttgt

SEQ ID NO: 44220 - DNA, 245 bp, Glycine max
  Clone ID: PAT_MRT3847_139929C.1
gcccaagattttgggctggtggaagaagcttgcttcccctacacaggcactgattctccatgcattatgaaggaagactgctttcgttactactcctctgagtaccactatgtaggaggtttctatggtggctgcaatgaagccctgatgaagcttgagttggtccatcatgggcccatggcagttgcttttgaagtatatgatgacttcctccactacaaaaaggggatctaccaccacactgg

SEQ ID NO: 44221 - DNA, 270 bp, Glycine max
  unsure (1)..(270): unsure at all n locations
  Clone ID: PAT_MRT3847_13992C.1
ggcagttgctgatgctggaggtatttttgagcttgcaaaggttattattcaagaagaccctcagccaccacatgcactctgggaatcagctgctttagttctctctaacgtattacattccaatgctgattactattttaaagttcctgtggtggttcttgtgaaacttttgcactcaacacttgagantacaattagcatagcccttaatgctttaatagttcatgacagaagcgatgcttcaagtgctgagcagatgtggaagctgga

SEQ ID NO: 44222 - DNA, 308 bp, Glycine max
  unsure (1)..(308): unsure at all n locations
  Clone ID: PAT_MRT3847_139930C.1
gctcgagatnatcaaacaccaccgtgtatctcaacttttgcccatacccttataatagacaaacgttatcatacctgactcacactctccttttaaacagatcatatcaacatttaacaatggcgcttccttccttctcctataatcctgttgtccctctcctgaataacgaactttacatctttatcccttcaatccaaaacctcgactttctcgagatgttgctgcccttcttcgaaccttaccacctcatcatcgtgctatactgataccccatcatgaccattaattgtcccttatgcttttat

SEQ ID NO: 44223 - DNA, 519 bp, Glycine max
  unsure (1)..(519): unsure at all n locations
  Clone ID: PAT_MRT3847_139931C.1
gaagcaaaattcttgaaaaaggagaacatgaatctcaagattcaacttagagaaactgcagaagctgttcatgctgctggagaactacttgtcagactaagagaagctgagcatgcagtgtctgttacagaggagaatttcacaaaagtgcaacaagataatgaaaagctaaaaaagcaaatggataagctgaaaagaaaacacaagatggagattattaccatgaagcagtaccttgcagagagcaaattaccagagtctgcactgcagccactaattagagaggattctgatgttgttcacaagggtgcaacttcccgtgatgatcaggcatggagagtagagtttggagcaatctatcaacagcattattaattcgacatttgttggattgattaacaattgatgagtttaacaatcaaacttccaacagtttgcctagcatcagatccttcttggatcaataagtaatctattcatacacccatttatattgaanaaaaaaaaaaaaanannnnn

SEQ ID NO: 44224 - DNA, 387 bp, Glycine max
  Clone ID: PAT_MRT3847_139932C.1
tggaaaatgaagagtactgtaggcgtttgtttgttgcttttggttttgttggaggcgatgtgctgtgaagggtgttggaaggaagagagagatgctcttttggtcctaaattcccgttttgacttccctctctcttgggacggcccagactgttgtcaatgggaaggagtggagtgcaactccaccactgggagagtggccggactcgatttgcggtggcggtggtcgtttccgccttccaatggcaccaaactatatattaattactcagattttgttgtcttcaaagatttgcagaagctggacttgtcatggaatgccatatccggctgtgtatggaatgaagcgcggctggaaagctggaattccttgacataagttacaact

SEQ ID NO: 44225 - DNA, 389 bp, Glycine max
  Clone ID: PAT_MRT3847_139933C.1
gcactgagggtggagagagaaagggaagcttaattcttgaaaaaggagaacatgagtggtcaagattcaacttagagaaactgcagaggcggttcatgctgctggagaactacttgtcagactaagagaagctgagcatgcagcgtctgctgcagaggagaatttcagaaaagtgcaacaagataatgaaaagctaaaaaagcaaatggataagctgaaaagaaaacacaagatggagattgttaccatgaaacagtaatttgctctctgcaaggtactgtttcatggtaacaataccttgcagagagcaaattaccagagtctgcactgcagccactatttagagaggattctgatgatgttcacaaggatgcaacttcccatgatga

SEQ ID NO: 44226 - DNA, 390 bp, Glycine max
  Clone ID: PAT_MRT3847_139934C.1
tggcttggaacctttgggctgatttatgtgcttgagagaaataaagccagaagcaaagaagactacggtcctctcagtaattccggtcgtcgccgaattagtcatgactaacggttccgtcggaagcctttctctcggaatcaagtctctccctaagtttctctgttatagcgctaaacttaagaatcctaggagcggcgttgcggcagtaaagcacggcgataagagcgcgcatcccgacccggaggactcgggtaatatcatagggtagcgggatccgcacggtctagacgtattcctatttcataatttctcctagagtaagcctccttagatacccgtcgtctttcctataaagaagggaccggcatctaaggcctcgacaccggg

SEQ ID NO: 44227 - DNA, 498 bp, Glycine max
  Clone ID: PAT_MRT3847_139935C.1
ggaatttggctctgggcggacgacgcgagttcctctcagctctcgacaggggcctctcggtccgcctccctgctatcgctctacgctcagtgccagaccatggcgctccaatagcacacatcgctctctaggctcatgtgagagggatacatactcctcctgggcaaaaggtcctgtggacatatatagaagtcatacaattggcataaggagcccacatgtgatgagatgaggaccgatcattgtctctggtgcacgtccagctgcgcgctacaagcatgctacagctcgagcgcgatgaaaaataataccttgctggtggcacgtcaccatggtcgagtcttatcatgatgtccagagatgtagatttaagaggtacgatttgcctcttatctgaaagcaacagctaatgtgggaaaatatgctcactatagctcactaggagataatttcagccacatcagcctcacggtatgcttatggtcagcgggagaaact

SEQ ID NO: 44228 - DNA, 683 bp, Glycine max
  Clone ID: PAT_MRT3847_139936C.1
ggctcgacccacgcggcatacggctgcgaagacgacagaaggggacagacacacacttttctaagattttctcagcttccttctcatttgttaaatttttccaccattttctggcttcaaaaatcgttcggaaatgaggactgtgaacattttcgccctcccacttctggctttgttcatcatggcaatctctcgtctggcccaagctcaggacttgcctctttctccggcacctcctcctaccagtgatggaaccgcaattgatcaaggaattgcttacattcttatgctggtggctctcggaatcacatacatgattcattaactttttcttgttcttcttcttattatcatcatcatggcgattagagaatatttcaggatttttttgtactgtaattattattgatgaaatttattattatttattctgatacattttcttcagaggatggtttccttcttcttcttctctctctttcttttttttgtgttcaaatttccttttgttgtatatatggggaattcttctctatttttttttcattattcaagcttccatattttaatgacgcggtttggctttttctctgtcagatttagaaaaaaatggacccgtgatagagataggaataggattctactcttatgcttaaaaagaaaatcttatttgatggctttag

SEQ ID NO: 44229 - DNA, 324 bp, Glycine max
  Clone ID: PAT_MRT3847_139937C.1
agtagttgagaactaacaatgagaagcacatggcttcctcaatgatctcttccccagctgttaccactgtcaaccgtgccggtgccgggatggctgctccattcactggcctcaagtccatggctggcttccccagcagtaaagaccaacgatgacagtacctccattgctaccaacggtggataagtgcagtgcattcatgtgtggccaccaattggcaacaccaagtttgagactccttccgacctgccagaccttgatgatgcacaagtggcaaaggaaatctaataccttcttatgaatggacggataccactgcctgga

SEQ ID NO: 44230 - DNA, 207 bp, Glycine max
  unsure (1)..(207): unsure at all n locations
  Clone ID: PAT_MRT3847_139938C.1
cggtagaaatttacagaatttctcttccttcttcttctttttcttctacatcttccanaaatgccgatttgtctattctaaagaaacaacacacatatctaaaatttctttttctttctactanttcttaatgcctttcataatccttaatgatcattatcataatatcatactcctactattttactctcataaaaccaacatctt

SEQ ID NO: 44231 - DNA, 436 bp, Glycine max
  Clone ID: PAT_MRT3847_139939C.1
caaaaacggtagccccctttttgggccatgggagggcccactcgaaccccaagggcaggtcacctagccctcaatatagggggggggggggggaacaagccgaaataaggggggaatttacaactctcatcccataggaaaaaccaagatggggggggaaaggaacattactttccaaccaaagaattagatcaaaatagcgggctcaagggcctgaataatgggccaataaacgcaacaaactatccattggttcaggggggaatttcctagcaaatagggaacaggggttcggaatcccattccataagcaaggccaggtttgcacttttttcttctcataacggggtacgggcaccctaacataaagggaggggatattcttcaaaagcccgaaagaaacatcctgagccctggaagattttgggggccattt

SEQ ID NO: 44232 - DNA, 103 bp, Glycine max
  unsure (1)..(103): unsure at all n locations
  Clone ID: PAT_MRT3847_13993C.1
catgaatttcgtccctttgtgagagatgccacaagtggaccaacagttctcatgaaacttggtgagacgcatgacaantccactgagcgtactcctagtcctg

SEQ ID NO: 44233 - DNA, 368 bp, Glycine max
  Clone ID: PAT_MRT3847_139940C.1
cgtttgggattggtttcttttttattttttacctttctatcatctccaccatcaccaattgagattgattattttttcgaatggattaatatttctgggaaggaggccaatattatttggtccaaactcacatgatccttttgcttccacccaaaaaaacccccaggcgttggtaaactcctcaacggaaccttgacttcccccaccccccttaagtggctctttttaaggccccaaccatggcctttaaaggttttattggcggcctttttttgaaccccccccaaagttggcaaccttcccaaaaccttaccaaccgggggaaatataaaaaaaatcccaaagggacctttggcccttcctgattc

SEQ ID NO: 44234 - DNA, 199 bp, Glycine max
  Clone ID: PAT_MRT3847_139941C.1
aattcggctcgagcttctcttctcttctcttcgaggagccccctcctcgcagatccgatccgcacccttcactaaacggaggcttattgattattggtcgatactaacactttgggttgattatcaattcagctttctgcattgttcaacgtcgctcaagctcactgttgaacacgtcctcattatttgtatgacccct

SEQ ID NO: 44235 - DNA, 328 bp, Glycine max
  Clone ID: PAT_MRT3847_139942C.1
tcctcttgtctgatcgtttttgctttcaacaccacaaccctagcttcctcatcgtcaaccatgtcgaccaaccaacgatggaaaagctaatcactttgttgaaacccacctctgataagaaggattacgacgaggttgacatggctaacattcataagaaaaaggaagaggagaaggcgctactggagttgaaagccaccgcgcaacaaaagggaagctttggaggttctggtctcatgaaaagtggaaagaaataagggctctttatcatgattgtatacatccaatattgagccctgcagtttattaccatgataacttctgtctt

SEQ ID NO: 44236 - DNA, 505 bp, Glycine max
  Clone ID: PAT_MRT3847_139943C.1
aatgcttacttccagaaccttcccaagggtttgggtgtgttgaaatctgaccatggtttgtatggtgacccttctacgagaccctttgtggagaccttcgccaaggatcaaaatagattctttcaggtttttgctagggcgatgcccaagttgagtctcttgaatgtgcagactgggaggaaaggagagatcaggcgcaggtgtgatcagattaattgaattttcttttttgttgtctgaatttgataatgagatgagattttataatttataatgataatgagaatgatacctctgttgtgcgtgaattggatggtttttgaggttgattatacatacatagtgtttatgaggttgtaagagaatgggggcattggggtattgaggagttactattgttgttcttcgccctcttgttctttggatagatgagtctgagtatgtttttccaatgtaatattataagataagatttaattaataaaatttctcattttgagctccc

SEQ ID NO: 44237 - DNA, 730 bp, Glycine max
  unsure (1)..(730): unsure at all n locations
  Clone ID: PAT_MRT3847_139944C.1
ccacgcgtccggtgataaactcatctcttacctctaagtgggctcacatgtgtagtctggtagggatagcagtatctctagctgtttcttaagatttctcaagttttttctctggttgttctgttagggtttccaaatgttagaaagaagaagaagggattggaacccccatttcattatctctgtgtgagggacatttctctcacgaaagacattatatcaaaaatcccaacggtgtaaaaatgtgaaaatgagttttgaacctggtgttcaaatttcacgatgatccaatggttagcgagtttggaataataattttactgggacatgtttgagtgtatgcgggaaaagagagggttttgggagatggggaaggaaaaacgaatttgagaagaagagagagtgtagagacgtatcataaatgtaaaagctgacctaatatgtctctatttataactagggtactctcagcctattatttactctatttttctttattttattaaaatgaactctattttactctttatcaaatgaataaataaaacatcatttttattttctaagacatatatttatttttatttaccttanaaccattatttntaaattgataaaactattcttcttatttaatttaatttcaaaaacctcattattttcctaaaactccattttatttttttaaataaaatccttttttaattttattttacaaaaatgggggggg

SEQ ID NO: 44238 - DNA, 243 bp, Glycine max
  Clone ID: PAT_MRT3847_139945C.1
aaaaaaagggtggttgtagctcaagctagacactaaggtctccgtccaaccctacattttctcacatgctcacctgacttggatccaaccaggcgaagcgacagcgcgggccattccgcgggactcgtcgcgggccggtcatttgaaccgagacgcatcaggtcgggatggtcccggaaatccaaggaagacgtcttagcctgcagcgcgggtgacatccagtctgtacaagaacttcatgcg

SEQ ID NO: 44239 - DNA, 654 bp, Glycine max
  Clone ID: PAT_MRT3847_139946C.1
ccacgcgtccggcctctctggcaaccagctcgaccgctacattaccccggagctcggagacctctgcgacatactctagctactacattggctactacaaaacctactacagggggaatagcttctgtgagagtaaacctgttacacgcgtaaaacgccaatgacactcgcctactgaagccgtatggcgagagagattccgtgaatggactaggaaaggtacacattgatgacacacctcgtttgttgaggggaatggacaatacgagggtgtcactgacgcacttgggaacgtgaaaagccttaaggaaacagacctactcaacaacatgctctcatgagaggatacggcgagtgtttacctgaactaaaaaatctaactataatgaacctgctaaggtacaagctcaacagcacgatccgctaaataagcacatagatacagcatctaaaagcgtggtatctaataggaaaacaactcaaccggaagcattccagagaatgggtgaaaaatggaagactgactctggctactacaatgacggacataataacccaaactctacctacatataatatgcatgagaagaggttaaatactatgataactaatggaaactactatctactgacccatatctagattcgcttgac

SEQ ID NO: 44240 - DNA, 344 bp, Glycine max
  Clone ID: PAT_MRT3847_139947C.1
gttggatcaggatctgccatgcaggtataaaaaagactggtgcagaagatattgcttgctgtggacaacaggttagaacggacaaggaaaacggaaatagggccgccctgtgccctggatcaagaggttgccacaagtgcatcaaccactgtgttagaaagggtgctatccacttctaagggagggagcacccatgccatgatcttaagatcaacatgatcttatcatgcgctggaccttataggctcctaactggaaggagaggatcgtcacgaaagtcacatgtacactttgctaccagtggctatatgcaactgtctatgtatgtgtcacatgcaacgaca

SEQ ID NO: 44241 - DNA, 270 bp, Glycine max
  Clone ID: PAT_MRT3847_139948C.1
catagatttattacatcactattgtaatggagggaacatgaacggaaacacgatcgaggggtactctcattccgagttagacatgtaacattttcatgcatgaaaaccctaactcctcaatcccttgcgcctctaactcttcctcttaagaattgcttaaacaagtccaagctgtcttaaagcgccatcactccttcgctactacgcaattgcataacttgaggccaaagcgcgccatgttggctctactaaaggccactaacaagctcg

SEQ ID NO: 44242 - DNA, 2499 bp, Glycine max
  Clone ID: PAT_MRT3847_139949C.1
acccgccggtccgctgccaaccacactgaacaacaaacacagtctgtttggtcagagtatggagaacacagatccttgtagacattttctcaaggatgttaagcgcatcataatcaaggttgggactgctgtggtcactcgccaagatggaaggttagctgttggaaaattaggggcactctgtgagcagattaaggagctgaattctcttggttatgagattattttggtgtcatcaggtgctgttggccttggtcgccaaaggcttagatacagaaaattaattaacagcagctttgctgaccttcagaagccgcaagttgaacttgatggcaaggcttgtgctgctgttggacaaaacagccttatggctctttatgatgttttgtttagtcagctggatgtgacatctgctcagcttcttgtgacggacaatgattttagagacaaagatttcagaatgcagctcagcgaaactatgaaatcattgttagcattaaaagttattcccatattcaacgagaacgatgcagttagtactaggaaagctccatatgaggattcttctggcatattttgggataatgacagtttatcagctttattggcattggaattaaaagctgatcttcttattttgttgagtgatgtagagggtctctatagtggccctccaagtgatccacgttcaaaacttattcatacatacattaaggaaaagcatcaaagtgaaattacttttggagacaagtctagagtgggaagaggtggaatgactgctaaagtaaaggcttctattcatgcagctgaagctggcattcctgttatcattactagtggttatgcagctgaaaatatcattaaagttctccaaggacaacggattggaaccctcttccataaagatgcacataaatgggccccggtaaaagaggttgatgctcgtgagatggcagttgcagctagggactgttccagacggcttcaggccttatcttcagaagagaggaaacaaattttgctaaaaatagctgatgccctggaagcacatcaaaatgagatcaggattgaaaatgaagctgatgttgctgatgcaaaagaagcaggatatgaaaaatccttggttgctagactgcttgcaagccttgctaacaacattcgaattattgcaaacatggaagatccaattggtcgagtgttaaaacgaactgagcttgcagaggggctgattttggagaaaacatcatcttctttaggagttcttttaattgtttttgagtctcgccctgatgcactagtacagatagcttctttggcaatccgaagtgggaatgggcttctcttgaaaggaggcaaggaggctaagcgatcaaatgcaattttgcacaaagtaattactgaagccataccagatattgttggctcaaaacttattggacttgtgacatcaagagcagaaattcctgagctacttaagttggatgatgtaattgatctagtgattccaagaggcagcaacaaacttgtcactcagatcaagagttccactaaaattcctgtcctgggtcatgcagatggaatttgtcatgtctatgttgataaatctgctgatctggagatggcaaggcggattgtactagatgcaaaaatagactatccagcaggctgcaatgccatggaaactcttcttgttcacaaggacttggtagagaaaggttggctcaatagtattattattgacctacggacagaaggtgttacattgtatggaggacccaaggcaagtcctttgttaaatattccaatggctcgtatgttacatcatgagtacaattcgttggcatgcacagttgaaattgtggatgatgtttatgcagctattgatcatataaatctttatggaaggcatgccactctttatttcttgataattgcacatactgattccgttgttgcagaagatcatgaagtagccaatgtgtttctacgccaagtagacagtgctgctgttttccacaatgctagtacaagattcagtgatggggcacgatttggactaggtgcagaggttggaataagtacaagcaggattcatgctcggggtccagtaggagttgatggattgttaacaaccagatggattctcaaaggaagtggacaaatagtggatggtgacaaagcaattgactacactcacagagaccttgggctaaagttgtacaattcagtggaggagggatatttatgctatctggtgctgctgcttttacgttcaagatgttatacaagggaattgctattctccccaacgttagaaaattgatgttcattgtgtgaagcttaatttgaatggtctaactgctttactttcttttgtagcctttttcatttgttttgacagttgagaacggtataaaattgtacaatttaataaaatagggtcatttgtatcaaataaaaaaaaaaaaagggtggtcggttttagaggatccaagctta

SEQ ID NO: 44243 - DNA, 435 bp, Glycine max
  Clone ID: PAT_MRT3847_13994C.1
ggaaaatgtcaaaaatacccttatgatatttttggttaaataacagcatgaattttttatttatgcagcaccatttttttttcacaagatttccatcacttattgtaacttgcttccgttaccgatagtttgcaagcatatttggtctcccgtggtgtacatgcttttgtgaggagtatatggtgagtttcggtcggttttcgtcgtcaggaaaggagaggtaagtaaaaaaaaatgggatgcacatacggattgtcaatccatatgattacacagattgttaatccgtaaatttaattattattaattttgtttttcgattgcattagttgtagtcatttcagaaaatttgatatggtgatattaatttttgtagtgatataaaaaatgtattaagtaattagaatggtggaaaaaaatactaatgattaataa

SEQ ID NO: 44244 - DNA, 1952 bp, Glycine max
  Clone ID: PAT_MRT3847_139950C.1
gtacgcctgcagtaccgtcggattcccgggtcgacccagcgtccggccttggagttaaaagccgatcttcttgttttgttgagtgatgtagaaggtctttatagtggccctccaagtgatccacattcaaagcttattcatacgtatattaaggagaagcatcagaatgaaattacttttggtgacaaatctagagtgggaagaggtggaatgactgccaaagtaaaagctgctgttcatgcagctgatgctggcattcctgttgttattaccagtggttttgcagctgagaatattatcaatgttctccaaggacaacgcataggaactctcttccataaagatgcacataaatgggccccggtaaaagaggttgatgctcgtgagatggcagttgcagccagggactgttccagacggctccaggccttatcttctgaagagaggaaacaaattttgcttaaaatagctgatgccctggaagcacatcaaaatgagatcaggattgaaaatgaagctgatgttgctgtggcacaagaagcaggatatgaaaaatccttggtggcaaggctagctataaaacctgggaagattgcaagccttgcaaacaacatgcgaattattgccaacatggaagatccaattggtcaagtattaaaacgaactgagctatcagatgggctaattttagagaagacatcatctcctttgggagtgctccttattgtttttgagtcacgccctgatgctcttgtacagatagcttcactggcaatccgaagtgggaatggacttctcttgaaaggtggcaaagaagctaggcggtcaaatgcaattttgcacaaagtaattactgaggccataccagatactgttggtggaaaacttataggacttgtgacctcaagggaagaaatccctgagctacttaagctggatgatgtaatcgatctggtgattccaagaggcagcaacaaacttgtttctcagatcaagagttccactaaaattcctgttttaggtcatgctgatggagtttgtcatgtctatgttgataagtctgctaatgtggagatggcaaggcggattgtacttgatgcaaaaatagattatccagcagcctgcaacgccatggaaacacttcttgtccacaaggatttggtagagaaaggttggttaaatggtattgttgttgacctacgaactgaaggcgttaaattatatggaggaccaagggcaagttctctgttaaatattccacaagcacaaacatttcatcatgagtacagttcgctggcttgcactgttgaaattgtggatgacgtgtatgcagctattgatcatataaatctttatggaagtgcacatactgactccatcgttgcagaagataaagaagttgctaatgtgtttctacgccaagtagacagtgctgctgtttttcacaatgcaagcaccagattcagtgatggggcaagatttggactaggcgcagaggttggaattagtacgagcaggattcatgctcgaggtccagtaggagttgagggattgttaacaacaagatggatactaaaaggaagtggacaagtagtggatggtgataaagggattgtctatacccacaaagacattgcaacttaatttgaatggtctaattgctatacttccttttgtagcctttttcatttattttgacagttgagaacggtataaaattgggcaattaaataaaatagggtcatttgtatcatctgatggttcctttccttcaagaattttgtcagcaattacagtttgttgttgaatttgttatttaacgcatccgtttctgttatggcatacgaataaagcaccacctctaggaaaacagagaatatgaagtctccgcaatggaatccatttattgctttgttaacgacaattggatatttatagtttcagtttttgag

SEQ ID NO: 44245 - DNA, 876 bp, Glycine max
  unsure (1)..(876): unsure at all n locations
  Clone ID: PAT_MRT3847_139951C.1
gcgatttgccacgaaggtgaaagagagcaacggggcaggtaatgattcggcggcgctatccactttgattccattcgcattcgcaggtctactgtagaatcagcacgcagccatggcggaccgttctcggagcttcatgaaggacgtgaagcgcgtggtcatcaaggtcggcaccgccgtggtgactcgcgaagagggaaggttagcggtcggaagattaggcgctctctgcgagcagattaagcaactcaactctctcggatacgacattattcttgtctcctccggcgccgtcggcatcggccgccaacgactccgctaccgcaaattgatcaacagtagcttcgccgaccttcaaaaaccccaactcgaactcgacggcaaggcatgcgccgccgtcgggcagaacagtctcatggctctctatgatattctcttcactcagctcgatgtgacgtctgctcagcttcttgtgacggataacgattttcgagatgaggatttcaggaagcaacttactgagaccgtgaaatcgttgttatcgcttaaggttattccggtgttcaatgagaacgatgctgtcagtactaggaaggctccctatgaggattcttctggtatattttgggataatgatagtttatctgctctgttggccttggaggtaaaagccgatcttcttgttttgttgagtgatgtagaaggtctttatagtggccctncaagtgatccacattcaaagcttattcatacgtatattaaggagaagcatcagaatgaaattactttttggtgacaaatctagagtgggaaagaggtggaatgactgccaaagtaaaagctgctgttcatgcagctgatgctggcatttcctgt

SEQ ID NO: 44246 - DNA, 278 bp, Glycine max
  Clone ID: PAT_MRT3847_139952C.1
gaccgccaaagaacatctgaggagactaagcatgaaagaacgtgagcacggagaaaaggagaggcaggtgtcagaggcagaggaacatgggacaattggatatgagagaacatacacacctacatgaccatgtttcaacgtgcgcaacgttgcggcggcgggcagaggactactacagatgcaacaatcaccccttctgcaagaaagcctctttgcaaccggtgcacttacaatttggtattacctgggagtgaaaagagatattacagccatgccta

SEQ ID NO: 44247 - DNA, 3640 bp, Glycine max
  Clone ID: PAT_MRT3847_139953C.1
cttgccatcttcctaactaaggtgtcctgtttctcattatcatcatcttcctccttaattcaatttcagaacccttcctgttcctttcttcacttcccaattcaatgaacacccaaaccccaatactcacgtgcttgccacgtgtcccttgaaattaccctttttttcttcttcttccactcacccacaaatccacttccccccaagcttctaccctctttaaaaagcttttcaaagtttgaatctttagcacaaaacaacaagacccagaaattttttttagcaatgctgtgaccaatgattgagtagcgaagattctgtgatcgttcagcaatgggggtttgcacttcgaagccgcagaagccgaacccttacgcgcttcgtgaagccgaagccgaagccgacccttctcaaatcccgaaaaccacactcagccccgccggcgccgacacccctcgccggaaagatgacgccatcaccggaaaacggtcgccgttctacccgttctacagcccgagcccggctcgcttcctgaagaagtctccggcaccggcgggagggagccggagcgcgagctccacgccgaggaggtttttccggcggccgttcccaccttcgtcgccggcgaagcacataagggcggtgctggctcggcggcagggcaagaaggcgtcggctacggcggcgataccggaggagggggaggagggtgcggcggatttggataagagatttgggttctccaaggagttcactagtaggttggaggttggtgaagaagtgggtcgagggcattttgggtatacgtgttctgctaagttcaagaagggtgagctcaagggtcaacaagtagctgttaaggtcataccaaaagcaaagatgacaacagcaattgctattgaagatgtgagaagggaggtgaaaatactgcgagctttgaatggacacagcaatctgatacagttctatgatgcatttgaagaccaacataatgtctacattgttatggagttatgtgaagtgtgaggggggagctcgagacgaatcgtgcgagaagacgacagaagggaaatactcataagatgatgcaaaggccgtcatggtacagatactaaatgttgttgcattttgtcatctacaaggtgtggtacaccgagatcttaagccggagaattttttgtatgctaaaaaggatgaaagttctgagttgaaagctatagactttgggttatcagattttgtcagaccagatgaaaggcttaatgatattgttggaagtgcatattatgtggcccctgaagctctccatagatcttatagcacagaggctgatgtgtggagtataggtgtgatagcggctcgagctcgagccgaatcggctcgagacggctgcgagaagacgacagaagaggctcactaattggacaacccttctcctacctccatggctaatttcataactttcttcattcccctagccctaaccctccttttctcctccctagtcactgccacttaccaccaaagcatctctccaagccttctacgttctcgtgagaagctcacgcaccttcgcttctatttccatgaaatttttactagcgacaaaccctctaatctcgtgatcgacccccccaaggtggtagccgactctccccttccatttgggtcccaagtggtgatcgaggacccattaacaattgggcctgatgtggagtccaaacagataggtaaggcccaagggttttacctatccgcaacccaaaggcccggtttggagttggagatagtcatggggatggccttgaccttcttagaaggcgaatttaacggtagcagtttaagtgtattggggagaaacaaaatcttcaatgaggtgagggagttgcctattattggtggcacgggtgagtttcgcttcgcacgtggctatatccttgctaggactgtcaaggtcgattaccataaaggggatgctaccgtcgaatacaacgcatatgtttaccattattcttccaccagctcttcttctcaccacctttttaataagggacttcaaatggcggcagatcctctgcaactttaattggccttaaataatttatgtcatggagaaagcttataataaactccagaaaatcatttcatcgctgaactcgttaaatatagagatggatttgtagaattttgccgaaattagactacagaaggtgggggcataaatccaaagaccaagttgctaatttactcctctgaaattaacttctgtccagtactataaataaatttgctcttttcgtacacggaatgtaagtctttgttgtagtgcaagttgcgtcagctaaataatgtgccaatcggaaatatttttttttttggaaatgttgcccgttgattattatttgtattgtgcaattgaaaagatagagagaaagtggcccggagttgaaaacttgatatcattacaatgtgtaccaaaaatgtgaaagtatcattgtctcgttgctatctaaaatcccttgctagcacacccatttaaagtacaggttcataatgaaatgcaactgattcttttgaagggagtgcaaattgtaaaatagtctacagatctggtttaagaattaatatatgaattgtagatttagattaactttgtcttgatggggggtaataatttcctgtcacctgtattaatgaatacttttgtacacacgtgtacatttggcaatcttaaaatgtgcctcttatctttgttggattctgtgtgtctgttacactctctcagaagccactactcccccccggacccaagcaaaaacaggcgcacctcgctagagaacgtttacaaggccttgatgaaatacgcaacagatgccatgaaagagtctcgcatccctgaattcctgtcatcgcagaacagaagggaatatagaaggatggattttgaagaattttgtgcagctgcattgagtgtgcatcaacttgaagctcttgatcgttgggaacaacatgcccgctgtgcatatgaactctttgataaagacggaaacagggctattgtcattgaagagcttgcttcagaacttggacttggtccctctatccctgttcatgtcgttcttcatgattggatacgccatactgatggcaagttaagttttcttgggtttgtcaaattattacacggtgtgtctagccgaagccttgcaaaggttcaatgaaatttaaagcagaagccctatggatatgctgaattttctctgccttgtgtggctcgaccatagttgaatttgtatctagtgcgtgctggaactaattattgttgtcttgttgctatctgaagctcttgctagcacacacccatttaaagtacaggttcataatgaaatgcaactctgattcttttgaagggagctcaaattgtaaaatagtctacagatctggtttaagaattaatatatgaattgtagatttagattagctttgtcttgatgggtggtaataatttcctgtcacctgtattaatgaatacttttgtacacacggtacatttgtgagtcttcaaattttactcttatttttgttgttgtattttgtgttatgttacacattctttgaatcaattacttttcctcgtacc

SEQ ID NO: 44248 - DNA, 2708 bp, Glycine max
  Clone ID: PAT_MRT3847_139954C.1
attcttaattgcatttttttttaaaatttaatattgatattactttatttatgaataactacaattctaacgttggggagaaaaaacattcatactgattttataataaatatttatactgacgtttaaatttatagcaaaaaaaaaactcacacaatgaacatcaattttctaacgttggggagaatagcaattcccttgtataacatcttgaacgtaaaagcagcagcaccagatagcataaatatccctcctccactgaattgtacaactttagccccactctagagaaaataaagcacagcctagcaaccctccttttctcccatccctccaatccatgaatttttacttgcaacaatcatgaatcatatagaaaggtctctgtgagtgtagttaactgctttgtcaccatccactatttgtccacttcctttgagaatccatctggttgttaacaatccatcaactcctactggaccccgagcatgaatcctgcttgtacttattccaacctctgcacctagtccaaatcgtgccccatcactgaatcttgtactagcattgtggaaaacagcagcactgtctacttggcgtagaaacacattggctacttcatgatcttctgcaacaacggaatcagtatgtgcaattatcaagaaataaagagtggcatgccttccataaagatttatatgatcaatagctgcataaacatcatccacaatttcaactgtgcatgccaacgaattgtactcatgatgtaacatacgagccattggaatatttaacaaaggacttgccttgggtcctccatacaatgtaacaccttctgtccgtaggtcaataataatactattgagccaacctttctctaccaagtccttgtgaacaagaagagtttccatggcattgcagcctgctggatagtctatttttgcatctagtacaatccgccttgccatctccagatcagcagatttatcaacatagacatgacaaattccatctgcatgacccaggacaggaattttagtggaactcttgatctgagtgacaagtttgttgctgcctcttggaatcactagatcaattacatcatccaacttaagtagctcaggaatttctgctcttgatgtcacaagtccaataagttttgagccaacaatatctggtatggcttcagtaattactttgtgcaaaattgcatttgatcgcttagcctccttgcctcctttcaagagaagcccattcccacttcggattgccaaagaagctatctgtactagtgcatcagggcgagactcaaaaacaattaaaagaactcctaaagaagatgatgttttctccaaaatcagcccctctgcaagctcagttcgttttaacactcgaccaattggatcttccatgtttgcaataattcgaatgttgttagcaaggcttgcaagcagtctagcaaccaaggatttttcatatcctgcttcttttgcatcagcaacatcagcttcattttcaatcctgatctcattttgatgtgcttccagggcatcagctatttttagcaaaatttgtttcctctcttctgaagataaggcctgaagccgtctggaacagtccctagctgcaactgccatctcacgagcatcaacctcttttaccggggcccatttatgtgcatctttatggaagagggttccaatccgttgtccttggagaactttaatgatattttcagctgcataaccactaaaatgtggcagaaccaaggaaaaaccaatttgcaggatgaaaatcaccataaagtgggtagcataaataatggatttcatagtgttcttggaattaaaattcctagtaatgataacaggaatgccagcttcagctgcatgaatagaagcctttactttagcagtcattccacctcttcccactctagacttgtctccaaaagtaatttcactttgatgcttttccttaatgtatgtatgaataagttttgaacgtggatcacttggagggccactatagagaccctctacatcactcaacaaaataagaagatcagcttttaattccaatgccaataaagctgataaactgtcattatcccaaaatatgccagaagaatcctcatatggagctttcctagtactaactgcatcgttctcgttgaatatgggaataacttttaatgctaacaatgatttcatagtttcgctgagctgcattctgaaatctttgtctctaaaatcattgtccgtcacaagaagctgagcagatgtcacatccagctgactaaacaaaacatcataaagagccataaggctgttttgtccaacagcagcacaagccttgccatcaagttcaacttgcggcttctgaaggtcagcaaagctgctgttaattaattttctgtatctaagcctttggcgaccaaggccaacagcacctgatgacaccaaaataatctcataaccaagagaattcagctccttaatctgctcacagagtgcccctaattttccaacagctaaccttccatcttggcgagtgaccacagcagtcccaaccttgattatgatgcgcttaacatccttgagaaaatgtctacaaggatctgtgttctccatggctgcgtgctgatactggagcgcagcagacaagaccttcgaatgcaaatggaatcaaagtggatagcgccgccgaat

SEQ ID NO: 44249 - DNA, 1227 bp, Glycine max
  Clone ID: PAT_MRT3847_139955C.1
agcatcactacctcagtatatactcactaattggaaacccttctcctacctccatggctaatttcataactttcttcattcccctagccctaaccctccttttctcctccctcgtcactgccagttaccatcaaagcatctctccaagccttctacgttctcgtgagaagctcacgcaccttcgcttctatttccatgaaatttttactagcgacaaaccctctaatctcgtgatcgacccccccaaggtggtagccgactctccccttccatttgggtcccaagtggtgatcgaggacccattaacaattgggcctgatgtcgagtccaaacagataggtaaggcccaagggttttacctatccgcaacccaaaggcccggtttggagttggagatagtcatggggatggccttgaccttcttagaaggcgaatttaacggtagcagtttaagtgtgttggggagaaacaaaatcttcaatgaggtgagggagttgcctattattggtggcacgggtgagtttcgcttcgcacgtggctatatcctagctaggagtgtcaaggtcgattaccataaaggggatgctaccgtggaatacaacgcttatgtgtatcattattcttccactagctcttcgtctcacgagatttttaacgatggagttcagttcatgacagaccctattcttagcaagatttagatttttaactaatttatgtgttggaggaagtttataaaaaactttaggaaatttgtatctaaactaactcgatacaattttctaagttttactcacataaataagttcggaaattagactgcggaaggtgggggaataaatccaaataccaagttgctaatttactcctttgaaaactatgcctcggttcagtactataaataaatttgttgtcttgtcgtacacaaaatgtaagtctttgttgtagtgcaagttgcgtgagctaaataacgtgccagtcttaaaaatttaagtctttgttgtagtacaagttgcgtgagctgaataatgtgccgcaccttttttttttgttggagatttagaccgttgattattatgtgtattctgcaattgaatagatatagagaaagagacccgggggttgaaaacttgatatccatgacaatcatgtaatatatatatatatacacacgaaaaataatactacctcctcgtttctttataattatattgttgaacttttgat

SEQ ID NO: 44250 - DNA, 508 bp, Glycine max
  Clone ID: PAT_MRT3847_139956C.1
gagccggaaaaaaaaccaaccttaaccaaaaaagaaaaccctttgggaaaagaacatgggtaaaaaacaaataaaaaaaagcccaagggaaccccaggggggcccaaaaacccttttatttggaaacccaccctatataaacccccaacgggaaaaaaagcccccaactttaatgggacctaaaaccaggggggggggaaccccccccctaaaaaaaaaaaaaagcccaaccttcaagggaacgaaggatttttgctcaagccttataaaaagcaggggccccgggggggggctttccccaaaaaagctttaagggggccccccccccaggggaaaggggggtaatttggggggaaagcccaaccttttccacagggggaagggggcccccccccccaaggggggggggcacccccttcccaccaaaattgggaagtttttggggtaaaaccctgggcccggggggaaacttaacaaacccaaaaacccccgtggggcccttccaaaa

SEQ ID NO: 44251 - DNA, 1823 bp, Glycine max
  unsure (1)..(1823): unsure at all n locations
  Clone ID: PAT_MRT3847_139957C.1
ggcgataccggaggagggggaggagggtgcggcggatttggataagagatttgggttctccaaggagttcactagtangttggaggtgggtgaagaggtnnntcnagggcattttgggtatacgtgttctgctaagttcaagaagggtgagctcaagggtcaacaagtagctgttaaggtcataccaaaagcaaagatgacaacagcaattgctattgaagatgtgagaagggaggtgaaaatactgcgagctttgaatggacacagcaatctgatacagttctatgatgcatttgaagaccaagataatgtctacattgttatggagttatgtgaagggggggagctcttagatatgatattatcaagaggagggaaatactcacggcttgatgcaaaggctgtcatggtacagatactaaatggttgttgcattttgtcatctacagggtgtggtacaccgagatcttaagccgggagaattttttgtatgctaaaaaggatgaaagttctgagttgaaagctatagactttgggttatcagattttgtcagaccagatgaaattcggctcgagtacggctgcgagaagacgacagaagggggaagtgcatattatgtggcccctgaagttctccatagatcttatagcacagaggctgatgtgtggagtataggtgtgatagcatatattctattatgtggcagtcgtccattttgggctcgaacagagtctggtatttttagggcagttttgaaagctgatccaagctttgatgaaacaccgtggccatctttatctttagaagctaaagattttgtcaaacgcttattgaataaggatccacggaagcgaatatctgctgctcaggctctaagtcatccttggatacgaaattacaataatgtaaaagttccacttgatattttaatatttaagttgatgaagacatatatgagatcatcatccttacgcaaggctgccttaagggccttgtcaaaaacattgactgcagatgaactctattatctgagggagcaatttgcactgctagaaccaagcaaaaatggcagcatatctttagagaatgttaacaaggccttgatgaaatatgcaacagatgccatgaaagagtctcgcatccttgacttcctttcatcgctgaactcgttacaatatagaaggatggattttgaagaattttgtgcagctgcattgagtgtgcatcaacttgaagctcttgatcgttgggaacaacatgcccgctgtgcatatgaactttttgataaagacggaaacagggctattgtcattgaagagcttgtttcagaacttggacttggtccctctattcctgttcatgttgttcttcatgattggatacgccacacggatgggaagttaagctttcttgggtttgtcaaattattacacggtgtatctagccgaagccttgcaaaggttcaatgaaacttaaagcaaaagccctatggatatgctgaattcctctgccttatgtggctcgaccttagttgaagaactaattatcgttgtctcgttgctatctaaaatcccttgctagcacacccatttaaagtacaggttcataatgaaatgcaactgattcttttgaagggagtgcaaattgtaaaatagtctacagatctggtttaagaattaatatatgaattgtagatttagattaactttgtcttgatggggggtaataatttcctgtcacctgtattaatgaatacttttgtacacacggtacatttgtgagtcttaaaattttactcttatttttgttgaaaaaaaaacat

SEQ ID NO: 44252 - DNA, 473 bp, Glycine max
  Clone ID: PAT_MRT3847_139959C.1
ttccaggaaggtttcccgtcatcactgtatgacgtcctccttctttgggggggggggggggggggggggggggggggcaacacgaaaattataataaaaggtatggcaggaggcacgagcgcacataattgtagatagaagacgatagttatttaaatttggatggatggggtagagacccgcgataaaaatgcggcgtacgaaggtgaaacccgggatagtaggtgatagtaatggctgtaggtgtggggatcctactattagcgagattaccaatgacggtccaggtattactttgagaacataattggccgagtcaaaagcccacaaaggagatctttaagcgaaaatcatgactggtgagagtttagtggcggcaagagcattataggctacaagagactcgtatccaacctaaggtttaaaggcacgaaaagtaagacagcataaggaccgtgaaaacgacagccaat

SEQ ID NO: 44253 - DNA, 144 bp, Glycine max
  Clone ID: PAT_MRT3847_13995C.1
gtccttatcagatgaggattcaaatgccactttatcaaaggaggaagagagccatttaagtgttgaaagcttccacagtgctgggttgtttttggcaggtaggaagagaagcaagatgcaacaagtgataattgggagtaaaaa

SEQ ID NO: 44254 - DNA, 184 bp, Glycine max
  Clone ID: PAT_MRT3847_139960C.1
tagcgcggacgacgaatgaaggacacgggtgcgacaagacgacacaacgggacacaactgaccaagataagactatccatagcagacggagaaaggaagaggaccttgacagcccggtcaatactctgagccatcacctcttacctacctatatgcaccgatggtgatgtggtcaacactagat

SEQ ID NO: 44255 - DNA, 584 bp, Glycine max
  Clone ID: PAT_MRT3847_139961C.1
gactaaattagattttactagactccagtgccaattataaaacatgagacgggtaaatagaaacaatgcgaacacaacaatgagagatcaatcaagttccctaccaatattactattgcggccactgcaaaattaaaattcaaaatgcgctgcactatagacagagatctgctgggacatgttctttactcattctgaattcatgatcacatgaaaattcgcagaaccaagacagaaattataacagtaagcatactctcctacataggcctagtatgaagaaaatactagagctgtcaacaatgcaacaaagccaggctactccgaaataaacgattccatgtggggtaatcatatttgcagaacttgttgatttagaagactcctcttaagatgcagcatattcaccttctgatgccggtgatgagcttgattcttgcgatgatcctcctcctgctgctgtgttgttgcactgagaaaggttaacatatatgccacaagcttgagggagctgtatgatctcaatccttggaagcaccaggggactgaaacaaccgagtgtagttaacgaaattgcaaacaca

SEQ ID NO: 44256 - DNA, 133 bp, Glycine max
  Clone ID: PAT_MRT3847_139962C.1
caattttgctccaaagacaaggagagtcgctccccaccaggagggggattccatatgctttttcaagagggattactcaggtacaaaatacggttttttgaccttaacgccctgaaaagaatgggatgccaaa

SEQ ID NO: 44257 - DNA, 240 bp, Glycine max
  Clone ID: PAT_MRT3847_139963C.1
cggacgcgtgggaatttaaaaaaaaaattttaaaaaaaaaaaaaaaaaaaaaaaaaaaaaaaaaaaaaaaaaaaaaaaggacgaacaaatttaaaggagggccggcttatttacgggtgcttgccaaaaattagcttttttttaatgtcatcttttttctatggggtggccgaacttttttacgtggccgactggaaaaaccttggtgtatggggaatttttttggcgttgccccaacat

SEQ ID NO: 44258 - DNA, 492 bp, Glycine max
  Clone ID: PAT_MRT3847_139964C.1
ctccaatccatgcatgatcttttaattcatcaaaactgtgcatctgcgcagctctagtctcccttaattaacaatatagaattcagaaacagcaaaacattaacacccatgcttaataattttgcttaattgaaaaggagagggaaccggcaacgcatgcaccgttggacaattcatacaattattgaaacccaagagagaaaatcaaaatatacatacatctgctcaattcaaagaaacaaaaaccactcatgactcgtgtatatttacaagacaaaactttgtggctacaaaatacaccagattcaatcaagcacagcacaaaaggaaaaagattttactttccaaacagtaacaagtaaaatttgttcaacgcgccacgtcactccctggaagcactcttccaacgccttggtcccacgccaaaagactcgcctttttttctcaattgcttacatccaagggcaaagggccccatttcgtgtttgccct

SEQ ID NO: 44259 - DNA, 366 bp, Glycine max
  Clone ID: PAT_MRT3847_139965C.1
ctttcatttttttttcttttttctcccaattacctttttttcttaaaattacaatcccctccatttcagggaaataaccaaacttggccgggtcatcacacctaattcttccaattcaaccaaaacattataaaaacccacatttttaaattctctccacccatttacattaaccaatttataaatcttttaacacaaaaacccataccctaccctaaaccacccaataaaaacaatttgagccacactccctcataaaaaaaatatgaccccattcttaacccctaaaaccatatttatccccccctaaaaataatcttccaaaagctcattcacaaaccaaaccccctttatattttttctaaa

SEQ ID NO: 44260 - DNA, 113 bp, Glycine max
  Clone ID: PAT_MRT3847_139966C.1
gctgctttgccaagctcaccaatacctactgtgctggtatcgatcggaggctcagagagcttctacagggtgtccgaaggcgagctctccgttgccctgcccgtggtggacgc

SEQ ID NO: 44261 - DNA, 261 bp, Glycine max
  unsure (1)..(261): unsure at all n locations
  Clone ID: PAT_MRT3847_139967C.1
ccctaaacgactctatccctcttcgttttgttcttccttncgctcctacctncgttcganacgttatccctcgcgtagancggcaatggcggagaccgagacgtttgctttccaggctncgntcanccagnttcctcagtatacatnatnaacagcttgtcactccaacaangncatcttnacttcgtganctcatcagcaacggntctnatgctttgnnacanatnaganttgagagtctgacggacaagagcaagctcg

SEQ ID NO: 44262 - DNA, 767 bp, Glycine max
  unsure (1)..(767): unsure at all n locations
  Clone ID: PAT_MRT3847_139968C.1
ccaaatatataattctctttcatctgaattttccctttcaaatctcttcctttgaagttttcgtagttctctgcatcatggagatggaacgcgtcttcgagtttcctcacactcacatggatcggcgcccgagaaagagagcgagattgggctgggacatccctgaggtccccaaggctcaggtaggattgttttgtggacaagatgttgggactatttcaagctttgctccttcaaggggtccctcagaaaataccactagttctctatttgttaagccagttgctcgaaatggttctcccccttggcgagatgatgacaaagatgggcattacatgtttgcgcttggagaaaatttaacttctcgctataagatacatagcaaaatgggtgaaggaacttttgggcaggtcttagaatgctgggatagagaaaggaaggaaatggttgccgtaaaaattgtccgtggtattaagaagtatcgagaagcagccatgatagaaaattgaggtgttgcaacagcttggtaaacacgataaaggaggcaatcggtaagtaattttaacttanatttgtcacgtatgcatactacaatgaaaatccttgattccattgcattggttaaatgggcttattccttgcagtttgtgtgcanatacggaactggtttgactatcgtaatcatatctgatttgtaagtatttaatttgtgatggaatcatttccccaatttacaatattttggggggttaagacacagtgaattt

SEQ ID NO: 44263 - DNA, 241 bp, Glycine max
  Clone ID: PAT_MRT3847_139969C.1
cggaaagtcaaacattcacccaccataaaagtcaccaatggtagccttccttccatgagtagacatgattgatctaccatcattatgtacctttggtaaaatacgagagcaaaaacatcaaaagaaaaacatgaatcaaacatatatagtctataggtattattattattattattatccaaattccaaaacagtaaaacagaaataaatagatagatagatcccttgtatacaagtatgt

SEQ ID NO: 44264 - DNA, 1233 bp, Glycine max
  Clone ID: PAT_MRT3847_13996C.1
gtttcgggagaaaaagcaatccactcagaggacccttttaattgttcaccgggttgaagttcaaaattgatcagctagaagaattcaacaatgcctcgctatgatgataaatacggcaatacccgcctctatgtgggacacttgtcttcgaggactcgttcccgtgatctggagcgtgcctttagcagatatggaagagttcgaggtgtggatatgaagaatgatttcgcttttgttgattttagtgatcctcgagatgctgatgatgcaagatataacctggatggtcgtgaagttgaaggaaggcacgttactgtggaatttgccaaggggggtcctcgtggttcctgggaatcctcaggtcagggtcagggtccacctactggacctggacgatgttttgactgtggcttgatggtcattgggcccgagattgcaaaactggggatgggaagaacaagtgtttccttagtggggaaagaggtcatatagaaaagaactgtaagaacagtcccaaaaagttgagacatggatgaagtctttcaggtcacattctgctcatcatggcagaagaagggatcgaagctacagccgagaccgcagctacagtcgatcaatatctcctgtcggaagagaacgaagcccagtttctgaagatagatcagagtcctcaaccctcctagataagaaagcatagtgcatcacttgaccaaagcagtccacagaagagaggtgtcacatctcctggcagtgataggttggccacccggcaagatgggtctgactacagtggtggtcctagaaagaaaagtaggagccctgcaagggactgtgatgagggcggctatgatagccctaaagttaatgggcatagccgtagccttagggatgatgacaagagccccattgatgaagatgatgacaaccaccgtcgctcactgtcaccttgaaaagcactttctgataaaatggggtcaggatgtgacccagtttgtatctgctttgtatataaaatgcactccagcttaattctgtgacaattgtttatgaaaacggttttgtgtatggtatttttcagattcttgctggtcaaaaaaaaaaaaaaaaaaaaaaaaaaaaaaaaaaaaaaaaaaaaaaaaaaaaaaaaaaaaaaaaaaaaaaaaaaaaaaaaaaaaaaaaaaaaaaaaaaaaaaaaaaaaaaaaaaaaaaaaaaaaaaaaaaaaaaaagggggg

SEQ ID NO: 44265 - DNA, 853 bp, Glycine max
  Clone ID: PAT_MRT3847_139970C.1
agaagggggaagcccgggcgtccgctctatcttcccaaaatcatataattctctttcatctgaattttccctttcaaatctcttcctttgaagttttcgtagttctctgcatcatggagatggaacgcgtcttcgagtttcctcacactcacatggatcggcgcccgagaaagagagcgagattgggctgggacatccctgaggtccccaagataagatacatagcaaaatgggtgaaggaacttttgggcaggtcttagaatgctgggatagagaaaggaaggaaatggttgccgtaaaaattgtccgtggtattaagaagtatcgagaagcagccatgatagaaattgaggtgttgcaacagcttggtaaacacgataaaggaggcaatcgtcatgcatgacttgcgcatgattcatactgacctgaagcctgaaaacatactactagtttcaccagagtatgtcaaagtctgcgtaagtaattttaacttaaatttgtcacgtatgcatactacaatgaaaatccttgattccattgcattggttaaatgggcttattccttgcagttgtgtgcaaatacggaactggtttgactatcgtaatcatatctgtattgtaagtatttaatttgtgatggaatcatttccccaatttacaaataatttgggggttaagacaacagtgaatttaaatggttttaacaggtgtttgagaaacttggaccaagcttatacgattttcttcggaaaaacaattatcgctcatttcccattgatcttgtccgtgagattggcagacaactattggaatgtatagcattcatgcatgacttacgcgtgattcatactga

SEQ ID NO: 44266 - DNA, 1676 bp, Glycine max
  unsure (1)..(1676): unsure at all n locations
  Clone ID: PAT_MRT3847_139971C.1
ccggaattcccgggtcgacccacgcgtccgctctatcttcccaaaatcatataattctctttcatctgaattttccctttcaaatctcttcctttgaagttttcgtagttctctgcatcatggagatggaacgcgtcttcgagtttcctcacactcacatggatcggcgcccgagaaagagagcgagattgggctgggacatccctgaggtccccaaggctcaggtaggattgttttgtggacaagatgttgggactatttcaagctttgctccttcaaggggtccctcagaaaataccactagttctctatttgttaagccagttgctcgaaatggttctcccccttggcgagatgatgacaaagatgggcattacatgtttgcgcttggagaaaatttaacttctcgctataagatacatagcaaaatgggtgaaggaacttttgggcaggtcttagaatgctgggatagagaaaggaaggaaatggttgccgtaaaaattgtccgtggtattaagaagtatcgagaagcagccatgatagaaattgaggtgttgcaacagcttggtaaacacgataaaggaggcaatcgttgtgtgcaaatacggaactggtttgactatcgtaatcatatctgtattgtgtttgagaaacttggaccaagcttatacgattttcttcggaaaaacaattatcgctcatttcccattgatcttgtccgtgagattggcagacaactattggaatgtatagcattcatgcatgacttgcgcatgattcatactgacctgaagcctgaaaacatactactagtttcaccagagtatgtcaaagttcctgactacaagagttcatctagatcaccaagttcctatttcaagagagttcccaaatcaagtgctataaaggttattgattttggcagcaccacttatgagcgagaagatcagaattacattgtgtcaactcgtcattatagggctcctgaagagctgatatctggaatgtagctatccttggacttggctggagctatccatgtgatatatggagtgtgggctgtatattggttgaattatgcactggtgaagctttgtttcagactcatgaaaatttagagcatctggctatgatggagagggtgcttggtcctataccacagcagatgttaaagagagttgaccgacatgcagagaagtatgttcgaaggggtaggttggactggccagagggtgcaatctcacgagagagtattaaagctgttatgaagcttccccgactacagaaccttataatgcagcatgttgatcattcagctggagatcttatacatcttttgcaggggctacttagatatgacccctttgaaagacttacagctagggatgctttgaggcattccttctttatgagagatcatcttaggagatgatttttatgtgtttgtaaacgattggtctgcttttaggtgaaagatcactcgagggcaaatatggctgtaaggagcctatgtgccaatgtaaataaatatttaaatttaggcttgtgtgacaagtgaggatggttattcagcagcatttacacctcaacctcaaagcctgtgtttcaaacgttttattaaaaaataataattgtagatgttactaaaaaaaaaaaaaacaaaaggcgnccccccc

SEQ ID NO: 44267 - DNA, 451 bp, Glycine max
  Clone ID: PAT_MRT3847_139972C.1
tacggctgcgagaagacgacagaaggggtgttaaatttcttatattgatcatgtgaaaattaaccgaagaagaagagtcatgtactcacacagaatgaaaaaatattaaattatcattaatcacaaatcattttatgttgtcataaatttgttaatttttattataattaaataccttaaaattttagaattgaaattttaatttttcatatttaatatttattttaaaaaataagattctaaaaaaaagtctcacggagagtttttttttttttgtcatcgggaggtgaaaatctaattttcttcatttaatttttttattacactaaaaatttcatattattcttattagattatttaatatgataaataactaaagtaatgaatagacatatcaagattttcaaaaaaaattatataaatattttcaagaatatttttttttggattt

SEQ ID NO: 44268 - DNA, 227 bp, Glycine max
  unsure (1)..(227): unsure at all n locations
  Clone ID: PAT_MRT3847_139973C.1
ggggtggagtttttcttnttcttcttcttctncttcttttttattttaganccaagacccaaacgggtttggaatttataacatgtccttcttcctcatcaccaccctatttttcttcttctcctccttcaaatctaatccctcaaatcaccgatacaaaattatcatcttcttacctttttacaccaacaaatttgtccccttccacaaccctaacgaaacctacc

SEQ ID NO: 44269 - DNA, 281 bp, Glycine max
  Clone ID: PAT_MRT3847_139974C.1
ctttttactgctgtttttatactaagactcgttaccggtggtggttgatagtctagagggagtcgctcatcttggcgaactgtattctggtgtctatgttccactgcctactaaatctatattaggaggacacctccaacgaatggaaactggttctaccttgcgataaaatatctagtgtttcgacttccaactgatgagagattggtaggcacagaacatgagggatctgagcctttctttggtggaatccaaatatatgccaatcccatgatgcccct

SEQ ID NO: 44270 - DNA, 503 bp, Glycine max
  unsure (1)..(503): unsure at all n locations
  Clone ID: PAT_MRT3847_139975C.1
cccacgcgtccgcccacgcgtccgtacggctgcgagaagacgacagaaggggctcctcaaacttggaacaaaacgaaaaccaatcacaacaacgtagtaaaactcaaaaccaggaaattaatatgagctgcaacggttgccgtgtgctccggaaggggtgcagcgacacatgccctctgaggtcgtgcctgcagtggatcgaatcttcggagtcacaacgacacgccactctcttcctcgctaagttctttggccgtagcgacctaatgtccttcatttcctccgtccccgaaaccaaaaggcctggtactgtccaacactctaccttgtactcactcataattcatgcttttacgtgtgcttagatttcatgctatatagctgcctacgtcttaaaatataaagtgtattcatattttataagatgaattatatttataattggtcatttgatttgaatcaatgattatanatcctttagagtgaagcctcttttcttttta

SEQ ID NO: 44271 - DNA, 382 bp, Glycine max
  Clone ID: PAT_MRT3847_139976C.1
agtgctgttaaagattttaaccgtgtgttagtttgactggccccagaccagtgataagaccccaaattggaatttcccttctctctgtgatccattatgattaacctttcattttcaaccacaatagaaaagtggcgggcctgtgttaccagggggctgggctggacattggacccagtttacgactggaggctaatttacatgcttagaaaagaaaataatgatttttggggggggaaaccctggaagggtaacaataattatgttccttagggggctcattaccattttttgaatgtaactagtacttggggaggggaaaaattccctatgtataataggggtcatgagggacccatgaaactgggggggcccttttttt

SEQ ID NO: 44272 - DNA, 221 bp, Glycine max
  Clone ID: PAT_MRT3847_139977C.1
ctcaggaccagtttttttttgttatcataaagaacttggttaagaacattccttgagctcttaatttgaatttgcctataacaaggaccattacaccttggtctgtgtggcttatttttagaacttaacactagtttttcataaggataatcttaacactgcaatgtttgcttgatctgtaattgtccactccaccactatttttgttttattgacaggtc

SEQ ID NO: 44273 - DNA, 230 bp, Glycine max
  unsure (1)..(230): unsure at all n locations
  Clone ID: PAT_MRT3847_139978C.1
tttntgttactaataatcccgaaaggcaatgagaacatcacaaattctgttggctttgcttnggttcntcngnanttatgccccctnctgtttngagcaatgtncgtatgacacagagattggtcattganggcaacncagtcttggactggccatcatactctacatcaagaggcantctcgatcaaagngatgtggntggatagtttgattacgancataagcattac

SEQ ID NO: 44274 - DNA, 616 bp, Glycine max
  Clone ID: PAT_MRT3847_139979C.1
cggtcgtccttttttttttttttgattttttcgttttttttctttttttttttttttgttttttttttttttttttttttttttttttttttttttttttgggaggaaaaaacccaggggggaaaatttttttttttgtttcccccctttttttcaaagcccaggaagggggttttaaaaccccccccccgctattatacttacccccaaaaaaagaacctgggtaaacccacttttttttttcctttttaaaggaaagaaaagggggtcccttcaaaccctttaaaaaaaaaaactggaaacagaaacccctttccaaatttccccccacccaaagaaaaaaacaaggggcccaaacccatataaaaaaaacttggatttattacccccaccccctagagagcccaaattccctttttgggggttcccgcggccccccaccttggattgttaaaccacgggcccccaaagggaaaaaaactcctcccttttgagggggtaaaaagggctaagaaaaattatttttgttgtagggggcacccccccaaattgggggggggggggttgaaaccctcttttgtctttgaaccaaaagggccccttgggggggtttttt

SEQ ID NO: 44275 - DNA, 297 bp, Glycine max
  unsure (1)..(297): unsure at all n locations
  Clone ID: PAT_MRT3847_13997C.1
gagagaaaatggcagcgcctctgctttcaatttagacccacacgaagaagccatagagccggaacattctccangatgacaggactatggaaatcaatactaactgatgcataccaaaaggcatagaacgtcatgaaaacagaaagatcaaggtaagcactgagaagaccatcataggtaaaggtgcagactctaagacctaaggaaatgtaacgaacaagatcaggaaatcagaaggacccaatgagaatgatcatcaacagctcaggatgcacaacataacttactgcgctgata

SEQ ID NO: 44276 - DNA, 720 bp, Glycine max
  unsure (1)..(720): unsure at all n locations
  Clone ID: PAT_MRT3847_139980C.1
gctcgagccgaatccacccgaggaaaagcacggaagaaagtgagaagtactccaagttttgttgttgagtgatgagtcttgaaacatgaagcagaatgatcggcgaagggagtgtttgtctaattcgaattcagaaagttgttctttcttattgatgggaagagaaccccctcagaatttgttaccttccaaacacgacttccccagacttgtccttgtggttgcactcgcatcgctagttgcttggacctgcaacttcctcttcaccccttccaaacccttctgcgaccccaacctccactctccggattacttttccggtctctctctctctctctctctctctctctctctctctctctctatgtcattcatttgcttctctaatttccctcactttctttttgtgctgtgaatgtcatgcatttgatgtgactgtgttatgtgttaagtctagtggtgtggtgacttattgttctgccatgtactgttacaactcaacaagccactccactaggtctaggttgttcaattgaactttgatttagcaaatttcagtctgccactgaacgatgaatgacaagtgccaagtctccatttattctcaggacgattttattctattttgtatcattttccctattttttggtttatnttgttctcgttggcgggnttgtgcatttgagttntcttgcaatgatggccaattcaatatactc

SEQ ID NO: 44277 - DNA, 755 bp, Glycine max
  Clone ID: PAT_MRT3847_139981C.1
acgagctgcaactgagcaatctgacaaaattaaataaataaaagcaaaggaaaccacttccccctctctttctctctgtttcctctgccactccccatcactattgcaaactccattaagcaaaaacaaaatcatccaaatctctctctctctgtgcccacttgtgtatactggctctcccaaccatggaagctttcaccttgctcaaatactggagaggcggcggtgctctcggacacccaccttcctccgacactccctcttcacgcaccgccaccaccaccaccatcctcaccgccgtcgaaaacgaaaatgcaaccgaaagcgacgacgacgacgacggccccttcttcgacttagagttcaccgtccccgacgaagacgctcatgaaaatccaaacgcgaaccacacccaagaagaagaagatgaagatattaacatcgaagaatccgacggcgagagagagtttaagttcactctctccccttcgagcaacgaccgtagtgatccgaacctctcgccgctgtctccttcggacgatctgttcttcaagggaaagctggtgcacgtggacccttccgaacctaactccaagcctcagttcaccgcctccctcttaaaatccgccaccaaattccgcgtcttcatgttgggcctcaaaaagcccaagcccaacgacaaagactccaacaacggttccgattccgcaattccagaggcccacaaagacaagaagcacttcaccgtcaaattc

SEQ ID NO: 44278 - DNA, 681 bp, Glycine max
  Clone ID: PAT_MRT3847_139982C.1
ttcccccccccccccccccccccccccttggttgtattaattgtctatatttatctttttttgttaaaaaaaatattttgcgtgtgtatttaaattatttgtattttcaatttatttgattaataaaatacataattaatcaacaacttaattgacataaaaaaaaatatttaaccaacaacttgaattgaactaaaatatttaaattataaaatagatataaaattataaaaaatagaataaaatatttaaattccaaacaatacaataaaatttttaaaatataaacaatatgacataaatttaactttgttggcttgagcctacattccgaggacatttgttctttaaatggcttgagatgtgacataaaacatcatttttgttgacccggatctcacatatccattttggtgtatgtacgagaggagactgaacaacctttagaatttcttatcaactttgggtcagggaaaattcttggtttttgacactgtggctaatatgaatcattatgcaattcaccaaactatcatttgtacatctcgaagacactttccaatgtatatacaagatgtatgtagttcctatattcttagtgaacatgcttaaagcagcgataacatgaaaacaaggcatgtgcaccttttagaatttgccatagtctttcatccaatctac

SEQ ID NO: 44279 - DNA, 1231 bp, Glycine max
  unsure (1)..(1231): unsure at all n locations
  Clone ID: PAT_MRT3847_139983C.1
agcncggagggggctcgagggatgcaagacccaacagcattccaaggagtgaagccaccccagtttcctgaacaagaacaactcaagtgtccacgttgtgactccaacaacaccaaattctgctactataacaactacaacctctcgcagccacgccacttttgcaagaactgcagaaggtactggactaaaggtggcgctttgagaaacatccctgttgggggtggaagcagaaagaccacaaaacgttcttcatcaaccttatcaaaacgctcttctgcaccatcttcttcctctgcagtttcggatcctgacccgacccggatttgcaccaacccggttgatcaagaccaaagggtgctcaacattggtggtggcagtttcagttcccttctagcttcatctgggcacttcggaaccctcttggagggtctgaatccatctgggtcgggtctcaaaatgggtgaatttgtggagggcgtgagttctgacccgggtctgaatctggattcgggtctaaacccggatttgcaggttcagagcaatgagaattcagagagttttctaggtttgcagaatggtgattcaagctgttggaatggtactcatggttggtctgatcttgcaatatacacacctggcccaagttttcaatagaagcttagtgataaaagtttgagactttttggcttaatccagcttctcgattatggtgattggtcttatatatataatatatacttaaatactattgttgtgttttttcctggttatagaaaagtttagtggagtttgatcttgggaaattcataacaggtttcaccgttcaaaaagcacttaatgtacaggatattcaaattcacattcttgtgaaatatgaattctatcttgtcaactggatcaatcttcgttcatatttactatatgattatgtaaagagttatataatttgatcaagcctatggagagcatgctatggaggatcatacatacaccagaatgtcactgaagcagcatcctttaggtaaagatttttttttctttcaatagtttatatgctcgtgattggtgtttttcaaacttaccacttgtgaaaatttggggaaaaaaaaggcattttttttgtgaggatggctcggaggatgtgagatgttattatcatatgtaatttggtatgtgtttttgcatagcttttgaagtgtcctcggatatatggaagtttacattgaca

SEQ ID NO: 44280 - DNA, 295 bp, Glycine max
  unsure (1)..(295): unsure at all n locations
  Clone ID: PAT_MRT3847_139984C.1
tntgaagagtgnganagagatganagagacngcacntcggcaacncacnaatgagagnactcatccaggctttcaacatacggtcaangcccgagatccaggttgggcanattcctgatgggnactctantgacctggaacatggcatcccancccgatggcatgatgccaagtgactccttccttcngtgtagnccangacgcttcaacaccttcttcagcganaccggatccggcaaggcacgtcncttcgcgacgtcttcgtccgatctngagcccancgtcatcgacgaag

SEQ ID NO: 44281 - DNA, 589 bp, Glycine max
  Clone ID: PAT_MRT3847_139985C.1
gcaccagtaacttagcttttccccaagagcatacacttgctaataactgctaactattctttgccttagaaaatatattcgctgtgccactgcattatgggaaggtcaccatgctgtgaagagaatgttggtgtaaagaaagggccatggacgccagaagaagatgagaagctgattgattatatcagcaaacacggccatggcagttggagaacacttccaaagcgtgcaggtctcaataggtgtggtaagagctgcagattaaggtggacaaactatctgacgcctgatatcaagagaggcaaattcagtgaagaagatgagaggattatcatcaaccttcattcagttctcggaaacaagtggtcaaagattgcaacccatctgccaggacgaaccgacaatgagatcaagaactattggaacactcacataaggaaaaagcttctgaagatgggtattgatccagaaactcacaagccaaggacagacttgaatcacctcatgagtctttctcagttgcttggcacgtcaaacttgagcagtgccatgaacactacttggggcaataaccctcttggtttacaac

SEQ ID NO: 44282 - DNA, 943 bp, Glycine max
  Clone ID: PAT_MRT3847_139986C.1
acggcaggctctactcgaagttactagaagcagtgctcaaaacgggaaaccgaatgaacgttggaacaaccagaggaggtgctagagcatttaaactcgatgcacttctcaagcttgcagatgttaggggagctgatgggaaaaccacgaatggtccatttcgttgttcaggagattgttcgtcctgatggaataggagtttcagatagcattatggggaaaatcagccaaagaagtaagaacagatcggaggaagagaaggaagaagattacaaaaggatgggactagaacttgtttctggtctcagcactgagttatacaacgtgaaaaaaacagctaccattgacttggacgttcttgcaagctctgtgtcaaacctatcagaaggaatgaaaaagctgcaacatctagtggagaaggagttgcttaaaaatgaaaggagcatgaactttgtgcagtgtatgaagtcattccttaactatgctgatggaaacttgaaggagttgcgtggagatgaagatatagtgttggcacgcgtgaaagaaattacggagtattttcatggggatgtgatcagcaaagaagatggaaaccctcttaggatatttgtgattgtgagagattttctggggatgttagataatgtgtgtaaagaacttagaaggtctaaagctccacgtagcctgaaccctcttgctatgctccctttagatagatcctagatagactagaattaaacactgcctcgtgtgttcataggaattgataaaattttaaaccaattgagtgtaactttattttgattttttgtggagttttggagtatgtggattttgtattctctgactttgctaatcatatggaactattcgtttgattaaaacttttcccctcttcttagggaatgattaagaacagccaagggacagatctttacaattt

SEQ ID NO: 44283 - DNA, 651 bp, Glycine max
  Clone ID: PAT_MRT3847_139987C.1
cgatactttcatgtcatcagtgaaaattcactcatttggggtcttccaatcatatggagaagcttattcctttttcaggaatattgagctctgaccctgctcagaacactggtgaagatacactactgtggcggcgcatcttttgccggtcatccagagagtgagcagagaggaagtgggttgttcttcagaggctaggtcatatggaaaactattatggatgaactcttatcaactggcctgtctaaagcaaagcaggctttgctttcaggatgctctgctggaggattggcaactcttatacactgataatttccgacaagtacttccaaaggaagcaactgtcgagtgtcttgccgatgcaggattcttcctagatgaggtcttgcaaaaagtttgcacaaagattgcattgctaaaatggaaccatataagtgtctctttccatcagaaattgttaaaaacataaagactccactgttccttgttcatccagcttatgatttctggcagtagccacgctgaggcatgggataacttgggaaattatcattgtttggttacggtggctctttgctgaaggctgtgaatgaattccaacaatgaaaggagattggaatgtttatagattcctgctttgtccattgcctg

SEQ ID NO: 44284 - DNA, 1711 bp, Glycine max
  unsure (1)..(1711): unsure at all n locations
  Clone ID: PAT_MRT3847_139988C.1
tcgacccacgcgtccgaacaacgccatgccttcatggccgtcttcttcttccgctctaaccgctcccaatttgcgtcttcgcactctcagaatttgggcctccaaggactatgcaatcgccgcattcattttcctcattctcttctctctccttctcttctcccacttggattcccgttcccattcccgttacgattcccagccccatcactccaagctcgttccgntaaccctgctccgcaacgccaaccaaacgcgcgcgctttgcttggacgggagcgctccgcgggaccatgggcaaagcggcgccggatccggagcccgcaatnggctgagccacatcgagggaggagggcggcgcaggcgccagacctgccttgctattccagcgatactttcatgtcatcagtgaaaattcactcatttggggtcttccaatcatatggagaagcttattcctttttcaggaatattgagctctgaccctgctcagaacactggtgaagatacactactgtggcggcgcatcttttgccggtcatccagagagtgagcagagaggaagtgggttgttcttcagaggctaggtcatatggaaaactattatggatgaactcttatcaactggcctgtctaaagcaaagcaggctttgctttcaggatgctctgctggaggattggcaactcttatacactgataatttccgacaagtacttccaaaggaagcaactgtcgagtgtcttgctgatgcatgccttcttcctagatgagaaggatattagtggaaacagtacattgagatctttctatcatgatgttgcccagcttcagggtcttgcaaaaagtttgcacaaagattgcattgctaaaatggaaccatctaagtgtctctttccatcagaaattgctaaaaacataaagactccactgttccttgttcatccagcttatgatttctggcagatacgcaatattttggtgcctcaaggatcagatcctgatggtcactggcaaaggtgcagactggacattcgcagttgtaatgctaatatgattgataaacttgacagttaccgtggctctttgctgaaggctgtgaatgaattccaacaacgaaaggagattggaatgtttatagattcatgcttcgtccattgccagactgagatggaagtgacgtggcattcacccaactctcctaaaataaatgataagacaattgcggaatctgttggtgattggtactttgaccgagaagcggtaaagcgcattgactgctcttctttttcgtgcaaccccacttgccacaacatggatttcacctgaatataaaataaagctatgagccccattttttattgcaacttttatcccggatcttggttgcttgaagttcatgaaggaatatcctcatttatatccgttacgtgaatttggcttcaattgatttagagttagagaatatgctggggagttcatcttattcacttgtatgatatgggttctacagtctatagattattaagccatgcagcatgtgtccccttgatcaagtgattcaattgttatataaatcaattgtgtaattgatttgttagtttcttcttaactttgtaatttttttatggatccctaatccagcacattagatttttgtgaattacaaatttattatattgatgctctattagcaaaaaaaaaaaaaaaaaa

SEQ ID NO: 44285 - DNA, 1456 bp, Glycine max
  Clone ID: PAT_MRT3847_139989C.1
cccacgcgtccgcccacgcgtccgggggactttgaggcctggtacccctggccctggagggcaccctacaatgcactactttaacccttcttttaggacttcttccactcctccaaggaaatctcctttcctttcatcagataaagaagggtctggtcctcatggtgctggacttcattctagcaataggttgtctcttgagacagattctaatggctcttcaactgtgacttgccacaaatgtggagagcaattcaacaaatgggatgctgctgaagctcatcatttatccaagcatgctgtgactgaacttgtaattaggcacgagattcattaaggaaagcacttatagtctgcagggtcagtgctggaggggtccatagaccactcgagaacattcaggagattgcaggacaaacaggctttgattcattggctgggaaagttggtctttattcagattcataggagctttatttgcttggctcttctactctctgtctatcataaatgtgtagtgtttgcagaagcataaggaatgtattttcagccaagtatgagctcaagggtggtattggagttgtcacaacatctacaagtggaagggcttttgagtccatagaaatcattggtgaggaaccatcactgagaaaagcacttatagtgtgcagagtaattgctggaagggttcataggccactagaaaacattcaggaaatggcagcacaaacaggatttgattcattggctgggaaagttggtctctattcaaacattgaggagctttatttgctcaatcctagagctcttcttccttgctttgtggtgatttgcaaaccttgaacctaaagggtcaaaagtcaaagtttcttacatgttgtgtagttttatagatcccccttattttggcctttatggaggttctttgccattcatctttcgaagaaatttgattctttccccaagtcaaaattgtgcgtcttcgtgtttattgtatgaacctcccattcatacatttgtaattttttttcttaaatggctatgaatatttttacgtctgcacttatagtgtgcagagtaattgctggcagggttcataggccacttgagaacattcaagaaatggcagcacaaacaggatttgactcattggctgggaaagttggtctctattcaaacattgaggagctttatttgctcaatcctagagctcttcttccttgctttgtggtgatttgcaaaccttgaagcaaaatttcttacatgttgtgtagttttgtagattcccctattttgttggccttatggaggttctttgccattcatcttttgaagaattttgattcttttctccaagtcaaaattgtgcttcttcatgtttactgtatgaacctcccattcatacatttgtaatttttttttaaatggcaatggatattttacgtctgcactaggc

SEQ ID NO: 44286 - DNA, 557 bp, Glycine max
  Clone ID: PAT_MRT3847_13998C.1
caaactctatacccaactttatggatcccaagctcagattctttattatcatcttccttttgctgtttgttgaactgtatccagatagagtcaacagcttgagtatgagagtggatgtagaaaaatcaccaaccaaggtttcttttcagatgaagggaagaaagcttttgaaccttgacactgacgactacaaagaatctggtgctaatccacggaatgatcaagggaaaacgaagcctcacggttgaagttaacctgttgtgctctgttgcttctaatattatattatatatattttaatggaataaattattcaagccacctcacactgcttgtagctgtaaaacagcagaaatatatgaaaaatatgtacaaaataaatatataagaaaagctgacagcccaagatctccttccactatgagttttatatttctgtagtatgttatgttaaaatcaagtgctgattaagatatctagattctgatcgatctctatgaataccaacgactgtttaaatttgtatctagagcattttatgaaattataaattgctt

SEQ ID NO: 44287 - DNA, 381 bp, Glycine max
  Clone ID: PAT_MRT3847_139990C.1
aaaaaggcaggcacacaatacataagggggcatagtttcacaggtccattcataaaatttataatggaaacctgtgccatagtagttacaaaaagtttatttacattttattaacgagcttataaaaacatgccttatataatctccaacatgttttgttaggcagtttgggaaaacccaactcggagattgccatatgaaaagacggggtgatatcccctcataaaaacatccccaaaaatccaaagaggacccggggggggaggattgtcaaaagcaataaacccattagggcaaacttttgaaatgccttttccagttttaaaaatatactgctaaggagggagggtgaaaggtttgtctccaacagtaaacgtgatg

SEQ ID NO: 44288 - DNA, 478 bp, Glycine max
  Clone ID: PAT_MRT3847_139991C.1
tgctacgcgtccgcccacgcgtccgcggacgcgagggatttccgaataccattgcgcagattgaaccagacatgaatccaaggtttcagcttttgagcaccactaccaatggtgattatgttcaaggaaaagatctcgcaatggctaaagttaatggagcaagagctgctgttggcttgacatcaagacacactccaaccccattgacggaatctggttcgaaaaaagacagagggctaattgcggaatatataggaaggatgtctaacgtagctcaaaacggtaaacagccccaagaagaagattagtcggagggaaatctatccttcgatatcaaacctcgctctagataggaaaaagatttctccacaaaagcaaaatcagttagtggaaaaaccttaaaaatgaaaaaatggtgccggacacatcattaaaagactttcctgaaaagaaaacaagaaaacccaaaagatgacgc

SEQ ID NO: 44289 - DNA, 389 bp, Glycine max
  Clone ID: PAT_MRT3847_139992C.1
ggcaggaacattgagtccatttattcgttagaaccggcaggttctccggagggacgaggcaagggtaccatttgggctgcaaactcactgttgattcaagtagctcttttcggtccgggaggataaacggtgtatagcaacagacatgatctactaacatctcatgcaggcgaaaaatgtgctctttgagctccaagccacctaagattaacatgtttacactacctgtttcacttctggccttcaaactcgagacttccatcacggtggatttctaccacatccttgaacctatacaactggtgcaatttgcattataccactttatatgtgcatgctttctctgggctatagctgcatctgtacaatgactagagatgatatctgta

SEQ ID NO: 44290 - DNA, 444 bp, Glycine max
  Clone ID: PAT_MRT3847_139993C.1
cccctggtcatatagtagaaaatcaagacatgtcttatcgcagtatggagaagtggtaaactctagtctctacaaaaactcatatggcaggatcaatacacaaaacttatattgatgcgtattaatgaaaaaaacaatcattgtgggtaacaataaaccataattatgcatcaaattagcaagaagcaaattgcttaaccatgtcaagggcattagaaaggcaggccaccaagcagtgattttgtttttttatcactaaagtttcacatatattcttttttttgaacaaacgcaggagagctgtgtgtcactatattaagaagaaaaaaagaacataggagagacaagacttgtcaacccctaaatacaaaggcccctaggccgagacccccctgacattaacactacgcaccacacacacatagcaacaacccgaccaaaaac

SEQ ID NO: 44291 - DNA, 682 bp, Glycine max
  Clone ID: PAT_MRT3847_139994C.1
gcgctgcattccgcagggtgagagtgtagacggggaatagaattgtgttcatctatgaaagaaaagaacgacacaaactataagatcatgaaacggggaatttagtttttggagaaaaggaagtaaagacacactccctcctcctcctcctcctgctctgtctccggcttcaatttcggattccaaattgagttgatttcggagattataaattttcttttacttttttatttttgcgaaaaaatggaagaggcaaaggcattgcaccagcaacaacaacaacaacagcagcagcaacaacttctgctacaacaacagcagcaacaacaacatcaacaacattatctgctcttacagcagttgcagaagcagcaacagcaacaacagcaagctgccgccatttctcgcttcccttccaacattgacgctcacttgcgtcctatcagacccctcaatctccaacaaaaccctaaccctagccccaatcccgctcccaaccctaaccctaatcccctcatcaatttgcatcagaaccctaattccaaccatctaccaccgccacagcaaccgtcgcaacagcagcagcagcagaagattattcgaccgggaaaccagatggagctccagatggcgtaccaagacgcgtggcgggtctgccacccggacttcaagcgacccttct

SEQ ID NO: 44292 - DNA, 828 bp, Glycine max
  Clone ID: PAT_MRT3847_139995C.1
tttttttttttttttttttttttttttttttttaccgagcaatgcatagctttaatctgtcataacattgtgttatttacagtacatgcaagaagctgggggaataatacagtttctagtcagagtagtaatagtaaccatacatcatcttcaaaactagtctaatagaccaaaccatattctaatcacagttatcagataacttacaactccgtaagtaaacaaagaaaaacaatcttccgaaaacatggaacctcttgtttgaaaactagttacaaaattcaaaattaaagttggtctttattagctttgcactgccagcacctgcaactgatccagaaaaacttccaagctgaggtcatcggtaaatataatgtcggaaccctctgtgtaggttgaattttgagtaacagatggattcaacttggcaagaagaaatctagcctgactactatgctggtcacatcttataatccttggcactggaaggcggtcagcaaccaattgctctgcatccagttctggggcttccaacagctttctcaagctttcgtgattggggtccttatcataacccagcttcctccactgggcaatcttggacccataatgaatcaccacacagaagaaagaatcaaagagcaagataaaatctggagaaatggaacgaatatctagcagcactggcaccggtgggccatcaaacgaatattggaaaagtgtgggttgaatcattataagggatcctactactccctcgcgattgagcacgaggcggaagaatgcagtttcatccggagtagtgttagagacatcaatgaattgaga

SEQ ID NO: 44293 - DNA, 484 bp, Glycine max
  Clone ID: PAT_MRT3847_139996C.1
ttttttttttttttttttttttttttttttttttttttttttttttttttttggttttggttttaaaaataggggattgaaaaccgggcccttttttattcaaaaaaaatcaattcttgacttgacccaaatataggaacattgatacctttgacaggggggccattcaatggggcaccaaactttttatcccaacctggtggcccccccctttttttagggttaaaactggccgggttcttttgaccaggatttaccccaaaaacttgaccgggggaatttcccggtgttgtacccggattgggggaaacaaaattccgacaaatttttatgtccccgccaattgatcccccgggttcaaaacccgggggtgccggtcccttattagcagccatgcttgaattgcgccccaatccttgattctggaagtttgatgaagccgcaacaaaggtccccttaaatggggacatctattcctggtccc

SEQ ID NO: 44294 - DNA, 1328 bp, Glycine max
  unsure (1)..(1328): unsure at all n locations
  Clone ID: PAT_MRT3847_139997C.1
ctgacgcgtgggcttttagcttgttctctacactagagactttgtccagcactttagtttagaccctctttggctctattttttcctgcattacactaatcaccatgaaaagatttcatagtaaaagaaaactcttgatcttcctggtggtaatcccaagcctagtcgctgccgagtgcacgtgcgatgaagaagaccaagagcgtgacaaatcaaaagctttaaggtgtgatattggcgaccggttttattcatatcctacccgatgctttcgagaaccttacttcgccgtgtttgaataagtatccatgggatgctttccccttcactggctttgtggcaatgtgcactgccatggggactctcatggttgagacttacgccacggcttattttaaaaaacatcatcactcacaagtccagacaacatacgtggaaaaggaggaatcaggggatgtgcatcttcacacacatgcaacacatggtcatgcacacggncatcttccctctcatgatcatcaatcatcggcactttttcgtcatagggtcatatcacaggtgttggagctaggaattattgttcattctatcatcattggaatttctatgggagcttcagaaagtcctaaaacaataaggccactggtagctgcattgacttttcatcaattttttgaaggcatgggacttggaagttgtataattcaggcaaatttccagaggttatctattacaataatgggattgttcttcgcattaactactccagtggggattggaattggcatagggataactaatgtttacgatgaaaacagtccaactgccctaattgtggaaggaatcttcaatgcagcatcagctggaatcttaatttatatggcacttgtagatcttcttgcagctgattttatgaatccaagaatgcaaaaaagtggtagcctccgattaggagccaatctctctcttctacttggagctggatgtatgtctcttctggctaaatgggcttaagaatgcgagttaattttaggttggaagacagtcttgtggtgaacgtcttcggctcaacccaaacagtttttttttttaatatatgcattggctttttaatatatatatatatatatatatatacactttctctaccttccaattttctgcattcagtttggtgttgtttcctactgtgtaattaatgtataccccaactgtttagtagatgatggtgtcaatggaagattaatttctttccaagtccttgattgtgttccatatagatttagaggaatgcccaatagtaaatatatcagaaaagtattaaggcc

SEQ ID NO: 44295 - DNA, 1089 bp, Glycine max
  unsure (1)..(1089): unsure at all n locations
  Clone ID: PAT_MRT3847_139998C.1
cgttacgcgtgggcttttagcttgttctctacactagagactttgtccagcactttagtttagaccctctttggctctattttttcctgcattacactaatcaccatgaaaagatttcatagtaaaagaaaactcttgatcttcctggtggtaatcccaagcctagtcgctgccgagtgcacgtgcgatgaagaagaccaagagcgagacaaatcaaaagctttaaggtacaaaatagcagctttaatatcaatactagttgctagtgcaatcggggtgtgtattccacttcttggcaaagttatacccgccttgagccctgagaagaacatattcttcatcattaaggcctttgccgcaggtgtgatattggcgaccggttttattcatatcctacccgatgctttcgagaaccttacttcgccgtgtttgaataagtatccatgggatgctttccccttcactggctttgtggcaatgtgcactgccatggggactctcatggttgagacttacgccacggcttattttaaaaaacatcatcactcacaagtccagacaacatacgtggaaaaggaggaatcaggggatgtgcatcttcacacacatgcaacacatggtcatgcacacggccatcttccctctcatgatcatcaatcatcggcacttcttcgtcatagggtcatatcacaggtgttggagctaggaattattgttcattctatcatcattggaatttctatgggagcttcagaaagtcctaaaacaataaggccactggtagctgcattgacttttcatcaattttttgaaggcatgggacttggaagttgtataattcaggtactatatgttatatatcattgtcctatattagttagttcacgtgcatcagatatattcgattcatgaaatttcttgattgatttacaatgatcaatgaaccaactggaaaacaaatatgaagaatcaaaatgattgtgaaattattaatttgtgacggngagcatgtgtgtggttcggttggtatggaacatataactatcacaagttggaaattttcaaacttttctattttttggactaata

SEQ ID NO: 44296 - DNA, 173 bp, Glycine max
  Clone ID: PAT_MRT3847_139999C.1
tttttgttgaccccaacttgattaaacttgagcgggtagattgaatatactaggacttgaacggtatggccctcattacgacctgaggggagagtgctgctagtgcagccccaatgaaaggtcccacccagattattcagacatcattcgagccaaagcctttggtgaagatg

SEQ ID NO: 44297 - DNA, 582 bp, Glycine max
  unsure (1)..(582): unsure at all n locations
  Clone ID: PAT_MRT3847_13999C.1
tcgacccatcgccgtcccggtcttatttaaccgagtttnnggaggagaaaggagaaacgagaggagagnnagatccattcccantgtgcatngtnntgaaaagtctatttctttgtnntggccacggcgaaagtcaaactggggatgnngcagtcagaatttcagcttccaaccccannatcaaacccataatggggttgccccttgtgttctcttcagtttcattttccaaagttatacgctgttcagcttctcacaaggtgaannccttgtgtttaatttcatnttctggngtctatcattttttgtacagataccatatacacagaaaacagttcttttgtttgtttgttttgatttgtgttaaggttgttcttttgtttgttggttcaacatcacatctcttccttgggttttcaaaacttgatttttgaggatcatttgagtcattggagcttggtttggaacttgaagggtgagtcacacaagtttgtaaggttttggcttagttggaggaatggctggtgggagaaggaggaggcaccacttcggcggagtcgctgcgttcacgtgtggtggagc

SEQ ID NO: 44298 - DNA, 2294 bp, Glycine max
  Clone ID: PAT_MRT3847_1399C.1
gggaagcccatagcatgtttaagagctacgtgtgaggctttcactaattcttggacactcatcatcgttgattcgttatcattatcatatcatcaacttcaccatttcacctcactcactctttgcgtctctattaaccctcttttcgacgccaaaacgatgtcgtatgtgcctccgcacctcagaaacgccacctccaccaccgtcgccaccgccagaaccccctccgtaacccttgacaacaacaacaacaaccaccaccaccaccacaagctcgcattcccctccaacaccaccaccaccaattgctctccctctctctccttccacaacaatgcctctcgccggagctccgccgcgcctccctcgccgcggattcttgccacccccgacgccgtcttcccccaatggcaaccctccgaacgcgtttctcgcatgactcccgagcagattgaagaagtccggtccaggcttaatcttgatgttgctgtcgcatctgactctcctcctgcacctgctccaatagaatcgtttactgatatgtgtttgcatccgagtatcatgaaggacattgcttaccatgaatacaccaggccaacttcgatccaggcacaggccatgccaattgctctcagtggaagggatctattgggttgtgctgaaaccggtagtggaaagactgcagctttcacaattcctatgatacagcattgcttggcccaacatcccattcggcgcaatgatggtcccctggcattagttttggctcctacgagagaacttgctcaacaaatagaaaaagaggttaaagcttttagcagatctcttgagtcattaaaaactgccatagttgtgggcggaaccaacattgaaaagcagaggtctgaactaagagctggagttgaaatagcagttgccacccctggaagattcattgatcatttacaacaaggcaacacttccctctccagaatttcttttgttgttctagatgaggcagatagaatgcttgatatgggttttgaaccacagataagggaggtaatgagaaatcttccagagaagcatcaaacactgctgtttagtgcgactatgcctgtggagattgaagaattatcaaaggagtacttggctaacccagtgcaagtgaaggtggggaaagtgagtagcccaacaactaatgtttcacaaactcttgtgaaaatttctgaaaatgagaagattgatcggcttctagatttgcttgtagaggaggcatcacaggctgaaaaatgtggtcatccatttccattaacaattgtgtttgttgagaggaagacaaggtgtgatgaagttgctgaagcgttggtagctcaaggattatctgcagtttctcttcatggtggtcgcagtcagagtgaaagagaagctgccttgcatgattttcggagtggcaccaccaacattttggttgccactgatgtcgcatctcgtggcttggatgtcacaggagtgtcacatgtcatcaatctagatcttccaaagaccatggaagattatgtacaccggattggaaggacagggcgtgcgggatcaactggcttagctacttcattttacactgatcgtgacatgttcctcatggcaaatataaggaaagcaatagctgatgcagaatctgggaacacactgacatttgcaaccggaaaggttgctagaaggaaggagaaagaagcagcagctgcacaaaaagaggcaaatattgctttatccaaacagttaggattgggagctgcttcaatgaacattgaagataaatataaattcatgattactgccacaaacactaaaaaagagggagcagcagatagtgcctgggatgattaacgaagtatttggttcttcccatatttgattggtgacaactgctaaagccttttaagtgctggtgcataattgatattgagtgcatttataggtttgttgcttttaagacgctggagatggagaagtttcttgttaagtttccaagtctacgtattgtttcacaccgttgtaaccaactagcttgctagacgcctaggtgctttgtagagttgtcatgcaggtagtgcatcttatgtaatcatagaagtgcaagttttttttaaatttgtgttacgccgaatataccactgttcgcacaaatatttcatcatcattaaatgtatatatccagcttgctgcatttcacacactcatggttttgttttttttgtgtcaccatgacattagtgcggaggatcaatcaattttgttaataattaattttcgtt

SEQ ID NO: 44299 - DNA, 300 bp, Glycine max
  Clone ID: PAT_MRT3847_139C.1
aaaaaaaaaaaaaaaaaaaaaaaaaaaaagaaaaaaataaaagataaaaaaaagaaaaaggacgacatcctacatcgtggttcctatattataaaatcaaatatgctaaatacgggcggccgttatacaacatcgtaaatactttcactgtcctgcgattaacaacgttaagcttgttgcacctcatccttttgtcaactgatgtcgtattacacgaggatgtcttgaaacatcctggttaacaacagttggaggccgaatgccgattgatattgactacgtgttgcgcagcatgaatgg

SEQ ID NO: 44300 - DNA, 363 bp, Glycine max
  unsure (1)..(363): unsure at all n locations
  Clone ID: PAT_MRT3847_13C.1
gactatgatagatgcaactgccataacagttaggacggtgacagataacaagtgtagaaggagctgatgccaagaacattttttatttagaaggaggaagacgatgctgacaaaatgtacgcaaaactcgatgcatatccctcgcgcgagagcggggggagacgacggaagatacatcggcatggagctacccgcagnggagagactgacacaaatcgaatatccatggtctacccggagccttggtgtatgccacgactatatacggctgacgtagctgaaaactatgaagaatattacgcatataagaggtgaagtatgaatacaggaactaggcgctggggattcactgctaagacggat

SEQ ID NO: 44301 - DNA, 1337 bp, Glycine max
  Clone ID: PAT_MRT3847_140000C.1
attacactaatcaccatgaaaagatttcatagtaatagtaaattctttactttttcgatcttgattttcctggtggtaatcccgactctagtcgttgccgagtgcacgtgcgatgaagaagaccaagagcgagacaaatcaaaagctttaaggtacaaaatagcagctttaatatcaatactagttgctagtgcaatcggggtgtgtattccacttcttggcaaagttatacccgccttgagccctgagaagaacatattcttcatcattaaggcctttgccgcaggagtgatattgtcaaccggttttattcatgtcctaccggacgctttcgagaacctcacttcgccttgtttgaatgagcatccatgggatgcgtttcctttcactggctttgtggctatgtgcactgccatgggtactcttatggttgacacttatgccacggcttattttaaaaaacatcatcattcacaagatgaggccacagatgtagaaaaggaatcagggcatgaaggacatgtgcatcttcacacacatgcaacacatggtcatgcacatgggcatgttccaactgatgatgatcaatcatcggaacttcttcgtcatagggtcatatcacaggtgttggaggtaggaattattgttcattctatcatcattggaatttctttgggagcttcagagagtcctaaaacaataagaccactgatggctgcattgatttttcatcaattttttgaaggcatgggacttggaagttgtataactcaggcaaatttcaagaagttatctattacattaatggggttagtctttgctttaacaactccaatgggaattggaattggcatagggatcactaaagtttacgatgaaaacagtccaactgcccttattgtggaaggaatcttcaatgcagcatcagctgggatattgatttacatggcacttgtagatcttcttgctgcagattttatgaatccaagaatgcaaaaaagtggcagcctccgattaggagccaatctctctcttctacttggagctggatgtatgtctcttctggctaaatgggcttaaagaatgcgagttaattttaggttggaagacagtcttgtggtgaacttttttggctcaacccaaaaaacttttttttttaatacatgcattggctttttaatagataatcaaacacagcctaagctgttcatatatattttccttttctccacttccaaatttctgctttcagttgggggtggttccctccggggaaataaaggaatcccccacctgttaagtaaataatggtgccaatgaaaaattaatttctttcc

SEQ ID NO: 44302 - DNA, 252 bp, Glycine max
  Clone ID: PAT_MRT3847_140001C.1
agactagatctctagctcccaattctatttcccaatcatcttttttttccacacaaatcctcacccaaaggttttccatattaacaaagcccgcccgtacataccattccccacttcactcttttatcactaaactctcctccatatccttccaaaactacctattctttctttacttctattacctcctattccttaatctcaataccctcaacattccccccttccattaatttctctcatccctcttct

SEQ ID NO: 44303 - DNA, 553 bp, Glycine max
  Clone ID: PAT_MRT3847_140002C.1
gagagaactagtctggaatttttttctgcatctcaaaaattgttttctgcacctttctggaatttgtttttaaccttttgggttggtcaatttgaaatgtaaataaaaagtgtaattaatacagaatgtagaaatcaagggaatttaattcagttagttgaagagggtgtgtgagttgaaaattctctagtactatattcaaatcctactcctactgataaaaaaatccagaatgtagaacaacttaattttacattttggatttgccaattttgaagccaaaaatgatgtaggaagcaattttttggagtaggaagtaacaaccagaatgataattatactccacttcaatgggtacttactaaatatactttataaatagaatttttacttgacaaatatgtaaatatttggatctggatagttatttgcaaaattctacaggtacaggtacgtatgggttttggttttgtaggataagtatgtgtaacgtgcgcgtgaaatgactatgagctggataaaaaaagaaagttagttagagcaaagggacacg

SEQ ID NO: 44304 - DNA, 163 bp, Glycine max
  Clone ID: PAT_MRT3847_140003C.1
ggttctggggaaagcatgttgccacctaggcctaatggaagacgcaatggtccttctccaaaccggcaaacgcctagccaccgccgcattccgccgcgagagcgtgtgctggtccgacgacagcttctccctctccaactccctcttctccggcgacaccccc

SEQ ID NO: 44305 - DNA, 449 bp, Glycine max
  Clone ID: PAT_MRT3847_140004C.1
gtagtagttgtccacactaagggttgtgcatataccctaaaccatcgttgttgactaccactactagtggacactgatctattcactgctgcacttacattgcctagatccacccacagtcacccaaccttgctctgtcccaccacctagttcttttacttccaaaagcccctcatattcctgtctttactagcggatgtccaacactcttttgacaagacctttgctgtttgctgtcaaagctttatctgggggtggctcaaaagcatcctgacaggagagtgacaagagtgaattacaataagacgtggaagcaccgtatgaagagtattatgtggatatagagcagccctttggactcaaattagtccacggtatgacatgggcgaacttacattgatgctattgcaccacgatgatcacactgatcacgctggagtcttcactgt

SEQ ID NO: 44306 - DNA, 271 bp, Glycine max
  Clone ID: PAT_MRT3847_140005C.1
accatgtctccctgcattactccgatcagggccctaccgactcagcattcgccattcgcgttctcgacatggccatcgacgcgatcaacagtctcacgaccagccccaactctactctgccttcacccactaccttgacctccctcccagcccgacaaatcgaagaatcgcctcgtccatctgacggcgaattcctgggagagcgcctcaagggcaccaagatcgatgaccttcttatccactctcctgctctgactcacgcatggagcca

SEQ ID NO: 44307 - DNA, 342 bp, Glycine max
  Clone ID: PAT_MRT3847_140006C.1
acacggctcagagggacaacttttcactctctgcgtgtacaaacaatcatttgacatctttcaacggtgtcgggcaacaacagcaacatacacaagaagaaaacttcaattattgacagccaagttgggagccagtaacgacgaacaacaacctcgcacttttactatgatgagagaaaaccacgtctgaagagtttgagcagcagagagaactaacaatgatggaggattctcggagcaagtgttgtggagatcgagattggcccgggacccggggaaagaccttttgccatgatttaaaaatctttgaaagatccttggacatgcataaaccaagaactt

SEQ ID NO: 44308 - DNA, 418 bp, Glycine max
  Clone ID: PAT_MRT3847_140007C.1
taattttaaaaaaagaaaagaatggaaaaaaaaaaaaaaaaaaaaaaagattgaccctaattggtacaagaatttgtgcggcctgcagctgtacagagcattttgatgcatgttagtggacaaaatcacaaccacattcctgggaattgctcttttcaattgaggcgtgtggtcccaataatggtttaggagtgtggcgctttgtgtggtaacacaatcttgctggcatacgagggttcttagggacactgccagacagaacacagggactgattttctgttgggaatccctcacgatgttgcatgtgcttggaatactcttatgcctgctttttttgattcacagagctgtggcggatcttctgagaatgccgaaccctttgcatgagctggaattaccagtttctttcgtttgttc

SEQ ID NO: 44309 - DNA, 401 bp, Glycine max
  Clone ID: PAT_MRT3847_140008C.1
gggaaaaaaaaacccctgttttattttattttttaaaaaatcaaagctgcaggggcccggaccaaccccttatggccatggagataaaggtcatcacgaaggaaaccttaaaacgttttttcccccataatacacgactggggaccaaagggcctcccgaaatagggggttatttaaaggacattatttataggtccccagaaccaggggcggggcagtttttcaggtcaaagacaagctaaggatgcttggggatataaccatttcaggggtacccaacccatccaatcaaattcttaaaccaacacctggcccaaagagctgttttcggatctctggaagctttttacggaccactacataaggtcgggcttaaagagttttttcgcacacaatttttc

SEQ ID NO: 44310 - DNA, 258 bp, Glycine max
  Clone ID: PAT_MRT3847_140009C.1
gagattcttctacatatggacacagctccactcgtcgtgatagaagagccatgacgaatgataaatcgcataacagttcatacctaacctatagcgaaaaactaaattcggttatagcatccactataagctccatctatccgagtgaaaaatctcataacagtccatactgaacctttagctaaatactaaattcacttttaaaaaccacaataagctccatccattcaattgaaaaacccaattcacacaaacata

SEQ ID NO: 44311 - DNA, 498 bp, Glycine max
  Clone ID: PAT_MRT3847_14000C.1
tacggctgcgagaagacgacagaagggggcagagtgagtgagtaggttactggaaagaggaatggagaaggaagccgaattgggtgaaaaggagtttgaacaaatggtgcgggctttgccttccgatgctgtcaaggagttattgtcgcacggggtatgcactcgctgcatctttcgcctcttcggcctccaaggccccgtctatgcttctcctccctccctctcttccctcttcgatgcaacacaacaagattgcctttgcacactttgcttagggattctgcagttcacatattctaatgttcaaaacgacaatctccctcttctcattgctgacatggttaaacgacaagcctatcagttcgataccttttcccttgaagtttccattccacctatcattatcgatgatgttaactttctttgctcctatatgaaaaccaaatatggatcccaaccttggttccaagaaaacttgcacagtggatgcatctctac

SEQ ID NO: 44312 - DNA, 856 bp, Glycine max
  Clone ID: PAT_MRT3847_140010C.1
cccacgcgtccgtacggctgcgagaagacgacagaaggggaaactaggcattggtttctctctctagcttggacgagtgaattagattcatcatcaagatgtcgtctctgatagcagaagatgtgaagagcagatcagaggtgtaccacggggacgaaatgtgccaagtgaagtccaaggagcttctcaaggaaatcgccctccccaacggccttcttcccctcaaggacatggaggagtgcggctacgacagacaaaccggcttcgtctggctcaaacaaaagaagagttacacccacaagttcgacaagatcggaaagcttgtctcctacgcgcccgaggtaactgctcatgtccaacaaggtaaaattaccaaactcaccggggttaagaccaaggagctcttgctctggatcacgctcagtgatatctatgttgatgaccctcccactggcaaaatcaccttcaagacccctgccggcctatttaggtcttttcctgtctccgctttcgagattcaggaggagcctgaggctaaggacactactaagcgcgtgccggataccgctgagcctgtgcaagtcaaggaactctgattttattctcaaacaaggtcgccgtggtggttagcgtgcaaaatatatttatatatatgtttattaataagtttatttatgttaccttttatgttaagctttcagatattgtgcggctttattgctaattaaccatcatctccttgttctggctttgaaaagaaaatggattacgatattgttatttctttcatagattgcaaaaaattttttctctttgacttgcacaggctaacaaacccgtggggcggcccgtgaat

SEQ ID NO: 44313 - DNA, 341 bp, Glycine max
  Clone ID: PAT_MRT3847_140011C.1
gtgccacggctaagtgggtattcgggactacatcatgacggggccacttctacacaaaggcctaattctatgagcacgccgacaaacggactgcacgctgctaccctccttcttagccggcgctaatggaacactctttacccatcacctttccaacagctactacgccatgctggaagccacacccaagccttgagcttcttataacgccgggatgaagccgaactgaccctgggaacaattgcctggaaagaaaacaagaacggcgattcctgtcacgattacttggaagacagggcgagttttagcgaatacaagcttatggactatgaaagcaacgc

SEQ ID NO: 44314 - DNA, 294 bp, Glycine max
  Clone ID: PAT_MRT3847_140012C.1
atatggtgatttatttttctgcggtcaaaacgatcctcccggaaaatttaccccctcccaaaatggtctagccctaaacgaattactagtcttcgatacatttggcattcctctatatagctctctgattaggttatcccaagtgtaactgacctggccgcctttatctaacagacctattatgtgaaaaacaatggggctcccctatcttaaaatccatattaacaaacttattttgtacgaatgggtgattagactaatgggccgcaccaaaaggactttcccatacaaggg

SEQ ID NO: 44315 - DNA, 252 bp, Glycine max
  Clone ID: PAT_MRT3847_140013C.1
gttatgtacaaactagtttttatagctatcaacattaggagtaactttcaaccttgccagcatcactggtatgatgtatatttaattaaagcacacttttccccgaccgtatacttaaaatgacaaagccattcttttaaatatttgtgactctttcctaaagccaaagtttctgttgaattatgttttgacacacccctaagtacaaggtggtatggttgtatacacatgctgccttcttggggattcaaa

SEQ ID NO: 44316 - DNA, 1676 bp, Glycine max
  Clone ID: PAT_MRT3847_140014C.1
atcctttataatcttcaaagctcagcttttcactttcctcaccggctccccgatctagttagggttccttacacgatggagcggttgaagtgggcgcaactgggtgagaggctgaagaccggtggggcccagatggggcgaatggtgagcggaaaagtgaaggagatgcttcaggcgccgacgccggagtccaagatggtggacgaggccacgctggagaccatggaagaacccaattggggcatgaatctcagaatctgtggcatgatcaacagcgaccagttcaacggctctgaggtcgttaaggccatcaagagaaagatcaatcacaagagccccgtcgttcagaccctcagccttgacctcctcgaagcctgcgccatgaattgcgacaaggtcttctccgaaatcgcttccgagaaggttctcgatgagatcattcgcctcatcgataacccgcaggcccatcaccagacccgcagccgggcttttcagttgattcgggcctggggcgagtccgaggatctcgcttatcttcccgtctttcgtcaaacttatatgagtttgaaaggaagggatgaaccggttgacatggcgggaggaaattcaccacatgttccgtatgcctcagagtcatatgtagatgcccctgaaagatacccaattcctcaagctgaactacatgatattgatgatccagcagctttctcttctaattaccaacacatatcagttgaagagaggaaagagcatcttgtggttgctcgaaacagtctcgaattgctctctagcatattgaattctgatgcagagcctaaaactttgaaggaagatttaaccgtgagcttgttggataagtgcaagcaatctctctctatcatcaaggggatagtggaaagcactacaaacgatgaagcaacactttttgaggctttatatctcaatgacgagctgcagcagattgtttctaaatatgaggagttagatgctgctcaaagttctggggcacaacaacctcaaaatgctgacactgacaagcatgatgccaaagctgttcaaaaccccaatgaagtacccgaaaatgaagaatctgaagctgctcagaatctggatcgaaagcttccccaaaagtctaacactcttgaagtcaatgcaactgagggcgagagagatgatcttgctgaaactaaaatagtggatggtcttgctgaaactaaaatagtagatgatggcacgaaggagaagaatgctgaatctagtttcaagcgagataccgaatgagcaaagcatagttggcatatgtatcttctaattcgcattttatcttgtctttgttcatatcttgtaataagctatagtccttctatgcgggtgatttacattgcccaaatgtgtaattggcaggagtttccatcccgaggattgtgataacatccttgtgagatcatgctagtttctcataatattaagtggttcccacattttgatccgcttccttatattattaatgcgagaaggggatgaagttagtactgttgttagtgcatagagtgtggagacaactaatcgcgcacattggagtacagattagaaaatcggactcttgtttgagttttatttatgataataatgttttgttttgtaagttagaaaaaaatgccccctttccctgtttt

SEQ ID NO: 44317 - DNA, 660 bp, Glycine max
  unsure (1)..(660): unsure at all n locations
  Clone ID: PAT_MRT3847_140015C.1
gttnntccagcctaatttcataggaaggttttataaaggttaaaaaaccctcaacagatctaaggggggaatggggaaaaatccccagccccgaaagatggggagaaaccgaagaannatcccnngtttggtaataatatcaaaatcccaagaaaggccggttaacttaaatatgcccaaaggttgggctaaaaaatttgggaaatgccaataaaatggttttatgaaccaggttaatggnncgccctttatacctaacccatttggtttggggaactggtggccagaacccgccgaccaaaaccagaaaggggggaatttacacttggattggcctcctaattttttcttttaaaaagggggggaacctattttggtgattttcccattggaaaaataaaaaaccagggagcgaggttggatttaccaaagggcttattacaaacccagaacctataacttggacgaagacccttaactggattttggaggggcatttggcaagccataagcttggccatcttcattngcttattcctggtgggcagannattacgggtggatggccgnnnnncaagccctaatatttgatccctttcaagcctaaatggtgaccaaatgncnctttnnntttcaacagaaagcnnnattgncgcatng

SEQ ID NO: 44318 - DNA, 884 bp, Glycine max
  unsure (1)..(884): unsure at all n locations
  Clone ID: PAT_MRT3847_140016C.1
gaacactcaaaccaaacaatggtgctcttactgggcatgcaatatctacttctggtgcaacaaatgaaatcaatgtggttgatgctaattatcagaaagaagcactaattattgagacatatactcctccagatcctggcccctatcctcaagatcagcctaaacaaaattcagttagatttacacccacncaggtgaattcagctcttgatctcaatcatatactgtcacttttcatgcataatgatttttcttttaatctttctctgccctcctgctttcctcacaatagttgaatctgagtatttgaccaaaatccaattgattcatatggctaaattgatgcatgtggaatgcaaaaatgcaatgcttgtgtttcttgatccagtacatattaagtatgtagtgtagttagcatcacaagtcatgtcctatttccctttgcactgtcgcctcgtcagtaatatgaaatggatgatcagtgtgccatgatatattttaaaagttttgacaagaataaggagtccatgattttgtgacaatgtagattcatgttacccttaaatttgttaaagaataggattgtgtttaccattacttgttaatgttttgctgatggttgttttaaagaaatttccattgaaaatatgcaaagaattcgagaagttcttcccttccacgagttcttctgtgtttctttgtactttctgtcagtaggtgcatcttttgagagcaaggaaaagagcacaatgggcacacattttaaaaaattgtggggccttccagtacttcctttctgtcgggcattcgaattacttaagtcaacagctgatagggctaactacttaatgaccaagcaggctaagattgtggcaatgacttgc

SEQ ID NO: 44319 - DNA, 343 bp, Glycine max
  Clone ID: PAT_MRT3847_140017C.1
gtttgctaattttacctccctttgtttattgttttaactaaggctcttaatcatgtggagatttattctctcgaggaagtcgcaccactttgctgttgcaattacattgcaatatgcactattgacaaaataaagtacccacaatcaggtaaacaggaaaaactcaattttaacactacttgttgtatcttcaggtttggaaaccccatctttcatgatcttatgctatgattctttaaaattgcatgtgttcgtattgcttctataaccttaatatgtatcattagatgaatctatttatttcaaattgagactctaacatagtaggagatgaacatgaata

SEQ ID NO: 44320 - DNA, 403 bp, Glycine max
  unsure (1)..(403): unsure at all n locations
  Clone ID: PAT_MRT3847_140018C.1
gggggggtttttataggtggaaatgttcccaggaagcatgggcgaaatgccttctaggtgagactcatgtgtttacacactcttacctaacatatttttanttcttaacagtgagattcaagtgatttatatatactttgatgagaaggcattatataggcagaaccttatttttggagagcatcatgtagtatttcttttgacacattcaccagtaagggcatgttggcttttttagtagatgaatgctgttgcaagcaatcatcactgttaccatagtggttagagcttgctattgctaatgcttttcattaacatccctgtctctcttctgttgatgttgacaacatagcaatgtttacaatgccaaagaaactgttgtgtcacattcacataacataag

SEQ ID NO: 44321 - DNA, 384 bp, Glycine max
  Clone ID: PAT_MRT3847_140019C.1
cacgagcttaatttgaattctatctactgaactccaattatttttcaaactagtgtttttatttttagagtttaatagatatgtatcataaattgtttttaaattgactttaaataaaaatgacacacactttatagagaatgacatttattctctcaaaaacttggtaatggagtgaaaagcaaaggagaggattcattcccagaaataatatgctttttttggtaaagttgttatcatcgttatataatgtatacatttatgcataaacgcaaacgtgtatatatgggtttacagattaaaaacattttaatgtagcttaaaaagaatatgttaatgtaaagttttgtcccgtgtacacactaaaagatataaaagaaatat

SEQ ID NO: 44322 - DNA, 290 bp, Glycine max
  Clone ID: PAT_MRT3847_14001C.1
ggctcgagactggactgtggactgagcattaacacaataaactgggatctttttgctcttcacatgactatagaggatacgacttgcgtgcattgttgcgttcaaagtagatcaaggactaatccaggattgagaatcttacatgaagatagataaaaacgtggtaaaggctattcatccccaagtggacgctgtatctgtgatgatcataatacttgcatttatttcgaccggggcgattattgaaatggccaactgttatggtacatctcatactttgtattacttga

SEQ ID NO: 44323 - DNA, 193 bp, Glycine max
  Clone ID: PAT_MRT3847_140020C.1
tttttgcacttacataaaagttcaaatttttatccttgataactagttgattgaccatgggacaaccggcgtcatttacttcaaaactataaagcctaacattgcgtttaaaatattatattacacgtgcgtgacaaatgtaatgcattgtacatcgtgttaagtgtacaaatagaaccccttaatatttcta

SEQ ID NO: 44324 - DNA, 942 bp, Glycine max
  unsure (1)..(942): unsure at all n locations
  Clone ID: PAT_MRT3847_140021C.1
ggctcgaggtagaccgcaatccaaatgtctttacacttctcaatcgaacttgttctttggttgaccctgacacaatcaaagacccaaacaccttcaattatggaatattttttgatgctctagattcacgtgttgtagaatcaacaacagattttcctcagaagttcttctactgcttttggtggggtttgcgcaatttaagttctcttggacaaaatctcaagactagtactgatgtctcagaaatagcctttgcaatcttcattgccatctttggattggtcttattctcgttacttattggaaacatgcagaaatatctgcaatctacaactgttagagtggaggagatgagagtgaagagacaggacgcggaacagtggatgtcccaccgtatgctacctgagaacttgagggaaagaattagaaagtacgaacagtaccaatggcaagaaaataggggtgttgaggaggaggcattaattcgtaaccttcctaaagatctcagaagggacattaagcgtcacctttgcttagctttagttaaaaaagtgccaatgtttgagaaaatggatgagcagttgttggatgcaatgtgtgatagactgaagccagtcctttatactgagaagagctacattgttcgtgaagaagatccagttgatgagatgcttttcattatgcgcggaaaagtttcgaccatgacaacgaatggtggaagaactggtttcttcaactccatgttcctcgtggctggtgactttgtggagaggaacttctgacatgggctttggatcccaactcttcctcaaatctacccatttcaaccaggacagtagaaaccttatcagaagttaaagcctttgctctcatggctgatgacttgaagtttggtggttcccaattacgacgccttcacagcanacagctncaacacgcttt

SEQ ID NO: 44325 - DNA, 282 bp, Glycine max
  Clone ID: PAT_MRT3847_140023C.1
ttcacttggtcccctgtatatgtgcgtgatgcttattagattaatcccccctttatctatatctttcttttcgtgtggtcaacagtgttgtggccattatatatgtgatcagagacagatcacaaggtaggccaggtttcaaaatcagaactacatctgcatggaaattatgttcccttttgttgttttgtttatataaataaaccaatgttaattaagagtgtgattgaagttattaaagccctcgtgactttcttcttatactttaataggtgaagcact

SEQ ID NO: 44326 - DNA, 463 bp, Glycine max
  Clone ID: PAT_MRT3847_140024C.1
ataagatgtgccagacatataaaggacacaagcgctgcatgaagcacaaaagtttcgcgaacagatttcacgattaaccattatgctggagatgttacgtatcaagcacattattttcttgatatatacactagattatgttgtggcagagcatgaagctcttttatgcgcttccaagtgtgcattagcagctaatatcttcccttctttaccagaggagacatcacaagctatctatattgtctgacataggctcacaatttaagcaccaactgcaatctctcatggagacactgaatacagcagacccgcattacataagatgtgtgacaccaaatacagttctgcaggcagcaatctttgagaacttcattgtcttgaaccaattaagatgtgggggagtacttgaggaaataaggattagttgtgctggatatccaacaaaaaggacatttgaagaatt

SEQ ID NO: 44327 - DNA, 259 bp, Glycine max
  Clone ID: PAT_MRT3847_140025C.1
attgtgatgtgatcgtagctgaggtatgtgcttctcaggcctccaaagcttccacatttttgttggtatcagttattcatgttgggtgtattctcatcccagatttttctcatttagatcataaacataatagaaagggctagaattgcaatcttgtgtaacttaaaaagcagctagtttttatttcctaggttcgttccaccagtcataaaccagatgaaatctatggcatgattgaaagactatctcctggcactcg

SEQ ID NO: 44328 - DNA, 389 bp, Glycine max
  Clone ID: PAT_MRT3847_140026C.1
ggggttcgtcaacggtcgggggcgggcgcaaaattcaacctaggaggaaggcgtaggtataaaccggaaagggggtatgtggaaattggggtcggacgagcaaagaacgggggggggggggggggaaaaaaaaaaagccggggggggaggtcggttttaatcggggggcggcaaattagttaaaaaggcccaacaaaggggccggggcaagcggttagcaaacggaacaacactctggggagcgccgggaaaaaaaggggggagaagagaggagcggatttattttaaaaaggggggggggggggggggaaaaaaaaaagaaaaggggggggggcaagaaaagggaggcatttttgggggggggggggggaaaaaataggggggggggg

SEQ ID NO: 44329 - DNA, 406 bp, Glycine max
  Clone ID: PAT_MRT3847_140027C.1
cagaaagctaacaacgctaacacgcacgtatatgtatctatctatgtgtgtgttagtgtgtattgtgtaatgtgtattcaatcactctaagtttcaaactttcaaatgtcagagagacagaagatggtgccaaccagcactgaactccaaccgagagcaccttgcaaccttgtactgttcctctctgctcctccaactacacttccactttctgatactaagcctgtgaaaccaagctcaaataatatatcagaaatggtgtacaagtttgccaaagtttgtaaattgaagtctattggggtgttctcttccgaaatccccaatctccctcacttgcaaagatccatttgcaatgagacccttctgagtgaaaacagcagtgaggagaacagatgctatgaccaaa

SEQ ID NO: 44330 - DNA, 246 bp, Glycine max
  Clone ID: PAT_MRT3847_140028C.1
cagagaatacctttctttaatgaaaaaggtaaatatgtaagtacagatccacttgatatcaatgacttgtcatctctaaattacattggaacaaaactattagaaagttttaaaaggaaaacagctattttagaaaaagagaattcggctctttctcagaaattacagaagctggaacaggaaagaggtataatagcccagcggagagtagaagaaggaaataataccgaagataataatacatta

SEQ ID NO: 44331 - DNA, 629 bp, Glycine max
  Clone ID: PAT_MRT3847_140029C.1
ccacgcgtccgcagaagatggtgccaaccagcactgaactccaaccgagagcaccttgcaaccttgtactgttcctctctgctcctccaactacacttccactttctgattttgtgaagtgctttcttgttttttgaagcaaggatcactgttggattcgatctgtatgagttcaaggtttgatcttttttaccatggagtgctcagatactaagcctgtgaaacccaactcgaataatatatcggaaatggtgtgcaagtttgccaaagtttgtaaattgaagtctattggggtgttctcttccgaaatccccaatctccctcacttgcaaagatccatttacaatgagacccttctgagtgaagacagcagtgaagagagcagatgctatgaccagaaagtgcatccccaccccactgaagttcctgccaaagaaaatgcttgtgctggtttggaggtcatgaggaagctgtttgatgctgtttcggcgctgaaattggcataccttcagcttcagcaggctcatatcccttatgaccctcagaagattgttgcagctgatgaccttgttggtgctgagcttgagaagctttgcaagttcaagcgcgaatatgtgcagaaacattgc

SEQ ID NO: 44332 - DNA, 232 bp, Glycine max
  Clone ID: PAT_MRT3847_14002C.1
ctgattgcctccgaaactacttaccttagctcaacaccatattgtgctgtacagagttcttcacctggctcacgaaacctcaacgctatagggagttactggagctgctcgtcagaaacccattcacagaggtgacaccgtgctggaacatactattctcttaccaagactgaagaaccatagggttctctccctatgggagactactattggttcgcgcccaaccgggact

SEQ ID NO: 44333 - DNA, 287 bp, Glycine max
  unsure (1)..(287): unsure at all n locations
  Clone ID: PAT_MRT3847_140030C.1
aagttgtcaaagtcatgggcaagaanaaagtccttgtcaaggtccanccagaaggaaaatatgtcgttnatattgacaaaagtattgancattacgangattactnccattccaactanagtngnactttcggcaagcgangttatgtttcttcacttagttactgcccaagtgaaagttngattccatntggtacaatgctggatngaaagttcgagaangggttnccccgatttctgaacttgacgancattgatttggtcggttctaggatccaggcnaattta

SEQ ID NO: 44334 - DNA, 310 bp, Glycine max
  Clone ID: PAT_MRT3847_140031C.1
cttgtcgattaagggaagaagttacccatccgttacattgcagcccacaaggcgtcgagatcaccttagatgtgcggcacatccacaaacagcgaagaaggtgtgtgacatagtcaataagcaattgacactgccacatgaatcagctgttactgcagagtctatattcgctgcgcttggagctgatgctcttgacacggctgagaatgtgatgggacttgacgaggaatatgatcttaccgtggaagaagatagcgaccacagtatcaccacacgtcacgacgctgctgatatgatcgtatctcttctt

SEQ ID NO: 44335 - DNA, 1690 bp, Glycine max
  Clone ID: PAT_MRT3847_140032C.1
tttttatctctaacataggtagatagttaaaatgcaactagatttacacagaattcaaattatataaactaataaagataaaatctaagtaatagagccacaaattcattggatgattccttttccagttttccggatatatgcacaaaaattgttcctcgaaaaagttgtggctagaattgttacattgaattaaaataataggaaaagaagaggctccagttaggcaattaggctttggtcccatccaatcgcaaccaggaaatggatgtggttccttatccagtaacacccccaaacctcatttctctgccacatgaaccctcccaaacacagaaaccatagcaaaaagaaacccagattattgattattaataatggaagccatattcgtcaccaaacccgcttcccattctctcctcttaactaaactctctccgaatcccaaacacttgttccctccacaccaacaatcctttcacaacatccgccacaaacccacgcgcttccgccccgtcatcgctgttttccaaaaccaacatcaacaagatgcagctgcagcttccaaccacaccgaagatgagtcctacggcgaagtcaaaggcatcattggaagcagagccttggaagccgccaccggaatggagtacctcatcgagtggaacgacggccacgcgccgtcctgggttcccgccgacttcatagccaaagacgtcgtcgccgagtacgaaactccctggtggactgccgccaagaaagccgacgagtccgcgttgaaaaacttaatcgaatccgacgacggccgcgacgtcgacgccgttgacgccgacggccgcactgcgctcctcttcgtcgccggactcggctcggagtcctgcgtgaagctgctagcggaggccggcgctaatctggaccaccgagaccggagcggcggcctcgcggctctgcacatggcggcggggtacgtcaggcccggcgtggcgaaggttctcttggatctcggcgcggatcccgaggtggcggacgaccgcgggagaacggcgttggatctggcgagggagattctgaaggtgacgccgaaggggaatccgatgcagttcggacgcaggattggactggaaggtgtgattagggttttggaaggggcagtgttcgagtacgcggaggtgcaggagattctggaacggagaggaaagggtgagaatttggagtatcttgtgcggtggaaggacggtggtgccaacgagtgggtgaaggcgaagtttgtggcggaggatttggtgaaagactacgaggctggcctcgagtacgccgtcgctgaggcggtgctcgcgaaaagggtagcggatgaagggacgccggagtttttggttaaatgggccgatttggaggagcccacatgggagcccgaggagaatgtggacccagagcttgtcaaagctttcgagggaagtaacaaccaggcccagcccagtagtaatgggcccgctgtggtcttttccaatcaggatagccctagcctgtgatttttcatagtttgtttggactgggattttgttgcaaaatttcgggagcaaattaattaataattgttttgtaccaaatcaagttgtggacatgaaaaagctaatcaaatccaatacatattttcctcctggttttagatcgtactttgaatgttttaggaaag

SEQ ID NO: 44336 - DNA, 762 bp, Glycine max
  unsure (1)..(762): unsure at all n locations
  Clone ID: PAT_MRT3847_140033C.1
aattcggctcgagtaagatcatgtcagcacctacacttcatcatttctcttctctcttcacccttttcatagttttgcttcaccactccaacgctgacgttggcaccgcttctcgttactcccctccatatttaccatccgggtgctacggtaccgaagcgacgcagtttccgtcgagcaatctttttgcggcggcgggagatggaatatgggataacggagctgcgtgtgggaggcaatacctagtgaggtgtataagtgcggagcaacctaggacttgcattccagaccagagtattcagattaaaattgttgattacgctgccactgccgtgtcgccggcttccgccggcggcaccaccatggttctttccgataaggctttcgggactatagctaacatgtctgccaccttgatcaacatagagctccaacagtaaattccaaatctctccctatttaataattaatttctatttatgtatacatagtttgacaaaatggtgttatatgtttggttgcagagtgtgataaatctggtaattaattgctgccctatcttcagtttgattggtgaatgatttgtttttgtgtctggagttgggaaattcaattattgttgttattattttgagaaagcgtgtgtgtgcaaattcgtagtttttgctttattttttatttgggaattttccgagaggctgcagtgtttttgggtgtttgtaatcgaaaggaagttcctggagcnnnnggcttgnnnnntct

SEQ ID NO: 44337 - DNA, 462 bp, Glycine max
  Clone ID: PAT_MRT3847_140034C.1
ctttgttgttaataaagtttgccaattcatggaaaatcccttagacattcattggggggcagtcaagagaatcctaaggtatcttaagggcaccctctcccatggccttctcatgaaacctgttgttgttgggaaacctttatcaattacagccatgtgcgatgctgattgggcttttgatgttgatgacagaagatcaacctctggctctgctattttctttggtcctaatttgatctcttagtggtcaagaaaacaacaagttacagccagatccaacactgaggttgaatatcgcagtatagctcaaaccttagctgagttaacttgggttcaagctctattacaggaactccaggttcccttctctactccaatactgctctgtgacaattagagtgcagtagctattgctcacaatcatgtttttcacaagtaaactaaacatatggagattgatgt

SEQ ID NO: 44338 - DNA, 218 bp, Glycine max
  Clone ID: PAT_MRT3847_140035C.1
ctcaacagtagttcgcggaaagactctaaagatgggaaatggtgagccagaagatgtagccatacaaattagtcgtagtaatgacaccatgtacaaggctggtatggatgaattggtcatattgaaggaattatacgtacaaatccagatgcataagcgtcattgtgttcgtttcctttcaagttttagatacagggatcatctttgtccagtttttg

SEQ ID NO: 44339 - DNA, 499 bp, Glycine max
  Clone ID: PAT_MRT3847_140036C.1
atatgtagccccgatgtgtaataaaatcgagtttcaattttgcatttttggcaacagaattgcaaaagtattttttggaattcgaaatatgttaggtgaaaatagctttttttttgtgtgtgtgtgggggggaatagcaacacctattaaaccacacatcctcgtgatgcagtgacaagaggatgactcctatattttggatcttgtatcaattgcttgaaagttagattcaagtaggcttttactccctatacctactttattgctttctggaccccaaagacctgaacggacacaaataaccctttctcttccagacaagccttggctccacccaataccactgtcgatctaaacaccacttcgcaaccatcttacaccaccaccgaaccacccattcccacaccattcaatcaatcagcctcttgcaagccgccgagcacgacggagccaacgaaaagcccgacggctccgacgccgagcgcgggagcaacaacag

SEQ ID NO: 44340 - DNA, 474 bp, Glycine max
  Clone ID: PAT_MRT3847_140037C.1
acagatgtactgacaagctcgacgtaaataccactgtcagcggagacgttgctgggttttagtttatcctagctctgaccaggacgcgctcccaactttgctattgccagatgatcacttgccaccacgctttgggccagacaatattgggctttttctcaaagttctgtctttcaattcgttcacggaggcagagagggaaagcttcgaagcagaagtcagagctcaaaagccgtcgttcattgctggattgatagaaatagccgatgccttcaactcccctgaaactgtccgggaatgccttgaacgggcctgttacactcttgggaaaccaaagctgccatttaccaagttcaccgcctccatgctgaaactaaacgaaaatcgtattcggcaatctatattcatagcaaagtttttaaaccaccaaaccgtcttcaagatgctcacgcatgctctggttgtggggggatc

SEQ ID NO: 44341 - DNA, 426 bp, Glycine max
  unsure (1)..(426): unsure at all n locations
  Clone ID: PAT_MRT3847_140038C.1
gctcgggcgtagtaggtctggacgcctagcatgaaacagccttctctggtagcggcactataccttagtatagtatctctctagcttccagtctatattaaaaaacgtagttagcagaggtcagtctgtctggcgttccctcgcgtaaagggcgactttggcatcggctctctctcgttaggtaattaccgaggcgaaagcggctctctcgngaagtcnagtttccccgccatcttagtgggactagtctaataaactttcacttcaactgccttactctaacaagtanangcaagtcaaactaccaagactcggattttttttgttgtggtaacgcccttctagaattacgtttaacgtcccnttcctttaatgaattatgaacttttcccgatcnagcgcctcgggtcggtagccgggctccgg

SEQ ID NO: 44342 - DNA, 292 bp, Glycine max
  unsure (1)..(292): unsure at all n locations
  Clone ID: PAT_MRT3847_140039C.1
nctctaattctggtcggggggaatcacactacacttcactcaccatatcaatactcaacatttcacacactaggatcagtcttctgcgggggaatattacctgggggtagataacttaattatacctttctcagagctactccacaattataatccattgttcataatcattaaataccgatattacttccaaattcatcataacccactattacaatataaaattatcttctataaaattccccttaactaattctcaacaattatatgatactcatatatatctatctat

SEQ ID NO: 44343 - DNA, 864 bp, Glycine max
  Clone ID: PAT_MRT3847_14003C.1
aggaagaagcattagctgtatttgaggaaatgcttgatgctggtatcagaccaactcggaaggcttacaatattttacttgatgcattttctatatcgggaatggtagagcaagctcagactgtgtttaagagcatgagaagggatagatactttccagatctttgctcatacactaccatgttatcagcttatatcaatgcagatgacatggagggtgctgagaagtttttcaaaagattgatacaagatggctttgagcctaatgttgtcacttatggaaccttgattaaagggtatgctaagataaatgatcttgagatggtaatgaaaaagtatgaagaaatgctcatgcggggaatcaaggccaatcagacaattttaactactatcatggatgcatatggaaaaagtggagacttcgacagtgctgttcattggtttaaggaaatggagtctaatggaattcctcctgatcagaaagctaaaaatgttcttctatctttagcaaaaacagatgaagaaagggaagaggctaatgagctcgtagtgcatttcagtgaaaatagcagtttacctaaagttaatggcattgttaaacttgttgacgaagatgaagaagaagataattatgaatattttgatgcccagctcgcaagggcttatgaacattctacagaggtaaaagttgacgaatgtcaagtcctttgagacctaaacactcaaattttgtacacttgtagtcattgtattttgtggtagcattatattatcaagcaattgaaagtatttaacttagacataatatactccaaatatgggagtcatattggaaagtaatcatgtcccttgtgtctcatcatcc

SEQ ID NO: 44344 - DNA, 332 bp, Glycine max
  Clone ID: PAT_MRT3847_140040C.1
tatttttttcttttttttcttttttttggtttggggggatatgtttgttttgtggttacattctttttatttcatttttttagggaccacccgcaaaaaagggggtacaaattgagcgcgaaaagaaaccatccaaaaccctttttggggaaaaagggggaacgaattcttccccctctcgaaaaagacattctttgcaatgaggaaattgtttttttgttctctggaggcaagaacaagaccggctaaaacccctgttgagcaaacaagaagccaaaagaacagggggggtgatcccctggatggcggccttcttctccgccctgattttt

SEQ ID NO: 44345 - DNA, 211 bp, Glycine max
  Clone ID: PAT_MRT3847_140041C.1
ctcattctgtcttatgcttatgttaatagattttgtaatggaagatatttccagtttattggattaatgtatgatcatagcaatctttacttttcaaaaaaaaaaaagaaaaaaaaaaacaaaaaaaaaaaaaaaaaaaaaaaaaaaaaaaaaaaaacaaaattcaaaaatacttctaaaaatgcacatcaattattcacaaaaagaataa

SEQ ID NO: 44346 - DNA, 190 bp, Glycine max
  Clone ID: PAT_MRT3847_140042C.1
agaggatgaagagatggagaaaaatcctaaaaggggttatatgagatcaaatacacagccaacgaaagagacccttattgatatatgagagatagaaatatcaggaaggcatgcttatgatgaaatataccttggataaaaggatactccaaatcgtcctactgataaaaggcatttagagcatatgaaa

SEQ ID NO: 44347 - DNA, 453 bp, Glycine max
  Clone ID: PAT_MRT3847_140043C.1
ggctgcgagaagacgacagaaggggcctcttgaattcctcatgtttcgatattaaaaagaaaagaaatatatgctattgaaattacgctggttggttctatatgtttttgttgcttgctaatttattcctcctttgaatcattgtgtaattgagatgctgaaatgaatcggttcaatgtgagtgaggaattggtgaacttgaaaagaaaaaaataaatgggaatgggatctattagttcgatgttagtgagaaacttgtgaatttaaaaaaattctttatagagtcacaagaaagatgaattgcattggttctggatttgattttgcattaattctattagtgtttatttggattgttggaagttgaaattggaaaaattggtttgaacttgttggtggtattgctgtatttttttgggatccttacaaggaagacaaaggtattttggacag

SEQ ID NO: 44348 - DNA, 424 bp, Glycine max
  Clone ID: PAT_MRT3847_140044C.1
caacaatcttggataaatctcagtggctggggttgcacttctctttccttttctgggaaattttttgctgctatttatgtaggaatgtttttggtggggctagctgtgtgacttattggatttagaaatcggctattgagtggtggtgaatcttttttttttttttttttttagttttttcggttgagtcggcatcaactgagaggaagcagatcttattattgtcaagatgaagttcatgaagcttggttctaagcctgatacctttcaaactgatggaaacaatgttaggtatgtggcaagtgagttggcatcagatattgttgttaatgtaggggatataaagttttatctacacaagtttcctcttctatcgaagagttctcgcttacagacattgatctccctcaataatgaagaaaat

SEQ ID NO: 44349 - DNA, 429 bp, Glycine max
  Clone ID: PAT_MRT3847_140045C.1
cccacgcgtccgcccacgcgtccggtggaagtggaaatggcaactctactggaaccacagctgggggtggtatcatagttgttggatcattagaacatcctttgtcaagtttgtctattcaaggttatgtaaaagctaatggaggaaattttgaaccgcaaatcagaaacgaaaaatttgcaatatttgacaattttactggaggtcccgggggtggatctggtggcactatactaatgtttctacatatgctcaccattgggaaatcagctgttctttctagtatggggggatatagcagttctaatggaagtggtggtggaggtggtggaagaattcattttcattggtccgacattcccactggtgatgtttatctgccaattgctagtgtgaatggagacatttagatctggggaggaaagggta

SEQ ID NO: 44350 - DNA, 496 bp, Glycine max
  Clone ID: PAT_MRT3847_140046C.1
gatagaagtgacctttttattctttcttcgcaaacatgccagttgtacaccaataataatcagttgattgaaacataaatatttgatagctctctacttctcttctacaaatgacgtacaactacaacaatgtgtttacaaatttagaagatttgatataaagttccaacccgcccattgtttcttattaaaaggacttgaaaagtttaattcaatcaagtccttgctgttttcatcagatacactgaaatcaatgagctttgctacaatttcagcactttcttgcacatgttgcatgttataagggtcggtccacaatttattcacaaattgcagtctcctttgtttttccaaccggaggaacttcccattttgcataaagcagttccctctcctctgctgtaagtttagtgttcaccttcctagcaagatgttccctttcttgcttcagagctctaatgcttgctgaaacagagcctgcaggctcatgaccacc

SEQ ID NO: 44351 - DNA, 307 bp, Glycine max
  Clone ID: PAT_MRT3847_140047C.1
ggctcgagcagttaccaaactattttatgtgtactcaaaatcaaaaaggtggtgcctacttattacaacaaccactgagtggctgtgagtgacacaggccgggagactggagcacctttggacagttcctgaggaatcagagtcccccagttccactctgtcagtgcaacttcaaccatgtgttggatttccttcgggaccttgagcaatcagggacaaccaaggaccacttgcacggaagcatattgtttggccagcacacccctactggaccctgtgcctgccctctcatgcaagcatggggtag

SEQ ID NO: 44352 - DNA, 489 bp, Glycine max
  Clone ID: PAT_MRT3847_140048C.1
gtgaaaaattaagttaaatatgaatttctttcaggatttaaaagttctcaaacttcctttgttcatgtttctacatcaacacatggtatctatattaataagaagtggtgtttcagctcaaaacctctctttacactcaatcctaatattgacagatctcactattataagtagtagatacattaccgtgcttctctgaactgccaactcattctctgcaaaaacaattcgttatctttaaaatcaggagggaggttgtcgtgaagctgcaatgtttcaaccaaaacatgattgccttactcaattgctatgtgtcaatgtcaaacccctttgtccaaacgggaatacagtatatcaagattcctaaagcgaatgacacaagaactgtaatggcagcatatgcataagctctcataggacgactgctttctctcatcgcattaaactctgcagcgaatgtagagaccgtactcaaacaccccattagac

SEQ ID NO: 44353 - DNA, 534 bp, Glycine max
  Clone ID: PAT_MRT3847_140049C.1
tttgccgctctacatcgttgcagtaccgccttcttgggggggggggggggggggggggggggggggggggggggggggggggggggggggagtaaagccagtctggtagttgtctaataaccgaaatgtcttctgggggttagggggtggttgtttggccacaataggataaggcaactacaaaaggaaaataggcagctgagccagcggataacccgtgagtatgaaaggcataaggttaaaggcaagaaaaataagcccaatgcaagttagggaatgtaccctaaatcataaacctataaattacaggatggcttatgtggcagactaaaggggcccttaaattgtaatccgccgcccctgagagtgcagcaggattacaggtatgcttaggggcgctaatatgtgccgtggcagaagtagtaggccgggggccaggccgttgccgatgaagggttttggccgttggtgtttgcggttaggctgtaaggggactgtgttgggtgctatgaggggtgtgcagtccaccaagtt

SEQ ID NO: 44354 - DNA, 366 bp, Glycine max
  Clone ID: PAT_MRT3847_14004C.1
catcctttgctactacttccactgcttcgatgctctgatctctctctctcattcaagacattagtttcttcctcatctttgctcggccttcgtattcaagcgaacgtgtatcaaacatgacaatattcagaggatggcatcgtcatatttgtggccttcctttgattctcctccttactcatttgcttactgctaattgcacacaaactcataaatggaagaaccccccaagcaactaaactacacattggatcatctgcctcttgctcctgctgctggacaaagctagtcaaatcgatggcaatgcctacgtacagaatcactcaatacgatccattcttacaacagcagatccagcgcagatcg

SEQ ID NO: 44355 - DNA, 188 bp, Glycine max
  Clone ID: PAT_MRT3847_140050C.1
aagcttcctagtccaggatacaaacatttccttgcgtcagggccggcaaaggcgaaccgctttcaaagccaacagacccagtttacgtaccaaactttcacggattccggggagcgcactcagttctgactgaaccaggtccaagacccaactatggtgctcgatggaaaatgagtccctcaacgtga

SEQ ID NO: 44356 - DNA, 313 bp, Glycine max
  Clone ID: PAT_MRT3847_140051C.1
accaactgaagagaccaatacggccaccattaccaagcctccttttaatatatgtttactggtcatggtgcttttagtacacttgcattagggccaaatccaagttgactagagtcactactctaaaagctgtccagaagctgaagagacagtcaaggctctagtcacacacctcttcagcaagcgtggaaactccggcgccgagcgggtcataaataaggtccacgacagcgtgggtatgtgatgcgatgcatgactactgaacgggaacgttagcagtgtagtctgcgatcacgacgcggacacacagtgg

SEQ ID NO: 44357 - DNA, 480 bp, Glycine max
  Clone ID: PAT_MRT3847_140052C.1
gaatgtcggcctcgatgtcgaattatgagcaaggccaaggctgctgctgctgcttccaaggcggcgaaggctcccaagaagttcaccatcgagtgcactgagcccgtggaggatgacattttcgacattgcttctttcgagaagttccttcacgaccggttcaaggtcggcggcaaggttggcgtgctcggcgatcaagtcaccatcacccgcgagggctccattatcactgttgtctccaaagtcgcgttctcaaaagcttacctgaagtatctcaccaagaagttcttgaagaagcagctgctgcgtgactacatccgagtcattgcccgcactaagaccggatactttctccgctactacaacttccaccaggacgacggcgaggcgcaagagggcggcgaccattcgtaaattatgtcgatgtgcttgctcgtttgtcgtgaatccccctctgataaaaaaaaaaaaaaagggcgg

SEQ ID NO: 44358 - DNA, 476 bp, Glycine max
  Clone ID: PAT_MRT3847_140053C.1
tcgccgacatgtgactgaaggactcacttacacctcttcgatcacatgatgatggctgtgatcactcccaacccaagggattgacacactcgaaccattcaatctaagagctgacaacgctgtctagcacctcttcacagcaccaccggtcgtgcctcaagccaatgcccaggtattccatgactttcccctgcgttgaccgtccaagggtcgccatccaccagaataacgatggccctcctatacatgagttcatctgaacgaatcgaccttcttagcttctgtcatgcctaataaagagattggcgtcaatcgctaattcaacgctcatcccgcatatcgacggtcgcggtgctctcattgctgtattcgattctggtgtagacccagctgctgatggatcacctagtacctgagatgggaaaccaagggttcatgatctcatcgattgcacagggagtggtgatttgacacct

SEQ ID NO: 44359 - DNA, 262 bp, Glycine max
  Clone ID: PAT_MRT3847_140054C.1
aaaggaaaaaccgccgaaggcttttcccattggaaatatagaactggccaacatattaacatgatataatggtaaatcttgtcaacccccaaaaaaaagcttttaaatagcttttaacctaaaaagggaatacaggttgtttcctccccaacccccccaaaagggaaaaggaaaaaaaaaaaaaaaacttggcaaccaaatccgaaaccctcatttgttttatgaaggggaaaaagaaaccccttttccaaaaggtgtttaa

SEQ ID NO: 44360 - DNA, 1565 bp, Glycine max
  unsure (1)..(1565): unsure at all n locations
  Clone ID: PAT_MRT3847_140055C.1
tgaaaactttgtcaaagatgaaaacttcgtttgactgttgagtatactgataactatacgaataacaagtctcaaaattatacagaaaaacccaaatgttgttaatcccctccatccaattatgagaccagaaagcactattaaattgttggggtcaggcttacaaaatgtagcgtaacctatgatactatattttcacaaatcttgaatttaatttcttgagcctatttgcattatcagtcacattacttttctatactgtgcagggtcatctatcatacttaacctgtttaccatcctcgtctaatatagcgtctgaaaaatgtacagcagcaaccgaaaagctgtggatcacttcgatccatttataacacaaaaaggacactatagaatatctgtcaggcttaaaaaaatgaaagagtcgtggaagagtgtattttcattgatctacattttgatttctcaagcctattgcatcatcagtcacaccaacatctctatcctttgtactgataattaatgttctttatctgtttactacaatagtctaacctttctgctctacaaggtattgaaccggtctctatgccatgaaatgccagaactataagtctattcatcttgcttgcacaacgatgaatgtaaactgtctctcgttaaagaatgttgctatctgaaggagttctaaaaaagtcgaaaagctgtggatcccttcgatccatttataacaccaaaagggcactatagaatatctttgccaggctaagaaaatgaaagagtcgtgaaagagtgtatttttcattatcttcattttgatttctcaagcctattgcatcctttgcaccgtcatctatcattctttatctgtttactatcctcgtttaacatttctgctctacaaggttttgaagcattctctctcccagtccacagcaggtgaaccggccttcatttcttcatcaggcttccaaagcatttttcgctgtcacgatcgcagatgttaccatctggaggaggtataaaggagtagcggctggatccaactctcgacagtcccttggagcataatgagcttcttggctcgtaagcaaaaagcttgaaatttggaacctgatgagagaattggaaatatctccactttaggaatctttcttccctgatcatggctggtgcctgtgaaacactgtcctaanagcatcaactttaacaagtggtgagaccaataaacctccctcttcattgaaatcttcaagcacttccaccatatcatacttgtgtatcacttcatctagagtattttcattccaatcaggagaccagtttctatagagagcccagacttcccccttcctaggaaagatgcgaacaactcctctggtgccttttgtccaccttaccttgtgtgaaaaggaatttaacgattcagttatttcatgcttgccagtcctgaaatccccacaggttttgtaaaaaccagaacctacccaatctattgggcccaattcactgttgcttcgagagttaagccaactgattcgcattctaaatggctttgtggaaaccac

SEQ ID NO: 44361 - DNA, 265 bp, Glycine max
  Clone ID: PAT_MRT3847_140056C.1
cccacgcgtccgaagggcggcaaaagaacaacgaaagggaaaatctgatgctactcaatgatatctgaatctccgtccgaatgcacctgtgacaaactttcagttccacgtcgctgaaacaacatcatcaagactacggtaaagaagtacattcagcctcttcatttttcgaagcgttgctttcgaagcacttcgcgaaatgtccacggttgagatcctcgtgatatgcaatgctcgaacgcatacaatgttccaccaaagactc

SEQ ID NO: 44362 - DNA, 393 bp, Glycine max
  Clone ID: PAT_MRT3847_140057C.1
gaagcattatcacaagcaagaagaacttgtcttagcagaaaaggcctctccagagatggcatctagagccctcaaacctgcccctttcactgttgagaagtcctcagttagagggcttacctccctctcaaggaactacctttcattcacagatgtggccaagcgtggcaagaagatcaagactgacacgccttaaggaatcaatgacggcatggctttgacggaaggagatgacgcatgtcgcacgaaaggaaagggaaagggcgcctaccagtttgtagacatatactgtgctaatgtcaatggttacagccctatgtacgacacccaagactggtcttcaaccgctgatgtacacgctggcgagccgactggcttggctatcgtggctga

SEQ ID NO: 44363 - DNA, 349 bp, Glycine max
  Clone ID: PAT_MRT3847_140058C.1
ttccggtcatcactgtatgacgtcctccttctttgggggggggggggggcagatagagcagtgtgtgggcagtgtgtgggagctaaataaaaaccagcgtaaaagaagaagccgcgaaaaaaagaagggtttgatagataatgtgggaccaaacaccgacgataaaccagggagatagggtggatagggagcatatccgaacaaacaaagaagaacaaggcaacggataaaggctacatacgcaggggcgaccaaggtgttaaacaggaggaggaggccgagtagccgcagtgtaagtggatgggggcatcttagcggtgcagggatggtggctttggtgaagcagggg

SEQ ID NO: 44364 - DNA, 428 bp, Glycine max
  Clone ID: PAT_MRT3847_140059C.1
tctcgagccgattcggctcgagtacggctgcgagagacgacagaagggttcttcaacttaggcgtttgtgagaaggtgaaaaataaaatattttccttgaatttacctggtgaaagcaaagaaatctgtcagccagagcaattcattaatgccttgtaaaatacataactaaatgaacaccaagcagaatagaaaattaattaatacagatcaaacgaaaacgcttctctattctgttaaaacagtatttgcaaagaatatgagatgttttataatatgttcttactgatgtaaaggcacgtacggattaatctctcaaaagacatctgtatagagtaaacttcaactctgctttaaaatatccaaatagggattcaaaacatttcgcatgccactatattcatctattatagatataacttccttag

SEQ ID NO: 44365 - DNA, 387 bp, Glycine max
  Clone ID: PAT_MRT3847_14005C.1
tttttcctacgcgtgcgaccacgcgtgcgataactctagactatagctttgctcttatctgacacaggggagacaagagagcacacatgcccctgatgactgtttaccagcttagctctacctcccacagaaacatgaataccttccttgaaacccttgacttgaagtagacgtgcacatcaatgctgatggccaaactaattaaactttctctcttgtagactcatcactaaaacgttatattacatgtacaccagttgacaacaaactaaaataaaaacattagaccacaccttgtacacaaatcgggtatctatccagatgcacatttagaacccggatcacccactataagtagcaagactataaggcgtacccacacaagcc

SEQ ID NO: 44366 - DNA, 603 bp, Glycine max
  Clone ID: PAT_MRT3847_140060C.1
aaaggaacccccccccaacttttttttttttgaaggggggggggaaacaaccaaaaaaatcccttttgaagccaaaaaaaaaaaaaaatctggggccaaaacaaagggggtttattacaggacccccttaccccaacggggtccttatttataggccccaaaaaagggttccttggcccacaaaaatttaacctttacggaaaccctggcccccctccttccaaaaccaaccttggaaacaccccaaaaccttcatttttggaaccctttttttttttttcccgggggggccctgctttgcccccccaattggccggaaaaacaccccccttactggcggaaaattttttggggggaaagtggggggccaaaaaaaatccccccctgtcagggggggggacaaaaaaattccccctccccatggggaaaaaaaatacccgggggcgaaccccaacttttttttagccccgagaggaaaaaattttttttctttttgccaaaaaccaaaattgccccaaaaataatggggggggtcaaacataaattccccaaccctcaaaaactttttgaaagggttgacccccccgggggggaagaaaaccc

SEQ ID NO: 44367 - DNA, 187 bp, Glycine max
  Clone ID: PAT_MRT3847_140061C.1
gtttaataaatggctgtacatttttttacttataatatgatcacaattaacaaccatgcacagcctgaccatgcacaaccttaaaaaaatgtacagccatttattaaggttgtgcatggtaaggttgtgcatggttggtaatggtgatcatattataagtaaaaaaatgtacagccatttattaatc

SEQ ID NO: 44368 - DNA, 547 bp, Glycine max
  Clone ID: PAT_MRT3847_140062C.1
ggtccggattcccgggtcgacccacgcgtccgcaaggatctggtgccccttcttccttcttgtgttgggaccaattctttaatgagcgagagagagagggcgcaatagtagccatagccataatttattgttattatttagggatgagtgaagtgaatgaatgaaaacaaaaacaccgccatcgctcttgtctctcacggttgactctgcggttcttaatctctccgacatctccgatctctcccatgtccctgatcacatcctcctcgacctcttcctggcgagtaccactacttatcttttctcttctttcttattctaataccgtacttcgtagttaactatggttgtacttgcatgccctttattcatcttttcttgattctgattgattgattgattgcgacatgcccttttgcttttattaacgcctcttctttagatcttctgtaaaaatcaaggtttgctcgtaaattgctgttgttgttgttgcattcgtatcattgaaaggttatgcagctgcaagctctttagcctttcttttctt

SEQ ID NO: 44369 - DNA, 220 bp, Glycine max
  Clone ID: PAT_MRT3847_140063C.1
tgcgccataaacatcaacatgagcatgatcacagtggctgtaaattgcagcatctcatcttttccctcttctctaggttttcgccgcggggaatttcaaaaccttccccttccccctccttcggttttttgcttttcgggttgttaaaggataattgaaagtggggttggtggaattggtggtacaggaacctttcaattgaaccgttgaaaaaacattc

SEQ ID NO: 44370 - DNA, 1013 bp, Glycine max
  Clone ID: PAT_MRT3847_140064C.1
ccaggctcgcggcaaattatctgagaattgctgcggaaggagagctgaagtgcaacaagtgagcaacggagaaggccaaagcccgttactcttcttcttcagttgacttaatccgtctctagggcatacgtcagcgcgtgtgcttaatcgagagttgacgaagaagatggagaataacccgaaggagcaagcggagcagcaaagggtcaatttcaacggagaccctcacattcacgacaatggcaacgtattccaccacttccaacccacacccgccgtcgattctggttacgctcttaaccattccatggctcgccctctccgcaaacgcccctggcatcactccaacaacggaacttctccagatcaagtggacgtttcgtgtaaagtttatgtagcacctgttccaagaacggcaacggaggatgagattcgcactgtattcgaagaacatggaactattgttgagattgttcttttaaaacataagaaaactgggacacggcaaggaagttgttttgtaaaatatgcaacatttgatgaagctgatagggctattaaggttttaaacaataaatatacatttgctggggaatcatatcctgttgctgtcaaatttgctgatcgagaacttgaacgccttggggttcgagggttatgccgtaacatggaaaagaaagatcctttataagaggtggccgataaagtttttgtcagttccatcaacaaagaagctacaaacaacgatattgaagaaatattgtccccttattcgcgggttctgcatatccatggaaaaagaagatatcttagaagaggtggcagataaagtttttgttagttccatcaataaagaagctacaaacaaggaaattgaagatatattttccccttatgggcatgttgaagatatcttctttaaaagcactcatggatatgcttttgtcaaattttctaatagagaaatggcattggctgcaatcaaagggctgaataaaaccttcacgatgaga

SEQ ID NO: 44371 - DNA, 579 bp, Glycine max
  Clone ID: PAT_MRT3847_140065C.1
cggcccctgcacgcgtacgtaagctcggaattcggctcgagcttctctgctgatttctggtttgaagatcaatctcactgcaatgggaaaacatatcttgctgctcccactgggcctgtctttgctcatgagctccctgctagctttgcagtgcttcagatgtattagcttcgattctacaggattttgttatgttggaagacatatatgtcagacttatcctgatgagatttgtgcctgggttgtagtaaccactcgagatggaaaatttgtatatggaaaccagagctgtgctgagtgcaacgctacgactgttgagcatggaagtcttatagtatcaacaaactgttgctcagccacccctttctgcaatatggtacatcgctgatacttaattgtatggaaggattttagtgctctttattgagtcttgacactggagcatgccagaaagaataatctactgaccatgtctggacaactcactatgatttctacatcgtgttttctgactacatgtatatcattatgttcttgggtgatctgtaataaattgaaagccttacatattttaatttg

SEQ ID NO: 44372 - DNA, 299 bp, Glycine max
  Clone ID: PAT_MRT3847_140066C.1
aaaatattctttcattgctcgctgagaagagagagaggtaccgcccgatgaccgggaaggcttatcccaagaagcacacggcgtaagaaatcgccgcgaaggttgacgccgtcaccactaaccgtggctgatggaaggctcggcctgatggaccgatccggtttggagaaaggcggtcactcgaaatacgagtgccctcactgcaaagtgaccgctctggacgtgaaatcaatgcaatttcatcactacgcgcgtaactctaagttggcggttgcggatttacttcttttttttatttt

SEQ ID NO: 44373 - DNA, 343 bp, Glycine max
  unsure (1)..(343): unsure at all n locations
  Clone ID: PAT_MRT3847_140067C.1
ctcttttccttgtcctaaccctttttcctattaaaaagaaaaggaataaccaatacaatatacacaatggctttcgctttcaatttcaccaaaaccctaattctcttggtctacctctactgcctgcgtatgcaaacccaagctgnccccatgccctcgtacccgtcaagcccggctctacagcctctgcaagcccaccaacaatgctgggctgagctacaggaccattctgccagaagtgctgggcctgccccgattcaactattacaaggccctcaaagtggagatgctcgtgacccatatacaagtggagaaaaccctcgagttgataagcgtgctcctg

SEQ ID NO: 44374 - DNA, 415 bp, Glycine max
  unsure (1)..(415): unsure at all n locations
  Clone ID: PAT_MRT3847_140068C.1
gccacaggtggcttcaggctgcactgccgaggaagtggcagcatcactaggcacatttgtgcaaactgcacctagaatggccagcataggcagctatgaggtgaacttgttggctggagaagacctaggtaattgcatgcacattgatgtgcttaaatctgaaaaaaaaaatgttctagagctttcaaaagaaacacatatttcaagtatgtgtagtgatagtaagttgaagaatgaccccatggaacaaattagcaagttgtttgtcaattcagagaaaactaggcagacacctgtttctaggactgtaggttttcaaattagagcatcaactcctcgtgttaatggtttcggaggaaatggatattcatcacctgtgtntaatgtcatcagtgatgcaactgaggcttctgag

SEQ ID NO: 44375 - DNA, 826 bp, Glycine max
  Clone ID: PAT_MRT3847_140069C.1
aattacatcccaatcagggattcttcccccaactattgctacctgggatcgagctcgagaatcccaatatgcagcaggacttgccggtcaaaatcaaatggcatttgggatgggttcaccctttccacagagtcagccacctatgtttgctgcacagcagggttttccatccaccgaattgcattcccaaagaaacctgaattttcattctaatactatatctggcgcccgatctcaatttcatccgcgttcaaatgctaatcgtgggagaaaaacatttcatggtgcaggtaggaaagggtggcgaccacccaagtgaaggttattatttattgtgtgctctactgcacactgaactaaatttgttgtgttgggccattttgctaggaatgtactacacatgtaaatttcctgtaagcctcgaattttgaaatgaattcggttggttcctgaagtagttttgttcctaatcttcaattaaaggcctcatttgtgcttgaatattatgaatttgaaatgcttggtgctgattgtttattcacctacagcatgaattgtgttcagaaagaaacctgaattttcattctaatggcgccccctctcaatttcatccgcgtccaaatgctaatcgtgggagaaaaacatttcatggtgcaggtaggaaagggtggcgtccacccaagtgaaggttgttattatttattttgtgctctactgcacactgaactaaatttcttgagttgggccattttgcaaggaatgtactacacctgtaaatttcttgtaagtctctcttgaattttgaaatgaattcggttagttcctg

SEQ ID NO: 44376 - DNA, 419 bp, Glycine max
  Clone ID: PAT_MRT3847_14006C.1
gcaagaccctcagacaagaaactaattaggggccgaaagaaaaaataaagcaaacaaagaacccaggaattgccgctcttaagaggggacaacaaacccccaaacgggaggaagatagaaaaaatggggcacccaaggacaacgggcacaaatggggtttggggcctcaaaccccctgacccacaaggccagaaggcggcgaaacaaacgtttctttagggaacaacttctcccaaggggggaaaccgaaaatacaagaatgcgaagggggaaaaaaaaaacccattaagccccccaatcttacacgctcgggaataaccccaaagggaccaaactgaaggggggaaaccccctcccacacaaagaaactcaggggatacaaaggaattaaaaagtcggggctcaccccaaccaaaggg

SEQ ID NO: 44377 - DNA, 541 bp, Glycine max
  Clone ID: PAT_MRT3847_140070C.1
aaatccggctcgagctcgagccgaatcggctcgaggtgcctgcatgtgatttaggggttgaatagcaagaaacccagccaaggtttcttaacctagcaactcctaaacctaatattgctcaaaacctaaagcaggcaaagagaggtcatggctattttcaacggtcacaatcatttggctttaggttttggcatgctaggtaacgtcatttcattcatggtgtacttggcacccctgccaacattttaccgaatatacaaaaagaaatccacagaaggtttccaatcactgccttacctggtggcactcttcagttccatgctttggctatactatgcctcactcaagccagctgatgctactctcctcattaccattaattcattgggttgtgtcattgagattgtttatattatcatgttcacaatctatgccaccaaagatgcccggaacttaaccgttaaattatttatggtgatgaacgtgggttcctttgccctgatctttctcgtcacctactttgctatgcatggctccctcc

SEQ ID NO: 44378 - DNA, 464 bp, Glycine max
  Clone ID: PAT_MRT3847_140071C.1
ccccgggggggaccgggccggaataacccgggggcgacccaccacgcccgtttttacccccaggaacggaacccaacgaaggggaggcgtggggcactgaccgcggcatagaagggaccgctttttaggaagggagaaacgagcatggtggccacaagaaaagccacaggggctacaaaaaaatgtggggtggaccaaggagactcaaagggatgaaaaccaaaccccgaaggcctactaaggaaaaagggacagcctaaggaaaggaaggagcgaaaatcccaaagcaaaggatatcacaacggggcaaagatagggtggagcacacgcaaaatagagcccaacgaacatgaccacgcctgaagagaaaaagccgaatgaaaggctggaaggaaaaccacacgggtgggcaaccaaaaagcgggagaggaaacaaaggcacaagaacatgaaacaaaaatcga

SEQ ID NO: 44379 - DNA, 326 bp, Glycine max
  Clone ID: PAT_MRT3847_140072C.1
tgtagttgattttttattattaccttaatacagataagggacataaagattttattgaagattgttgtagtttctcttgtcaaaaaaaaaaaaaaaaaaaaaaaaaaaaaaaaaaaaaaaaaaaaaaaaaaaaaaaaaaaaaaacccctgcggcgcggggctaataccctttggagggggccaattttacccagcccctggccggggaaaacccacgcgttaaccgggaaaaccccgggggaacccatcttaattgcctcgccgggcatcccccttaggacgcctggcggcaatcccaataggcccgcaccgaccgcccgtccgac

SEQ ID NO: 44380 - DNA, 878 bp, Glycine max
  Clone ID: PAT_MRT3847_140073C.1
acggctgcgagaagacgacagaagggtacggctgcgagaagacgacagaaggggaccacaccttcaaaccctaaccctagaagaagaaaaaaaccacaaccaccaccatctagggtttttctttttctcatggctagtttgtcaactaggattttcttcatcatgtcccttgtgtgcctggctctcggtccaatggcacaaggggaaatgacatgtggccaggttgtgagcaacctgaccccatgcatctcctatgtggtgtatggtggaaccaatgttcctgaacagtgctgcaatgggataagaaatctctatggcatggctcagaccaaaccagaccgccaagctgtttgcaactgcatcaagaacggtgttaggaacagtggcttcaactactctgacttcaacctcaaccttgctgctaaccttcccaagaaatgtggggtcaacattccctaccagatcagccccaacacagactgcactagggtgcagtgaggttggtgcatatgatgtttatgttagcagtgttagaataagaggccacgtgacatgacaagggaatggctagaaattgcttctttaatgtactagtgctcttgtattatgtctgtggttatatatattatatagtgtgtaactgaggttatggtgctgcttgtgtagcatgcatatgtaggcattagtataagatcataggaagctatgggaagaaacatatggttgtgtaagctgttgttgtcacttatttaatgatatgagcagtttggcaaaaaaaagtcataagtataagatcatatgaagttatgggaagaaacatatggttgtgtaagctgtagttgtcacttatttaatgatatgagcaatttgggaaatac

SEQ ID NO: 44381 - DNA, 266 bp, Glycine max
  Clone ID: PAT_MRT3847_140074C.1
cacccacctccaccacttctcctactgacgtcataatctgtttaatatgctccaaatcccaggcatgcagaggtataccccaacacaacaactagactaggcgatagccaattctcagctgaggcgtccatttttctagtgaggatgagccttgctcatttgcttccttagccattggtgtagctctggtctctctaagtcccattagcaatatcatgtcatcgccaatatattttggcgtgatgtcttcacctccattccacaca

SEQ ID NO: 44382 - DNA, 500 bp, Glycine max
  Clone ID: PAT_MRT3847_140075C.1
ggaactgtttctgtatatgttgcaattaattctggaaggtgtgtgatatttggtgtgttgatttaggaagtggtctcggaataaatagcattgctgtaattggaattactgtattcgtttataaatatgcaattatatcttcaggtgttatggtaattgtgaactaggtcaatcttttcagtttgtacgtgatttctgggaagaagtaaagaactactgaattgtgactggttctgtgaattacacgtgtattgctgccctagaattgaatgttattgcttccttttcgtgtccgaatggctcgaacatcttaccaattttgttttcgtgaaatttctgtaagctaatattgttctcaggatgagcaaagttggaagataaataaaatacaccatatgcccaaaaaccattggacaagttcttgtcaagtgtgcgagtagcactagaattgctaagcaaccataggacttggagggaacgtttatttgtccagtcacatg

SEQ ID NO: 44383 - DNA, 626 bp, Glycine max
  unsure (1)..(626): unsure at all n locations
  Clone ID: PAT_MRT3847_140076C.1
ttnnnngattgtnngacagctatagagagtataaggctagttttctgcatacgtccaggaatactaaccaaacattaaaactataccaattaatagacatacatttaattaatcagccaacatcatcctcacgaactcttcataatcaatgaggccatcaccatctaaatctgcctctttgaccatctgttccacttcttcgtctgtcaccttctccccaatagttctcattacagacctcaactcgctgggcgatatataaccatcatgatctttgtctaacaccctgaaagcttccttcagttcctcttctgcttcagtttccttcatttttctggccatgagattcaagaattccccgaattctatggttccgttgccgtccatgtccacttcgttcatcataatttgcaactcctccaccgttggattttcatctagtgatctgattgcagtgcttaattcttcgatggttatgcagccatctccatctttgtcaaaaagacagaaggcctccaaaaactcaccaatttgctcttccctcaaggcgtccttcatgctcgatccctttatataatatatattaagacatccactatttaactttcagctcaatacaagctcac

SEQ ID NO: 44384 - DNA, 801 bp, Glycine max
  Clone ID: PAT_MRT3847_140077C.1
ggaatatgctaacccatcgatttttatatggttttgggtatgacacatcaacagatgactacttgctaattatgatcccgtttcattggaaaactgaaatccaggttttctcattcaaaactaattccaggaacagaaagatgattaaacttaatgttccataccagggtatcggctcgaaattcagtattggatcactcttgaatgagacacttcattggttggttttctctaaggataaatgggttgatgtgattattgcctttgatcttataaaaaggagtttatcagagattgctctgtttgatcatttaacaaagaaaaaatatgaaatgtttagtttaagagtaataggaggatgtctcagtgtgagttgctcggaccaagactgggcaatgactgaaatatggataatgaaagaatataaagtgcagtcatcttggactaagtcttttgtaatccctacatatggcttttcccccatatgcatcaccaaagatggaggaattttgggatcaaatatgagagaaagattggagaaacataatgacaaaggtagagttgcttgagcatctcgcctgtgttgctgctgcaggtgaagagtactactgtgccaaccaagatcaacaatctgcaatgtatagagagagtcaactgtttcccaatgtcagttgggaaacaagtgaagatcaccaacagtaacagacaagaaaaaaaatcatgatatgcacaatgtttgctggggaagtgtggaatggtaacgacaacttagcatttgctggttgcacccaacctatggac

SEQ ID NO: 44385 - DNA, 1851 bp, Glycine max
  Clone ID: PAT_MRT3847_140078C.1
actggagctaacatctcttccccgtctaacaactcttctgcttgatcataaccagctcacagggccacttccatcagatataatatcatggaagtccctaataactctagatttgtgccacaatcaactctctggagtaatcccagacgcaattgctcagttacctggccttaatattttggatttgtcagaaaacaaaatctctggtcaaattccacttcaactagcccttaagagactcacaaatctcaatctgtcgtccaatcttttgacagggaggattccaagtgaactagaaaaccttgcttatgccacaagctttttaaacaattccggtctctgtgctgatagtaaagtactaaaccttaccttgtgtaattctaggcctcaaagggcaagaattgaaagaagatctgcatctcatgctataatcataagcctggtggtagcagcctccttactggctttgttgtcatcattcttgatgatcagagtttacagaaaaagaaagcaagaattgaaaaggtcatggaagctcacttcctttcagaggctgagtttcacaaaaaaaatattgtgtcttcaatgtcagaacacaatattattggcagtggtgggtatggtgcagtatatcgtgtcgctgttgatgatttaaattatgttgcagtgaaaaagatatggagtagcagaaagttagaggagaagcttgtaagttcatttcttgcagaggttgaaatactgagcaatattcgtcataacaacattgtaaagttgctatgctgcatctccaaagaggattctctgctccttgtctatgagtatctggaaaaccatagccttgataggtggctacaaaagaaaagtcagccagcagctgtgtcaggttcagtccttgattggccaaagagattgcatatagccattggagcagcacaaggtttgtgctacatgcatcatgactgcttaccgccggttgttcatcgcgatgtgaaaacaagtaacattctgttggattctcaattcaatgcaaaagttgctgattttggtctggccaagatgttgatgaagccagaagaacttgctaccatgtcagcggtggcaggcacattcggctatattgctccagaatatgctcaaacgactagagtcaatgagaagatagatgtctatagctttggagttgtcctattggaactgacaactggaaaagaagccaatcgtggagatgaatattcatgtctcgcggaatgggcgtggcgccacattcagatagggactgatgtagaagacattttggatgaagaaattaaggaagcttgttacatggaagaaatctgcaacatcttcagacttggggttatgtgcactgctaccctgccagccagtagaccttccatgaaggaagttcttaaaatattgctcacctgcagcaatctacttaccaatggagagaagaatgctggtttctatgattctattccacttcttaagaattcaaaatgggaaaaccaggtggaatattatactgatgatgattgatgatagctaggtagtttgcatcacagtttgagtatcctatctggtaataatacagaaaggtgaaaaacttttaacaaaagggctagtcttgaagtcagaatagtagacaataaaactcacagtttagctactgtataattagatagagtagaacataaatcgactcacagtttagaagtgctttgctaagtgcaaatggcatctaggctcagttgtattgaggagaattgcctctttatcttggttttgtttttatgatagtataaaatggtttttgtgtttaaaatccaaaaaaaaaaaacccaaaacaag

SEQ ID NO: 44386 - DNA, 542 bp, Glycine max
  Clone ID: PAT_MRT3847_140079C.1
ggctcgagacgcttttgtttaaagggtgcatttgggtgccttgcttctgtcactgattcttctgtaaccaaagaggtttttgtgtctctgcttaagagttttcaatttgtagattgtgaaggtgaaggtgaaatattgacaagtccagctggagtggtagatagtgatcaaaatgacttgaagggatattctcagaggtgtctgatattggaattagcatattgtcttgttcaaggagcaaaggataatcttattgagataatttacaatttcactatacattcatttcaggcaactgatgagagtgttcatcacgaagcatacaacactctgtgcaaaattttagaggagaatccatgcttatcttctgctcggtacatcgcgctaattgatttattacatggcttaaaacctccaacctctattgcatctcttaggagtcgatatgcttgtttccacatgctgatggtgcatgcagtgaacgttagcttagaagaagaggagaacctcaaggcttttcttattcttaatgaaatcattct

SEQ ID NO: 44387 - DNA, 279 bp, Glycine max
  unsure (1)..(279): unsure at all n locations
  Clone ID: PAT_MRT3847_14007C.1
attgtgacaatgttaatgttcagcctctcaacattgtttaagaaaaatcgtaaganaacatttggctccatagtctaatagttcctttcttttctttttctttctcaaggtcatgatataatttactttttgtaaaatccatgggctcaatgagtcaaccaaataatgtcagctaatatccattgccccctcactttttgtaagttttaatagtaaactctataagatttagataagagctagttgctaatttgttgtgaaaatgttaattttgttgtg

SEQ ID NO: 44388 - DNA, 497 bp, Glycine max
  unsure (1)..(497): unsure at all n locations
  Clone ID: PAT_MRT3847_140080C.1
acgcgtacggaagctaggcactgggtagacggccgccctttgttttcttttttgactcagaaaggtccttccctttgggaagatcgaaaagattataaacaaaagttatactaatttaaaaagaaaaaaaaattatatatatagatgacgaaaggatgaaaaagaaagtccacatatacatatatatatatatatataggaggagggtactataatttttttttttctggaggnagctatagctaaccttgccatggcttttgagactgattttggcgatcatggatgcaatttccaatgccggcaatggtgagaatatcagtatgagagaggggcctaagacccaagaaatctctagtcaacccttcgttaatatttccagctgcaccagtactactacttgtttttgagaatgggtcntgcaaatccaagttatgatgatcatcatcatcgagtttctttgagctctgaatgaatgcgtcctccaaagggggttc

SEQ ID NO: 44389 - DNA, 295 bp, Glycine max
  Clone ID: PAT_MRT3847_140081C.1
acggcgctagttttaattcggggttggagagtccaaaataaacaaaaaaaattgaccactttcaaattactcattccggaattatgtacacaattccagaaacatttgtttatacatgcaaaagctttgatttcgaattatgaatgcttacacaagtttgtcaatttgagttgaaataactcttctaaataaattggatttcggcagaatcctaccaattattaccttctatatatgcaaaagccttgattttcttgagagatatactacactaaattgtttgagcttcttattc

SEQ ID NO: 44390 - DNA, 650 bp, Glycine max
  Clone ID: PAT_MRT3847_140082C.1
gcaccaggagagaactagtctcgagttttttttttttttttttactttaaaattgtctgattttcatttcatagttggattaacaactactagatgcttgagcaagttgaagttttacttactacaattcaattcaatttgtacatgttccatagaccatggatatagaagatcttatttgtataatataatctaacaaacaactctctttaactaacaaacctataaaatctgttaggatcccaaataggaagaactcatcaacaattcatttacatgtggaaaaagggatattatacttgtccatgtactatgcttaatccaaagcccaaacctggatcttgccatcagaggaaccaacaaaaagcatcataccatctgcatctgatactaatgatgtgatctttgtgtgaccaccagccattttgattgaagcaacccgggtgagcttatcttttagccaaacctcaatggtgccaaattttgtgccagcaaatatgaagtcactgttgatggctatgcgatggatgtcaagtccagtggagagtgatcccaccaccattttggaggaaagtgaaaatatctttcctgcatttgcatcaacagaagaaccacaagcaaagaggaaaccgtcatgaattcgaagggag

SEQ ID NO: 44391 - DNA, 209 bp, Glycine max
  Clone ID: PAT_MRT3847_140083C.1
agtatgtctttttttttttttttttttttttcaacttggaacggccaggagcggacaatacctgaaagcccaggaaagggaaaacaagggagaacaacgcccctacatgccccaacatgaatactcaagaaccccttcgatcaaattcaggaaccacttagaggctcgatttggcagcttaagatagcccaaggcggccccagggggcc

SEQ ID NO: 44392 - DNA, 358 bp, Glycine max
  Clone ID: PAT_MRT3847_140084C.1
gtaacgctagaaacaactctatacaagacacgcgattatatgaatacatctcaatattaccactcatgtgatcttcattcatgtggaataggcctgctcatcagcaattcagatcggccacgagaataacatggggcatttctagacctgcgtagtccatcgagctaagacgactccactaatgagctaggaccgctcatggcataccgcccaacttgtaccatatcacccggagccggctgtggctgtataccaccgtggcacactgactctcgttgctacaacatatggtttttctcttcgattataccacaacgactgggaactggctcaccagaaactttcttgcgcgaacact

SEQ ID NO: 44393 - DNA, 485 bp, Glycine max
  Clone ID: PAT_MRT3847_140085C.1
cactgcattccctttactctctctgtcttttcttcaacctctctcggtttcgaagaatcgcaatgacgaactccatgggtcccccaccccccaaaaaccctaatccacctgacaccgcgccaccgtcaatgcctcctcctcctcctcgtgactcagcggaaccgtcaccgccgccgccaccgccaccagctcgcgattcgagcaatgctccctctcagggtgtggcagttccgtataagattcctccgtggggcgccgctccttgccatcaattctaccttgaagttctgaaggacggttccatcatcgacaaattcgacgtgttcgagaaaggagcttacatgttcggccgattggatctctgcgacttcgtgctcgagcaccccactatttctaggtttcatgctgttgtacagtttaagagaagtggagatgcatatctctatgatcttgggagtactcatggaacctttttgaacaaaaat

SEQ ID NO: 44394 - DNA, 753 bp, Glycine max
  unsure (1)..(753): unsure at all n locations
  Clone ID: PAT_MRT3847_140086C.1
cactgcgtccgctttaccgtgggctttactctctctgtcttcctcggttctctgttgcgaagaatcgcaatgacgaactccatgggtcccccacccccaaaaaaccctaatccaccagacaccacgccaccgtcaatgccccctcctccttgtgactcagcggaaccgtcaccgccaccgtcaatgccccctcctccttgtgactcagcggaaccgtcaccgccaccgcctcgcgattcgagcaacgctgcctctcagggagccgcagttccgtataagattcctccgtggagcgccgccccttgccatgaattctaccttgaagttctcaaggacggttccatcatcggcaaattcaacgtgttcgagaaaggagcttacatgttcggccgattggatctctgcgacttcgtgctcgagcatcccactatttctaggtttcatgctgttgtacagtttaagagaagtggtgatgcatatctctatgatcttgggagtactcatggaacctttttgaacaaaaatcaggtggagaaaaacacatatgttgacttgcatgttggtgatgtcattcgatttggccggtcatctcgcttgttcattnttcaaggaccgtctgacttgatgcctcctgaaactaatgcaaaacttatgagaagaaagtgagaatgcgtgaagcaatgctagataaggaagctttcagtccaaagagcaaggcaggaagcatctcttgctgagggtatttcttgggca

SEQ ID NO: 44395 - DNA, 340 bp, Glycine max
  Clone ID: PAT_MRT3847_140087C.1
cccacgcgtccaatacatcctgaactcatatgattaccatacactcataatcaagaaagagacatgagtatgaaaatctccattagcggagcacacccatctactagcacaaccaacatgacatacattacatactcagacatatacgctaatttcttcatgaactacctcaactaactctacattgccaaatctctatctctttacatactccattttgttctcttctaaactttcgactctcatccacaatatcctactatatgcatatacacttcattacagttatcattaactgctggaagctataaatgcataaatcttttagatcttgaaattc

SEQ ID NO: 44396 - DNA, 217 bp, Glycine max
  Clone ID: PAT_MRT3847_140088C.1
gcccgaagaccccgggtggacccacccggggtaacgcccgccagaagacgacagaaggggggggacagggggaaaagaagccccggataccccccgacaaaggacaagacaagggagcgcccaaggcagacgaaaggcggcgcgcaaaacggaaccgcaagagcacagccagcaccggtgacaggacccacgagccacacagggaccacgcgcggag

SEQ ID NO: 44397 - DNA, 308 bp, Glycine max
  Clone ID: PAT_MRT3847_140089C.1
ggggaaatgcaacaagctggacatagggattggatgatgatgaaataattgtgctaataaagggatattgtgcgcaacacaaatttaaagaaaacttggacttttatgattacatatgaggggctacctactttacaactttacaatacaccatggcgtctagcaagctacattgttgtaacggtgggaaacaatacgtagacataggaacttgacaagaaactttttgatgttctggagattatagaagctacagaccttttaatggacgttaattcaattgtgtacgaggactttaaagggggttt

SEQ ID NO: 44398 - DNA, 280 bp, Glycine max
  Clone ID: PAT_MRT3847_14008C.1
tgggatactctaccccccaaaattgcccgacatcatttcttcgccctgtatagtcatctaactatattacctgcaagctgcatctctgtacttattgttgaattactttgtataataattttaatccaatttctgtctgtctgtccctttcttaatatagggacctatcttgcttttttcttttttcagcaagagattaacgatgtaaccattgaaacctgggaaaattataatgctactgtatagcttctgtctcaataaaagctcgattcagtcaaaa

SEQ ID NO: 44399 - DNA, 953 bp, Glycine max
  Clone ID: PAT_MRT3847_140090C.1
gaatcatagtccttcttcgatccttatggaaaaaaaaaaaacaatccttttgcacactcaacacgtaaaagttacacttatccgaggtatcgggcgcacaactcatagttgttagcaaatgggtacctcgaaaagttgcaaaagtgaagaactttgcacagaactactcgaatcccaaactggggacacttccactgggtctgtgattcaaactttgcgtcttcaagtatttggggtgctacattgggttgtttcactaggcctcattctggccattgactttctcttgaagaaagccttcgtagcagcttcgattgagttcccaagtgctctgtttgggatgttctgtattttctctgttttgattattcttgattgtgctataccttctgctgctgtggctttgatgaagttttttgaaccagggattatgttcattcagagatggctccctttgttctatgttccctatttggttgtgctgcccctttctcttaaagatattcccccttcttctgccatcaaaatttgctttattgtagttggaggatggctggctacactttgtgtgactggtatgacagctattggagtaaggaaagcagtgaagacagagttgatagatgctgagcctatggagaagccctctccattttcttccattgaattgtgggcatggactgggattttccttatatcttttgttgcttcattagtttacccaacagcactggggacacgagccagaacgtatcttccattcttgcttgcttccacggtgttaggctacatgattggttctggattgccatcaagcgtgaagaaggtcctccacccaataattttctgtgcggcatctgcagaagtaacagcagttgtttttgggtttctttccaagtcagggcttgatcctgttctaggatattaccttacaaactcatcatctgatcctg

SEQ ID NO: 44400 - DNA, 207 bp, Glycine max
  Clone ID: PAT_MRT3847_140091C.1
agaagatgcatttttctgtagatcttttcaaacaaaataaatttcttggttttctggctctgtatacagttttttatttttttttcttgtttatgccaaacatcaaattaagtttgacaacgtgagatacaggatgcagatatttgcagcttttattttttaaaaaaaattatatttatcaaaaaaaaaaaaaaaaaaaaaaaaaaa

SEQ ID NO: 44401 - DNA, 681 bp, Glycine max
  unsure (1)..(681): unsure at all n locations
  Clone ID: PAT_MRT3847_140092C.1
caagcgtccgcttaaacttgcagaatgcggaaatcttttgcttccacggcggggagttctctcaccgccgccgtgtctcttcctcttcttacaaggcatcatgtgttcctcaacttcagaggggaagacacccgtgacaaccttcattagtcacatttacgctgaaccacagaggaaaaatattgaaacatatatagattacagactatccagaggcgaagagatttcacctgcactccacagagcaatagaagaatctatgatttatgttgtcgttttctctgagaactatgcatcttccacatggtgtttggatgaactcacaaagatactcgattccaagaagagaatggaagggttgtgatcccagttttctacaagngtggatccatcaattgttaggaatcagagagagacatatgcagaagcattcgttaagcatgaacatcgatttcaagacaagatcgacaaagtgcatgcatggaaggctgctctaactgaagcagctggcctctcgggctgggattcacaagtaaccagaccagaagccacacttgttgcagaaattgtgaaagatattttggaaaaattggatagttcttccttnagtgatcatcaaggaaattgttggaattgaanaccatgttacacgaatccagtccttgatgaaccttgagtcac

SEQ ID NO: 44402 - DNA, 248 bp, Glycine max
  Clone ID: PAT_MRT3847_140093C.1
ctcggcccgtggacgactcgtactcgccgagccccctagccctggttgcccggggcccgcccgggtcactacttgctccgcgggctgcgactcgtgcttcgtcctcgtcggcgtcctcgtagcagccctcttcttgccactcgccccttcctcgtcctgttcaagcgttccgtccgagcgctcccccgcatctcgtaccctcgcgcgcgagtctgacattctggcgttccaccaccgccccgctgcgg

SEQ ID NO: 44403 - DNA, 903 bp, Glycine max
  Clone ID: PAT_MRT3847_140094C.1
tgaataggtactgtctttcataaggacgctcatttatggaccaatataaaggaagtaagtgcacgtgaaatggcagttgcagcacgtgagggttctagacggcttcagatcctcaaatctgaagaaaggaggaaaatattgctggcaattgctgatgcattggagacaagtgaaagtatgataaggcatgagaatgaagctgatgttgctgatgctgtggcaactggatatgaaaaatccttgatgtcacgtttaatcctgaagcaagagaagatctctagtcttgcaaagtctgtgcgcatgctggcagatatggaagaaccaattggtcaaattttaaaaaggactgagctagtagataaactcatcctggagaagatatcatgtcctttgggtgtccttctggttatatttgagtctcgacctgatgcccttgttcagatagctgcattggcaattcgaagtgggaatggtttactgcttaaaggtggaaaggaagcccgacgatcaaatgcaatcttacacaaggtcattacttcagtgatgccggatactgttggtgacaaacttattgggcttgtgacttcaagagatgagattcctgacctacttaagcttgatgatgtaatagatctagtggtccctagaggcagtaataagcttgtttctcaaatcaaggaatcaacaaaaattcctgttcttggtcatgctgatggaatttgtcatgtatatgttgacaagtctgctaattttgatatggcaaagcagattgttagggatgcaaagactgattattctgcagcttgcaatgcaatggaaactcttctcatacacaaggatctgtcaaataatggtggacttaatgagcttgtccttgaactccaacgagaaggtgttaaaatg

SEQ ID NO: 44404 - DNA, 256 bp, Glycine max
  Clone ID: PAT_MRT3847_140095C.1
ttatataaccacagaatcatcagttcccggtaaaaacttcattggtgaagacacaaggatgcgctgctcctaactagatccgacggagtgactccggcgttggaaaatccctactatgaatcactaatcgtttggacgaccttctgtgtccagtgtaaagaaaaaaacacgcggccacgttgatattctagacataaaggttcttctttaacgaggatgtatgtacttgaaaaaccctaggtagtagcgtctatgg

SEQ ID NO: 44405 - DNA, 1966 bp, Glycine max
  Clone ID: PAT_MRT3847_140096C.1
aatagctgcagcaaaagaaaacgagttaaatcatttatatttcgtcaagcttatgatcaccaggaaaaaaaatacaacattcgaaaatgcaagaccccccagttacttgtaaataacaagtaacacatttctttggtggtatatatacgcattggagggtgttaagtaatgctaaacaatgttgtgatttcacaaaatgttacaaacattaataggcacgcctacttgagcacagctttgtgccaaggatacttccacagctcagattcccctctctttttctgcaaacttaaattacacactcccgttacctgtctttttctgcctcttcccaatcccaacctcagcccgaattcccttcttgcagctaaaaaattacaaaaaggaagaccagaaaaaaaaactagtaaaacaattaaatggaacacattgtaagtgccactttattgggtggtagtagttgcctccgctatccaattccacactcttacttcacccgtaccgtcacccgtgaagaatatgccgttaggccctatctgaattgctcgtacctctttttttgtcaatatcttgcctctctctgcaaatgatggcagatcatagaggtgtacagtattatcattgcaagcgcagagcaaaatgggtttgccttgtgaatcatgcatcccacatagggtaagtataccattttcttcattgtgagaatatgtcacttccaagtttccgctttcagtagcataccataccttcactgttttgtccaatgaacaagacaaaaggaattggtcccagcagagaacagacatcacaacagatgtgtgctctgttagtgtctgtaaacactgcaaggtttcaaggttccatacttttattgtattgtccattgaaccagagtaaagtctattagcaccaacaactaatgaaacaacaccccgagaatgacctttaagtgatgcagccggctcaaagcagttggtagctacattaaacttccatgccaatatagatccgtcctgtacagcgagcatatcattattcacaacaagtgcataaacttgtccaacaggaccattaagacttagctctgataaattttgtgtgttccaggccttgacaaaattgggtatcccaacaaaaacccaggggccttcactgatcatacaacctacttcaccaccaagattgatcacacctacacactttccagattggcagtcccaaatccttgcagtctcatcagtgcttccggtatacagcttatctgaaccagagggaaaggcaattgcactcacagccttctgatgcccttcaagctgggtcagcaaagaaaacccatcccccacactccaagtgtgaaggaacttgcacctctctccataactacaattcccctgaatccaataattacagactttctccgccttcaccaccacccctctaccggcaccggcaccggcaccaccgccaccacggctcccgccacggccccacgtgttgttgaaactggggctgcggcgcgggcccgagaagcccgaattgtcgtatgcccgcttcgaggaggcgccattggcgtggtgcgaattcgcgggcgattcgctgtgcaggaaggggcacgggtagcggttgcacttgcccgcttgccagtggaagcacactttctggtgcttggcgcgcccaccgaggcggttgtacacgcgcttgttgccaccgtccacgtccatgagtcgaaacagagaatgtgtgataaagtgaattgggattcagggatttgggggtttgaacgagtatttattctgttatctttaggtgcgattggaagaggaataagggatcgagggttgctattgattggggaattgagaaggggaggaagggaaatgtagagtgcgatcatcaaaggagtgaagaatgagatgagaaacctcaatagatgatgagattagggattagggttcgtgaggaagac

SEQ ID NO: 44406 - DNA, 307 bp, Glycine max
  Clone ID: PAT_MRT3847_140097C.1
gggggttcttgcaaaaaaagctttttccggggaaaatacaaacacaagaatgccaacccgcagaggggggggggccaaaatccccttgggcccaaatggagactactaaaggatggcgactttcgggggggggaaacacctaagtcaccttccaacttaagaaaacccccccaaggactgggaccaaaaccaaaaaaaaactggtggggtttttctcttacagggaaggtggaaaagagcccttccaagggaaacaagctaaaagtatttggaaaaaactattaccgcctctttgtccttgggccca

SEQ ID NO: 44407 - DNA, 256 bp, Glycine max
  Clone ID: PAT_MRT3847_140098C.1
cagaattatatccgtcctttagtcgatctcaagccctattggaactttgaagtctctacgtgtttaacacatggtgatgaagctaatgatatcaggaacgaatagcaatgcagttgtgatgattcttatgtttcttctcatggtgtacaaaatacaatgtacttgtgaataaggcatatcccgtatgaatcctggagtcaccaccttccaatagttgattgagccctttgatctctttgactttttgcttggtggt

SEQ ID NO: 44408 - DNA, 291 bp, Glycine max
  Clone ID: PAT_MRT3847_140099C.1
tcgaaacacgccgcgaacaagaaaaagaaacaaccttagccggttcaacctgaacttatgggtgttcaattccatgcaaccgttcacacccaaatcttcttcgacaattcccaacggcactttcttgaacggtgatcaccattactaccgttcattaacaggcggcatgtcattaaccccggaccttggacatggaccgaagtcccgtgccccaccaaacccaatttccaagcctggaacccgaacccgaacttgccgacctagccaccgcttttgcttccaaacgtttct

SEQ ID NO: 44409 - DNA, 462 bp, Glycine max
  Clone ID: PAT_MRT3847_14009C.1
agcccaggcttttttcttttacaagaaaagcctttggcctttacaaaatgggaacccggaccaatcttaaattttatagggaaaggcaacggcccattccctttggacaactattggtggcaaataaccatcaatcgggttctatatttccatgggtaaaaaagaggaccaatttcacaattttttaaaacagaaacattttcgacctgattcaggagttcaatgggggttcccgaaagagagaaagagagagagggggcattcctaaaggggggtaaatttcccctatctttttcaggggacaaaacttttttttaaatttttggggataaatagataggggattggagttttaaaaacgcaaagcgaaaaacttttcatttttactatctcagggcttttacctttcctagggcggaaaggtctcctggaaatgcaaaagccgggatatcgaaacagggg

SEQ ID NO: 44410 - DNA, 329 bp, Glycine max
  Clone ID: PAT_MRT3847_1400C.1
ggaaagaggaaaatttcaatattatttaaaagcaaccgggagaaccggggcttttacttacataagaaccttaatccggggccttttccaggggatttaaaccaacaaatcattggaatagtcctacaaaagggggtattaaaagttttgacccctccctaaaccgggggtttaaacgttgctgttaatacaggctaaccaccacagggggaaatggaccatcgggtttcccattaatatcccccttttaaaacgggcagggggccacaaccatgttgaagggtcttacactggggggaccgggggtttcctaccaatacccccctccc

SEQ ID NO: 44411 - DNA, 394 bp, Glycine max
  Clone ID: PAT_MRT3847_140100C.1
attcggttgagtctgtttaccttggtgctctactttctcccatcttttcttactgctgacaattaatatcttcggcgtacgcgtatcattcaccttttcggcttattttactacgagtgatacaaactctggactaaacacgagaagaactttgctgggacagaagacgaaacgatggatgtgattcacaagagtggctatcctgccgatgttcttgcgaagggagctcctgaagttgaaaaacatgtcgttcatgaaaggctcaatgatcaaaagcctggcgtggacacgacgtccactactaaggttaataacttcagcaaaaactatgcaccttaaacaaagtgctgtgggagaacttaaacttcacactgaagggaagtagtgtgacggt

SEQ ID NO: 44412 - DNA, 682 bp, Glycine max
  unsure (1)..(682): unsure at all n locations
  Clone ID: PAT_MRT3847_140101C.1
agttttcatcaccttcctatgattgtttttgttttaatttcctaactaactaacacagcaacaagcactgagtctttggccatgacgttcaacgcgagcaccatcacaacggcgtcggaaggagcctggcagggcgataatcccctgaaccacgctcttcctttgttgatcgttcaaaccatcctcgtagtcttcgtgagccgcacactcgcctttctcctcaaaccctttcgtcaacctaaagttgtcgccgagattattggtggaattttgttggggccttctgctattgggcgcaacaagaaattcatgcacatagtgttcccagcatggagcactaccatgctggaatcagtggcaagcttcggcctcttattctatctatttctggtgggcctagagctcgactttcgcaccattcgccggagcggcaagcaagccttcaacatcgcggtggccggaataaccctccccttcatctgcgccgtgggagtaacgttccttctccagagagccatccgctctgaaaaccataacatagggtacgttcagcacttcgtgttcttaggggtatctctgtccatcacggctttccctgtgctcgcgcgcatcttagcggagctcanactgctgaccacacgtgtgggagaaaccgncatggcggctgcagccttcaacgacg

SEQ ID NO: 44413 - DNA, 399 bp, Glycine max
  Clone ID: PAT_MRT3847_140102C.1
ccccccctacccccttctgttggggaccattaatcgaatttccctcaaaaaagggaacccgaaagggtgccccaaagcaccccctaaacccaatcatgtcaaacaagacaaacggaattgcccccaggaagggaatttttttttcgtcggaccaaccattagggccaaatttgttcattaacgaaaaccagggtcctggccctggaaaaccccccccaaaaaccccaaggggccccctccccccccttttgctcccacccatttttttttttgaaccccaaaatgggaaacctagctgggccccccaaggttaaaaaaaccaaatcccctcttcccccccaaggccaaaaaattggaaaaattggcccccaaaggggccccaaacttcccccaaaaacc

SEQ ID NO: 44414 - DNA, 705 bp, Glycine max
  unsure (1)..(705): unsure at all n locations
  Clone ID: PAT_MRT3847_140103C.1
atttctttttgatataggaatgggtaacagattgctggatctaaatacgagaaatgccatggcaagtgttgtaggataaaagatgtaatgggaattgttacatgggttgggggaagttactgttattattttaaagtctgtattttttagaaacaggcactggttgcttacttgatttttaattgctaaaacattgtatgtaatcttgtgaactgtcttttgtatcaaaatagggtaccacttttacctaatgctgtttttacttgaagtttctgtcattgtagattctaaatttgttctgctgaaactttttttttgtgcatattaatttgtgatatgtttgtctttttttggcctttttattaattcaaggtataaagttttcaatttttttaatatagaccaagtcatgtgggtcaataagtgacccactagtttgaccactgacccaatgccttgaccggttcgatcactttttggtttttaaaactatgcttcgtagttcctaggccaatgtttgcattcacttccttatatgctctttggaaccatcacaggctttttagacagctgacaagagacaacaagatatggcagagaagagcaaagagctgctccagtttgagcatanaggcacacccctttcttccttagaatccactcttcttgtttgtgataataaaaaagaatcagacacacaaacta

SEQ ID NO: 44415 - DNA, 1603 bp, Glycine max
  Clone ID: PAT_MRT3847_140104C.1
gggtaccgattacgcaggttccagaatccacggggcctcttttaaggcaaattgaagccatgcaggaaacaaatgccagaagaagctgaagcttgggctgttgttgaaagaactcttaattctcgacttcaggaagcagaggctaaagctgcaactgcagaggagagagaacgatctgtgaatgaacgcttatctcagaccttatctcgaattaatgtccttgaggctcagatttcatgtcttagagctgaacagactcagttaagtaggacccttgaaaaggagagacaaagggcagctgaaagcaggcaggaatatcttgcagcaaaggaggaagctgacactcaagaaggtcgtgtgagacagcttgaggaagagattagagacattagacagaaatacaagcaagagttacaggaggcattgatgcaaagggaacatcttcagcaggagatagaaaaagaaaaggctgctcgatcagagctggagaagactctacgtgttcattcttcaccattatcagatcaaactcctactacaaagctaaattctgcttttgagaatgggaacctgtctcggaaactctctagtgcaagctccctgggaagcttggaagaaagccactttctgcaagcatcattggactcctccgatagtatatctgagaggagaaacataggagaattaagcatgagtccttactatgtgaaaagcatgacacccagttcttttgaagctgcacttcgtcagaaggagggtgaacttgcttcatacatgtcacgcttggcatcactggaatctattcgcgattctcttgctgatgagttggtcaaaatgacagaacagtgtgagaagttgcgtggggaggctgctgtattacctggcttacgatcagagctagaagcactaaggaggaggcactctgctgctttggaattgatgggcgaacgtgatgaagagctggaggaacttcgtgcggatattgtagacttgaaggaaatgtacagagaacaagtgaacttgctcgttaataagatccagacaatgggtccatcaatgggtagcgactagtttgggcgaagaaagtgctggcttggggaacggaaagtttagtgttcaataactatttgagaagaccatgaccatgaccatgaccatgtccatgtctctgggctgcgtgtgatgtacattggcacagtaataatatattggagaatagtgccatcagcctctgaagaatgattcgttcaggtttccatcggcagatatatattttgtttgcctgggcagcagatacggatagtctcccttgttaagggaatgttgtatagtcagtcttttaaaacgtattcatgcttggagagatccagagaatatttttgctgagtctgttgacaatacagggttttcttttcctccccaagtgtgtgtaacgtaaaacgagttttttgtttggtgctattttttttttttattagtgttgaatgaattttatatgggttttatttaaaactttggatttattattgagaattatataaaatttacctcatgataaattaatattctgattttatccgaaaaaaaaaaaaaaaaaaaaaaa

SEQ ID NO: 44416 - DNA, 762 bp, Glycine max
  unsure (1)..(762): unsure at all n locations
  Clone ID: PAT_MRT3847_140105C.1
gtaagcttcggactcggcaaccagacttgattcttttttgggagcaatcaatgcaaccctctatattccaatccaagtcgaaaagatgatacatataacataacatacaccatatccccaattcaacctctattgggtataacaattgattccaaaaaaacagtcatagccaagcttttaaattctggctcatatcacggttttgttgcatttcttggtattgtgagaaattacagataaatgcagtcgatacagtcacaatttgtgattgcagacacttagaaaaccttgacgttgcggctgaaatggcagtcgcaaatcctttttacaatcttggtatcaacttcatccaaaaagaatcaaagaatataaaacccatcttcctcttcttcatcatcatcatcgtcatcataatagtcctccacatccacgtcctcatcctcgtcctcactatacaacaacataaactcttgccccaattcctcatcctcattcaaaaacaccccaccgtcatcatcttccaaaccaaaaccatgttcttccccctgttctcttcttctactattctcccttcttctcttgggcaacaaatcccccacctccccattctccactccactccacggnacccacaaatcggcgtggcgcccaagcgccttatcccaatccccgaccaccacggttcccaaatcagcctccctagccctcctcagcatctccgaaaaaatccgatcatcccgaaccaaaaacagccaatcaata

SEQ ID NO: 44417 - DNA, 314 bp, Glycine max
  Clone ID: PAT_MRT3847_140106C.1
gtgggtttgttttttttttttgtttttttttttaaaagcccagcatatttaaccttgtgaggggaattttcaaacccatacatttcaattgattggggaaaaattttgtctcgatcccacaaatgtttttaccttagataggtggtccgcgcaaaaaaacgggggttggtccaagtaatgagcaaaaattctcaaaaaaggttgggggctttgatgacccaacctagtgctaagcacaaaattgctgggcccggagccttgtggcattaaccaccctaaattgaagatatgggtttggcgatttgccaataaaa

SEQ ID NO: 44418 - DNA, 441 bp, Glycine max
  Clone ID: PAT_MRT3847_140107C.1
cccacgcgtccggttaacaaccaattgattggagcagaaattctttcactagctgaggaagatgtacctcctgaggatctcgtcttccacaagttctacacaaacaaaatgagtttgtcttctaaaccgaagaaaaagaaaaagaagtcagctgatgaggaagcagctgaggagttgtttgatgttgataatggtgaagttgatggtggggatgagagtgacaatgaagagattgagaatctgttggattccactgatccaactttgggaccagacagtgactatgattatgatgatttggatgaagtagccgatgaggaagatgaggacttgattggtgatgttagtgatgcagagattaattcggagatggatatagatataccctctgatattgatgaggaagagactgatgatgctccaattgatgatgacgacgac

SEQ ID NO: 44419 - DNA, 2247 bp, Glycine max
  Clone ID: PAT_MRT3847_140108C.1
ctggcgcgctgagagcatcgaagcaaggtataaaatgacgtcgcttccatttgccgtgaaagcgaggatgcgctttcgctctcgagactttactctagtactggacaagttcccacgtgacaggggatctatcgatctcatctccgtcatggctccgaatccgatgaagatgaacatgaagcaatctgccaattccactacaactaccatagctaataaggagattctggtccgtgaaacgatgcgtatcagtgccaatttggcttccacccctctcctcgaagccccgccgccgccgtcgcccattgtcggaatcatctgctgcgaagaattggatgggcgtcgttggaagtacgtggccgagagcgatgcccgtggcggattcaagaagaattcattccgccctgtcaggctcaacttccacaaccctcgcgaccaccctctccatgaagtcctcactttcgttacatcctatgttgtccccgaaggtcttcttgatagtgttattccttcctaagtcccctacatgagggggaggggtcgtcagcaccacttcgaaatcctggtggaccactgcttcatccagatgctaataagatctgttggcgtctgctttcagcaggctgctcttggatgttgctggtcgtgtcgggaagatgctcttggctcggcaaggaaagaaattttattatttcctcaaacagctgagcatcacaggtgatcttctcatggagttgggttcatccgtgatcctcgcaaatgctgatgtgctgcatctctttcttctattgtgattgatataattatagctcttgaatgcaggtgcgctaacatcaacctcaactatcacaccaatttataaagcctttgctaaaggagaaaacatatgggatgtcactatttctggagaatgttttggcaatattgcagacctgttaggaactgctttgagcatattgattgccaaaaggaatccatcgcttgtcaccacattttccctcctttcatgtggatatatccttagctcttatagagaggtaaaatctgtggttttgcacacacttaactgtggaagattcagtgtggcagtaaattattttcctcgaagaggacaacttaatgctttgcacgagggcaatatgaatgagaacatattcagttttccatggaaagataggcctgttgtccttggatcaagaatcaaggaagcatgctaagaccctagtgcatatgttgccatagagcccttgtttgatagggagagatatattgtaacatataacccctcaaaacacaaggtttatgcggtgctcaaggatcaggcaaagtcagatgacattctgaaagcagcattccatgctcatgtgctatttttcagtttgatgaaatcattgaatgaaaataaggcctcatctttgaagcaaagggaggatctctcaaacatgacacacacagttgctgatatcgaggctcgtatagctggtacttgcaagaccgtggcagattcttatgggtgtttcaagaataaagctaaggagcaaggttggacgatgtcagaatcacatctaaatcctggtcgagcaaggttttatccagttgataatagatgatattctcatattctcagctggctgctgctaggttttgagtgtcaaagttcttgggactgctctggatgtgaaatgagtcaggcaactgaagcttaaaatcaccacgatgcaatgagaacatacaatgctcatggaatcgtagtaacatccttgatcctcacaaaagccaagtgaactttttgcggatgctgtgcatggatggcctttaacatgattgatatagttatagcagttcttagcatgactacatgaccacttgaaatatcaatgctcttcttttttctcgatagaaaattaccaacgtgtgactctgttctttctattgtcttagttttgttctttattctttttgcagtgggaattactctgtagtataagcttttcaatttcaattttgcagccgagttcaagaacttgttgcacgtgtatcagtgcaatttccatttcgcattcttgtagttttatttgtgcaatatgtttgattaagctaggtccaaagtattttgtaatttttttttcctcgaagcagaaagcataaagaatcatactgttttgtttggtttaaatttgtaagcttgatttcaaagtaaaggactttgtttgttcggaaaaaaaaaaaaaaaaaaaattacaaaaa

SEQ ID NO: 44420 - DNA, 372 bp, Glycine max
  Clone ID: PAT_MRT3847_140109C.1
taaggaaattattttgtattccaatcacaattgtactataaccatgaaagtttcttacaatatataacattacaattcatattttagtaaaatgtcattgtttcaatttcaaaactttatctttgtatctcacatcttatgggagttaggccattcaaggggttgatggcgtaatccatttatacatagttgggataattttcctaaattggtttgtatgttttggaatgtcaagtgctctatcaacttcaaagttgaaaagtcaaatattgaatgactactaatggatcttaatgactactaagtggtggtaatgcctacttaatgcattcctgattctataatgtccaataataacacatgtgtttggtt

SEQ ID NO: 44421 - DNA, 675 bp, Glycine max
  Clone ID: PAT_MRT3847_14010C.1
ccacgcgtccgaacttggccgccaagtcaaaaaagagtaaatctgccaaatttccgcacaaatgtatggagccgtagtgacagcgtctccaaagccctaaaacaaattccctttctctttgcttcctttctcgctctctctctctcttttctcttcccggaattttggacaaacactttcgttgcgagaaaaaaaaatgtcgagtatcactttcttccagcatctctctagtgctttccgtgataaccagtcgcatcttaagcttgtactgctctgcaccgccgtaagtggtggtggtctttgggcttatggtgagagtgttgccccagaagaggcagttagggagaagaagaaggtggtggtgctgggaactggttgggcggccacaagttttatgaagaatttgaagaatccaaaatatgaggttcaagtagtatcgcctcgtaactactttgcattcactcctttgctgcctagcgttacgtgcgggacagtcgaagcgcgcagcattgttgagccagttcgcaatatttttaagcaaaaaaggtggacgtacaattcagtgaagcagaatgtttcaagattgatgcagaaaataggaaagtttactgtcgatctagtgtgaacaataatttgaatgggaaagaagaatttgttgtggattatgactaccta

SEQ ID NO: 44422 - DNA, 281 bp, Glycine max
  Clone ID: PAT_MRT3847_140110C.1
acgttgacgcgtgggtggtgatgaaaaatcgacgcgtgaaaggacacacctgctgacggctcgtggggcaagaaaggccttttgtaggaaagatgcaaggagagctgaatgcgaagatgccttctggataagagatcacagttattggcagcacacagacatgaatgagaggctgattagatttagctgataaagaggactgctccaggataaagcttcaagtgtgttactacaatgcttaaaaggtttggactatatggagagaatggctgttgccacat

SEQ ID NO: 44423 - DNA, 1819 bp, Glycine max
  Clone ID: PAT_MRT3847_140111C.1
ggtcgttgagtgagtgagtgtggtttcacattggctgttcaaatcaaaaatgactttctccctttcattcaccactctgctttcccttctctctgtcattctgcttcatgtcaatgccttccccgttcatttcaatcaccccatacaccatcgccaccctcgctttgccgctcataactacagagacgctctcaccaaatccattctcttctttgaaggccagaggtcagggaagctccctcctaaccagagaatgtcttggaggagagactctggcctctctgatggctctgccatgcatgttgatttggttggagggtactatgatgctggggacaatgtgaaatttggttttcccatggcattcaccaccaccatgctttcatggagcgttattgagtttggtggcctaatgaaaggtgagttgcagaatgccagagaggccattcgctggggcactgattatcttctcaaagccactgcacatccaaacaccatttatgttcaactgggggatgctaagaaggaccatgcttgttgggagagaccagaggacatggatactccaagaagcgtgtttaaaatagatgcaaacacacctggttcagaagttgccgcagaaactgctgcagctcttgcagctgcttctctggtttttagaagaagtgaccccacatactccaaaattttagtcaggagagccatcagggttttccagtttgctgataagtacaggggatcctacagcaatgccttgaaaccttatgtgtgccccttctactgctcttactctggatatcaggatgagctgttgtggggtgctgcctggctgcacaaggctaccaagaatccaatgtacctaaactacatcaaagttaatggccagatccttggggctgcagagtttgacaacacctttgggtgggataacaagcatgctggagcaagaatacttctttccaaggaattcctggttcaaagggtacaatccctccatgactacaaggggcatgcggacaatttcgtctgttccctaatttctgggacctctttgtcttccacccaatataccccaggtggccttcttttcaagatgagtgatagcaacatgcagtatgtcacatccacctccttcctactgctaacatatgccaaatacttgacccaatcccatatgcttgttaactgtggcggaatcaccgtaaccccaaggagactccggacaatagctaagaaacaggtggattacttgcttggagacaacccattgaagatgtcatacatggtggggtatggtccacggtacccacgaaggatacaccataggggctcatctttaccgtcgattgctgtacacccgggaaagatccagtgttccgcagggttcagtgtgatgaattcgcaatcccccaacccaaacattctcgtgggggccattgttggtggaccagatcggcatgataggttcccagatcaacggtcagattatgagcaatcggagccagctacatacattaactcaccccttgtaggagcactggcctatcttgcacactcatttggtcaactctaggaaccccaattatttcgtgtatcccatgttttatttcactagtctcgctagttacttgtgtctcctagaattattatgcacacactcatttgagaccagtaccacaccactaaaccttataaacttatcacaagctgcttaacttaatactattatgtgtaactcttatgatttcggaaagtggtatatatgtatgtcacgtgatggtgtgtgttcaacttctcaagaaattcaaacaaaattacg

SEQ ID NO: 44424 - DNA, 466 bp, Glycine max
  Clone ID: PAT_MRT3847_140112C.1
ccaaaaaagaagccttgggtgtgcatttttttcaactttaatcatttgagaattacatttcaaagtttaaacctcatttgaggcataaaattttgggttccttctctccttctccctccactcatcttctcctaccttcaagctcttatccatgacttcctatgatggggaacttgttcttaactcatcttctccttcaaggggggtctccaatcatctttcttccttctccattcctctggcattgatcttcaagaagcaaaggacttcattgatgaaaaagattcaatgcctacaagctccacatggagttacatcaatttggttaattaatgagatgaaatataggaaataaactgaaatgaaaaagggaagaacaaccctagaatctctaaaataagagttagcatataataactcaagccaaaaatcaagcttcttagttgatacttgaaactaatttaaa

SEQ ID NO: 44425 - DNA, 387 bp, Glycine max
  Clone ID: PAT_MRT3847_140113C.1
ggctcgaggttgctacatccatgatccatggacctggctgccaatgcaaggatactagtgacgctgttgttgcttgaacaaaaagcatttttctgggttgagggagagcatgacctgaagcattgtctcatctgcacctggtgtgtggggtatgctatctcatagtgagaacatgggctccgatctagagaggctaggcatgaaagtggctggaccgctctcaatggtggcttggcatatatatcaccgggatgatccttttttgatgggctgttctcattgcaagacactgtgcgagagacatgtgctgccctactgtagctaagaggaaggtggaggactggaagtgctaccactcactcgttgactcttgtgaacagacaccct

SEQ ID NO: 44426 - DNA, 237 bp, Glycine max
  Clone ID: PAT_MRT3847_140114C.1
caataaccggtccttaaccggcgtcggatttgaaccctgggaagaggttaagaaggagctggaccttgtttccactgacccacacgcttaccttacgtcgacagaagtacacccatgagtctgaggctactattaacgaacagatcactgtgccgtacaatgattcaaacgttgatcatgcgatgattgcctacttgggtaggcacaaagcagcgcttaaagttattgccaagtttt

SEQ ID NO: 44427 - DNA, 540 bp, Glycine max
  Clone ID: PAT_MRT3847_140115C.1
gcggcgctcgaggcggccggtcaaaaagagggatgttacatccaacttgtcgagctgtagtttacccaagaccctcttttgagggagaacctacttggtgctgctacattttctatgacagcaaagattgttctgaggttccatttagttaagcgttgtagtgagaaactgtatgtttgttattgtgtaatacacttttccattttattaatgttctctctgaaaaactcaagcttcctctctggtttaaaccacgaaattttatacctcggtatattttgaagcctggttcaaacttgtatttgtcctatctttgttctagccataacctttttttaggcgtgctttttttatgcatcttacatatggtctatttgattttaggcctaagacatttagcatacggattgacttgtatcgtttttgaaccattactttgtttgaacgagcacccgacatagttcatatatattgtaaactattatttttgtgtagatgtttctgctgtcaattataattgtgaatattcatcggtgtttg

SEQ ID NO: 44428 - DNA, 427 bp, Glycine max
  Clone ID: PAT_MRT3847_140116C.1
attgttgtaaaaaaagaaacccaaaacaaccggagccccaggggaaaggcgaacgcaaggcaaaaaagtatcccacttgccccccggaaaggcaagaacccaaaggcacccccccccaacggcccaccaaaaaaaggcccccaaaccaaaaaaaagccccccgggggaaaaaccccttccccccccccttaaaaaaacccacccgcacccctttggaaaaaccccagaaccataaaacccccccccggaggcagcccacccaagcccaaaaccccaaacaaaccccctgggaaaaacccccccaaaaacgctaaaagaacggccccaagggagaagggacccgggcccaaaagaagagccccagggaggggaaaaaaaaccgaaaaagctctccccacaagaaccccaaaacccgcgggcgataaaa

SEQ ID NO: 44429 - DNA, 519 bp, Glycine max
  Clone ID: PAT_MRT3847_140117C.1
ccacgcgttcccaagagcaagagccgcgcgccagtgggttaaatgctcaatttcttctaattaagaaccacgatggtttaggaatccattgttctccatttagggtttctttttctcattcaaattcttctccagtcacatccagttggggtttctttctcggaagatggctcgtaacgaggagaaggcccagtcgatgctcaaccgcttcatcacgatgaaggcggaggagaagaagaagccgaaggagcgccgccccttcctcgcctcagagtgccgcgacctctcggaggccgacaagtggcggcagcagatcatgcgggagatcggccggaaagttgccgagatccagaacgagggtctcggcgagcaccgcctccgccgatctcaacgacgagatcaacaagctcatccgcgaaaaatcccactgggaacgccgcatcgtggagctcggcgggccgaattactcgaagcactccgcgaagatgacggacctcgatggaaacatcgtcgacgtcc

SEQ ID NO: 44430 - DNA, 464 bp, Glycine max
  Clone ID: PAT_MRT3847_140118C.1
gatacacttgagattcttgactctaaccatgatcttcagcaaaaatactttaagaggccagattctttgtttaaaaggcatctagatgatctgcaagctgccccttcccaatcacattttggtcacgttgaaggtacaaaattatcaaacatagtgaactgtgaacacaatgacttcagccggaagccagataaggagatgaaatggttgaattacaatagatctaaccagaagcatgatgatggttattcttgtcattttgtcagaagacatgctattcacagttctccgaaatcatcaaggaatcagtttaagggaaaaaatgtgcccaatgcagtcccaacaaggattgttgtactaaaacccaatcttgaaaaagtgcaaagtcctaccaaaattggttcatcaccttgttctccatatgctttcctgtctcaatgtggaaagcatgctgaattttcaga

SEQ ID NO: 44431 - DNA, 316 bp, Glycine max
  unsure (1)..(316): unsure at all n locations
  Clone ID: PAT_MRT3847_140119C.1
nnnnnnnnnttnncagaaggctatattttttttatcancggcaagcagaaagnacgcacagggggagtgagggtattagactcagggaagaatcgaaaacaacagagccgcagataaataattcagaacgctaaatgcccgcggagcacaatagacaaaggggatggctcacccaaaactgaaaaggacagaacccgggggcaaatacaccaacaaaaaaaggggaccccaagaaccacagcaaaacaaaagaacacccggggaaacgcactaaacaaagaaccgggacatggcacacaaaacggggggccaagag

SEQ ID NO: 44432 - DNA, 263 bp, Glycine max
  Clone ID: PAT_MRT3847_14011C.1
gccacctcctgtccatcaataccctcaccctcaccctcccttcgtccattactctgctccaccatctcctaagacgccatacaagtacccatcacctccaccaccagtacaccctccttagactcgccaccgagttgatcactctcctcgaccacggcctaccaacaagccttacatctatgcgtcacctcgccctgcttacgcatagtaggtagcatagctctatggatatgaagaatatgtgcaacgagtagcaagcgagc

SEQ ID NO: 44433 - DNA, 261 bp, Glycine max
  Clone ID: PAT_MRT3847_140120C.1
agaaatcaacacaccacacctccttagctcttcctgcatcgcaaaaaagctaaatacacagaagaaactccacattcatcatgaacacctaaactaaaatcaaaaccaaaaccaaaatcaaatcccaaacgtcgccgctttgatttcgcgagtaacacatgcaatacagtccttcctctcccataacgatctcgttctcctaccttcccaatccctccgtcaccaatacctaatctcatccaacatcgcccactctccctc

SEQ ID NO: 44434 - DNA, 422 bp, Glycine max
  Clone ID: PAT_MRT3847_140121C.1
aaataaagggatccttattattttggcaattcctttccaaatgctattttttttttttttttgtatgtcaaaaggtacccttgaaaaaaagacgggatccttttgagcataaaattttttttttaaacatattttacaggacctaaggccgggaaaagactaacccttgcaacagggaagaggataaaacggcccataactttttgaaggaaaaacattggggccggccttggagataagttaaacctaaaacaaatctttgtaacccttaccaattccagctgtatttcctggccaaaaaaaggagggaaatttggccggtttttgtacaaaatctaacaactggggagccttggccccaaaaactaaaaccaaacggggttcaccatgttgggagacttcttcacgaatcgattgaaaaa

SEQ ID NO: 44435 - DNA, 250 bp, Glycine max
  Clone ID: PAT_MRT3847_140122C.1
atgtaacctttataagacaaggaaaactaatgacactttgaatataaactattaattatacatacatgcctacaccctgcctactggccaaaaggctggctcccctttctatctgggaaagagaaaatttatctaactattttaaaaaaaaaaagtgatttacaatggttaaggtcccatgcaagttttatgctctgcaaattcctctaatttgctgcctcgaatgaggacacatttttgggagggatga

SEQ ID NO: 44436 - DNA, 243 bp, Glycine max
  Clone ID: PAT_MRT3847_140123C.1
ccacgcgtccgctcagggattcgaactcgctccttgaagggtaagagatctctaactttgcctgataaggacaccaggagcctccaggttggtagaactctattattcgatacacagcggctgatgatatgtggttactccatgtatctgagctcgcactccgactattgctgaatggtcgatcagacacatcgcatatgctctgaatggtaacgcatcatatccgagatcaagagctcctac

SEQ ID NO: 44437 - DNA, 416 bp, Glycine max
  Clone ID: PAT_MRT3847_140124C.1
agacaccacagagggagagacagggacggatataaatcgagaacagacaacgatcaactgaaacatcgactagggtatgctgaggaagctaccaagggtgaagtcctaccactttggcaaggtggaccccatcttcaacatcttagccggcttgggtctcgttttgcaccttgtccttgtcggaggattctgtgtcagacacggaatttctggattccaagttggctacatatttggcactgtatagctttgtaaagtacggactggcgtatggcgttgggaacggtatcactcaagatgacatcatgagatactttaacgttggaaattcgatccgtgaatctagaaacatgattttcgagcactatattactaggcatctggaagacctattcacttgtactgcatagcttata

SEQ ID NO: 44438 - DNA, 316 bp, Glycine max
  Clone ID: PAT_MRT3847_140125C.1
ggttacactgggtgtcatgatcagtcattttgggtgtgttcttcagccctttactgtgtgctgtattcccatgatggcgcgaacgcctccctgagggcgctgacgtagctgctactgagtcagccactgcggctgcaacaagcactgttatgacatgaactatccttctatgtctaccgtccaaactcttggaaagggtgtctggctctgtgaacgcccaactgggggtggctgatatggacgtagtcattgagaacgggaggtctgactgtgtatcccgctgcgcgtgcaagcccttccactgcatgtgaggtcg

SEQ ID NO: 44439 - DNA, 315 bp, Glycine max
  Clone ID: PAT_MRT3847_140126C.1
acgctggagtttcagcttggacactgagccaatcagacaagcaaagcaagccaggacagaccgtcctgccccaagcccagcttgtctcctgccttccaacgccatggggagcaatctcagcccccaactctgcctgatgccctttatcttgggcctcttgtctggaggtgtgaccaccactccatggtctttggcccggccccagggatcctgctctctggagggggtagagatcaaaggcggctccttccgacttctccaagagggccatgcactggagtacgtgtgtccttctggcttctaccccgtccctgt

SEQ ID NO: 44440 - DNA, 382 bp, Glycine max
  Clone ID: PAT_MRT3847_140127C.1
gcattcacctgcagagtttgtcttcatcaggcgcatacaccacaataaccagtgatcccttagccgcatatccgctttcccgcgacgcacctttaacgccagaagaacagtccgtaacagacttaccttccacagggccaatggcctctggaccctcataatatacaatctgacatcataggtgtccagacaccccacttcaacatatccggcacaatctagcgcccactgcaaactctcttcttctccgaccgaggtactcagggactcctgctcactaccatgggatcaaacactgcatatcgctccgtaatctcagcactcgctttctcaccgaccgagtcaacatcatctccatcttccacataaagcgcatgcgcac

SEQ ID NO: 44441 - DNA, 211 bp, Glycine max
  unsure (1)..(211): unsure at all n locations
  Clone ID: PAT_MRT3847_140128C.1
tattgtaggaagaataaaaagagatacatggatttaaagaccctataaacaactatttatggttatataatccgaataacagaaaaatggataattgccaaaatacctgagngaacttgcaaatttcacggatgaggatgatgaggaagcctttttatcacgccttttttgaagagcaaagattcagggtttggaggtaccattttaatgg

SEQ ID NO: 44442 - DNA, 438 bp, Glycine max
  Clone ID: PAT_MRT3847_140129C.1
cgtgcaccagagcacagcgtcctcaaacagctatcgctgtcggtttgaatacgaagatctccaagggaaagaggggaggccagaagaacgccgttggtccctccgtcactaaagactgacgcgatatcaaggcccctaccctcttccaggtcaagaatatcggcaaacccctcttctgtcgtacccagggaaccaggatagcctcctgaggactcagacatcggatttttgaggtcttatcggctgatctgcaaggggatgcagacctctcttccatgaagattccggtgagagctgcagacgttcaaaggaagaatgtgctgacagacttctgccgaacggacctcacagctgccaaggacaggtcttcggtgcaactatggcaaaccttaatggaagctacatcgtgatgttaagaccactgatgatgatgcattt

SEQ ID NO: 44443 - DNA, 308 bp, Glycine max
  Clone ID: PAT_MRT3847_14012C.1
tttttttttttgtactatcttttttttttttttttttttttttttaggggatgggttatattgaagaaggataaaacataatttaaaagttgtcaattgcccgatttcccaaattaaacaaaaaggcaaccaaatatcgcttataaaaaaagtttttaaaagagacttttctgtcacatactaagacacacgatttttaaacgtattaaactacccttaagtcataccacttggtgaagtattaaccccacctctttcgcgtctcatggtctgaaaatcttaactgttttaaacataaagccatttcc

SEQ ID NO: 44444 - DNA, 235 bp, Glycine max
  Clone ID: PAT_MRT3847_140130C.1
tctatgatgttagaaaagcttaccaatatgtagtttggaattgagtactgagacatggaagtttcttccttatacatataattgacaacaaactcagtgacggctttcagatattctatttggaatgattctcttgtcttcagagacatattatggttctacttcaaaaccttgaagttcacattcaacctatgcttgatgtatagtttacattaaacatattagtctgttaccg

SEQ ID NO: 44445 - DNA, 277 bp, Glycine max
  Clone ID: PAT_MRT3847_140131C.1
aacgggaaaaaaaaaaattttaacccatttttgggttttgggacgggacaattggttatttagttcaccatcgggcatttccttaaccaaaaagggaatggttaattgccccatgggccttttgggcatttggaaatttggaattggggaaacaaaacgaattccccaaaccctaatggaaggaaatcgggcctgacccacacccctttatttagggggaacagaaaaaggacccaacctggggcccaaattgagggggggcgggctttggggaaaa

SEQ ID NO: 44446 - DNA, 371 bp, Glycine max
  Clone ID: PAT_MRT3847_140132C.1
ggctcgaggtgcttacgtcttttctccttcttttacgctgtgccggacttgtgtgtcttgtgatggtgggcgggggacacaccacgctggggcacgcggatgccgtgcaggctgtgatcccatttcttgacccattggatataaacagagtactcgtagcacagcagactataccttatttcccaaactcctctctatgacgaacgcgcttaggattctgtgtgtgcatgttaagtacatgagccatccattttgctggacgaatggcttacagcgatgaggatcagcgagcctaacatccataccactgtccaaagagcctggcacccgcggcggaccatggatgactctttattggtacaaaatcgagc

SEQ ID NO: 44447 - DNA, 439 bp, Glycine max
  Clone ID: PAT_MRT3847_140133C.1
cccacgcgtccgctctagtaagtaaggttattgcttaatgaggaatacttttgctttcctttttgatggaaagaaatcttacttctagggaataagtctacttttatttttcgacaaatattaatatttctagcatgatgagagattatttggttattatgaagacattataatttttatttatagtctattcctagtttaaatggaaaacagagtttgcgtttacatggtaggtaatttacagtttacaattgcatatagttgtatgtgaatgctaaatcataaaacgcttatttcttgattcatgggggttttcacacttggtgtttgatggagttgtatgtagcagtgatactttctgaattattgacagattaggaggaagatagacttattcgtattacagagtaaaaggaaaactcatactgaaaggctgatt

SEQ ID NO: 44448 - DNA, 623 bp, Glycine max
  Clone ID: PAT_MRT3847_140134C.1
ggctcgaggaaacttgaaagtaaggctcgagcaacagatcgttaaggagaccaaaccaacagaacagagtaacagagagttagcattgcaacaaagagaaagaaaagttgaaacattttcagacagtggcatgtgggaatctattctgttaacggtggctgccaccgctggcaacaacatcggaaagatccttcagaagaagggcactatcattcttccacctctctctttcaaactcaaggtcataaggtcttatgctttaaacaaaacctgggtggtaggttttctaatagatatatttggggcattattgatgttaagggcattgtctctggctccagtctctgtcatccaaccagtttctggctgtggactagcaattctttcaatcttttctcatttttatctcaaggaagtcatgaatgctgttgattgggttggcattacattagcaggttttggcacaatagtaaagagttggtgctggaggtgaggagcaagaagtggttgctctatctatttttcacataccagggctggcatttattggtttcatcttgtttatacttcttagtggatggcttcgaatatgcagcgccaacgaagagaacaagagatgatga

SEQ ID NO: 44449 - DNA, 443 bp, Glycine max
  unsure (1)..(443): unsure at all n locations
  Clone ID: PAT_MRT3847_140135C.1
cacgatattacgtggtcactatgaatgtgtgaactcttgctggtttaatcaacaagatcaggagtctttaggaagaaaagagatgaaattatgataaaggttaaagatgaaaaggaagccattggtttgacaaatgaactagaagccaactgacaaaacacaaggtgaatcaaggagtcatcccggattcctggtattgattacactgaaaatattcatcgctgcttctttgaaagccatgacttgtctggactggagtcagtgttctgttggcaagaattgcaaggaactgtacactggtggaaatgatagacaaattcttgtctggtcacctgctaggtcaatggctgatgaaatggacgaaggacctgctgaggatcangataactggagtagctgagtcttgtctccatttgggtcacagctttctcttgttcgtcttc

SEQ ID NO: 44450 - DNA, 276 bp, Glycine max
  Clone ID: PAT_MRT3847_140136C.1
gaagaagaggaaattgcagtgtatattgaaatggaagacagataaaagaggtttttcagaaagaagtcaggatttgttaatgaatgagggagtgttttcaagtaacagagaacagacaggtgaaagtaacatggatgacctagagttaccattgtttgattttaacacaataacaatggctacaaacaacttctctgatgaaaacaaacttggacaaggaggctttggtattgtttacaaaggcaggttgatggaaggtcagaacattgctgtgaa

SEQ ID NO: 44451 - DNA, 450 bp, Glycine max
  Clone ID: PAT_MRT3847_140137C.1
aattcggctcgagtgaacacatgcttgatgttgcccacatgttaccaatttcggttgtttatttgttaattccaggtcttttcaggaatcatggtccacgtgactgtggcagtacaaatgtcagtcttttaaaaatgggtctggcctgtcatatcgcgattattcatagtgaggcttctgctgagaaaattgccagatagcttttatagaacattttggaaatttattggggttctaataaactttgtatgcttcttggacatagcaaagtttgagcagatgcatcagctgctcttattttgtattggtctgatttgaaagataaatttgctgggttgtcattagcacaatgtccctatgggggaacatctatagtttcttatcttttgtagaattgacacttggtgattatttaaatttacggttacttacatagatttctcatctgta

SEQ ID NO: 44452 - DNA, 2755 bp, Glycine max
  Clone ID: PAT_MRT3847_140138C.1
aattcggctcgaggccgcgctcaaccacctccaccatcactcgctttctcttctctctcgggttctctctcgggttctctctctctctctctctcgcacaccgaaaccgaaagcgataatatatagagagagagagagtaagaggagtgcactgcacacgaggtagagagaaggaactaactcaccgaacagtgaaaccaagacattctgaatttgagcttcggttagtaattcggagtgtttgtttgtttgacttcgatggcttcgaattccgagctggtgcgaaccgttgtggagtcagtgctgggcgtttcggtctccgattcggtgatggtgatcgcggccacttccgtcgccttggtgatcgggcttctcgttttcgtgtggaggaaatcttcggatcggagcaaggagcagaagccgctcgcggtgccgaagttgctggtgaaggaagaagaagaagacgaagtcgatgctggttcggggaagacccgagttgccattttcttcggaactcaaactggtaccgctgagggctttgccaaggctttggcagaggagatcaaggctaggtatgaaaaagcagctgtcaaagttgctgacctggatgactatgcaatggatgatgatcaatatgaagagaagctgaagaaagagtcacttgcatttttcatgttggcaacatatggagatggagagccaactgacaatgctgcaagattctacaaatggtttactgagggtaaagacgagaggggtatctggcttcacagctcacgtatggtgtttttggcttaggtaaccggcaatatgaacattttaataagataggtaaaatagttgatgaagaacttagtgagcaaggtgcaaagcgtcttgttccattgggactaggtgatgacgatcaatccattgaggatgattttgttgcttggaaggaatctctatggtctgagttggatcagttgctccgggatgaggatgatgtaaatactgtatctactccttataaggctgctattcctgaatatcgagtggttattcatgattccaccgtcacatcttgcaatgataatcacttaaatgtggcaaatggtaatgctgtgtttgatattcaccatccttgcagggttaatattgccgctcaaagagaacttcacaaacctgagtctgatcgttcttgcatacatttggagtttgacatatccgggactggcataatatatgaaactggtgaccatgtgggtgtttttgctgaaaacggcgatgaaactgttgaagaagctggaaagttgctgggtcaggatttagatttggtattttccattcacactaataatgaggatggtactcctctaggaagttctctgccacctccttttcctggcccttgcacactgcgctttgctttggcacattatgcagatctcttgaatcccccacgcaaggcttctttagtggctctggctgcacatacttcggaacccagtgaagcagatagattaacattcctctcatctcctcaggggaaggatgagtactccaaatggctggtgggaagtcagagaagtctccttgaggtaatggctgagtttccgtcagcaaaaccaccgcttggtgtgttttttgctgcagtagcccctcacttacaacctcgttattattctatttcatcctcgcctaggttttccccgcaaaaggtgcatgtaacttgtgccttggtatgtggtccaactcctactggaagaattcacaaaggagtatgttcaacctggatgaagaatgccattcccttagagaaaagccgtgactgtagttgggctcctatttttatcagaacatcaaacttcaagttaccagctgatcattccattcctattattatggttggtcctggtacaggcctggcacctttcaggggatttttacaggaaagattggccctcaaagaggatgccgttcaacttggtcctgcattactcttctttggatgtaggaatcgacaaatggattttatttatgaggatgagctaaagaattttatggaacaaggtgctctgtcagagttgatagtcacattctcgagagagggacctgaaaaggagtatgttcaacacaagatgatggataaagctgcaaatctgtggaatttgatttctcagggaggttatctttatgtttgtggtgatgctaagggcatggcccgagatgttcatcggactcttcataccattgtccagcagcaggaaaatgtggactcttcaaaggcagaggctatagttaaaaaactccagatggatggacgttatcttagagatgtctggtaaattttctgattattcatctttctgggttgtgccttccttgctatttggtctgttaagttcaagattggttgaaggatatttgatactcttctatcacggagttttgggacaccaatgatggaggctgaaatttccttgagaaagcaaatcgttttcgtggacatttgtgtggttttcttatatttttcgccgccttgatattctctcttgtcatgatatttgaactaggattatttttagggggactgatagatagcttcatagatgatttaatacgtataggtcgcactagtttatttccaatggccatgtatcaaattgtaggaattggcaatgaataagcactcgattaatgaaataattcttctagttgatgaaaattttgtatagtgctatcatagcttcattattcattttataatttgatt

SEQ ID NO: 44453 - DNA, 987 bp, Glycine max
  Clone ID: PAT_MRT3847_140139C.1
cacaatagtaacaattaacaagtaacgctctcactttcttccacaaccaagaattctctctctcttcattcattcattctctctcatcacaccttgcatggcctcggcgtgcgtgacgaacgctacccgcgcggcggcgtgcagggacggcgcggcggcggcgcacctgaaaatgatctcgatattcgtcatcttcgtgacgagcgtggccgggatgtcgtcgccggtggccctcgccggaatcttccgtgggaagcctctctacgacaaggccatcgtcgtaatcaagtgtttcgcggcgggggtgatactctcgacctcgcgggccgcacgtggagcagcacgcgcacgcgcagtacgcgccggtggagaaggaggccgcggtggagctcggtggatccgccggcgatggcgacggagaaaagggtgaagaattggcgaaattgaaacagaggctggtttcgcaagtgctggagattgggataatatttcactcagtgataattggggttactatgggaatgtctcaaaacgtttgcactattcggccactcgttgctgctttggcctttcatcaaatatttgaaggcatgggtcttggtggctgcgtcgctcaggcgggatttagctttggaacaattacatacatgtgcttcatgttcgcagtggcaacaccaataggaataattttggggatggcattattctcacttacaggttatgatgatagtagcccaaatgccttaatcatggaagggttactgggttcaatttcatcaggaatactaatttacatggcccttgtggatctcattgcagttgacttttttcgcaacaagcttatgaactccaatcgcctgttgaagaaagcatcttttgttgccctaacccttggttctgctgcaatgtctattctcgccctatgggcttgaaaattttgtaccttgcgtgtttaactaaaagaaaaattaatgatcaataataaaa

SEQ ID NO: 44454 - DNA, 412 bp, Glycine max
  Clone ID: PAT_MRT3847_14013C.1
cattcttttgtttgttagctcacagccgtaccattaatgggacaatgcagatcggcacaaacaccacttattttcagaggttattactgaccgaggacagatctcattcctttttaaacggtttgggcaaaatccacatcgaacatggaacagaaacgaattccagcttaaaaccctccacggggacgcagctccaggtgcggagtacactccttgtgtacgatgtagtcagggagggtacctttatccttgagctgtttgtcagcgaaggtatgcctatgttggtccggagtgattctttccttgtcctggatcttgggcttgacagttgctaatggagttggagctctacagctctagggtaatagaaggacccgttagggtcttgccaaaaatctgtattctacgacga

SEQ ID NO: 44455 - DNA, 144 bp, Glycine max
  Clone ID: PAT_MRT3847_140140C.1
cacatatttctctaaaccagtaagttatcttctagtatttttcaaggaacttaagggttcaaacctaagaaggtggaaggcatggcaacaacattggagggcgcaaccaggtctggcacttttaaaaccacttcttttcttagg

SEQ ID NO: 44456 - DNA, 187 bp, Glycine max
  Clone ID: PAT_MRT3847_140141C.1
taaagtgatacagccacacatccatacagatgaatggatacatgtagatatcttgacggcacgaggcagcaataaccgcaccatctctaaggcactggtggctatctcgccattgctgactgatgcaaacccttacagaccactcgttccttctaccggtcgcatgtgtgtacctgacgcggccaga

SEQ ID NO: 44457 - DNA, 544 bp, Glycine max
  Clone ID: PAT_MRT3847_140142C.1
caagaaagatccaatctgaaaaatctttcctttcccagatatcacaccttatatagtactgcatcactttgcttcttttaggtaagcaaggagagaagaaaaatggttgacactttcagtatagagagcaggcttcttataagagagtttgatgaagatagagatgttaaggtggtggggaagcttgagaagaactgtgagattgggactaaaaagggggtctccattttcaccaacatgatgggtgaccctttatctaggattaggttctatccccttcatgttatgttggtggctgagctgcttgaaagcaaggagcttgtcggtgtggttcgagggtgcattaagagtatgcgaactccttctgaatcattgctgaagataggttgcatactaggccttagggtctctcctacacacaggagaaaggggataggactaaaacttgtcaactcagtcgaagaatggatgctgagaaatggggctgaatatgcattcctagcaacagaaaagaacaatgatgcctctataaacctatttacca

SEQ ID NO: 44458 - DNA, 337 bp, Glycine max
  Clone ID: PAT_MRT3847_140143C.1
tgaatgtcatgcgttgtgtaaacgggtctttggttcccattccaagggcaaaaaaaaaggctgatattaatgaggtcttacagaagatagcgcaatacttgagctatagatagctttgagatcctcaagctgaaccacgcttaagccaccctattaggtgacaagttgtccaagtacctctagcggcgccaaacggcaatgctaacccatagtgacggctgcttgtcctcataacatagttgaggttcagggtgttcgtgcgcagcaagcatccgcacttccatagcaatcaaacatagcgtgcgccatgtagagcacaaaggcttcagcgtggagt

SEQ ID NO: 44459 - DNA, 290 bp, Glycine max
  unsure (1)..(290): unsure at all n locations
  Clone ID: PAT_MRT3847_140144C.1
btcgcgtncagggtacgtnagctcggaattcggctcgagngangnagngaagantaanacnanaacccnantctacttttnccgagtncttccagtgaaananaggcagcgatngaanangantncgacatccccggcggcgantacnatggatctaggcgaacacgangttngcgatncgagggatatangacnctggcggnctcattangtaacnccncatttanngtcaaggttgggaannncgcgantttgntttgcannntgntgnttcattatanggggnctct

SEQ ID NO: 44460 - DNA, 457 bp, Glycine max
  Clone ID: PAT_MRT3847_140145C.1
gggaaagtacattcattctcaccttgttgctagattagaaggtatagtggtatttgctctgactactactcatgattagagccaaccctatatgattaacaagtgtacttcctagttctggataactgtgttaatgtttgtgtggaatatgctaataaagcttctcagcaatggtcttttcttgccaactttgccccatttgtgtccttatcagtgcaaatgtgttgtttttgcctacatagctgtaaatgaacaactgaaggaacaaataaaggatgttgatgcggcacaatcaaaggaggtttctgtgttttgggttggcatggctgaggtaaacacttcaagattagacttccaaatgttcaataagaatcagcttgatcaataaacacataaaacttctttgcctataatatatcaccaagctatttcaaatgtgagatttgatttctctaga

SEQ ID NO: 44461 - DNA, 101 bp, Glycine max
  Clone ID: PAT_MRT3847_140146C.1
gtagaatttggttgtgtttaatgcaatttcgcttgataacgccttggaaatgtagtcctaggaccgggagagcctcccatcaccctaaacttttgtccacc

SEQ ID NO: 44462 - DNA, 398 bp, Glycine max
  unsure (1)..(398): unsure at all n locations
  Clone ID: PAT_MRT3847_140147C.1
cactaatctcatanattcgggccgttctttttctaaaaatcgccaaaccttccaatanattctctatttaaatccacatatttaacttttaattcatttctcatcaaattacgtcatataaatcacaatatttctttcatctaaccaatttttttctgatatacttaacactctcatttatatcattctttttataaaaaacactcacattttttttaatttttatctattccacttacttttctttatcctaaaaattaattatcctcttatattttcaactcttctatatattttacatttttcactatactaaaatttcattttactttttacaaattttaaaattttttacatattcttatttctctattcattttcttcttttaaaacctttt

SEQ ID NO: 44463 - DNA, 189 bp, Glycine max
  Clone ID: PAT_MRT3847_140148C.1
gagacacgtgatctaagatctctctctatctgggatctgcttccttctcttctctttctcaaatctcactcatagtcctaatgcagtcctcggatctgctacgttctaattctccttcaacgcatcacgagactacatgttcctctttcactcgggctatggcattcgtgcttccctcgtgtctctggc

SEQ ID NO: 44464 - DNA, 383 bp, Glycine max
  unsure (1)..(383): unsure at all n locations
  Clone ID: PAT_MRT3847_140149C.1
ggaattcataaccatatcagttaaattcagattacaatgttttagttgctgggtgggttagtgtttattcagctttttgaattattacatacatacacccaaaattaagtaaattaaaattactgttggttgcccaatttgaaataataataatggttttgggtaataaggcttttaactcccccggggacccttgtttttccatcaaaaggagaatcccaaacaaccttagttcctccaaggagaagtttgactagatcaacatttacctctaagacctcaaggcttgcagtctcacaatcagagaacaacaatcccgcctctagaccagcaagaagcagttcagtaactcgctcttgcatctnaacttcacactcacagta

SEQ ID NO: 44465 - DNA, 408 bp, Glycine max
  Clone ID: PAT_MRT3847_14014C.1
attcaaaaaggggccaaggggtccatgaaagcaccaaaaacacacgggagcaaaaaaggggatcccccaaccaagaagagagggccccgcaaaagaagaccaagacaacgagagggggacaaaaaaaacaacaaaaagaccccgaaaaaaaaagggagacaacaaaaaaaaaaaaaaaagatgaaaaaagaaacgccaagggccaaacattaaccgttagtaaagcaagcggagatcgccgcaagcccagccggccaaaaaagggggggagccttaagagagggaaggccgaacaaaggtcctataaaaaaaagggagaggggggttaccaaaatggggccgcattccacaaaaaaaggaggggggggggcaggtgaaacccgcaaaaccaacacgtttccggaaaga

SEQ ID NO: 44466 - DNA, 418 bp, Glycine max
  Clone ID: PAT_MRT3847_140150C.1
agaaagtaatagatgtgatacattgtataatgaaaaagaaagagagatagaaagaaaaatgggatggaagtgggatgaagtgaaagtaaatagatgatcagttttttcctagttcagcaatgattttggtggtcatatatttacagttttacagattcacacacacacacacacacacacacacacacacacatatatatatatatatatatatatatatatatatatatatatattgtaaattcaatctacataattttctggcaggggtgtctaattcaaaaggaaaaatatatttggacaccgcatatgttattttaacacctagtgagtgagagagtaaaaagaggaaaatataggtataatagatgacgtgtgataagaagagaaagataaaaattaatgagaagtgttaatg

SEQ ID NO: 44467 - DNA, 622 bp, Glycine max
  unsure (1)..(622): unsure at all n locations
  Clone ID: PAT_MRT3847_140151C.1
agctggatctctagacggccgctaaatttttttttttttttttttttttttaaacatataaaataaccatttanttcattaatgactggagattcatccttccaaaatggcttttangacataacacattttttttgaaggaataataataatcctactcaaataaaatctactttagctccccattattttgcaactccatcacaatatcattaccaccaatcaactcacttttttattaaattttaggataggttggccaatttaaatataccttcaatccctttctcacttcctcatcaatcaatatatcaaatgacccaaaattcaagccctttttttcaatgacataatcaactcttgaactaaaaccacattttgttgcattttgtgtacccttcataaacatcattacaatgtgactatgcaatcaaattttttatgtttattcttaatggtctctgaaagaagaatcccttttttttttaaaatcttcctaagttttccgttttttttcatcttcaacacaatattttatccaccaattacctccccctttttattcaantttagttaaactgtaccagtttaaattaaccctaatccccttaactaaattttt

SEQ ID NO: 44468 - DNA, 365 bp, Glycine max
  Clone ID: PAT_MRT3847_140152C.1
atcaaatgctgatgactgggcactcgctgatatgataaaccaaccggagttactccaccgtgcccgcgaacaattggatactcgtgcaccgaaatagagagactggcccatgaatcagatatacctacactcaactatgtcaaggcttgcgcaagacaagctctgcggcttgatcccatagcaccttttattcctcaccgtgtatgtatgagtgacacaatggaggaaaatcacttcatgcctaaggatcgccatgtaatgcttaacatacaagagctcgggaggaacccagaagtgtggaacgaaacctacgagttcacacctgagcgccacctccagagtgatgggtgccatgtggatttgac

SEQ ID NO: 44469 - DNA, 1307 bp, Glycine max
  Clone ID: PAT_MRT3847_140153C.1
aattcggctcgagctcgagccgattcggctcgagttcatttgatttgattttgcgagagaacggaacaacaacaacaacgatcaatgattcgaagccttgctctgcacttggctgcacgattccgacacaaccacaacctcgtgcgtctttcttcttcttcttctgccgcttctgcctccactcttcatcatgccactccctctccttcttcctctgagcccgttcacatcacccaaaactgcgttcgaagaatgaaggaactggaaggtagtgaatcatcaacagatggaaaaatgcttcgtttgagtgtggaaactggtggatgttctggattccagtatgtttttaatctagataacagaatcaactcagatgacaaagtttttgagagagaaggagttaaattggtcgttgacaacatatcatacgattttgtaaaaggggcgactgttgattatgttgaggagctaatccgttcagcttttgtggtgactgaaaaccccagtgcagttggtggttgcagttgtaaaagttccttcatggtgaaacagtagtgattttcttagtccttgccccttcaccctctgctcaggtttttttgtaaccaatttcggctcttttattcctctaaaaagggcgcgagattgaactcaaggtaaaatttattgcttgtacaatgctctcaatgtaagatgcagttgtcctagtaacaagtgatccattatacattcatggaactcagatatcaataggtttttttgcagctgatccctaaaagaaaaggtgtcaaccttcttggtctagcctggtttgacattactactttgtaattcgaaatttaagtagtgaaataagtgtgaatttgatattccattgcatcaaagttgatccatatccacaacagcaaatatttatagcttatgcatctgcaggaatgttttgtagcgtttcgttttttttttttacctctccaaaagcacatccaagacgtccacttccaaaatgttattatatacaatgacttagtctgttggtcagacacatccagtgaatcagaaatatgccgcactatattgtgtatagtctgttcggtcctaaaaaaaaaaaaaaaaaaaaaaaaaaaaaaaaaaaaaaaaaaaaaaaaaaaaaaaaaaaaaaaaaaaaaaaaaaaaaaaagggtaaaaaaaaaaataaaaaaaaaaaaaaaaaaaaggggggggcccccctatggggcctcccccccccgggatttattttgggcccggtcctctgggggggccccttttttttttttgggggggggttt

SEQ ID NO: 44470 - DNA, 581 bp, Glycine max
  Clone ID: PAT_MRT3847_140154C.1
gatttatattttttcttttgttttttctctttttttttcctgttatttttttaccgtaaaaagaaaaagtctttttttaattggggcctgggggaacatacctgaccaaattatattcttttttttttcctgcgggaaagctttaggctgggaaaatcaaacctagcaacccaaaatgaaggggaaatgtaaaaaaaagggtgtctcctgggaaagccaactccctttgatcgccccaaactaactgtcagctctcgggtgggtatatttgttttgctagcagcattaaagaaccggacatcgcacggtgagaggctgtttgcatattgttcaccaaggtggaaacttttttgaacattgggagggttttttgctgattgtctttaacctgatgaccctaatagagtttttaaaggcttcccaatttttatccgccccattaaccatttttttacaaggattgaggctgaaactttcacataacttttggagaatttggaacagtcgttttgcactgattttccattcgcacttcaaatcaaccccttcaaaggcattgtggacatcgcgctttttgccct

SEQ ID NO: 44471 - DNA, 262 bp, Glycine max
  Clone ID: PAT_MRT3847_140155C.1
ctgggttgaaaggaattgtaacattatctcgttaaatcatctacagatttggcaacaaaatcatacaattcctttcaacccagccacataatttaattcaacctggcctgcatggatgcgaagtacaaaaatagacctgagtagcaatggaatcaagctcatcaaagaagaggacacgtggagctgattgtttggctgggttgaaaggaattgtatgattttgttgccaaatctgtagatgatttaaggagataatgttaca

SEQ ID NO: 44472 - DNA, 572 bp, Glycine max
  unsure (1)..(572): unsure at all n locations
  Clone ID: PAT_MRT3847_140156C.1
cctgtcccagccgccggacaccatcaacgggtccatccgtgtgacggtgcagggcgaggtcatcgagttctgcttcggggaggagcacctgtgcttccagactctgcagcgcttcacggccgccacgctggagcacggcatgcacccgccggtctctcccaagcccgagtggcgcaagctcatggacgagatggcggtcgtggccacggaggagtaccgctccgtcgtcgtcaaggaggcgcgcttcgtcgagtacttcagatcggctacaccggagaccgagtacgggaggatgaacatcggcagccggccagccaagaggaggcccggcggcggcatcacgaccctgcgcgccatcccctggatcttctcgtggacccagaccaggttccacctncccgtgtggctgggagtcggcgccgcattcaagttcgccatcgacaaggacgtcaggaacttccaggtcctcaagagatgtaccacgagtggccattcttcagggtcaccctggacctgctggagatggttttcgccaagggagacccccgcattgccggcttgtatgacgagct

SEQ ID NO: 44473 - DNA, 323 bp, Glycine max
  Clone ID: PAT_MRT3847_140157C.1
tttttgtggcgacaaatgcaactggaatggtgcaaagggcgcactagccatattacaaccgatcggaccatcatcttacgtgcggccgctggaacaagacaataggtgcttctaggaataggactctacactatctttgacgtatttgatagaacaacgattgatcgctcggctgaatgatgaccaccacggatccacactgtgcgctcgagcggagatacggctgtcaccaaatggctgccgaatcttgcaaacaatcatgtctaccagaacacatgtagaagcattcagaacacttatccttggtggtaacagccgaacca

SEQ ID NO: 44474 - DNA, 426 bp, Glycine max
  unsure (1)..(426): unsure at all n locations
  Clone ID: PAT_MRT3847_140158C.1
acaaggcaaagggaaaaaacacggacgggggacattagaaggnaaccaaaacccccaaaaccaacacaaacaaaaagacagaagagaacaaaattaaaaaacaaaaagagcaacccgacaaaagaagccagaacaaaaccaaaaacaaccatcagcacaattagaccaaaaacggaaccccagaaaaaacccaacagcgggccgagcaaaaaaacgaagggcctcaataacggcgagagggggccgaccaaaacacgaaagggacccaacaaaatgaacgacaactcgagagacaaaaggaaaaaaatcacccgcagaactgaataaccaaacacaacaaagtacaaaccggcatcgatgacgcacatcaatgttccataaagaggaaaacgacccagtgctgccccaacggaaaccccgacaaac

SEQ ID NO: 44475 - DNA, 339 bp, Glycine max
  unsure (1)..(339): unsure at all n locations
  Clone ID: PAT_MRT3847_140159C.1
cgagaactttccctaagtttcattaagggggaaaccccttttcactccccctcgttccttcctttggctggtaaccctggccaattgcaggcttggtaataacccaacagttcaacaagttgcaactcaacaacttcaacgcgttggaacccaacaacgcgttgagtccaaaggtggtcttattganacatggaactctcaacaccctgagctgcaatgcgccggtgtcactgtttccaaacgcaccctcaaccgcaacggcctccacttgccatcttactcaccttatccccaaatgatcattgtcgttcaagggaaaggaacaattggatttgcaat

SEQ ID NO: 44476 - DNA, 239 bp, Glycine max
  Clone ID: PAT_MRT3847_14015C.1
aaaaagcttgcatcttcaaggtttcaattttactgcaactggcaatgactctgctgagccttgttcaaactgctacgtgttaaatactttggtccttagattttgttctttgcataatgatgcaagggttctctgcatatctaattctaccctttccattttgacaatattagaaggacaaacttatcaaattgtgctttctactccaaatcttaagtcttttactatcaggggttcta

SEQ ID NO: 44477 - DNA, 1470 bp, Glycine max
  Clone ID: PAT_MRT3847_140160C.1
gaaatctcgaccaggtgattgatcaagtctttctctcctttcttctccttctcgcactgccatttgaaacccctgacccgaatcgtttcctttctcctcatcctctgcctcagtctcccaggatccaatataaatggaaatggaagcttcaaaatttatggctacaacgaactgaagcctctatcagacttagcttgcccgggttagtggaagaatttggggtgaagtaaagtgaaaaattgccttacgttagaaacgtgatcaagttccatggaagaagagcatcaatgttctggaagtggtgaagaaccacagacacaggaaccagatggagaagatcaacagctgcagcatcaatgccaagtacctcgagctgaagagaaatttgtattgcaatttatggattcgatggataactacctatccctctttgatgcagtgtcctccacacttcgacagggatggtttgacttagcaagtgctcgacattccatgggtgcttctcgcattaatagttctttattggacctgaaatttcattcagctgctacaacattgaagataaccaactacgatggtacacagccatgctctcatgtttgcgtaaatgggtatcctctgaaattgaaagttctcagatagaagatgaggggtgttcagtcacaagttgttacagagtggcaaatcttctggtagcgttttcttactcctgtacataagcgtcatacaattatttctcattagatgttatcattctgtaatttgaactggatattagggtaaatcccaaaattaaacatgcacattagagcaaactttgatttcatttgttacttgattcttctgctatatgctttaagtagcatgtttgttgtttctcattttgttatatgtttggttgtacgaactgctgaggtgaccatggctaaaaactcatcaggacttgtagaaaatgctgaagttcaaaatgagcgatccaagtccttgtcaatttttggagttttaatttccccaaagcttcgagcctcccagctgtcatttgagaaagcactagagacactcatagaaatagccaatatgcaatcgtcattgttatattcttttcaccaacttcgaagggtggaagataccaaagaataaaaaagtaccagctctttcaggctgctggaaatccgtcgcatgtggacaatctgattgcagtattgaggattcagtattcaatgattttggtgttctatttattgatgcatcagcagactgtgaacatcttcctcattacgcttatttctttttatattggttacaaatacatgaacattgattatagtaagggggaagggttttacccaacgcgtgctaacagatttgcgcatgctgaaggggcgtaacctttctctgctacatatgtggcccgaagtcaatacaaaggatttgggcttcattttggttgaatgaattaatttactgatg

SEQ ID NO: 44478 - DNA, 316 bp, Glycine max
  unsure (1)..(316): unsure at all n locations
  Clone ID: PAT_MRT3847_140161C.1
gggaaaaaaaaggagcaaaccctcaatttcaagccacggcttcaatcaggatcttatgggacccagccaaaagccggggggggggggggccccagtggtttacaacaaggctcctttcagcccttgggggcataaacccggctctccccggaccccgggggggccntnttttgaaaaagaaaaggcgatattcgggtacggaaatttgttccccaccccaggcggggccgggggatggaaacctcgcgggaggggcggctggtggggcaggggggcccggggggggggccggccggggggggccgggggcgggggg

SEQ ID NO: 44479 - DNA, 1277 bp, Glycine max
  Clone ID: PAT_MRT3847_140162C.1
ggctcgagctctctcccctacttccaaaacccttcttcacttctccagttcccattgctgcaacagctacctcatattgttccgaatggaatgatattgccgggtgatacccttgcttaacgatgaagatgtcactggttcaacttcgacctctcttgacaaggcgagggttcagcacaagctctgagaaccttgttgcttctgtgctctttgagagactgccagtggtcattcccaaaattgaccctgtagtttatgcatttcaagaattctcgtttcgatggcgacaacaatatcaacgcagatatcctgatgaatttctagacaaatctgatgctaggggtaaaggtgattatcagattgactatgtgccagcaccaagagtcactgaagctgacaaaaacaatgatcgaaggtcattacaaagagctcttgatagaagactctaccttctcctctatggtaatgcatatggtgctccaagcgggaagcctgtgtggcattttcctgagaaagtttatgaatctgaggacaccatgcgcaagtgtgcagaatctgcattgaaatcagtcttaggagatctttctaacacatattttgttggaaatgctccaatggcccatatggttgttcagcctacagaagaccagtctagatccacatcttttaagagattcttcttcaagtctcaagttattgccaaaaacaaattcaacatcggaaaatgtgaggatcatgtctgggtgacaaaggatgaactgatggagtattttcccgagcaagctgagtttttaaacaagatgatcattagctgatgacaatggaggatagttgtttagttgaaactattgcaaattagctctaaatgacagtgagggaccttgaaagaagatcaagctagcatagtttttctgggcataactgaagatttcaatttgaagttacacttaacatcccaaatttgcccaattttattgacaattatgtttggatatctatcttaccagttcaccaactagtcttgttttagagttcaaaataagttgcaatggtgattatgacgatttgaatatgtttcccttttgggctggtgcagttgctgaacagtcaggaagctcggaaagctctctctcgtattgaatggctgcaaaaagctgatgtgcctaccatagcacagattgaagagttccattcgatgatgaatgctcctgattcatgataatattgatctactgattatcgatgtttttgttgatatagtttctgtttggacatct

SEQ ID NO: 44480 - DNA, 1092 bp, Glycine max
  Clone ID: PAT_MRT3847_140163C.1
gctgcaacagctatctcatattgtcccgaagaatggaatgatattgcgggctgatacgcttccattctttgcttaacgatgaagatgtcattggttcgacctctcttgacaaagcgagggttcagcacaagctctgagaaccttgttgcttctgtgctctttgagagactgccagtggtcattcccaaaattgaccctgtagtctatgcatttcaagaattctcgtttcgatggcgacaacaatatcaacgcagatatcctgatgaatttctagacaaatctgatgcaagggggaaaggtgattatcagattgactatgtgccagcaccacgagtcactgaagctgacaaaaacaatgatcgaaggtcattacaaagagctcttgatagaagactataccttctcctctatggtattgcatatggtgctccaagcgggaagcctgtgtggcattttcctgagaaagtttatgaatccgaggacaacatgcgcaagtgtgcagagtctgcattgaagtcagtcttaggagatctttctaatacatattttgttggaaatgctccaatggcccatacggttggtcagcctacagaagaccagtctagatccacatcttttaagagattcttcttcaagtctcaagttattgctaaaaacaaattcaacattggaaaatgtgaggatcatgtttgggtgacaaaggatgaattgatggagtattttcccgagcaagctgagtttttgaacaagatgatcattagctgatgacaatggaagacagttaattcagttgaaattattgcaagctctgaataacaatgaaggaccttgaaagaagatcaagctatcatagtgtttctgggcataactgaggtttttcgattggaagctacacttaacatctcaaatttgcccaattttgttgacaagtaagttagggaatctattttagcagttcaccaccaagttttgttttagagttcaaagtaatacttgttttcctgagttcccgagaatgtctccacatttttggtcttgaacattagtcgcggttgcctccacattaagttatattttaataattttttattg

SEQ ID NO: 44481 - DNA, 330 bp, Glycine max
  Clone ID: PAT_MRT3847_140164C.1
cctcacttgaattgaaggaccatcctgcctttaatttctcatcagcacttcagtcaacaaaagatggtgatgatgaaatctctcgcacttcttctagatagtagctcttttcccaggctaccaccagcgtagcccagtccccggccgcggcaccgactgccccggcgacgccctcgaccgcagccgccccggccccagcaccctccgcagccccgacagacatcataagaatcctgaggagggcaggagggtggacaaggctgatccgcctcggggaggccacacaagtcgcgaaccaaatcaactcccagcgcgggaggacaagcggcg

SEQ ID NO: 44482 - DNA, 480 bp, Glycine max
  unsure (1)..(480): unsure at all n locations
  Clone ID: PAT_MRT3847_140165C.1
caccgctccacccgcaaacaaacaaaacaaacattactctatctccaatctcccttctccgccgcgccactcatcggaaaattcaaaccaccgccggaggttatggacgctccggcaatcgctgctgatcttgatttcccaagcaacaaccatcgcttgtttaagagcaccaatcttcttatctggtagaaaccaaagcctaagcaaaagcgattttacttagcagagtttacaagttattctatgcttatcgctgcataaataatctgaaaataaaataaaaaaagaccagaaaagcatttatttattactatatagtagtattatttatcggtcttgtatctttttcatttagctaaaattagcggtttctagtcaactactgcaaagtttcgcgtgcagcttctgcagagtttcagtttcagagattaaattcgcttagaaatactagtantttttcctgttctgactcgcaattta

SEQ ID NO: 44483 - DNA, 477 bp, Glycine max
  Clone ID: PAT_MRT3847_140166C.1
caaaataaaagaagatatatatatatatatatatataaatgttattaatgcatgttctcttataattttcctttgtcctcccttttttttcttttctttcttaccacgttccttcaccaatcattccagtccaataaccagttgaattcccttgttgtttctctttgtgttccacttgatcagcacctgcagcagcagaaagctgcttgacatctccaaaagggaacaaaagtctgccaccacccctctcttgaatctgatgatgatcatatgatctatttcccatcccatcagctgaagaaaagttaagactaggtttaacttcttgcatgggaaaccctgatgagtaaagggcattgctgtttgttgagtttggcatcaaggaagaagaaggagcataagggttcaaacccctagatgccatgcttgacctaagtagctcaagagctgaaagagaagctggaggagcagaacaag

SEQ ID NO: 44484 - DNA, 847 bp, Glycine max
  Clone ID: PAT_MRT3847_140167C.1
ggggaacccaggaagaaccatttgctaattctcctcatttttcgggaaaattgcaacctccatacaatcattctgaaaacaaaaccatccaatcattttaacatccatctaaataaaaaataattcgcccaaaccagaacccagaccgccattaatttcaagctttaaccgaaaaacagaacaacccaaaccattttcccatttgggatccacaagttccacactttctatttaccaatggcctaataattaattattaatccactagtttacactactaaaagcttgggatagattacacttacactcgctatgttacaaaaaaagtttccccaaaccagcacgcttcactacacacggacaacggaaacaacgtgagggaccttgccatcatcaaatggcaagcaaacgtactgccaggcaaactcctcggcgatctcaagcgcgagctcgccgtggacggccttgcagtacatgtagaggacggtgtcggcggcggcgttgtagagcatgaggagcatgaggagagtagaagtgaggacgatctggacgacgaaggcccagtctttccaggcccagccgtcgacggaggcggtccagaggaggagggcctgcatggaggcgaagaagaggaagcaggaggcggcgaggggtctcattccttttgtgagggcggcgcttcggcaaagagattggaggccccaagtggactcgacgactgcgacgacgggggcgagggtccaggacacgcggaggtagactacggcgaagaggacgaggacggcggagatggcgaggaggatcgggggcgaggaggcggtggaaaagagcggctcgagctcgagcc

SEQ ID NO: 44485 - DNA, 677 bp, Glycine max
  unsure (1)..(677): unsure at all n locations
  Clone ID: PAT_MRT3847_140168C.1
atataatgtagctggaggcggtgaaagccatctgtatgggactgaagggcctctttattatctgaggaatggatttaacaatttcaacttttgttttgttcttgctctgctgttcttggggattttgcctattgcaaagaagaaatatgcaccagacctactgattgtgatatcacctatatatatttggctggggtttatgtctttgcagccacacaaagaagaaaggtttggctgaatttttacctggtcttctgttacaaatttaaatttagtcatatgatgttatttgagacaaacacttgcacaatgcacacaccatgtatattattatgttttatgctatgacattgaaatggatatcaatttcttatttcctacatttttggtttatacaagtccacagaccttatatttttttgtaatctccaatataggctcatttttataagtgggagcttagatgggtcgggttagattgagaaaggggggggttggcttggaataggggcgctggcctgtgggtgagaacacagagccttnnnnnnnnnnnnnnnnnnnnnnnnnnnnnnnnnnnnnnnnnnnnnnnnnnnnnnnnnnnnnnnnnnnnnnnnnnnnnnnnnnnnnnnnnnnnnnnnnnnnnnnnnnnnnnnnnnnnnnnnnnnnnnnnnnnnnnn

SEQ ID NO: 44486 - DNA, 283 bp, Glycine max
  Clone ID: PAT_MRT3847_140169C.1
ctgatcggaagcagaatgagggtaaccatattcctgtatctaacattattccttgggaaaaccatgtatttcaaatacccgataatggcgcaagaggaaaccctgtctttgaatgcatgagagctgggatctgcaatggtgagtaaaaagaggaagcctcaagctactgcattgcatggggcagctatataactgatcatcgatagctgcgcaagtccccactgcaccataggttgtgcaatgctatcgcttgatacttattatcccattccggaaaatgcac

SEQ ID NO: 44487 - DNA, 892 bp, Glycine max
  Clone ID: PAT_MRT3847_14016C.1
atgaattagtatattaattacttaataattcaaagattggattgctaaatatcatgttctgttaaaagtttcctgattttcagtgtgtgaagttgattgagctgttcccatactccttacaaataataataagaaaatgaagtaaaaataaaaaaagacaactaaaggagttcccggaaacagacaataatagaaataactgacccaccaagaaggcatagtctaagaaccttcttcctcttccctgggcttaacgaagtaaagtgggataaagttgcatctaaaatagattcaccatccagaaaatagacaggcaaaccattgagaagagccagagccagagagacatgaaatgtccatattaaaatcctttccagtaaatttggaaaatatgcaacaatttgtggtccccagcgaggctgatatgatgttagctgaatcgaatgtgccatagagatgacatcgccaacaaaaataaaagtaccaccacaattagtttccttaacaccagaagtttcagaaaatggaaatctgttttgtacatgtgacaaacattcatgagaagtccttgaatatgcaatctcaacccataccgatccaggctcctgaactggagctaaacaaaattcatcctgagagcacgtacagccacctcccttggttatagctagtccccagtcatcaccacacctatagcgtttgacaacatctttagcatttaagcagtacatattccatcctctgttcaaaagatcagtttcgctctgaccatcatccagtgtaacattagcagagcataaagattttacaaaggcagtaagttcactgggacaagcatgttgattttcggacgcgtggccgacccaggaattcggcaccggtactgacaggc

SEQ ID NO: 44488 - DNA, 930 bp, Glycine max
  Clone ID: PAT_MRT3847_140170C.1
ccgccctttacaatatcttatcttaaacactcttctcatatctctctcactcaaacctactttctcctttctttctcttctggaaacaattactaaaggatgagtaaacaagacttcttgaaagttcagagctgtgttctcaaggttaatatccactgcgatggttgtgagcaaaaagtcaagaaactgctgcagaaaatcgatggggtttattctgtgagaatagatgcagatgaagggaaagtggtagtggcaggagatgtggatccagcgaaactggtaaaaaagctaaagaggggagggaagcatgctgagatatggcagaaccagaaaggagaaatgatgtacaatcacaagtatcccatcaaccagaacatgatgcaacttgggggaaaggacaataatgagtgtcaaaatcaaaaccagcagaaagagtaaggtgctggaggtgttggtccactagcacacatcccaaacattaaagggattcaggatctctaggtacctgcaaagagacaaaaatctgtcaagttcaacttgccatggaatgaatttgatgcctctgatgatggttttgatgaatatgacgacaattttgatgaatatgatgaggaaggattaagccatgggcatccattgaatcagaagaagatgatgccaatgatgggggatgggccgtgggcctcatgggcctcctgctatgatgaatgggcctgccataaatcacaaccataaaggcaattctggtgggagtagtgtcaagaaagctgacgtcattgatcaggcaatgatgttcaagggcaaaggtggaaatttcaacgaggcctatggaggaaagaaaggtagtagtaaccaaaaagttgaaaagaagaagggagatgatcataagaaaaagaatggattactaggtcggtttctaggctttgggaa

SEQ ID NO: 44489 - DNA, 169 bp, Glycine max
  unsure (1)..(169): unsure at all n locations
  Clone ID: PAT_MRT3847_140171C.1
tggcccagttgtagcattcaagcagtccacaacaccctaatatagatcatataaagaacacgttctcagcaacaggtctaaattcgcacaggatctaaacgagaggcgctatcaactggattcagaagaaactgacaatcacntggttctgaccaacctgaataataac

SEQ ID NO: 44490 - DNA, 629 bp, Glycine max
  Clone ID: PAT_MRT3847_140172C.1
aaacgaagaaacaacacatggttgaataataaaaataattacacgaacactggaggggggaacttctgtacaaactaaaaaaattgttgtttttcttacttctgtgaaatatagcacattctcaaaaacttatctatgaccaacataccatcctttcactatgctaaattgcaaatttatctctacttgtattcaacacatcactccccagtaaattgcaaatttatctctacttgtattcaacacatcactccctggtgagcctcttacctaatagacatattcgcttgaaaactctacaagactaaaactcagatcattaactgaaagtattcttttttcccttggcaatgccaaaattgtctatccatgagaaagagaaaccaaatggtttattctacaagtgaagaaaatgctggcgcaccctgtaccacgttaatcctgtgcagttgatgggtcaaaccttgtactcacgaagatgcattcactttgttgaagaccatttatttcctttaattaactgggcaaccaccatgttaactagatgggactagtgggggatcaggccttatgctccaaaaatgcaaaacattacccattttttggttttacctgaggagacccttttt

SEQ ID NO: 44491 - DNA, 559 bp, Glycine max
  Clone ID: PAT_MRT3847_140173C.1
ggggggaataataaaaataattacacgaacactggaggggggaacttctgtacaaactaaaaaaattgttgtttttcttacttctgtgaaatatagcacattctcaaaaacttatctatgaccaacataccatcctttcactatgctaaattgcaaatttatctctacttgtattcaacacatcactccccagtaaattgcaaatttatctctacttgtattcaacacatcactccctggtgagcctcttacctaatagacatattcgcttgaaaactctacaagactaaaactcagatcattaactgaaagtattcttttttcccttggcaatgccaaaattgtctatccatgagaaagagaaaccaaatggtttattctacaagtgaagaaaatgctggcgcacctgagcaaaggggaacatcactaggtagcataaaaggtgaacatgaaatgcactgaacttgtgtttatccaatccaaaatgtgatgaaatactcaccctgtaccacgttaatcctgtgcagttgatgggtcaaaccttgtactcacgaagatg

SEQ ID NO: 44492 - DNA, 728 bp, Glycine max
  Clone ID: PAT_MRT3847_140174C.1
aacgacaattcttttaaacaagaaaaattgattaaacacatttcgctgtcatcagagcctaaactaaaggcacaaataatctcacccaacccttccattcaaagaggccccaaataagctgttttatattatcaagtataaactatgatattcgttggcattcagcatatagaaattaccccagaaacatgtttgaaaactatctcagatatcataatcttctattcttcttgaacattacacacaaccaacattgtcatcgatagattatgaacataacttagagtcagatatcaaactaaaacgtccaatgcaatttttcatttaaagctatctgcttggcaaaatttcatccaattcaatgtttatattagacataaacgccagaagcaagtaggaggaacagggacccaaaacccaagaagactgaagccactgctccagttgtcagctcctgaacaagtgaacgacttttcctagaagatgttgcttcataaatgaagaaagaggcggttaagacgaggccgatggcgagagtgaagacggagagtgtggggtaccacgaatcggggacgggactcgttatcggttttggtgccatcacagaatgtagagactacagcaccggatcttgcacgttccaaatttcaactgcaatttgcagactacaaacccctctttcactcactgactctagtctatactctatttcaacgtcagcaccgccc

SEQ ID NO: 44493 - DNA, 309 bp, Glycine max
  Clone ID: PAT_MRT3847_140175C.1
cgtccggaggttcgttccctgcaaccatacctgaatatgaacttagatttacacctgctataattggcccaataacgtggtctttgcctaacaattttgtatccttgacaggttcatctccttgtagcactattgttagaattttatattatgctgactcttattattattcctcacccttaccctttaatcattgaaggaacgatgaacaactatattaatatctatatcgatatctatcttaataacctaactatcatgcatgagcattgtgttatgatctcttaaagatggatgatatcccttata

SEQ ID NO: 44494 - DNA, 3278 bp, Glycine max
  Clone ID: PAT_MRT3847_140176C.1
tttggcattgccaagggaaaaaagaatactttcagttaatgatttaagttttagtcttgtagagttttcaagcgaatatgtttattagttaaaaggctcaccagggagtgatgtgttgaatacaagtagagataaatttgcaatttactggggagtgatgtgttgaatacaagtagagataaatttgcaatttagcatagtgaaaggatggtatgttggtcatagataagtttttgagaatgtgctatatttcacagaagtaagaaaaccaatcatttttttattgtgggttgttacatatggcaccgtgggatttgcataaaaagtaaagcacatcccaagctattattgttcactcatattccactctaaatcccttttttttatagaacccaaagcaatggtcacaaaaagtgcttgaaaactatctcagatatcataatcttcttgagcattacacacaaccaacattgttatcgatagattaagaacataccttagagtcggatatcaaactaaaacgtccaatgcaatttttcatttaaagctatctgcttagcaaaattttcatccaattcaatgtttaaattagacataaacaccagaagcaagtaggaggaacaaggacccaaaacccaagaagactgaagccactgcaccagttgtcagctcctgaacaagtgaacgacttttcctagaagatgttgcttcataaatgaagaaagaggcggttaagacgaggccgatggcgagggtgaagacggagagcgtggggtaccacgaatcggggacgggactcgttatcggttttggagccatcacagaatgcagagattagagcaccggatcttgcacgttccaaaacccctctttcgctccacgaatcgggttcgggactcgttatcggttttggtaccatcacagaatgtagagactacagcaccggatcttgcacgttccaaatttcaactgcaatttgcagactacttacctctcgcctactcactccctcgaatcgaacctctttgcaaagattcgatttagtactaaaaagatattctgatgctcactataaatactgccttgattctctcaaacaataaaatcaaggccaacgtatttttacagttctcctgtggccttcgattattgccgaagctgggtagacgattactctctgtgaaattggtcattatgtttctcagggtacacgcaacaatatatgtataagcgtgagaagagttgtcttagtgaaaccctaaatagcagatgctatgctgtttataaacatgcgacctgatgatacacataatcaattaaatttagttggttgttgcccagttcttcaaggaattaaatggctttttatataagatttccctatttttttgtcaaatttatgaccgagtaattacacttgtgcaacgtagaaaagggtctttaaagctgaagatcttggatttgcttagtatgagttgtttgggtaaaatgtgttgacataagagactcccatggtgtttatgttttagaaatttgagtagctatattttaggtaattctgtcaacttggatgttttagcccctggacaattgcacatccttttctcgagtctttacatatgcctctctgccctacttctttgttatgatggtgctcatgttgaatgtaacttgatatgatattgtattaaattcacagttagagaaatatgaaaaagcccgggatgttattctttcaggccttcaagttgatccttttagtaattctcttcgggcttctcttcaaaatttggaaagtgtttcatctagttcaagagggatgagtacacatggacatccagaacgtaatgatgattttgattgcactctctgcctgaagttactgtatgaacctgtcacaaccccgtgtggacattctttttgctgttcgtgtctatttcagtcaatggatcgtggaaacaaatgcccattgtgcaggactgttctgtttattagtcctagaacatgttccatcagtgtgacattgaagaacatcatacaaaagaatttcccagaggaatatgctgaaaggaagcaagagcacgacagtttaatcaaagctggtgtagatttactccctctttttgtcatggatgttgtcataccatgtcaaaggtttccactcaatatatttgaacctcggtatagactcatggtaagaagaataatggaaggcaatcatcggatgggaatggctatacttgattcaacaggttccttagctgagtttgcctgtgaagtggaaatcacagagtgtgaaccacttccagatggtcgtttttatatagagattgaaagtcgcaggagatttcgtatcatccattcctgggatcaagatgggtatcgtgttgcagaggttgaatggatacaagatattatgccaccagaagggacaagtgaaagagatactttacagcaacagacatataatgcagtcgaagatgctagatcatggatagcaagagctaaagaagcagcaagacatgatcaaagaaaacttgagagactcgccagtgttgaagtaatgatgccctcaccaaaagaccctgagcgctttagtttttgggctggctactctttccaatcggaggcctgcggaaagattggatctcctacgcataagagacactgccgagaggattagacggggcctgatatttctccgccaggaggaacaagggtgcagaattcagtaagacaagctgaggagggctgccactattattgcaattgaatatttgtttattgcaaattcatttagaagtctttcaacattcttcggcctcataaacaaccgttgatgaggtcatttttgctgtaacatagggttgaacagtttttctaatatatataatcatctacaacacattttttattggccaaaaaaaaaaaaaaaaaattcctgcggcccgaattcctggtgccgaattgtctgtaagttaaaattttgtgaatgtgtttgtaagctcagtgtcatgttggatagaatgctagtttatttgactataggcatgcatatgagatttttttttgggtgtataatggtggtaatggggcttaagattccatatactatcttccactgtttggtcgaccctagttgaataatgagatctttgtttgatcccctccagtgttcgtgtaattatttttattattcaaccatgtgttgtttattcgtttaaatagtccatgtttatgtcattattatagtctatctcatttgattatatgactat

SEQ ID NO: 44495 - DNA, 301 bp, Glycine max
  Clone ID: PAT_MRT3847_140177C.1
tacaaccacaataatacttagagaaatattaccattgataattattttatcacattcaaacaagatgatttctggtaaaaaaatacacatgacgcatgaaaaaaacagaataaaaaaaaaaggctatgtggaagaaaaaattgacccaaagcattcccgtcccacccaccaaaaaactccctactccctactcccgagcctctctcataaacgaacatacgatgttaaatgttcttggtcctgacaagaagaagagtaatgtaggtgagtgcaggtgacatgagaaagtcataaaagctag

SEQ ID NO: 44496 - DNA, 159 bp, Glycine max
  Clone ID: PAT_MRT3847_140178C.1
ccggaacccagggggtaaggttgcttactttctatatggaaattatataaaacgtttttttacggaggtggaaattttacttgatttggcacccactatattttcggaaacatacttccaaatatcttattttattaaactacattttaccctctacaa

SEQ ID NO: 44497 - DNA, 699 bp, Glycine max
  Clone ID: PAT_MRT3847_140179C.1
ccacgcgtccgcttttgctgctgctaatgtgatcatgcaagaagcacggaataaggactgtatagcttctattagaagcgttattgatttcagcttccaggatgtagatgagcttgtacgtctgatttggaccgcaacaaaagccataagtcgcgctggtcttggtggtactagagattaacttgatcctgtatataatttatttttttggttttactgagatggcattgtgaaaggaagaggctaaaagatatctaccaagactagcacttagaaactcgctaaggtggcaggttgaaggcgatctgttccccttgtgtacatttgtacaaaatgtgattgattagaaaattttgtaacgtgttttccattaaggtttttcttaatgtggatagtggcaccacacaccccttaaattttatgggttagagagagggagggggattcctggctgtcaagtgatcccggatggatatcatattatgttagttcagtgccccattctttgccccccttaactggacccccccccccaagaatatagagtctggaaaggttaggcccccatttttgagggctttgaatacttatatagtaataataggcccgttgttaatgacaaactccccttttatgttatcatatcaaagttttgaatgaatggaaatctttgcagccccaaaaaaacccaaagggcgc

SEQ ID NO: 44498 - DNA, 504 bp, Glycine max
  Clone ID: PAT_MRT3847_14017C.1
acgaggaactagtctcgagttttttttttttttttttggcttggaatttcaatcctccaaaagaagattgaattacgtgaatagcaaagttagaatcaacttcgatcatatggggaaagtgtcatcacatcttttccaactctaccactatccacatctaaattcaaatttaaaaacacacaaacaaaacaggcatcattaacctatttcttatcaccatacctaaaaaaatagaagaaaaaaatagaaacaaagaagtaaaattgagggcttttttaaactagcagagaattttcctactctgcaatggaaactgaaataaaaacagtacaaaagagattgcagaaagggattgctatagcgtcagctcatacacagtacccattagattcagagcaccggtaatcagtatattgacgcgagaatcgccacaaatgaggcatacccaatacgcaaaatcgaaccctacaacaaaaacactctaagattgatacttggagagaa

SEQ ID NO: 44499 - DNA, 625 bp, Glycine max
  Clone ID: PAT_MRT3847_140180C.1
agtacacaaacagcattttctctaataatatccttttttatgggtataatagaagagtttttgtggtcttgctcttgttcaggattggaatgcccactgggcggttcagcaatggaagaacagttgcagatgtcataaatcagaaactgggccttggatcccactactactggatcagtggttctaaagggtgtcaattatgcctctggtgcagggtggtcgaatcaacttcgatgcacagattgacacctatgcaaatactaggcaagaaatcatctcattaattggtgttcctgcggctcgcaatttgtttaagaaggccctctttacaatagcactaggctcaaattccagaaagggtgttggtatctccggaaacatttgtggtcacattgatatcaagactcagactacaactcactctaatttttctaagaacctagaaagctttgttttaaaaaaaaatgtttctattttctttgttgatcacgagcaatttactatttgcggcggctattcagtctaggggccagaaaaattgttgtggctaatgtagggcctattgggtgcataccatatgtgagggattttaacccattagctggagatgaatgtgtaactttcc

SEQ ID NO: 44500 - DNA, 486 bp, Glycine max
  Clone ID: PAT_MRT3847_140181C.1
ggagcaagcagatatgatagagggtaaaagtagtcttccagcagcagtacaacatactcatgatgtacgaaaaatgaaggtgggactagagcaagaacgcaaaaagttggtaaatattcagctaaaactccaggaagaagagaaattgaacaagtctttccaggaggagcttaaattgctaaagttggaaagagacaaaacaaaaaatgaggtgagcaaattacacaatgaattgaatgagaaaatatctgaaataaaatgtctgcaattggagctgactagacgagaagatgaagaagcaggtgattctgtggatagcttcaaaagactaattgaaactatagagaaggaaaacactactcttaagttggaaaaggatgaacttgaggctgcgctcaaatcacgtaggatggctagtcaaatgtcacctgatgattctacagattcagaacaaggttccaagcagtaacagtgatgagcagttac

SEQ ID NO: 44501 - DNA, 988 bp, Glycine max
  Clone ID: PAT_MRT3847_140182C.1
tctttttctattctgactttcgaggtctcatatgtgcgccttctctgtgctatattcatctcagttcaaagtggctagtatagaagaaccataagcactgagggaaaaagtgattagtactttagccaacaaattaaaaatggctgtcaccaaggtctacattgtgtattactccttatatggacatgtagacaccatggctagagaagtacacagaggggctgctacagttgaaggtgttgaagcaacactttggagggtacctgagatgctttcggaactaatattggataagttgaaggcccctcctaaaccaaatgatgtaccagacataatgccagaacaacttgtggaggctgatggtttgatatttggttttccttctcgttttgggatgatgccgagccagctcaaggccttctttgatgcaactagtgagctatgggcatcccaagcacttgccggcaaacctgctggaatcttctggagtactggtttttatggtggaggccaagaactatcagcattgacagctataactcaattagctcatcatggtatgctttttgttcctcttggatacacctttggaagtggcatgtttgagatagatgaggtaaaaggaggatctgcatatggtgctggaacttttgcaggagatggatctcgtcaacctacagaactagaactgcagcaggcattttaccagggtaaatatcttgccgaagtaacaaaaaagctgaaaagctaacttctctgcctaacaaatacatgacaggatactatgaactgtgatgtgctacattatctataacatttgattgaagactcgatgattatttttaccggtaagacaagatagaaagacctcatgtggcttttctttttctgggttctgttgttgcaacaatgtatatcttctgttatctctttcagaaaactctcaaattattccaatgaaatgataaacaagatattcagtatttcc

SEQ ID NO: 44502 - DNA, 483 bp, Glycine max
  Clone ID: PAT_MRT3847_140183C.1
gaagaatgaaaaactctataccactgtggaattaaccatgcggggggggaggcacattacattcattgatgatgactaataaagcttgaatgaaccagagaagatgaggactcaatgatgaaggagtaaaactgagaaatgaccactgatgcgcaagagaggagaggagacactcatggaatacatacatggtacttaacaaaaagaaaaagtatacgtacctacgcatatgggatacaaaatacacccttggtcaccagcatgcttgtctacaatgcgatgcatgcgcccatgggatgagtcttatgtcccaaagaccctcgacaactgagattgatgagaggaaaagacgaacaagcctaaattagggaactgctgatacatatctctcagacttcccgccatataagttatcatcctttaggggaaacaccatgcatagcccttgctggcatataatggagggaacgtgctaattgctta

SEQ ID NO: 44503 - DNA, 254 bp, Glycine max
  Clone ID: PAT_MRT3847_140184C.1
tgaaaccaatgaaaatcgttactgcgctggattaattcaatcatcataattttgggagcctggtgggaccaggttcaaaagaggccctaagccgccctttacattgcttacccatcttttttaatcctctaaattaaatacccaaattttaaacttaaacccaggggtatatagaatcctgtttagattgggcttaatgaacatttgttttctaattcaaaacaagtgccaggtaaatggatcaccaagcttca

SEQ ID NO: 44504 - DNA, 318 bp, Glycine max
  unsure (1)..(318): unsure at all n locations
  Clone ID: PAT_MRT3847_140185C.1
gtaatatagaaacccaaaancgcccncncncgggggcgcttaccggaaccanaccagaccccaaacccnaccgngaggnnccccaanncgncaacaccccgnggaccggngcncngcnncnnagcagnncgaacgggnagnccgncgagagcccccgaaacgaagacgaaacgcccaagcgggaacaccaggaccgaggnccgccggaaccggnacaagggggcggaggacgcggaggaagggcggagacggcgagaggacacganggnggagacccgcaagaaccgcagagaagagagnccgcagaagaagaggcgc

SEQ ID NO: 44505 - DNA, 119 bp, Glycine max
  Clone ID: PAT_MRT3847_140186C.1
ctatatgggtaacaaaacaagtgtttctaatacagtatcctaaaacattttgcgatagtgctgcaatgacttcaagtcatgacgaggtgaccctttaaggagctactagatacccattt

SEQ ID NO: 44506 - DNA, 1883 bp, Glycine max
  Clone ID: PAT_MRT3847_140187C.1
attccagactataaattttttcgttacatggaaggggtaaatttaaagtcggaaagagctaggcaacaggaaagtcatcaggcagagtatgaatgcaaaatgacaaatgaatttcatgtacaaataaatttctttatatatgtataatacatataaatccacagtcaaaccaataactgaatttgacaggaattagcaaaaaaataaaataaaataacaaaacaacccaaagtgagagctatagctatacatatgaggacgatagctcatgcccttttgtttaattgtcattgcatttccatttagaagttggaacacatgttagatagtgacaccaatggcagtgatcatatccactctcaccccggaatagcatcactagagcaatagataacccaacaatcagtaaaatggcagagacaatccatagaacatattggtaagccttgtatttggacttgaggtgaacaccagcatggagacgttgttgttctaaccacccaaattgaggacggagcagcaaaataaacccaaggagaaatcctgagaggaatcccccaatatgcgcaaagttatcaacatgtggcaacattccaatggcaagattgatgacaataataaacagaagtgtgaacaaagcagctgccttattggtataaatactccagtttgtgataagttctgaaagcattgcaccaagaagtccaaatagagcaccagaagcaccaacagagatattgtttctaatgaataaggaagacagtacactcccgccgaatccagacaacaagtaaatgattcctatcctcacaaacccaaattgttgttcaaggcgaatgccaatgaagaccagactcaacatgttggcagctaaatgaacaactccagcatgcaaccaaatgcaagtgacgagtctccatgcttgatgatgattcacaacatcatcccaccgaagtgctcccatctttgttaaggtggatgaagagggcccaaataacggattttccctaaggggctgaaaggagaagcgacccagaaacctggcgacacaatccccttcaaagccgagatttttcctggggcaatcgttgacatacatgaccacaaagaacaccacaacgttaaccgccacaaacagcggcacgagccacgatgtccaatgaacttccggatcgtaaacataggaagtgggagcggcactgtagcttatgttgttgatgttcttgttcgcccctccactttctagatctctccgtattgttgatgatgacatggtttttgtttttcgtctcaacaaagactctctgacttaaaaagtttcaaagaaagactcaaagtttctactacgcaaaagggtgagttgggaagaagaataagaaggtggagaagtgtttggagcttaaatctgaaatgggaaatgggaaaggaaagttactgggaaggtgcgtgtcaccgaaggagcaaagcaaccttggaatggaggataccacagagtgtggctcctggtgtgtacagattaagacactttggagctgcaaagggcttatttggatcaattcatcactttacaggttcatccactgcgtttgtagtagcctaaagggaggcatgttgtttcagccgttactatatttgtgatttgtttttctgaactttagcagaatctattcaatcctaaagaaggatgtttcactatggatcatcatctgttaccagctcgtctttatcctcttccccacaaattctaccgctaaccgaatatttgcttagtgttgatatggcaaaacttactctttaaaacttgttaactacttctagttcaatcatttacaatttgaaaactgcagttacatttttaaatatatttatcatgaataatcctc

SEQ ID NO: 44507 - DNA, 1359 bp, Glycine max
  Clone ID: PAT_MRT3847_140188C.1
aaatgacaaatgaatttcatgtacaaataaatttctttatatattataatacacataaatccgcagtcaaaccaataactgacttttgacagaaataacagaaaaaagttacaaaacatcccaatttgtaagagctgtagctatagctataaagaggacgatagctcatgcccttttgtttaattgtcattgcatttccatttagaagttggaacacatgttagatagtgacaccaatggcagtgatcatatccattctcaccccggaataacatcactagagcaatagataacccaacaattagtaaaatggcagagacaatccatagaacatattggtaagccttgtattttgacttgaggcgaacaccagcagggggacgtcgttgttctaaccacccaaactgagggcggagcagcaaaataaacccaaggagaaatcctgtgaggaatcccccaatatgagcaaagttatcaacatgtggtaacattccaatggcaagattgatgacaataataaacagaagtgtgaacaaagcagctgccttattagtataaatactccaatttgtgataagttctgaaagcattgctccaagaagtccaaaaagagcaccagaagcaccaacagaaatgttgtttctaatgaataaggaagatagtacactcccgccgaatccagacaacaagtaaataattcctatcctcacaaacccaaattgttgttcaagacgaatgccaatgaagaccaggctcaacatgttggcagccaaatgaacaactccagcgtgcagccaaatgcaagtgacgagtctccatgcttgatgatgattcacaacatcatcccaccgaagtgctcccatctttgttaaggtggatgaagagggaccaaataacggattctccctaaggggctgaaaggagaaccgacccagaaacctggcgacacattccccttcaaagccgagatttttcctgggacaatcgttgagatacatggccacaacgaacaccacaacgttaaccgccacaaacagcggcacgagccatgacgtccaatgaacttcgggatcgtaaacataggaagtgggagcagcactgtagcttatgttgttgtagttcttgttcgcccctccactttctagatctctccgtgttgttgatgacatggtttcgtctttggtctgaaaagtttcaaagaaagactcaaagtttcaacgcaaaagggtgagttgggaagaagaaggtggagaagggtttggagcttatatcggaaatgggaaatgggaaatgggaaaggaaagtgattgggaaggttggtgtcaccgagcagtggaaggagacgtttcagcgagccga

SEQ ID NO: 44508 - DNA, 263 bp, Glycine max
  Clone ID: PAT_MRT3847_140189C.1
accacgccaacatctcaaacaccattccataaggaaatgctgagatatcaaaaacgcacggggtcatatatcaaatctcacgctcgacacatgactccccgactatccattaccctccctacagatcaaacattaatcaatacaagatcctatttaacactccatactacacacttaaaagcttactttatcacactaaacctttacagatattctatatccttctagactgtctaatatttacatctatctacatcacactt

SEQ ID NO: 44509 - DNA, 283 bp, Glycine max
  unsure (1)..(283): unsure at all n locations
  Clone ID: PAT_MRT3847_14018C.1
ctcgagcgcaacttctgctacttcctactncaaccgcanttctgctccgcaattatcatnggcaangtcaagatcggaatcaacggatttggaagaattggccgnttggtagccanagnggctctgcagagagacgatgttgaactcgntgccgttaacaccctttcatcaccaccgattacatgacatacatgtttaaatacgacagtgttcatggcacatggnagcatcacgatgtcaccgttaagacgagcagaccttctcttcggtgacaagccagtca

SEQ ID NO: 44510 - DNA, 450 bp, Glycine max
  Clone ID: PAT_MRT3847_140190C.1
aggtaatattaataattaaaaaaaaagggccatatccaattgggagtggaaaagaaccactgaagtctttagcaccactttagtagcagaggtgctgctagctagcctttggggctatgggctcttttaaaagcaacaggctctgaattgagagacagattaaaggtaaggatattgtcattcctcaagctttggttctggtgattttcacgcagatttagattcactttgagaaaacttgggtctctaattggtaggctttggtgaagaacgctggccagcatagatacgtggacattatgctgctgatagtggacgcacctatcaacatattcatcaccacaatctgtagctgaatggcttcaagtggcgaagcccctcccataataagaccagtcatagccccaggcagcgatatcaaacccactgttttggcgttgtccacaacag

SEQ ID NO: 44511 - DNA, 452 bp, Glycine max
  Clone ID: PAT_MRT3847_140191C.1
ggggggggaaaccaactaaaaagctacttttttttcatggggggtagccactaacataatccctggacaagcttttgacttgaattcttttttttttcccggggccacagaaaatttaataaatcccagctccttgcttaaaaaaaagggggggagattctttgccaaaaaaagagccccacttcggcaaattaaaaaacaattccagaagggttcaaaattaagcccttggaaaactccccttcctgatctttatggccacaaataaaaagggtttgccctttgcctaaaagagttagacaaaagcgggaaaatcccacgggttttacacttttttcactaccttgacaaaaaaagttcatttaggaagcccttccgcagttccaaaaaattgggggggggggaaaccttcaaaaatcacggtttaagtttcacaaaaccctgcctaaaac

SEQ ID NO: 44512 - DNA, 708 bp, Glycine max
  Clone ID: PAT_MRT3847_140193C.1
caatgtggatattctgcagccctctggaatgtttgtgttgaagagggaccagctggctaaccatcaatctgtagtgacgtctggaaatgaatctcaagaaattttggccgagcaaagagaactgagagattaccagcatattgtgactatatttcgtggacaagcattaggaatcgtggaagatgagtgggatgaggaagaatacgatgatgattttgatccagaatatgccctctgatctttgctagtataaagtacttttataatcccccctcccaaattaacaaaaggaaaaaaaaaaacactcctgttttctgtgtaatggttacccctaaaaaattctggtctttctgtgctttggctactgatttgattcctaagtatttacatctcgtagatatggtcttgggtgttggacaagtattacaccttttttcggtggtttagcatctgatgcttgaaaacttgagatttctctcaagttgtttccttatatcatccacctaattttgcgttaactatagttagacaaaccaaatttcgtgctggtaattatagtcaattttttagtatctactgctacttggcttttttttttttttttttcatttccttataaaatgccttatattaaatagtggatgcaaattgctttgttgaacaatgctttatttagtgaataaatgatagttgattttatgtttcaaa

SEQ ID NO: 44513 - DNA, 617 bp, Glycine max
  Clone ID: PAT_MRT3847_140194C.1
caaacactccctcttcctcaattttcttcgatcaaacccaatttagccaccttcacactttcacaatttccatagtttccttgatttcaattattgcatgccaaatcatgtaccatttagagaagccacaaagagatgataaacagtttctaactccctctttttcttccacactcctcgatcaaatttaccgttcgatcgacgagggtgaaagaaaaaacggcgaaattaagttctacagacacaccacaatgagcactagcaagagacagagcaggagcaattctaaatcgatggacgctggagacagaaaaattgtccgcgcaaaaaacggcagaaaaaaactgcactgcgacgaggacatcatgttcttcagctccacttcgatttcgtccacggattcctccagcctcggattctcctcctccgacactgaatccatctcacgggcctcgtgttttgcgccaagggtggggcgtaaaggaggagggagcgcgtcgttccggtcggagaaacagggaatgcgcgtgttagacggtttctgtcggaactccttccacaggttcaaacacgcgcatttcccgttacccgtcttgagccgtcaccacgtgtccgtg

SEQ ID NO: 44514 - DNA, 1820 bp, Glycine max
  unsure (1)..(1820): unsure at all n locations
  Clone ID: PAT_MRT3847_140195C.1
cgtactaactcgtattcggctcaccaataaaataaaaataacagagcaattatgaaatagcttttgtgtttggtgaggttatgcgccatttctcccttgctaccaacaacaaagtttccattctctctatttctgttcaatcttctctcccttctacttctagggtttagcttctgcatcggacatgtcttcttcaactcatcacagttgactttacgagcgaattcaatcaggcttgagaaggtatcctgatgttttttgttcaccatcatatccatgatggaatactgtaaagatgtcctcagctatcttgattctgatacatctattaagatactcatgtctctggatgatctggctgaccttgttcgggccacctgtgtctcgcgctcttggagagacattgtgattgcaaatggtctttgcaagcagctgtgcttgagaatgtttcctcagttatctagagttgcttttgttgttgaactgaatcaaaatggagcgaaggaacatgcagaggttggatctagctattctatggaatggctatctctactgagagaacatagagtctttgcttatttaggtagagctctcatgtcatctgttgcaatgaattgcattgctaagacagttggtgcttctagcactgataactttcctcaggagagcattgataatactctagagccaagagatcacattaatggtagatattactactggtcaagtaatggacaaagtaatcccaatgtgcctgagacattaacatacgagttggtctctccaatttgtgttattacagaaatcaatatccagccttttcaagctgattttcagatagggtcaccaatatattcagcaaaatctgttcggtttaaaatgggtcatcctaaagcctctttagatgccaccgatgatgaaatgtttgtatggacctatacttccccagagtttccaatgtctaaggaaaatcggctacagaaattcaagcttccagaacctgtgctttgtattgggggcttcttgcagattgagcttttgggaaggatacaaagacaagaaatggatggtttattatacatttgtgtttctcatgttcaagttctgggaggttcattgtcacctccattcaatgtggatattctgcagccctctggaatgtttgtgttgaagagggaccagctggctgaccatcaacctgtagtgacatctggaaatgaatctcaagaaatttcggccgagcaaagagaagtgagagatttccagcatattgtgactatattgagtggacaagcattaggaatagtagaagatgagtgggatgaggaagaatttgatgttgatgattttgatccagaatatgccctctgatctttgctggtataaagtaaatttgtaaaatcctctcccaaataaagagaagggaaaaaaaaatagaatctccccagttgaggaatgattgcattcaaaccagttttcctgttttctgtgtaatggttacccttaaaaaaattctggtctttctgtgctttggctactgatttgattcctgtatttgcatctcttgtagatatggtcttgggtgttggacaagtagtacaccttttttcggtggtttaacatctgatgcttgaaaacttaagatttctctcaagtcacttccttccttcatgggcggngttttaacaaggtggggatgggaaaacccttggggtccccaacttaattcgcttggcacaacatccccttttgcccggttgggtaaaaacgaaagaggccgccaccgtccgcctttccaaacagtggccaccttgaatggg

SEQ ID NO: 44515 - DNA, 246 bp, Glycine max
  Clone ID: PAT_MRT3847_140196C.1
cgagaaggtaacagaacaatatcatataaaaagaatctcaaaattttcacattattcaatccaagcatattcgtatgctcatattgcctgtgttgtgcaaacttactaccccaagtggtatcaataaaagataattctttcaaatgctgttattacattcttcaattatattctaattttccattttaaacttaatgggcttcttcaaacttataatgcaagacctccacaacgttttttataatt

SEQ ID NO: 44516 - DNA, 388 bp, Glycine max
  Clone ID: PAT_MRT3847_140197C.1
ccggaccggcagggccggcccgacccacgcgttcgggcgttgcgtagctgacataccacacacatcacactacacaacacatcgtttgatttctctcgtcatgtcataactaaacacacacaatccttcctaatataatacgtccgaccccaacagaaacaagcaagccagggatggctagacacatggatggctcgtgctaagtaagccaacctaccagccaaactaacccaaccccctttctctctctgtatgcgaccgaaggaggacgatcagatcgaagctggcttaaaaatgaatggagggaacaaacagccgtttactgacggtctcgctggtggctgcttactactacacatagatgggggtgctctgaacgagcacgtgc

SEQ ID NO: 44517 - DNA, 634 bp, Glycine max
  Clone ID: PAT_MRT3847_140198C.1
gacttatataattgatcaattccatgtgattatcattgacacagattcatgtgcatcaacatggtgggcaacccataacccacaatattttatggttgaatgtcaatttcaataataagtataaacaacaaatgaaaaaacaaaatacttgcaaaataataataccacttgcaagcttcatatcacatggagatggagccaacccaagaagcattattatcattatacaaaccacaaagctccataacgggcatccccaacacctcatccaccacacggtcatgccacgtgtccctcatggcttcattcaaccgttggatgaaccccttcttgaatttctcacaataatgcaacaaacgtgccacatggctagggtccttatcctcccaccaccaaccggcaccacccttcctacattgtggcatctcaccgccaccggagaccataccacgggggaatccagccatttccgccacatactccgccatgccatcaacaagcccttgtggggccccttcccatatccaaaccttatccatgccacgtaggattgcacccactatagctatcttatcgtacctttggtcttctagtaacgtagggctaatctcaatgacataactaaaacattttc

SEQ ID NO: 44518 - DNA, 262 bp, Glycine max
  Clone ID: PAT_MRT3847_140199C.1
cggctcgaggaaaggagaaatgatgttataaaaaactcataaggcaagagctgagaaggaagcgctgatcttctatttaattccccacccatgacccccccaaagcaggagggcattgcccacattcacagggctcttcagtctcagaatcaggacactggccaggtgtctggtttgggtccagagtgctcatcatcatgtcatagaactgctgggcccaggtctcctgaaatgggaagcccagcaataccacgcagtccct

SEQ ID NO: 44519 - DNA, 745 bp, Glycine max
  Clone ID: PAT_MRT3847_14019C.1
cccgcgtccgcaagctccaatgtgatccttactcgatccgaatcggctcgagcttctaacttccgattcatggcagcgtcttctcctctccctttacccgaactccatttcctttctccgcaaatcacccccaaacgccgtatttccctctccaaactcccctccatttcccgccacgtcacctccaacgtttctctccgcaccgcgcgaatccgcgcaagcagagaagaatccgcgttggccgaccgagtcaacgacgtcgaatggaccggaaatggcgccgccgccgctgcttccaacgccaatggtgcctccgttagtggatacgtcaacggcgccactaacggaagcttggtcaagtacggttacgaagacggaaacgacgttgctgctgcggaggtggtggaagttgaagcctctaacaagctgagcgaggatgggaggaagaagaggttggaggagattgggaaagaagacgcgtggttcaaacaaaccgggaacgaacaagttgagggtcgtcgttttgattgagtttaagtaggttctactacttggaacttggaatgaagtatgaacgtgtggtttttcgcaggtggcagttgcacctggggggtcgttggaacaggttcaagacttactccacaatacaaagaacctttgaaatttggggatttggtggcacggtcatctttaaaggttggctgaaccaccaaaaggtcttttaacaaaggaggaatgaccgagg

SEQ ID NO: 44520 - DNA, 704 bp, Glycine max
  unsure (1)..(704): unsure at all n locations
  Clone ID: PAT_MRT3847_1401C.1
tcgcgatctagaactagtacttagctaacccagtgcaagtgaaggtggggaaagtgagtagcccaacaactaatgtttcacaaactcttgtgaaaatttctgaaaatgagaagattgatcggcttctagatttgcttgtagaggaggcatcacaggccgaaaaatgtggtcatccatgtccattaacaattgtgtttgttgagaggaagacaaggtgtgatgaagttgctgaagcattggtagctcaaggattatctgcagtttctcttcatggtggtcgcagtcagagtgaaagagaagctgccttgcatgattttcggagtggctccaccaacattttggttgccactgatgtcgcgtctcgtggcttggatgtcacaggagtgtcacatgtcattaatctagatcttccaaaggtatttatgctccaagcagaaactacttgatgactgagttttatctgtaatccacttgaaaaaagattatcaggaaaagtactgngattttccagagttagtggattgccattctgctactgctatgatggcatctcatttgcctggaatttttcagtcaaatttaatttccttgacanatgcatacctgaagcttcagttatggctgcctcaattatagaccatggaagattatgtacaccggattggaaggacagggcgtgcgggatcaactggcttagctacttc

SEQ ID NO: 44521 - DNA, 511 bp, Glycine max
  Clone ID: PAT_MRT3847_140200C.1
ggtcaagagtgaggatgggattgaaccgttgaggttgttatatgagagatccaaggaagtaagatgtatgaggttggagaaagagggagggattgaaccgttgaggtggttacctgagaggtccagggaagtgagatgtatgaggttggagaaagagggagggattgaaccgttgaggttgttgtgtgaggggtccggggtagtgggatgtgtgaggtgggggaaggggggtggggttgaaccgagattgttacctgaaaggtccagggaagtgagatgtatgaggttggagaaagagggagggattgaaccgttgaggttgaggttgttatctgagagatccaaggaagtaagatgtgtgaggttaaagaaagagggagggattgaaccgttgaggttgttatctgaaaggtccagggaagtgagatgtatgaggttggagaaagagggagggattgacccttggaaaccacaatttgaaatatctaagaaatcaagagaagttgttgct

SEQ ID NO: 44522 - DNA, 194 bp, Glycine max
  Clone ID: PAT_MRT3847_140201C.1
agcaattctctattctgaagatggatttgacagcaagtggcaggggaatttcatttatgaccttttgggtctttcgtcctcgcgattccgctatccctgttttgtcccatccttgctctattgcgtttcaaatgaacggatgggtgtatcccgatgggtaccagacggtgaacctctccagtggcaggctccct

SEQ ID NO: 44523 - DNA, 331 bp, Glycine max
  unsure (1)..(331): unsure at all n locations
  Clone ID: PAT_MRT3847_140202C.1
cgngacgctttgggctttatttaattattggatcaattttatattttgcagaaggatctatatgtttattttgtcttgtagttatgattacttttagaatattgattataatgatatcgctgtaatctgtttgtgtttggcaaagagatcacgatggaaaaaaggacatagtaatatcccttgagaatccagctgatttgaatgttctatgcaagtgaatgcgcccatcaactaaagcgagtcacttaatgcaagtgagggaacttggctctctcgacaaaatctacacgtatgtatacaaacagtgaaaaaaatgtagatgtaaagattg

SEQ ID NO: 44524 - DNA, 160 bp, Glycine max
  Clone ID: PAT_MRT3847_140203C.1
tccgtcagaacttgatttatttatttaataattaatacgtgaaaatgatggaacttggaagtttatagttactacacatgcattatgcgttagatacctcattttattttaccatcccggtaaaaaaataatccccactcaataataaaagtttaaaatt

SEQ ID NO: 44525 - DNA, 343 bp, Glycine max
  Clone ID: PAT_MRT3847_140204C.1
gaaaaaaaggacggtcaatttttttcttttacatttatttacaagaaaatggggcgggaatttatgcctattacattaaagagcatgtaaaattccaaaaattcaatccccctccataagagaaaactataaaaagtccaaaaaagagcttctgcttctacaaaaagaaacaccaatggctaaaaaaacctattgattcagaaatatcattccccgctggatcaagaaactaaattgttaataaccataatttttcggtaataaaaaaaacaaaagctactttgaacgtacaccttaaagaaacttgttggcaccgaatactttaagatcaatgcctcaagag

SEQ ID NO: 44526 - DNA, 252 bp, Glycine max
  unsure (1)..(252): unsure at all n locations
  Clone ID: PAT_MRT3847_140205C.1
cancctcaattttcnntctcnttcancnatgaatccatctgagcaatttgtggaacatgggaatgtctcagcangaattaaaagagaacatnntgtngcaactgtgctcactntagcanaccaaantcttggaatagttncatggtgacctncancacttctcctngtnaagcntacaagaccacgttcttcaggggnantgagggctaaagaagatggagagggaatttttgggggggnttcaattancgt

SEQ ID NO: 44527 - DNA, 1158 bp, Glycine max
  Clone ID: PAT_MRT3847_140206C.1
attttaatttgaacgatgcttgttggtgaagcaaatgcacaatagtggttttctgaatcagaaatatactcggagaaagaaactgaatcgcttacgcacgcgttaacattaccactttcttacttacagcacagcacttctgctaacctttcgtcttcaatttccctttggatttcattcattagatggattcgagttcggggcatcaagaattcgattatttgtttaagttgttgatgattggagactctggggttggcaagagtagtcttcttctcagtttcacctccgatgcttttgaagatctctcccccactatcggtgttgattttaaggtcaaatatgtgatgatggggggtaaaaagctgaagcttgcaatatgggatactgctggtcaggagagattcagaacactgacaagttcttactacagaggggcacaaggaatcatcatggtttatgatgtaacccggcgagatacatttacaaatctttctgaaatatgggcaaaggaaatagacctttattcaactaatcaagattgcatcaagatgcttgttggaaacaaactagataaggagggtgatagagttgagacaaagaaagagggaatagactttgccagggaatatggttgcctatttattgaatgcagtgctaaaactcgagttaatgttcagcaatgctttgaagagcttgttttgaagattctggatacacctagcctcatagccgagggctcaaagggtgttaaaaagaacatttttaaggagaggccaccccagtctgatgcatccacaagtagttgttgctatttgagattttaagaattggatttcctagagaagggagcttcatccattttttgaacctgaaaatattttgctggttgtttagcatcagagaaagccattttatattttattttcaggttcctgttttggcttgagtattacatgtaacataatgttgatggttggttgtctaatttcttttaccttttgggtttcttgtttgtccgagttacatttaattttgtatgtagacgttcatttttttttttttaaatcgtggatagttggataccatttgatataatggtataaaaaaaatttgctttgagagctggtatgaatattagtgagtaatcctggattc

SEQ ID NO: 44528 - DNA, 441 bp, Glycine max
  unsure (1)..(441): unsure at all n locations
  Clone ID: PAT_MRT3847_140207C.1
acgaggtggtttcatagtgtcatccatggacattcccatcatcaactggcatcattctatgtcttaaatgcatatgataactgctttaatcatgaggaggtgcaatagtaatgaaggtgagcatgtgatatgtggttaggcgcactgttcataggttcaaatcctaactttccttattctatagagttaggcctctaggaatctaatgtcgattgtttgtttgtggccacttaaggaggcagattagctgaattgtctgtaagctggcctagatacctcttgattttaatactagacatttaaaaaaaaaggacaaggctgttatgacaaacatcattcaatctttataattcttcccagtactctaaacagtgcagagctatcaaagtgggttggtctgctanggtcaaaaggttaacttgataaatgggcctccaaaac

SEQ ID NO: 44529 - DNA, 584 bp, Glycine max
  Clone ID: PAT_MRT3847_140208C.1
gtggttttttgaatcagaaagagatactcggaaaaagaaactgcatcgctcacgcacgcgttaacattaccacgttcttagttacagcacttctgctatcctttcgtcttcaatttccctttggatttcattcattaggtgagtacgtacgattacgatggattcgagttcggagcatcaagaattcgattatttgtttaagttgttgatgattggagactctggggttggcaagagtagtcttcttctcagtttcacctccgatgcttttgaagatctctcccccactattggtccttttctcctttgatttgtatattaagatagatatttatgcacctttgtctcttatttgatttgatcatgcctcccgcaggtgttgattttaaggtcaaatatgtgacgatggggggtaaaaagctgaagcttgcaatttgggatactgctggccaggagaggttcagaacactgacgaattcttattaccgaggggcacaaggaatcatcatggtttatgatgtaacccggcgagatacatttacaaatctttctgaaatatgggcaaaggaaatagacctttattc

SEQ ID NO: 44530 - DNA, 1082 bp, Glycine max
  Clone ID: PAT_MRT3847_140209C.1
ggccggaataaaccgtcgacccacgcgtccgaccttttcatataaaaaggacacacaaaacacacacattcccagagagaagagtggcgacgcaagtcagtctctcatcacatcatcatcaaaaaccaaaaaccctaaccccccggtgtgttttctcgtcgtcgctcttcttcttctctgtcgtcgccgccgccgccgccatggatcctgaggtgcagcaatcgcaggtcgccttctttcttggcgccgatccctcccccttccagacactgatctcgcacctcatgtcctcctccaacgagcaacgctcccacgcagagactcttttcaacctctgcaagcaaaccgatcccgataacctctccttaaagcttgcacatctccttcactcctcgccgcaccaggaggcacgggccatgtccgccatcctcctccggaaacagctcacccgcgacgactcttacctctggccgcgcctctcccctcacacgcagtcttccctcaaatcgctccttctctcctcgattcaaaaggagaacatcaaatccatctccaagaagctctgcgacaccatctccgaactcgcctccggtattttacccgacaacgcctggccggagcttcttcctttcatgttccagtgtgtttcctccgattcccctaagcttcaggaatccgcgtttttaatcttcgcgcagttgtcgcagtacatcggcgattccctcactcctcacatcaagcacctccacgatattttcctgcagtgtcttacgaacgcttccgttaaccctgacgtccgaattgcggcgcttaacgccggtatcaatttcatccagtgtttggccggttccgccgatcgcgaccggttccaggacctgctgcccgcaatgatgccgacgttgaccgaggcgcttaattcccgccaggaggccaccgcccaggaggcgctcgagcttctcatcgagctcgccgggactgagcctcgttttctccggcgccagcttgtggatgtcgttggcgccatgttgcagattgccgaggctgaatcccttgaggaagggactcggcatttggcgattgag

SEQ ID NO: 44531 - DNA, 232 bp, Glycine max
  Clone ID: PAT_MRT3847_14020C.1
ttgctgaagtggtaactgcggttgctgaagcgcctgcaagtgcggcaactgctgctgaggctgcatgatgtacccatacttgagctacaccgaatcaaccacaccgaaaccttggtcattggcagtgacaccagttaaggctcaattcaagagtgcttaaatgggagttcccgctgaaaacaatggctgcaaatgtggagctaactgcacctgcaacccctgcacttgcaag

SEQ ID NO: 44532 - DNA, 420 bp, Glycine max
  Clone ID: PAT_MRT3847_140210C.1
ctcgagccgaatcggctgcgagaagacgacagaaggggaaccattacaaataagaacaaaagaaacaaagtcactatgaaatgtctcttattagccgaaaaccaaataggaatcaagaaatgagctgagaaaattaatgaacctaatatcacttacttgggctaatgcaggaagtgtttgtcttccagtactttcaacaaatccactgcagtctcctatagagaacacatcttgtaccgaagaaacacggagccactcatcaacaccaatcctatgaaacaaaaacattcagaactttctttgggatagtttactgcagagaacttatatacacctgatccagatttccttatatgacagataaaaaaataaaaaaaataaaaaactcagcctattcataaatcagcttctaatttggtg

SEQ ID NO: 44533 - DNA, 602 bp, Glycine max
  Clone ID: PAT_MRT3847_140211C.1
gcacgcccacgaagcacggaccacgcgtcgctcgctctctaatcacatcatcataaatcaaaaaccctaacccgcgcgcgtgctcacttgtcatccctctctcttcttcttcttcttctttatcgtggccgccatggattccgaggtgcagcaatcgcaagtcgccgccatcctcggcgcggatccctcccccttcgagacgttgatctcgcacctcatgtcctcctccaacgagcaacgctcccacgcggaggccctgtttaacctctgcaagcaaaccgatcccgatagcctctccttgaagctcgcgcacctcctccactcctcgccgcacgaggaggcgcgtgccatgtccgccatcctcctccggaaacagctcacgcgcgacgactcctacctctggccgcgcctctcccctcacacgcagtcttccctcaaatcgctccttctctcctcgattcagaaggagaacatcaaatccatctccaagaagctctgcgacaccatctccgaactcgcctgcggtattttacccgacaacgcctggccggagcttcttcctttcatgttccagtgtgtttcctccgattcccctaagcttc

SEQ ID NO: 44534 - DNA, 870 bp, Glycine max
  Clone ID: PAT_MRT3847_140212C.1
caacggtccggaattcccgggtcgacaattgcgtccgcattttcttctctctgcgccttcttagggtttgggtttctgcttgtgcttctgtcactcattctggagatggcttcttcggggcaatggaactgaatgagagtgacaaaaagaggatgaggcgccctaatagatccaaggcatttaaagttgagcttagctatgcttcaaagattccattgcaggccattgccaatgctctacgtggacaggaatccgagaattatcaagaagctataagagtgcttgatatcattttgaggcaacatgctgctaaaaggctgtttgcttgtgaggcaatcgttcttccacaatgatcccaagaattttgctgatgtaggagtgtacttggatgcagttccattctagctttagaactacacaaagtggactgtctttgaacatagatgtctcccacgatgataattacccctgtgtggtggacttctaatatccatcaaaatgtgagagaccttttcactgacgcattaaaaaatcgaagcgagccagcttttatggttctgagccaatgctacgggattgtggaatctctataagccccaactttactgaagttgagggtcgggttttacaagctccacggctgaaatttggtaatggggaggacttcaatcctataaatgggaggtggaacttcaataacaagaaaattgtcaagccaactaaaatagaaagatgggctgtggttaacttctctgcacgctgtgatatacgaaggcttgtgagggatcttattaagtgtggaggaatgaaaggcattgtgatagatcagccgtttgatgtgtttgaagaaaatggtcagtttacgcgtgc

SEQ ID NO: 44535 - DNA, 250 bp, Glycine max
  Clone ID: PAT_MRT3847_140213C.1
aaagggtctctggggggtttaccccttccttccctgggttggggcctcggtccctcccctttattttgggggggaccattttttaccttttacattaacaacttgtttccccccgcggggtttggggcatttacgtggggccccccgacaaccttggtggcgttgcccatgaatttggtgggaccgaacttcccatttgtcggggtttgaatggacgggggggaaaaaataaactggttttgtttttttt

SEQ ID NO: 44536 - DNA, 736 bp, Glycine max
  Clone ID: PAT_MRT3847_140214C.1
tacggctgcgagaagacgacagaaggggcatattctgaagtaagttattgtgatgtggccctcctcaaatgtacgcttggagggacataacatggcggaaggcaagatgttatcagttgcttcatttaagtgttaacccaatattgcatagttgcttggattccaagagaagttttcagacaggaaggaggcattacagtccaataggaatctccaaaggatgaacaagagaaagctagctcatcaatttttatttccaatgtacaacatacaaaagaaccctataaggcatatcaacaaaaaattgatctttcaatttgtacaggaggtaactatccatcaatatagaatttcaaaaaaaaaaaagaaaagaaaaacccaactcacctccacagaggacatcaaaactgacccttctccattccaattccaattttacactttttcaatacataaagcggaagctagatgagtgttggattggttgtgatcatgatgcttttgaggagtgtcaaaatagcttgacgtaatttaaaaccacgaatcgaactgatatccaaactcaactaactcaagcgatgggtgttcccacggagaagctgaaaccaaacaggacgaattcctcttgaccttggcattatcatcctcgaccaagcctggacaaatatccaaaaccccatttcgtagcgcctcgacaacagtttcttcactgtgacaacagagagaatagagagcc

SEQ ID NO: 44537 - DNA, 538 bp, Glycine max
  Clone ID: PAT_MRT3847_140215C.1
ggctcgagcttatttgcaggaaggatgtggtgtcactctcgattagtgtatctacccatgtcatacttatatggtagaagatttgtgggtcctatcaacacaattattttatctcttagaaaagagctctacaccattccctatcatctactcaattggaatgaggctaaaaacttatgtgccaaggaagatttgtaccacccatgcccaatgatccagaatattttatggggttttcttcacaatattggggaacctcttctcatgcactggccgtgctccaagctaagggaaaaagcactccattatataatgcaacatatacactatgaagatgaaaacacaaactatatttgtattggtcccgttaataagggatataatggttctcaattttgggatgtgactttttctattcaagcaatattagctatcaatcttgaggatgaatatggttcgattcttaagaaagcaaataatttcataaaatactcacagatcacagcaaatagctctggtaatctgagtcattggtatc

SEQ ID NO: 44538 - DNA, 398 bp, Glycine max
  Clone ID: PAT_MRT3847_140216C.1
ctcggctcgagacgcccttgggattggtggttggtttttttcccattccggtcttttgcaataaaacggtctaaacctttgcacatttgaatctctctactgtggcgtgtgctaaaatggtggataataactttctatcttaagcatctatcaccgatgagaacaagaacctaagcttgaatcctcagcgcttgtgccctactctatttattgggccagggaccgaccgtacacaattatacttttggaaccctataatatttatatactaaatgaaacagtagcacctaatctctgttacttgtgggtttaatgcatcgatgactgtttccccccttttttacaagacacgtctttgtagggcagtagcgacggccctacctccgaagcataattgc

SEQ ID NO: 44539 - DNA, 406 bp, Glycine max
  Clone ID: PAT_MRT3847_140217C.1
cggacgcttggtgtagaatattataccaaaatgcttggggcagagagactacacatattttaaaaaccgttcctggtgcaaggatgcttggatggtgtcttgtggcatgagaactgatcactcttgatgcagatcatggaggaaactgactgttgtaggtgctgatgaaccttcacgctgtagttttaacgcttgagcaattgtttataaagttgttctatttggtggtgaaggggataacatgcaacctatgaatgataccttcagattggatctcgatgttaacagtcctgactggtgaaatgtccacgtcagatgttctccctctgctcggtggtgccacacactttcttgagataatggatctcaattgattgtataagcaggttgtggaacgcttggcttg

SEQ ID NO: 44540 - DNA, 655 bp, Glycine max
  unsure (1)..(655): unsure at all n locations
  Clone ID: PAT_MRT3847_140218C.1
tcgacccacgcgtcgggttcggttatcttctttctatttcgtcattttcttcgcttctttcttcttctctgttaattcttttcttacatcttaaaaaacaatataaagaagggcgtggttttgttgtgagtactgagctgagaagagggagaagatgatcatccccgttcgttgttttacctgtggaaaggtaattggaaacaaatgggatacctatttggaccttctccaggcagattacagtgaaggagatgcactggatgcattgggactggttcggtattgttgtaggcgcatgcttatgacccacgttgatctcattgagaagttgctcaattacaatactttggacaagtctgatctcaattaagaagaaggcttgaggaataacagatgaccaagatgcttctgttgtattccatgccctatggcaatgcatcaatttttcttttcttttatgaattgctttggtacaagcaggtcatgtttgtgtgctggttcaggtcaagtgtgtttgttatcagttctgaggagctatgaaaagacacagcttatgttaatatctcatataatgatatgatatgacagaccaaacttttgaataatctgactggtatttccaaaaaaaaaaannnnnnnnnnnnnnnnnnnnnnn

SEQ ID NO: 44541 - DNA, 1519 bp, Glycine max
  Clone ID: PAT_MRT3847_140219C.1
gaaaatgattcgagaaggagattattattgagagagaaagagatataaagcgggggtgtagacgaaacggagcattttgatctcgtagttgagtctgagatcgatcatcagtcttatctagttttcgtagcagagagagaatgggagaggtagagcgtggaggttggcgccctccgatggatctgttccgttcggagccgatgcaactggttcagctcatcatccccatcgaatccgctcaccgcactgtctcctacctcggcgaccttggcctccttcagttcaaagatctcaatgcagacaagagtccttttcagcggacctatgcagctcagataaaaagatgtggagagatggctcgtggattgcgttttttcaaggaccaaatgttgaaagctggtgtttcaccaaaatattccacaacaccagttgatttgaacattgatgaccttgaggtaaagcttacagaaattgagtcagagttaactgagatgaatgcaaatggtgaaaagttgcaacggtcatacaacgagcttgtggagtataagcttgttctgcagaaggctggtgagtttttccactcagctcaaagccgagccttagagcagcagagagaacaggaatcatgccatctgagtggtgaatctatagaaacacctttattacaggaccaagaattgtctgttgattcatcaaagcaagttaagttgggctttttagcaggtcttgttcccagggaaaagtccatggtatttgagagaattttgtttcgtgctactagaggaaatgtatttttgaggcaggctactgttgaggatcccgtcacagaccctgtgtctggagaaaagactgagaaaaatgtttttgtggtcttctatgctggtgaaaaagcaaaagccaagattctgaaaatatgtgaagcctttggtgctaatcgttacccttttgctgaggaacttggaaagcaagctcaaatgattacagaggtttctggaagacttttagaattgaagaccactttagatgctggactactgcatcggaataacttgctaaatactattggggctcaatttgagcaatgggatgttttggtgaggaaggagaaatctattcatcataccctgaacatgctgagccttgatgtgacaaaaaaatgtcttgtggctgaggggtggagtcctgtttttgcaactaagcagatccaggatgcattacagcgggcagcattggactctaattctcaagtcaatgccattttccaagttttgcaaactagggagttgccacctacatattttcgcacaaacaaatttacttcttcttttcaaggaattattgattcatatggggttgctaagtatcaggaggcaaatccgactgtgtatactgtagttacctttccatttctttttgctgtaatgtttggtgattggggtcatggaatatgtttactactggcagctctatatttcataagcagagggagcgaagattgcaaatgggacagaaaaggctt

SEQ ID NO: 44542 - DNA, 231 bp, Glycine max
  Clone ID: PAT_MRT3847_14021C.1
ccgggttggaattacgcgttcgaacattcgttcatttacacttatgtccacttatcatccacaatattgaggagaccctccatgggggatggcacgcgaaagaggatcaccaccgccctcaccatggttagctcataaatgatcacaaaagataacaccatggtgtgcacaaatgtgaacacataggagaacttcaccttttcgagcacaaggagggacttgtggattaca

SEQ ID NO: 44543 - DNA, 598 bp, Glycine max
  Clone ID: PAT_MRT3847_140220C.1
tgattcgagaaggagattattattgagagagagagagagataaagcgggggtgtgaaagagacggagaaggtctctctgaagccgtagttgagagttgagactgagatcgatcatctgtcttacttagatttcgcagcagagagagagaatgggagaagtagcgcgtggtggttgttgccctccgatggatctgttccgttcggagccgatgcaactggttcagctcatcatccccattgaatccgctcaccgcactgtctcctacctcggcgaccttggcctccttcagttcaaagatctcaatgcagataagagtccttttcagcggacctatgcagctcagattagaagatctggagagatggctcgtagattgcgttttttcaaggagcaaatgttgaaagctggtgtttcaccaaaatattccacaacaccagttgatgtgaacattgatgaccttgaggttaaacttaccgaaattgagtcagagttaactgagatgaatgcaaatggtgaaaagttgcaacggtcatacaacgagcttgtggagtataagcttgttctgcagaaggctggtgaggtttttccactcagctc

SEQ ID NO: 44544 - DNA, 566 bp, Glycine max
  Clone ID: PAT_MRT3847_140221C.1
aagaaaaaacctaataaaacaatcttataataaatgacaaaaagtataagagcatatataatttggcgcgtaactgaataatactgcacttaaatcgtgaaccgaaatttcgtccaagggtggaaacgatacgtatattctatttttggggattctgttgcataaggttgcagagaaagaggaagacgaaaaccagaatacctctatcaccaattcaccatcagagtactaaatagtctcttattttcccgtttttggaagtatgagtttctccaagggttctcctggcagccagacgccgcgtgatttagaagctgggtctcctgctagcttctctgctgattttgatgatggagacgtttctgctgatccatttgacgttaccagaacaaagaatgctccggttcaacgcctcaggcgttggaggcaagccgcacttgtgctcaatgcttctcgtcgatttcgttacaccttggacttaaagaaagaagaagagaagaaacgagtattaagaattgttatagtgcatacacgggccattcaagccgcatatcgattcaaggaag

SEQ ID NO: 44545 - DNA, 1831 bp, Glycine max
  Clone ID: PAT_MRT3847_140222C.1
aaacatctagcccaatgtcaattattttttccaaatagaacataaattgtatcattaccaatcaggaacataaaattttcaaattaaaaattcctcacaactacaaaaatatgagtacaaaccccaagtcaataatcatcaagggtggatggataagtgagatttatcaatttgcaaaagtcagctggctctactctgctgttggtacttcccattctgtcattttactactacaacaaaaattagatgagcgaccatgaatctgaaacatatatacacagcactagtgtatattcaacaaagtgtgtcacccacgcattaaatcaatgtccacatgggaattacgcatgtccaacggacgtgatgttgaccaaggacttagagatgggggagttggaggaaggttttgattttgtgagatgctattcagtgaaactggattatgaactccctgatgatctgactccacagcaacttctgcaccttctgaggattcctttttcttgttctttgtctttgatccaccccatagaaagctcccaactaccacctgaacaggacttgatgcaataagcactccaccaactccaccaccaatgacacgaccatcaggactagcaagggacacactcaatccaccagttcgattgcgtgagccaccattatcggtgaccaagtaagagcctgacagacacactatctcaaagcgcccctcgtatgtgacagtgccacctgaagttgatggctgacgaagtgtgacagtagagacagcaccattggctgacaaaatgcatacaactctaggtccctgctgagaaaatgccatgatttttgttgcaatgtcttctccacttgcaatgttgatgatatgaggagtgaatcccatcccagctgaaccagacatcaattcaccaagagaagccaattgctgttttttcccagtccccggggggcgccctctgccccgtttctggctttgtgacaaggctccaggatggctagatgatgttggagttggagtcaatgccaatgacacacttccatcggtaccatatttcctaggccttcctctcttccttttgacaggttcccctagaggtgccccagtaggagctcccacattgacaccgtgcgcgtggattgctgaagattccaatggcaatgtggatccaatggtaccaccaccaatgctggattgaaatggtagatttggattagacagtgaacgcatattaggtgaaatatgtaactcaggttgtcctccagatccaggtatcctctttgctgcatatagtaagacccggataacgccatttggtccccacgatccatgcatttacttcgattgccttcagaatctttcacaagaaactttgacaccccaatattcagtacaccaaaacttatcacctagctattttaggaacaggatcaaaaagctgtggtgcacattcacagttctacctgtgaagaaatggaagctagtgattgattcagttgaaaaaaagttcaacagtttcttttttttctctttggaaagtgaagagtggtggcagagttacacagagaaagagatgtgagagaaccactgtgtcactgtgtcagtgcaaagaagcaaattactccacaacaatggaaaaaagagggtaaaatgaataaaaaaagaaagcttcaaaattgaaaagagaaaaaaaaaagaaagataatctttcttttctctctcaatataataactatttttgcagtgtctcagctgcaaaagtccttatctggttgcatatttttctagggctaccttctctttctctctctaaaaaaaaggtattttttc

SEQ ID NO: 44546 - DNA, 312 bp, Glycine max
  Clone ID: PAT_MRT3847_140223C.1
tacgagaatccacgaaaaaaaacatcatctattatctctcacaactagacagagagagataacgactgaggggacatttcaccatgctacttattaatttctctatagaagctccatctctacataatcatatcatttaattttccctaatgataatgcactactactaactcattcataattacctctccacatcaagaactccttctactcttttatcctacacactccttccttcttatactgcgcatattacaccgagatcctccccttcgcatcttcactttccaccatttcacaggaaaacaatca

SEQ ID NO: 44547 - DNA, 308 bp, Glycine max
  Clone ID: PAT_MRT3847_140224C.1
tcgcaacagcgtccgtttctgaggataatgacagcgcagaactatgtgtatgggaagcaatgcttatctctcatatataatgtatggaatattcactggagaacgtttgcgatgaaataaactcttcggtgaagtaggtatcaaccgggaagacttattggccggtctgtaaacaggatgcactctgacgctctgcttgcatagcaacaagatatcgtgggtattgaagctcctcaagcgagattactgcatgtgcttttacaacaagaaaactggcggagaatgtggagtttccgcccataagtgac

SEQ ID NO: 44548 - DNA, 140 bp, Glycine max
  Clone ID: PAT_MRT3847_140225C.1
cggccgcgcacgtaataattgttttcttcaccatcccaattagcttttattttgtttttaaacttgcatattgtttctcttttgagccccctgcagatccggcaggcccatgaaccccgactaaagcatttcgcctgaaa

SEQ ID NO: 44549 - DNA, 202 bp, Glycine max
  Clone ID: PAT_MRT3847_140226C.1
cccacacatgccatcactctacaaaacacttagcactgtgtattttaccaattgaaccatacatactaggaggtggactactccttctagctatggaacttcatataatcccacatcatctagccatgaagggaggcgtgctcatacggatactcgaagaaaaacatatgctcacctgagaacccattatcagacagttcaa

SEQ ID NO: 44550 - DNA, 640 bp, Glycine max
  Clone ID: PAT_MRT3847_140227C.1
agaaaaacggttgatatctgaccatgaaatttaccagttatcaccatttgactgaacacccttttgatatgcactacttgcactttatgcccaattggacgaatagaaccccctttgggtaaaaaaacttagaacgagctcactgtgtccttgtatccgatccctactcctgtggacatgtcttgcatttatacgtggctggctgagacctccctgaatgattaaaatcactaccagatcttataacgatatacgcattacacaaacacacattcgcctatcctggaataaaaatttggaatgatcataaactagcttcaggacaactaatctaatgaccgatcccataggcttttaaaatgattttaaatcttctgccctgggtagcggcgcttaatggtaaacagaataccaggaaggcaatcatttcaatttaagctactttaatggaggtcgtttacagttgcattataaggcggacgtgcacggatgcaaacccacactaggaccctagcgtatgaggctctatgttgaaacggaagagcgagcatggaacatcacgaacaaagtacgtggtgctgagatgcacacccacactataactgtctgaataggtcacggtccacaaaacttcattttt

SEQ ID NO: 44551 - DNA, 223 bp, Glycine max
  Clone ID: PAT_MRT3847_140228C.1
gccgaaactatgtgcagaaaaaatatcatctgagtcactatacaatgcccaatatcgtgtgatagatgcggcgctcacactagttcgtgaaaatacaaggcttaataaagaactcgtgcatagttcgggaggtgctgtggcaactacaactctaataggaggtgctatgggtcataatacatcgcatattgaagggcctacattagcacgtcactttattagg

SEQ ID NO: 44552 - DNA, 460 bp, Glycine max
  Clone ID: PAT_MRT3847_140229C.1
acttctgtggctaaaagaaggttcttttcatggattgtattttacaaaacaacatattcataattttaatgaatgatatctacaattaatttaaagtttcaagcttaaaccgcattagaagcgtcacagatttatatttctttccctttctgtcatagagagggactgaccgaaatccatgccttagctctgataatggcaaacaagtttgtccggcaaagtcatcttttcccttatctttgtcctttacttctatccgaagcaaagcaagctctggaaccctcaatttgaattcaaattcttcatcccaaacaggataccatgtatccgtctttactcttgttttgttcttgtcacaatcagcctggtctcgaacaatacttacctttgtgtaaaagtcgggtggagagaatcgatcaaagtgtgttgggctgaaatctaatctccagccatctccttt

SEQ ID NO: 44553 - DNA, 899 bp, Glycine max
  Clone ID: PAT_MRT3847_14022C.1
cccacgcgtccggaaagcctccgtttcagccagagttcctccaaccttccctgttagatcgatgggtgatttaagagttaagaaaaagaaaggaagcaacaagaagaagcatgggtctgtgtctgtcaccgccatcaaatttcttcctaaggatttgcaagtggagatttttgccaaggtggccactcgctccgtatttgaccactgcatgattaaactatgttgcaaagaatttcttcgcgcagcggaggataattacgtgtaccgtcacgcctccatggagaattttgcgttggtgccgctaccatggttcaaaggcaataataaagaattcccgtttctgaaacgttgcagggagagcggtaactcggagattttgtaccgtgaaggaatggttcaatatttcacttcttcaatgatggaattgggtctcaagaatttgaaagaggcggcgctggagggtcaccatgatgccaaatatgtttattgcatgcttttgatgtgcggtgaagatgaattaggagaaagaaagcaaggttttgatctcttttgttccttgaaagcgtcgtccacgtctcttattagatgcagaaaaagggttaaatcttttgtccaaaatatctgggtcaataataaccctgcgattaaagatcacaagtcatcatctttctgctgttctggcacgtgtgatagttagaggctttcaagaagaagatggtcaccgtttgaggataaagaagatggcggtagtattggtatttcgtgcgaacgttgcggtgcggactatgaacttagtttgtttcgcaacatatttcgagtctaagttgaatttctcttccacacatgagaatataggaaaacaagttcaaatacactttgatttttctttctcttttcaa

SEQ ID NO: 44554 - DNA, 482 bp, Glycine max
  Clone ID: PAT_MRT3847_140230C.1
actgtgactgacgggtcccctgctgtcgcttgaactgcacaaatccttccgtagactcatcgatagtgtgtctgagggagcggactctaacgatgctactcacatggcttattccagcgccatgtgctcgaaggattgagcggagaacgctggggggcgcatctaggagatgaactctatggatgattctgcgcccggagtagactcatactgagaaggcatacgaagggaggggtagcattggagacatgcgagctggctgtccagtctatggacaggatggcagactatgagtgataggctggttgctaaacatatgagaggagctaactagtatctgtggtgatcccaaagctgtgtgacaaagcatgagaagtgcatggtacgattaatcatgctacatacgctcgagaatatgacacatatgtgtgaatctgaggctaagctcagtaagaaatacatcgatccaagtttgaaagact

SEQ ID NO: 44555 - DNA, 325 bp, Glycine max
  Clone ID: PAT_MRT3847_140231C.1
gggccgacccactcgtccgcgctggttccctttctaaagccctcgcattcacgtccgtcgtcccgagcaggacgcgcgagctgcctagaaggcgacgccaaacgggcttgcgcggatcgagacgaccgggaagaagaagcaggacaacggcgtgtggtacgacgacagctcggcgccggtgcgcgcgcagaccatcgacgagctgcactcgctgcagcggaagcggtcggcgcccagcacgcccaagcggtcggcgcccaccacgcccatcaagggcggtgcccactcgcccttcgtcgacgcgatcagcgaggaggagcgccac

SEQ ID NO: 44556 - DNA, 250 bp, Glycine max
  Clone ID: PAT_MRT3847_140232C.1
aaaactgaactatgcctattcaaacgtgccaatatctacgggggaaagggcatcaaatttattcctggtgattctcaagttttcctgattgccaacttaaaatgtaagccgtatttccacaaccaccttaatccctcaaagcttaccttaactgctatgtacacaaatcaacacaataaggacattgctcaataacctgttaataacaccaaactcacttccaaaaagccttactctatgtcccattttt

SEQ ID NO: 44557 - DNA, 260 bp, Glycine max
  Clone ID: PAT_MRT3847_140233C.1
taataatttttcttttgggtacagacataaagtggggggtatattaagccccaccccctgtatgttaaacacccccaaccacaaaaaggaaaggaagagcggaacctaaaaacacgcgaaaaagccacgcacaaggaaaaccggaaatacaaaacaccaatctagggcgaaggcaatcccaaagcaaaaaaaagcaacaacaattaactaccccggcacagcaaaaaaacagggaggaaaagacagaaaagccaccgaaa

SEQ ID NO: 44558 - DNA, 533 bp, Glycine max
  Clone ID: PAT_MRT3847_140234C.1
gggagtacattaaagtcaaccagctagaggatcctgcgaatcctatggctatagtgtgtgatgggaagcttcaggagatctttggctgtgaaagcatttcggcattggggatacctgaagttctgggccgtcatcatatttttaggagttcatgatgctgacagcattctatgtgacagattgcatggtgttaattccagtatagttggaactgatcttgaccacatgttgataaggttctgtaacttgactgataagatttgtgttcttagttcttgttgataagctattagcagagaatgaagatgatgtaatagagacaactattagtttgtttgggagtggcgatgtgtttctaggtcctgcagttgttgtttgtctaactaggcacttaggttagaatgacctgtggctgtgggtattctgacacctgtaaaattctgacaataggaaagaaaatgatgtacaaggtatcttccttcaaacatgactaatgctattttatgtgtagttaatgaaatgcagtttgccgg

SEQ ID NO: 44559 - DNA, 430 bp, Glycine max
  Clone ID: PAT_MRT3847_140235C.1
ttggtttgagatacctattgctttctttcaatcaaatctctcaaaatgtctgaacaatccggggaaacctttgcgtttcaagcggagattgcgcagttgatgtccctgataatcaacaccttctactcgaacaaggaaatcttcctccgtgagctgatctccaactcctctgacgctcttgacaagatccgttaccaggcgctgaccgacccgtctcagatggagagtgggaaagagctcttcatcaaaatcgtgccgaacaaagccgataagacattgaccatcatcgacactggcattggcatgaccaaagcggacctcgtcaacaaccttggcaccattgccaaatccgggacaaaagcgttcatggaggctcttcaagctggtgcagatatttcgatgattggccagttcggtgttggatttattc

SEQ ID NO: 44560 - DNA, 2198 bp, Glycine max
  unsure (1)..(2198): unsure at all n locations
  Clone ID: PAT_MRT3847_140236C.1
ggagaaagagagttatatagagagagaaagagaaaaaaaccaatatcactatggcgggctcgaggagagagagagagagagagagagaaaacaacaacaaacctcatcaccacacagagtagtagagagagagagagaaaaaaaaagagagtccgttagttaatttcagtttatttattttatatttttaaaaagaagagaaaaagcaatggtgacagaggaagaaatatctgaagcggttcagtctctgctgcgggaatcaaaccctagtagattcacgacgctaaaccaggtggtggaggagctccaggccaagctcggccacgacctcactcacaaaatcgatttcatcaccgcgcagatcaacctcctcttcggatcccgacaaccgcaacaaccgccgcaaaacccgcataggcagttacaacagcctaaggaccattttgcccctccgccaaaccctaattttcactctgcccctgtcagtgttggctttcagttgcagaatttctcttcttctaacgctgttgtcgctgctgctactgctgctgatgcttcgcgcattgaagctccttccgctcctgttgttgttgaaggcaaccaggttcccaaggaaagtactcaaactaaggtgaagagaagaggtggcccaggaggtctcaccaaaatctgtggtgtttcgcctgaacttcaggtcattgttggccagccagcattgtcgaggactgagattgtgaagcaactgtgggcttacataaggaagaacaatctccaagatcccagcaacaaaaggaaaataatttgcaatgatgaactgcgtgtggtgtttgagacggattgtactgatatgttcaagatgaataagttgctatctaagcacattatcccccttgaaccaaccaaaaagcctgttccaaagaaacagaaggtagatgtggagtcaggaacaagaagtgctgaacctactccttctgtaataatatctgatgcacttgctaactttttcggcattactggaagggagatgcggcagtctgaggtnnngaggcgtatctgggagtacattaaagtcagccanntagaggatcctgcgaatcctatggctatagtgtgtgatgggaagcttcaggagatctttggctgtgaaagcatttcggcattggggatacctgaagttctgggccgtcatcatatttttaggagttcatgatgctgacagcattctatgtttgtaatcatgagagaaggtagaaaacctttatttccattggacaagactttggacacctgttcggatgatcctcttcatgcttgaaagttgaaactatttttcttttctttttccctgtcataggagcaataaatataccttattaaatcctcttaattacttcaaaaaataaatgttaaatgacttctttcttgctagtatgataaatgctttcccaataataaatttatgtttgtttccttaattgagacattggttagcacttgccttttatgaatattccgaacctgtcatgatccaagactatgatgaatgaggtacagattctttttttttattcgtgaacgaggtatagattgcctggctaaatagagtaaaacgattcatagaattgatgactatgctgcctttgatatgtaattatgtatatgcaatactgttgcaaatttctgaaaacaatgacttatcctagttaggatttgatagttttgtttctcagtttgatggggttgctttttgcattttcaaatgatatttatgcatagtttttgatgatatatgatgattgttttggttgatgtgacagattgcatggtgttaattccagtatagttggaactgatcttgaccacatgttgataaggttctgtaacttgactgataagatttgtgttcttagttcttgttgataagctattagcagagaatgaagatgatgtaatagagacaactattagtttgtttgggagtggcgatgtgtttctaggtcctgcagttgttgtttgtctaactaggcacttaggttagaatgacctgtggctgtgggtattctgacacctgtaaaattctgacaataggaaagaaaatgatgtacaaggtatcttccttcaaacatgactaatgctattttatgtgtagttaatgaaatgcagtttgccggatgtacaaaaaaaaaaaaaaagaaagg

SEQ ID NO: 44561 - DNA, 583 bp, Glycine max
  Clone ID: PAT_MRT3847_140237C.1
aataaaattctaaagcatgttccattagttttgttttgatatacattgggttgttgttcattgttggtgatgatgactattgttgagcatggacagaatcaaaggtggatggggttggaggctatctctgggtttgggcggtttaccggcactgcttctcacgttgggggctttcttggtggtggacaccccaaacagtctcatcgagcgtggtcacttggaagaaggaaaatctgtgctgagaaagattcgtggcattgacaacattgaacctgagttcttggagcttcttgacgcaagtcgtgtggctaaagaagtcaagcaccctttcaggaatatcctcaagcgcaggaacagatctcaactcgtcatttccattgctctgcaggtttttcagcagttcactggcatcaatgtcataagtctcataatgttttatgccccaattctattcaacacactaggattcaagaacgatgcttctctctactctgctgtgattactggcgccattaatgtgctctccactgttgtctcaatctattcagtagacagagtcgagcagtgaatgctcttactggaa

SEQ ID NO: 44562 - DNA, 1384 bp, Glycine max
  Clone ID: PAT_MRT3847_140238C.1
tctctcacaacgctaaatttcctctctctatttctcttcatttcttttcgttttccttttcgggtagaatttgcaatcttccagaaaccctacctactgattctcttcccatcagattcgatactcaattcgatcaaacggagttagggttttgattctcttcaacctttcgcacaatttaggatgtatgctgatcgggtggatggtggaactcggagatcagtgaaggaacgccttgatgggaattttagcactgattctactcgccaacacagaattacgggaaagaggcagagggaagatgacaagtggaaacatgatctctatgaggatgatgaaccccagctctctaatcgcaaggtcactgctcaagatcttcgtctgaagcttcaaaagaaaggtcttcatcctggaggtcaaactggaaaaagttctgttcatggtgagcgggatctccgtgaaaggctatcagggacaatgactcaacaacctaaaaactatgacccaccaaagcctaaagtggctgctagagctagcagtaaaagtattgatgttgagcctgcagtacatatcaaaagatcagctactaaaaagttgtcccgaaaggctgacgcttcactggatgattttttgcagtcattgggtctcgaaaagtatctcataggttttcaggctgaagaagttgatatgactgcactcaatcatatgactgatgaggatctcaaggccatgggtataccaatgggaccaagaaagaagatacttttagccttggagtctaaaggatgatattttggtcttgtattactataatacccaacacatattggtagaggcttatgtttatactttgcacttggtcaagctttgcctgtaattttctaaaaatccttttggtgcttttattaccatttttaatcttgtctcctcccttgcattgctggaagtggcctaacaagctgttaatatttaaaagacaaaaaagaagcatgaaagctggtttgatgaagatgcatcttaaaatagagtgattgctcctgtgaatataatcataattccttttgtaagctggatggtggtgggaggagatcaggatctaaaaaccaagtgtaatagcatagttctttgattattttcgtttttaatattttccctaacgttttagacattaatcaagttaattttggtgtttagtttgctaaacgccgtcaatctcctgaaactctcttataatgcaattaatggatttgagagtttaccttttgaatcgatctgttgcatgcctcgagcgcaaatgatgtaatgctaggaacagaatggatgatacttttcacccccgaggttcacctcaaaatgcaaagtcacacatggatgaaaaaagaac

SEQ ID NO: 44563 - DNA, 400 bp, Glycine max
  Clone ID: PAT_MRT3847_140239C.1
ggttttttaatttacaaacaaaaataataacacttgataacttgttatataaagattaatgagattatgtaattcaagactacctactaatttttctggttctctactgttaattaaaacatcatatttgacccaactcattttctaagatgagttaaattggcagtattcaatccatgaccaatttacttagcctgtcttatttgatatttattttctgtattttcattattgcattttgtacttcttattgtaaattacattctgaatcaacttttcaaaatgtaacgcaagatgtacgatatacataaccgtcttattttagtttgtcaaaaaaaaaaaaggacttgtaatggggcaagacatgttagcccatggtatcaatgtactttattttatt

SEQ ID NO: 44564 - DNA, 261 bp, Glycine max
  Clone ID: PAT_MRT3847_14023C.1
cccacgcgtacggccacgcgtctttgtctgatgctgagtgcttctctcacgacgacgatgataacttgctctgtacttacgaccttctcgataactgcgccggatggtactaatacgactcactgcatggactgaagtgtggctgaactaatattagctccgtgtacaaacacatgctaaaacatgggggcgcctccacgtcatgctcgcgaacatatgccatgtcaaatagttaggacaaagaacgagatgatcatacta

SEQ ID NO: 44565 - DNA, 800 bp, Glycine max
  Clone ID: PAT_MRT3847_140240C.1
cccacgcgtccgcccacgcgtccgcaaaattgaatctctcttccgcacaaacaacctctcacgccccaaagccacacacaaaacatttaccttttccaacccttcaattccctaaacatttttcttttccttcgaactccaattccctcaccacaacctacaaattatgatctgcctaagacaaaagttattaaaccaagcagtaaaagtgttggtgttgaggctcctgcagtgcagatcaaaaggccagctgacccagctcctaaaaagtcatggaaggctggtccttcagttgatgaatttttgcggtccttgggtctcgaaaagtatctcataacttttcaggctgaagaagttgatatgacagctctcaatcatatgactgatgaagatctcaaggctatgggcataccaatgggaccaagaaagaagatacttttagcactggagtcgaaagtctaacatttagttatggaattgattttttaagctggatggtggtgggaggagatcaggatctaaaaaccaagtgtaatagcatagttctttgattattttcgtttttaatattttcccttactttttagacattaatcaagttaattttggtgtttattttgctaaaccccgtcaatctcctgaaactctcttataatgcaattaatggatttgagagtttaccttttgaatcaatctgttggatgcctcaagcgcaaatgatgtaatgctaggaacagaatggatgatacttttcaacaccgaggttgatatcaaaatgcaaagtcaaacatggatgaact

SEQ ID NO: 44566 - DNA, 1400 bp, Glycine max
  unsure (1)..(1400): unsure at all n locations
  Clone ID: PAT_MRT3847_140241C.1
ggctcgagcgctacctagttggttcctgtcctgggacgaacaccagcactcgctcactcttttcttctaactgcgaccacatgcagacctgataagcactctcgcatttcccaactctctcacaccgccaaatttcctctctctctctctctctctctctctccatttgttttcgttttctttttcgtgtggaatttgcaatctcccagaaaccctatccactgattcttttcccatcaaactcgatactcaattcgattaaacggagttagggttttgattctccgcaaccgttgtcataatttgggttcctgcaccttcaatatcctctcctctgcaaccgaataagtgttcctgtttaggttttgatttgggactaacgcaaaggatgtatgctgatcgggtggagagtggaactcggagatcagtgaaggaacgccttgatgggaattttagcactgattctactcgccaacacagaattacgggaaagcattattttttcaggcagagggaagatgacaagtggaaacatgatctctatgaggatgatgaaccccagctctctagtatggattgattaagttattctcatatgcaagtataagttgctgctcttgttggatgccgatagttcattttatgggttttgactgtgtgttaatgacttgtgaagatcgcaaggtcactgctcaagatcttcgtctgaagcttcaaaggaaaggtcttcatcctggaggtcaaactggaaaaagttctgttcatgcgggatctccatgaaaggctatcagggacaatgactcaacaacttaaaaatgctgatcagccaaagacaaaagttgttaaatcaagcagtaaaagtgttggtgttgaggcccctgcagtgcagatcaaaaggccagctgacctaactcctaaaaagtcacaaaaggctggttcttcagttgatgaatttttgcggtccttgtgtctcgaaaagtatctcataacttttcaggctgaagaagttgatatgacagctctcaatcatatgactgatgaagatctcaaggctatgggtataccaatgggaccaagaaagaagatacttttagcactggagtcgaaagtctgaccatttagtaatggaattgattttctaagctggatgaacctgtttatggacggtggtgggagatcaggatttaaaaaccaagtgtaatagcatagttctttgattattttcgtttttaatatttttccttactttttagacattaatcaagtgatttaaattgaaatgcttgcggcataagctcgtgtaggatttatgtcatggtcattatcatattctctattgacacggataattgggggcgcctttttgttttaattaggattgccttttaaaagncccacaa

SEQ ID NO: 44567 - DNA, 1735 bp, Glycine max
  Clone ID: PAT_MRT3847_140242C.1
cacgcgtccgcctttccagccttccgtaccaaacaaaattgaatctctcttccgcacaaacaacctctcacgccccaaagccacacacaaaacatttaccttttccaacccttcaattccctaaacatttttcttttccttcgaactccaattccctcaccagaacacggtcaccattgttttccctttcaacaacattcgccatcctttcgcgacgaagagaaaaaaaaatggggtgttagggtttcgattctctgcgacgctctccgcattgcgctaccctgcaccttcctcaccatatcgcgcgcctctctcactcccctactgtttttccgctccccaccccctctctctgtgttgcgaaaattagggttcataggtttggggctaattcttcttccgatttcgaaccgagcgcaatcgtaggctcgaactctctcacacgctaaatttcctctctctatttctcttcatttcttttcgttttccttttcgggtagaatttgcaatcttccagaaaccctacctactgattctcttcccatcagattcgatactcaattcgatcaaacggagttagggttttgattctcttcaacctttcgcacaatttaggttcccgcaccttcaatcctctctcctctgcaatcgaataagtgttcgtgtttaggttttgatttgggttttggttcatttgggactaacgcaaaggatgtatgctgatcgggtggatggtggaactcggagatcagtgaaggaacgccttgatgggaattttagcactggttctactcgccaacacagaatcaccggaaagaggcagagggaagatgacaagtggaaacatgatctctatgaggatgatgaaccccagctctctaatcgcaaggtcactgctcaagatcttcgtctgaagcttcaaaggaaaggtcttcatcctgcaggtcaaactggaaaaagttctgttcatgacgtgcgggatctccgtgaaaggctatcagggacaatgactcaacaacctaaaaattatgatccgccaaagccaaaagttgttaaacctagcagtaaaagtgttggtgttgaggctcctgcagtgcagatcaaaaggccagctgacccagctcctaaaaagtcatggaaggctggtccttcagttgatgaatttttgcggtccttgggtctcgaaaagtatctcataacttttcaggctgaagaagttgatatgacagctctcaatcatatgactgatgaagatctcaaggctatgggcataccaatgggaccaagaaagaagatacttttagcactggagtcgaaagtctaacatttagttatggaattgattttctaagctggatggtggtgggaggagatcaggatctaaaaaccaagtgtaatagcatagttctttgattattttcgtttttaatattttcccttactttttagacattaatcaagttaattttggtgtttattttgctaaaccccgtcaatctcctgaaactctcttataatgcaattaatggatttgagagtttaccttttgaatcaatcttggatgaaaaaaaaaaaaaaaaaaaaaaaaaaaaaaaaaaaggggcctagaggatccaagggcttagtagcggtgcgcgacgtcaagcgcaaatgatgtaatgctaggaacagaatggatgatacttttcaaccccgaggttgatatcaaaatgcaaagtcaaacatggatgacctt

SEQ ID NO: 44568 - DNA, 1069 bp, Glycine max
  Clone ID: PAT_MRT3847_140243C.1
caaaaaaagtaggaggagacagaagacacagtggaacagcgaattttttattttttggtcaaagcggggtctttagcatgtttcgagggatgatgagcgtgaaggctcccatgggttggtgtctgtgtttcaaaccaaacaatattacaaataaggtgcgaacgccacaacaccctcgtagccgccaaggtatgcaccaacataacaactttccttcgcattagccctaccctagtagttacctttactccttcattcgccgcatctctctctccgtacctgatatactacctctattaccagtgtgctccgtactgcttccgagactaacgcgatggcgcttactttcgaggttcttggcagattcaaccgtgctcgcgctgcgaggttgagactccctcattttgtgtgccaaactccgttgtttatgcctgtgggcacacaaggaacaataaaggcattgacaaatagccagcttgaggatattggttgccaaataatacttggaaatacatatcacttggcccttcgacctacttctgagcttcttgatgaagttggtggtcttcataattttatgaattggaaacgggctctgcttacagactctggtggctttcaaatggtttcactgttgcatcttgctgatatcacagaaaaaggtgtgacatttcagtcaccagtagatggaaaaccaatgcttctaacacctgaggaatcgattcaaatccaaaaccgaattggagcagatatcattatggctctcgatgatgttgtaaagaccaccattactggtccacgaatagaggaagccatgtatcgaactcttagatggatagacagatgtatagcagctcacaagagacctcatgatcagaacttgtttggtatcgtgcaaggtggtttagatcccatattgagggatatctgtgtcaaaggtttggtggagcgcaatttgcctggctatgctattggtggtctttcaggcggtgaagataaaaattcattttggcgagttgttgctcagtgcacccctgctttgccagaggacaaaccacgatatgttatg

SEQ ID NO: 44569 - DNA, 535 bp, Glycine max
  unsure (1)..(535): unsure at all n locations
  Clone ID: PAT_MRT3847_140244C.1
ncnanncgnncgcttttttttttttttttttttttttccctatttttttttttttttttttttttttttttttttttttttgggggaaaaaaagctttttaaaaagagtttttaaacggttaaaaatatttggggggaaaacccaaaccctgaattcctaaaaaaaaagggaaatctggggaaaaaaaaattaaaaccccgggggattttgggggagggcacagtaccaatagcccttaaaaagaaccctgggtttcctaagaaaggtgaaaaaaaccttggcgggaaaaaaggtcgggaaaatgngaataaaaattctcctttggagcgggggataaaccgggggttctttaaggaacctgttttagaaaaggcggggatagctttttaaggtttccaaagaaatcgggaccaaatggggggaaaaagccggggagtatatctggcaacttttttgtttggggaaaaccacggccacccccttttttcacaccaagggatgctgaaacttggggattaaaaaacgggaaaaccc

SEQ ID NO: 44570 - DNA, 358 bp, Glycine max
  Clone ID: PAT_MRT3847_140245C.1
ttccaaccttgttagatgcaatgggtatatattgccgctaatggttctctgaaaatggaacgggctaactgtttcactcttatcaggttccaacttcatgtagcgttcaacatctgtctcatggctattgtatagcatccaattactgagcgccgaagatcctacctagtgtctcatatcacctgtgtcaccactaaataccgatctgtccatttaagatcgtagactttatgaatcgaggagcagccaaagagcttgggtaaggaccgagaaagcatataataccctgggggtgcttttaataacttcgtacactataacggccgatgatcattccgtcattacatttacgaagtac

SEQ ID NO: 44571 - DNA, 306 bp, Glycine max
  Clone ID: PAT_MRT3847_140246C.1
cttaaatggggggtttttttaaggaatttttttttttctccccattaatatcgaattagaaaaggaaaagggccgaatgaaattcatccagaaacgccaaggtaaccaaccaggccttaaagtcaggataaaaaaaaaccccacatcagaggcggaaaactaaccgccattcatttacaccttgtgggcctacacattatgtacaaacccaaaaaactataaaacccaataaccccaaaaaccgacatctcaatggttgaaaaaacaacagggaatcctaacttgggaaaaatagatgacacccca

SEQ ID NO: 44572 - DNA, 587 bp, Glycine max
  Clone ID: PAT_MRT3847_140247C.1
atctgcattaattatttcatgctctggttacaggttttgggctttggtttgttgtgggtatcggtgcctatgttgtttatgatgtggtttcgattctctgtatatggttcctatggggttggatgttttgatttggtgctgatagaatggcatccacggaagaagccaaacaaggacggtgcaggttgcgtggtttgacactgaagaaggagaagattcagggaaaagtcatgcctgtgtagagaaaaggatctattttgattaaaaattatttgaagataaagctttctgaaaaagattaaaatctgggttgtgtgtgtttgacaatgaagaagattaagattcaaggttttaacttatatcgattaagaacctaattaagtgtatctttactattttttttttaaaaatgcttactggtaataacttgctataaccagtaaaatttataggtccaccatcatttgagtaatcgggtgcaccagagaactcgtcaatttcatgatgtactcttcaagttcagaatctatagagcacttattcttgtagaacaaggcaacaccttatgaaaattttatttggggttc

SEQ ID NO: 44573 - DNA, 173 bp, Glycine max
  Clone ID: PAT_MRT3847_140248C.1
tcggatgcggctatggggagagacgcaacaaattcgaacaccctgcgccgaagccggtgccaaaaattgcgcacggcagcggacgaccggcggcggaatggggccacaaagagttggaagaagtggggaacattcggaagaatttgggacccgccaagtaccaagagcagggg

SEQ ID NO: 44574 - DNA, 441 bp, Glycine max
  Clone ID: PAT_MRT3847_140249C.1
cttgttctgaatgattttactacaaatttggcatgcctagtagcaatgattgttaaagtttctttgatttggtgttttattgcatgtctaaatactactatactagtcatcctttgctggtttaaatggagcatggattcttggatcttgatttattcagatcgaatctgtttttgatttttgcgatcttacattattgacaagatgattaagtacatgaatatattgctaccaatctctctgctgtaataaataaatatgctttcttatacatatgttcagctgcctgcacatatagatatgataaagagatcgcgtggtttatatttgtatattactgcttttgcgctcatagttaattttatatccttctcagactgcagagatgcctggtctctataaagaaggcgagcactatcttagtggctgagcaggtggcat

SEQ ID NO: 44575 - DNA, 630 bp, Glycine max
  Clone ID: PAT_MRT3847_14024C.1
gaattcggcaccaggaatagaaagaaaagcgcaatgttgttacttgttgaaatcgaaaaagtaaagtgtttccattgaatcaatggggttatgggaggccttcggcaattggttacgcagctgatcatgacaatttatctgtctctaaatgaacttcatgacttgttgagcaaaccttctttaagtgggattcctatgcttattttgggtaataagattgacaaacctggggcattgtctaagcaagacctgacagagcagatgggactgaaatgcatcaatggtagagacgtttgttgcttcatgatctcctgtaaaaactccatcaacattgatacagttattgattggcttgtaaaacattctaaatggatgaactgaagcttgagttctgccctattgatctatttgtatgttgtattacagatgaacctagctgattgaacttctgttggtgtgatactagtttttcttttcccttttttgactagcttacaccaaaccagacaacatgtgatttgatatgtacattctaacgaattacatgtgagagttgtgaattataaggtaagacaattgttaatgctacatatgcaatggatttgaataaacaattgttttcataatatt

SEQ ID NO: 44576 - DNA, 731 bp, Glycine max
  Clone ID: PAT_MRT3847_140250C.1
gtgctaagcctccaactagggagctgtttctgctttgcacatggttcactgctttcacttggctggttttcccaaaggcctaatcaactgtgtcactggaaaaggctcagaaattgctttactggtggtgatactggcatttcaatttcaaagaaggcaggcatgattcctctgcaaatggagttaggaggaaaagatgcctgcattgtacttgaggatgctgacctggatttggttgctgcaaacattataaagggaggcttttcatacagtggtcagaggtgcactgctgttaaggttgtcctggtaatggagtccgttgccgatgctttggttgagaaggtgaaggctaaggtggcaaaactaactgttggaccaccagaggatgactgtgatatcaccccggttgtgtcagaatcatctgccaatttcattgaaggcctggtcttggatgctaaggagaaaggagcaacattctgccaggagtacaaaagagaaggcaatcttatttggcctttgctactggacaatgttaggccagacatgagaatcgcatgggaagagccatttggaccagttttaccagtaattaggatcaattcagttgaagaaggaatccatcattgcaatgctagcaactttggacttaggggatgtgtcttcacaaaggatgtcaacaaagcaataatgatcagtgatgcaatggaaacgggaacagttcagataaattc

SEQ ID NO: 44577 - DNA, 1457 bp, Glycine max
  unsure (1)..(1457): unsure at all n locations
  Clone ID: PAT_MRT3847_140251C.1
gtcgacccacgccgtccgaaaaattaaaccaaccatactacacagacactcctcctaaccttaaataattctcctctcacccttataaaaacactcattttaactcccacttttgcatttccacctatctatctatccatctatcttttctaacatggctgctgggactggactctttgcagagattttggatggagatgcgtacaagtactatgctgatggagtgtggaagaaatctgcttctgggaaaagtgtttccatcatcaaccccactaccagaaagactcaatacaaagttcaagcttgttcacaagaggaggttaataaggtcatggacttagcaaaatctgcacaaaagttatgggcaaagaccccactatggaaacgtgctgagcttcttcacaaggcagctgctatccttaaagagcacaaaactccaattgcagagtgcctggtgaaagaaatagcaaagccagccaaagatgctgttatggaggttgtaagatctggggatctggtttcttacactgctgaagaaggtgtaaggattctgggagagggaaagttcttggtgtcggatagctttcctggaaatgaaaggacaaaatattgcctcacatccaagattccactaggagtgattntagccattccaccttttaactatcccgtcaatcttgctgtttncaaaattgctcctgccctgattgctggaaactcaattgtgctcaagcctccaactcagggagctgtttctgctttgcacatggttcactgctttcacttggctggttttcccaaaggcctaatcaactgtgtcactggaaaaggctcagaaattggtgatttccttacaatgcatccaggagtgaactgtataagctttactggtggtgatactggcatttcaatttcaaagaaggcaggcatgattcctctgcaaatggagttaggaggaaaagatgcctgcattgtacttgaggatgctgacctggatttggttgctgcaaacattataaagggaggcttttcatacagtggtcagaggtgcactgctgttaaggttgtcctggtaatggagtccgttgccgatgctttggttgagaaggtgaaggctaaggtggcaaaactaactgttggaccaccagaggatgactgtgatatcaccccggttgtgtcagaatcatctgccaatttcattgaaggcctggtcttggatgctaaggagaaaggagcaacattctgccaggagtacaaaagagaaggcaatcttatttggcctttgctactggacaatgttaggccagacatgagaatcgcatgggaagagccatttggaccagttttaccagtaattaagatcaattcagttgaagaaggaatccatcattgcaatgctagcaactttggacttcagggatgtgtcttcacaaaggatgtcaacaaagcaataatga

SEQ ID NO: 44578 - DNA, 306 bp, Glycine max
  Clone ID: PAT_MRT3847_140252C.1
caaatactctctcttggcattatgtgtcccttctctctatctcttgctcgatattttccaaccaaaataaattttggggccaaacgtagctaggcacggctgctatgaatggcaagtgagatatttctttgatggagagaaggaggcaggaattgcatgtgcttggtaaccaaaaccaaacaaagccttatgaagtactttgtgggatgatgcgttttataggagacagcattgaaatccaaaactgttgtccctagacaagacctcttgctttggataacgccacacagatccaatggcagagct

SEQ ID NO: 44579 - DNA, 497 bp, Glycine max
  Clone ID: PAT_MRT3847_140253C.1
gcgcccacgcgtccgcccacgcgtccgcccacgcgtccggtcagtctcgaaaaggattacccttaccgtggtgatgagggtacatgtgacctaaataagaaaaatgctattgttgctattgatgactacggatggcttcctaccgaaaatgagacaatcttgaaacggagcattgcaagtcggccagtggtcgtaattattgcaacagacgacgatgaatttcaatattatgaatcaggtatattcaaagggaaatgcggtacaaaagtaaatcatgctgtcctgcttgtggggtatggtacagaaaatggtgaagattattggatagcaaagaattcatatagtgataaatggggagataatggctatatcagaataaaaagaaaactgagcacttgtaaatttggaatcgagggttactatcccattataagagtcaccgatcaacaagcccccaaatattcgtgacaatggcatcggctaactgagcccattga

SEQ ID NO: 44580 - DNA, 369 bp, Glycine max
  Clone ID: PAT_MRT3847_140254C.1
ctccccgcgtgggtctctgtgttcaatacgggggtggcgtttaagaaaacccgagcccagccgcttctcagcatcaccaaaatgtccaattaccgcatttgctgctccgagggccggtctccgaacccgacagaagccgacattgctccggaccccggagacaaccgcagggtcctccacaagaggaccgccgtgttcccgacggagctccgttcgacaccaccggccggcagcctcctccagaggctccgggaaatggacatttcgaagagcaagatccgggtcgacggcctcgctccggcggagacaggatcaccggaggcgccggaacacgtgaggaaggtgaccagagcggtgcatatcgaaacg

SEQ ID NO: 44581 - DNA, 2043 bp, Glycine max
  Clone ID: PAT_MRT3847_140255C.1
cttacctggctccttacataaacgacgcatgttctcacacaacaccaaaccatcacccagaaaaattaaaccaaccatactacaccagacactcctcctaaccttcaataattctcttctcacccttataaaaagaaactcattttaactcagactttgcatttcaccttatctatctatcttttctaacatggctgctgggactggactctttgcagagattttggatggagatgtgtacaagtactatgctgatggagaatggaagaaatctgcttctgggaaaagtgttgccatcatcaaccccactaccagaaagactcaatacaaagttcaagcttgttcacaagaggaggttaacaaggtcatggacttggcaaaatctgcccaaaagttatgggcaaagaccccactatggaaacgtgctgaacttcttcacaaggcagctgctatccttaaagagcacaaagcaccaattgcagagtgcctggtgaaagaaatagcaaagccagccaaagatgctgttacagaggttgtaagatctggggatctggtttcttatactgctgaagaaggtgtaaggattctgggagagggaaagttcttggtgtcggatagctttcctggaaatgaaaggacgaaatattgcctcacatccaagattccacttggagtgattttagccattccaccttttaactatcccgtcaatcttgctgtttccaaaattgctcctgcgctgattgctggaaactccattgtgctcaagcctccaactcagggagctgtttctgctcttcatatggttcactgctttcacttggctggttttcccaaaggcctaatcaactgtgtcactggcaaaggctcagaaattggtgacttccttacaatgcatccaggagtgaactgtataagctttactggtggtgatactggcattgcaatttcaaagaaggcaggcatgattcctctgcaaatggagttgggaggaaaagatgcctgcattgtacttgagatctctgacctgtgtatgaatgacgtccctttataatgtttggggcaaccaaatccaggtcagagatgcactgctgttaaggttgtcctggtaatggagtccgctgctgatgctttggttgagaaagtgaaggctaaggtggcaaaactaactgttggaccaccagaggatgactgtgatatcaccccggttgtgtcagaatcatccgccaatttcattgaaggcctggtcttggatgctaaggagaaagtagctacattcgacatgggattcgcatgcgaggagccaaaagagaaggcaatcccatttggcctttgctactggacaagttaggccagacattgaattgcatgggaagagccatttggaccggttttaccagtaattaggatcaattcagttgaagaaaggaatccatcattgtaatgctagcaactttggacttaaagatatgtctccgcctaaagggatgtcaacaaagcaataatgatcagtgatgcaatggaaacgggaacagttcagataaattctgccccagctcgtgggccagatcattttccctttcagggtataaaggacagtggcattggatctcaagggattaccaacagcataaacatgatgaccaaggtcaaaacgactgtgatcaacttacccagcccttcctatactatgggctagtagtgtaatacacacatgcatgggggaacatcattatatagcatgttccataaatcatagtgaacgtacaaccgtgtgagttcagcattgcattgtcttttgcagctgggaatcacagagatgaataacgagtttgattgatatgtcgcatagctacttcatatgtgactacttgttgtactcgtatttaggatgatatgaaactgaattttatcttgtgccttatcattaaggaatatcattgtgttccaattaaattgaatgtcaaatcaatgaaatgagggggaaaaacattggcttctgaaaactggagagggcagaaggggcggaggccgccagggcgt

SEQ ID NO: 44582 - DNA, 222 bp, Glycine max
  Clone ID: PAT_MRT3847_140256C.1
ggctcgagcaaatgacgtcatttctgttagcgaagacttgtacaaggctatgttcggcgtgtcacatgagcggcagtgtggtcaggaaatgtactatggaggtgatgatgttaacaggctggtaaccgggtgaaaggctgatgggaaaggactggacttagggtgaaaccaagggctcgattgacagtcaaccatgcgctgctcctgtgtgctcgttgtact

SEQ ID NO: 44583 - DNA, 844 bp, Glycine max
  Clone ID: PAT_MRT3847_140257C.1
tttttgctatgtgtatcagggttgaattttgcacccaacggaaacttcacttcagaagagtcttcccctgaaactcttggaggaccctttggtggagtactatttgaccttgattttccatgggcaaaggaagaccgcttccgtttaggcactggaaccagggtcacttctgcttttcgttttttaattgttgcacactctggatccttctgcaacttcttactcaaggaattttcatgaccattacttgcttcaaaattagtggatgatcccaagttatctaaattaatttctctgaccatattcaagatatcgatatcattttcggccttttttgtttcagctggcacagcctttttctttttcacctttttgcccttggttccctgagattttatgtcctttattattttccccaggggcatttcatttttgtctttttcactgtcctttaaagagtcatccttagctaattgggatggaaccatttctaactcaagtgatataaagtgagccaagacacttccatcagccaaccaggatttcactccacttaccatggggtcactttccttctcacatgctttgtatagcattggaggtagagaaactaaaggagacaatccttgcaaatcaacatccttctgcactagtcgcttagtgattgctaacccaaggtcacatatggcatcgaattcttcgattttgatgaatcaaccacatcttcagattgcttaatactccaaaagatagaagtgatggtagatataatttcgttctctttgttaagagctacttgtgacttgccatcttcaaatctttgcattagcattttcactatcat

SEQ ID NO: 44584 - DNA, 149 bp, Glycine max
  Clone ID: PAT_MRT3847_140258C.1
cgggggttttggatatgaagatatatattttctacttggattcataaaatcaaataggagggtaatccctactttacggagtaacctgatctagctctcaaaaaaagcagtcgatctagatgatccaatctaacttacacattcaaact

SEQ ID NO: 44585 - DNA, 420 bp, Glycine max
  Clone ID: PAT_MRT3847_140259C.1
atatttttttttttttttttttttttttttttttgttaattttttattgttttttttttttttttttttttttttatttttttttttatttttttttgttgtgggaaagaaaagataaaaaaccgggccaaaatccaaacggataaaaaaggcccctattaattaaaaaagggtacagggggtttaaccgggggtttttaaaaaaaaatttttttttttttaagggaaaaacgcttggggaaaaattgcccttcccaaggggtgggggcccggggggaacaaagaaaacacccaagttctccaaaggggcaggccgggtaaaaattgattggtaaaaaaaaaatcccaaaaaagacacaaaaagcgggcggggggggttaaccggaaattccggacgggaatttgggaggggaaccattt

SEQ ID NO: 44586 - DNA, 676 bp, Glycine max
  Clone ID: PAT_MRT3847_14025C.1
aaagcttatacatgccggtaaagttttggaaaacaataaaactcttgctgattacagaataacgtttggtgaaatccctgggggtgttgttacgatgcatgttgtagtacaacctccagtaactaaaaaaaaaacagagaagaataaggaggacaagcaaaagatgaattcgtgctcatgcactatcctttagtttaggaagcttaccttgtggttgcccttaaagataaggttacattttttctatttttaactattgggatgatggctaggcagtgcctatccaatacctcgtggttacctttttaagacatgtttgtctttgtccaatcgttattgcttgcttcttttaatgttcaattcatttctagttactgtcttcggagtgaaaacagatattagcattgtaaaattctgaccccaacaagtacaataagagtgttgcagggcacagaccttggctacaacttgtctagactatatcaggctgcctcaacattcgatgatgcatattgtttgaaagtaaataatttgacaaaccttggctaagcatcaattggcattaagtgtaccccttcacctcttaatggcacaattcagccaacaatgtgacagtggacattatttaatgattccttgattgattatgtttgagtttaaaaaaaataaattaaaa

SEQ ID NO: 44587 - DNA, 293 bp, Glycine max
  Clone ID: PAT_MRT3847_140260C.1
tttatctgccttttgacgatggttaagatttgggacgttttttgttgggctatccaaaataaagataaaggatattagaatcacatagagccacatgggccccttggtatactgatgaagccgttatatggagacttataagaggggtggccgttctaagggttcaaaacatctcttacgattgattgctccgcattggttgttttttggggtcagctaaattcaaggtctgggccctagtttaacaagatgtgagatggggaaaactcatgtatcacgaaattaattcactt

SEQ ID NO: 44588 - DNA, 325 bp, Glycine max
  Clone ID: PAT_MRT3847_140261C.1
ctggggttgttttttttttttaatgaaatcattatccatgtgtcttcttttacattatactagtgaaacaaggaagctcacatgcggcacagggaataattgtgcaaataagctgggcctgccacacaaacatgaatggcttccttggaacccttgtcttgtcggggggggcgcgcaggtgcctgtgccctggctgggggggctggcggcgtgggcggctggggggctggggcgggtggggcagcggcgcgggtggcggcggggtggagggggggggtgggcgccgcaccgggggggcgggggggggggggggccgggggcgggt

SEQ ID NO: 44589 - DNA, 302 bp, Glycine max
  Clone ID: PAT_MRT3847_140262C.1
ctgtccacagtgcagttttgtgattttgtcagagtctaggatcgttagagagctccacataatggtatgttgaagtgtaatgttgttgtcagtttatttaaagattcaacctaaatttggttaatttggtctttatatcagcatgggtcggatgactcctaggattccttattctggaatatcatgtttttttgtctttccatcaatgttttttaaggttaattttgttagaagacaagtcaatggttcatgctctttttagagttgcatcatctttatctagttttcatgttttgtagtta

SEQ ID NO: 44590 - DNA, 630 bp, Glycine max
  Clone ID: PAT_MRT3847_140263C.1
attacattacacatcatttttctctctctaatcgttcatggaccaaaatatgttaccattatttgttcttttagcttttcccattttgctattattcttcagaaaacgcaaaacatctaagaagccaacctttccaccagggcctagaggccttccctttattggcaatctttatcaactcgatgggtctactctttgattgaaactctatgaactctcaaaaaaatatggtcccatcttttcccttcaactaggttcaaggccagccctcgttgtttcctcaccaaaactggccaaggaggtaatgaaaacccatgaccttgagttctgtgggcgaccctccctcataagcacaatgaagttttcatataatgggctagacatggcattttcaccctatagagattattggagacacactagaaaaatttccatcatccatttccttagcctcaagcgtgtcttaatgttttcctcaataagaaaatacgaggttacccaattggtcaaaaagataacggaacatgcttcttgttccaaggttaccaacttgcatgagttgctcacgtgtcttacgagcgctgtagtgtgtagaactgctttgggtagaagggacgaaaaagaagggat

SEQ ID NO: 44591 - DNA, 420 bp, Glycine max
  Clone ID: PAT_MRT3847_140264C.1
tcaatatctgtggtccaaagaatgtgagcgcgtgacagagttagaatcacgtgaaaaggaaaatgatgaattggctcgggtgccttgggtaccttcaccgtcttaccactaccagttctcccctgttgatgattctgacaacacaaatgcggagttgatggaagctgatgaaacgggatccatgatgatggatattgaacaagaacatgacactgacattgacgctaaaatttcaacatcaagcattcactatccaacgacacacggtggaataacagaggggttccagcaacactgcttgttaccacagcttcctcacaacacctcaacccccatcacatggacccgctgaaattttggtgggcttttttttttttttttgatatagtgtttaagtatatcctactattttttttttac

SEQ ID NO: 44592 - DNA, 395 bp, Glycine max
  Clone ID: PAT_MRT3847_140265C.1
cgagatggggcgcctaggccatcgttgtgagatgtgtgacttgcttatagaacgagcaggctttaccgggttgatgtgctaatagctggaatatctggagaaactggagatacatgaagatagttactattagtgtctgtatcatgtgctcaggctatggcgctgctgatgtatcatcagttgtacgaggatgtgctgcgatatttgttcgtacttatgcctgagcgtgaggaaagtgaattgtatcctatgggcgtgggttgaagaaacgtggcagggactgtcgatttggaagggtctgtctgcgcctagggactgcaatgaccgcagatttatttcctgacagtgaccagcgtgcttaccagctatgcctataccgagtcgtataagacctt

SEQ ID NO: 44593 - DNA, 259 bp, Glycine max
  Clone ID: PAT_MRT3847_140266C.1
gtatgataaaaggcaatcagcattcatacaaggcaggcacatgctacatagcatgatgattgcaaatgaggtgattgacgaagccaaaagaggccaaaaaccctccataatgttgtagtgttcattatcgctccatgttgcggatgattaaacacgatctttagatccctttttactggaaccatgagcatggaactatctctgtttttttttcagtacctctggtacttttataaatatattatttttgctgatcaaa

SEQ ID NO: 44594 - DNA, 474 bp, Glycine max
  Clone ID: PAT_MRT3847_140267C.1
ccattcaacatattttttcattcacatttaccaaataaggattgacatgcctacaagaatggaagagggatagtgtcagccaaaatcatatacaatagaagttttgatggcaactgaggcaagtgattttcacttacatattttataccagatgcctaatgatttgttttttctttttttttttccatcttcacattatataacacgtatttggcccccataaccatagtgattaaaaagcccttcatcttgtcgccaatttgctctaaccttcacttcaatctcaagataaactttcttctgtaaaaaatcttcaacatcaaggcgggcagccgttgcaagcagtttcaaagcctttccttctcttccaataaggataatctctctgagtgtttttctcaaccaaaatctctacttgggatgtattctttttgcatctcgggccgagcttttatagttttacaaacattttac

SEQ ID NO: 44595 - DNA, 255 bp, Glycine max
  unsure (1)..(255): unsure at all n locations
  Clone ID: PAT_MRT3847_140268C.1
attctttttttttttttttnnnnnnnnnaaaacaccaacaaacaaaatatataatttaaaatatgcaagatatgaagtacttatacatccaaaacttacaaagtctaaaccaacaaaaagagattcggcacaacaaccggagcatatcctacttggggtttgagcnannaaagaccccacgtcctttgaattccaggatatgctactgacttcgggaattcctttgtcgctagggtagactggggtgctgaggca

SEQ ID NO: 44596 - DNA, 242 bp, Glycine max
  Clone ID: PAT_MRT3847_140269C.1
acaaaccctctctccctttaccacccttttctcaatctctctctaatggtacctttgtaaaactctcaccgactcaatatcaacaccaccaccatcatcatcattatctattccaatctctataaccttcaatcactcaaaaccttaccattaaaccaaatgaatttacccatttctaacaacaattcttcctaataaaaacttcaaattcttcaaccttttcttaaccaatctcacaacat

SEQ ID NO: 44597 - DNA, 272 bp, Glycine max
  Clone ID: PAT_MRT3847_14026C.1
agctcttaacttatattcggaagggtccaaatggtccccaaaacataccctaactgtccatgtaagagaattccttgcccaggctttttaaacgtggaatatacaaataccggaacgttagaatttctaatcaaaaaacaaggatgagcaccacctagaccattgcattattacaaacttatactgcaagtctagtgcaatcctatactccagagcgtaagaaaaacctgttactgcgcgcattagttacccgacaacaaccactggcccag

SEQ ID NO: 44598 - DNA, 415 bp, Glycine max
  Clone ID: PAT_MRT3847_140270C.1
tgtcggctgcgagaagacgacagaagaaggggggcataatttaaagaagaggggagggaatgggaattgactgaagagaagaatgaagttgaagtgactgaagagaataatgaagcggaagtgatagtataagagaagaacgaagttgaagtgactgaagagaataatgaagtggaagtgacccaagggaagaaagaagtgggagtgatcgaatagaagaagggaacagaagtgacagaataaaataaagaactggaagtagaattgaggggagagaataacgaaagtgaattgaaagaagaagaaaaaggtgcggaagtgactgaagagaataacgaagtttaagtgactgaagagaagaatgaagcggaagtgatagtataataagaaaaggaagtttaagtgactggagaga

SEQ ID NO: 44599 - DNA, 271 bp, Glycine max
  Clone ID: PAT_MRT3847_140271C.1
cggctcgaggtctcgatacccgtcatccttgagtactaccgtaccggtctaaaataccagtaacaggtagctcgctcatagacttaatggagtctgcaatgacaaacatcgaaaaatatcgatgagctaccatcaataacggctaaacgtctatcacgaacctaagtaaaaaggcctcttgcagatccttatcctcgtccttcagggaataaatacctacccgtagacccattcaagttcgctcctacaaattatcgggagcacaaactca

SEQ ID NO: 44600 - DNA, 248 bp, Glycine max
  unsure (1)..(248): unsure at all n locations
  Clone ID: PAT_MRT3847_140272C.1
tggaacgggacgaggcacacattgcttctgctaaccctctctgggctctccagtgaagcggagtcggaggagggaaacatttaagtaactgcaagggctgcacggtgggctgcaaggtgcggatctagaaggctaggtagcagtcggtgtgggacaatacggagcgaggagggaaaggctgcanagaatgcgggcgggaggaaagctgaacaggagaagttggagaagctgactcgcgaaggtcctca

SEQ ID NO: 44601 - DNA, 407 bp, Glycine max
  Clone ID: PAT_MRT3847_140273C.1
caaagaattgatatttttttacatccacttttctatatggcaaagggtgaggcgttatgtttacggtacagaccccatttatttattacaacgcttgaagcaaagaaactcttggtgagcacctaccatggccgaacaaggagctttacttcccatgaccctgttgtttcctcatatggaaaaactcagttcatttattgacaactgagtgacgatatctatccttggtatggaggattgaatgtttttttggtacaatgaggatttaatgttaattgattatctttcacggacttcggttaccgcatattttagcttaatttcttatttaaatatttctatagatgatggtaaaaaaaatatattttttcactatttattatgacatataagtaaaataaaatata

SEQ ID NO: 44602 - DNA, 107 bp, Glycine max
  Clone ID: PAT_MRT3847_140274C.1
ggtaatatcaaaaacatcttccaaggggacgggagttgtcttgcgctcaattagactagaaccaaatatttaccccgcgcgctttcttcctatgttacatacacacc

SEQ ID NO: 44603 - DNA, 721 bp, Glycine max
  Clone ID: PAT_MRT3847_140275C.1
cttattatctagtgagatggcatctatcatctgttctatttgacttcatccggccgattgccctggtcaagatacatgcctacagatgaagattgcactcctggctaaggatgctataggagttagtatttattttacattggctggtcatgctcattcatgtccggttgtctgtgctttgtgtattttacacccgctgtaaccctgctttccttgtactgaatctgtgagaagtgtgtgttcttgcgggttagcaggtccattctttgaggccatcttagttattggttggaactggctgagaggacagctgatagaagtgcttgctttaagtcagtggctttttaagttaacaggcgttggtgaaacatgatacacatgccctccctagctatgggaaagaaagggtattgttgttaacttcctttaaacctagcaacgtttatccgttagtaagagtttgttattaactgggtagcagcagtccgagagccaaagaatatttatgtcattggggttggggcagccgggcgttaatccatcacgtagtataatatgctcagcttgttctgtttaacgtaggttgaagtatatagctggacaagtgaatttttgtgatgtcatcccttgccgtgttttaaacttgcggaaactgtgttgtggtaaattaatgattctataaaatccaagtactgctgcagtcaatacattgataaaaaaa

SEQ ID NO: 44604 - DNA, 2270 bp, Glycine max
  unsure (1)..(2270): unsure at all n locations
  Clone ID: PAT_MRT3847_140276C.1
gggggcccctaaaaaaaaaattttttttccaacccccgggtttaaaaattggtttttttaaaaccggcccccccttnntttttttttttttttttttttttttttttttttttttttttttttttttttttttttttttttttttttttttttttttttttttttttttttttttttttttttttttttttttttttttttttttttttttttttttttttttgcatattgtactacgtgatggattaacgcccggctgccccatgacataatattctttggctctcggactgctaccctaaaaaactcttactaacggataaacgttgctaggtttaaaggaagttaacaataccctttctttcccatagctagggaggcatgtgtatcatgtttcaccaacgcctgttaacttaaaaagccactgacttaaagcaagcacttctatcagctgtccctcccagttccaaccaataaaaagatggcctaaagaatggacctgctaacccgcaagcacacttctcacagattcagtacaaggaaagcagggttacagcgggtgtaaaatacacaaagcacagacaaccggacatgaatgagcatgaccagcaaatgtaaaataaatactaactcctatagcatccttagccaggagtgcaatcttcatctgtaggcatgtatcttgaccagggcaatcggccgatgaagtcaaatagaacagatgatagattccatctcactagataataagccaaaattaccagaaagtcaggaaagaagttcacacctaaaacaagtacgaacatctcatgataacaaaccttaataaactatatcaaactagtttagcacatgacaatgtcataaaaataacagagatcacatgactcttttccggggatgagggtgttaaaagaagaggtagggaatctaccttatttgaagattccagtgtgttggtatggtttaaccaaaacaacaaagcagctgtgggtgaattctgtagcctgccacattttgcagccaaacatttctttgtacattgatagacgtgatcatggttcccacttccataatccactcgttaaaacaaattaatgccagtgaaggcaagcttgacttcatattacatgctgacttctgtttcgtaatccatatatcatacccaaggaaaatcaaaaatagacaacagaagcccaaactccatatggcaagtctaaacgttttcacttgggaaatccattccctttccctaaaaagtaggccagcgtgaaagatacataaacacatggtgttccatcaccaagttcctaataatcatagatgtaatagctagaaaataaaatatggccaattccttcagttcaattgcattgcctctgcatgatacttctccaaatcagcatcaagatcatcagcagataccttttcaccacggcctcctccaccacgacctcttccccgtccccgatcccttcgaatgccttgccctcttcctcctggccttcttaatgccccacctcttccttgtccacttcgaggaactccattaaaatttccaatagctccgttacgagcaggagctacaccaggtgtggaaatgtttgttcccacaatttcaatcttcattggtttcccatccaattgaacattgttgtatctctttacagcagctacagcatcagctcgtcgtgaaaatactacttctgctgtaccctttgatctgccactcctgtcataatgaaccgcatgccgtttcaggtcaccaacttcagcaaacaattccttaatatcgtcactggaaacaccataatccaagtttgaaatgtaaagcttagtcccagtttctatggaagccgcacgaccaccttgagcagggtaccccgccgcagccacatgctgatctgcatataaatcgtgctgccacgttgcctccggcgccttagcgggggcataaggtgcggcgcggttggcggcacggttggggagccggcgagtaggtccggatccggagggtcgggtccggccacgtgaacttccggatccagactttttgttgttcttgattatgtcgtcgagcgacatatccatggctgcagacatgtttgctggttcagagatagggtttcgcgcaacgacgaaaggatctgatgagagtgaaagaaaggggaagcttagggtttcgtcgagagagtgagggatggagaagggtgggtagtgtttagagtttgaggtattgagattgggtctttagaatttttagacttccc

SEQ ID NO: 44605 - DNA, 274 bp, Glycine max
  Clone ID: PAT_MRT3847_140277C.1
gggggtggggtttttttttttctttttttccttactttatttgtttttttttctattccccccaaacattttgcccaaaaaaaaaaaacaattccccaagttttcgggaatagggtcccaccccaaaaggggatataatatgggaacccccacaaaaggtttttaaaaaaagggtcccccccctattaaataaccccctctccttataaataatcccccatccagaaaataacatcaaaagaccttttaaaattttggggacccccactcggcc

SEQ ID NO: 44606 - DNA, 753 bp, Glycine max
  Clone ID: PAT_MRT3847_140278C.1
gaacctattgatggagatacaaaatcaggagccctccctattcctgaacctattgctgatagacttggtgtcaattatccatttcctccacatcttgagtatgcttaccctccgcctgatggaaatatattgaccaatattgtgaatgctctaattgctgttccccgcttttacactcaggttctacacttgatgaacaaaatgaacatcccggctccgtttcgtatggcactgcccacacctccattacctccagaggtaccagcaccgccaccacctctacctgcacctactgtaactgtgaatccttggtctgcagatctgtctagtggcgaatctgagatggaatcttcagatgaggtaacatcttcactgctttcagaattggtaacatcctttatgattgaatatgcagattgcctaaatatttcagaattggtataaaacatgtgttttttttatccacctaaaagtctaatgttatgtatttaaggtaatatttcatagatattcacattcctttttatcactgcacaatatacttacactacactttcaagctgttgttctgtttgaatttgaaaacattattactgaaacataaattatttcataagtgattatcaaactataaaattatgatgccattaggagatatctttttcctatctttttagtcaaattgttattactggaaattataacaagtttttaggaggatgaagcaagaataagaaagtctggacaaaagcg

SEQ ID NO: 44607 - DNA, 229 bp, Glycine max
  unsure (1)..(229): unsure at all n locations
  Clone ID: PAT_MRT3847_140279C.1
catgggctgaaatcggaaactaaccggttccagattcnccacnccaaaatcgacggtcaaaactctttcaatcgctggagctttcgagngatgttgaggttaaatggatatgtctctgngctgattacattggagtgtccccatcaaagcatgcnaacatatgttcctcacactgctggtaggtactcagtgaagaggttcaggaaagcgcatgccccattgttgagag

SEQ ID NO: 44608 - DNA, 315 bp, Glycine max
  Clone ID: PAT_MRT3847_14027C.1
gggaaaaaaatattaaccccaaaaattcatatccagttttgacaacatgacctttcctatccaagaatggttttataaggggatggaataaaaattaaatccccagaataacaacaggttacgagccctgaaaatgacaagggttcctcaatcaaaaattttttccccagttgaaaataggtgaaattccaaagaactaaaaacgcattgaaaacccggaatgaaaaacacttttttccagcttttaggacttgaaagatcagaattagcagccttagcagctttaaaaagcttcccagtcagggcaacaccaac

SEQ ID NO: 44609 - DNA, 349 bp, Glycine max
  Clone ID: PAT_MRT3847_140280C.1
aaaacaaaaaaaaaaaaaaaaaaaaaaaaaataaaaaaaaaaaaaaaaaaaaaaaaaaaaccgccgaattcaaaaacacgggaagcaaaaaaaaaaaaaaaaaaaaaaaaaaacaaaaaaaaaaaacatacacccgccccccccccttaatggatcatcccttacaaccccttcccaacaactattttcttctatattgccaccccccaatcttaaaaccccccccgaagtctcacacctataccccttaaaaccccttcccgaaccacacaaaaaaacctgagcacctctacccttatccccaatctcttcaattcccgagagaccccctcacaaaaacctttcccta

SEQ ID NO: 44610 - DNA, 413 bp, Glycine max
  Clone ID: PAT_MRT3847_140281C.1
gggtaaataatgtagaactgaacatgggtttctctttctctctctctgtctgcttcttcactttctctcgattcaatcgaaaaaaatcatggccagaaaattcttcgtcggcggcaactgggaatgcaatgggaccactgaggaggtgaacaaaaaagggactactttaaatgaatctgaagtccctgcagaagatggtgtaaaaggtgtatgtgagccctacttttgggatccttactttagcacaaagtctgctgccccctgatttccatgactcggaccaaaacatgccggcttcgcaaaggtggggcttatactggagaggccagtgctgagatgctaggccactgggcaatatctcgggaccttattggtcactctgaacggaggcatgcttcgtatgaatcaaatga

SEQ ID NO: 44611 - DNA, 139 bp, Glycine max
  Clone ID: PAT_MRT3847_140282C.1
gtcggcggcctgtctcttttatgtgtggtttcgagatcaagaggacaaaactattcgcattaacaggagacagtctatgagaatgttgaaaatactctcaatgataagaactagccctctcacctgcgtaaccggacac

SEQ ID NO: 44612 - DNA, 428 bp, Glycine max
  Clone ID: PAT_MRT3847_140283C.1
cccactcgtccgcccacgcgtccgaccggaggattggggaggtttcgtcacgcggggggtcagagagatctctcagtacttcgattgcttgaagtcgcttcactttcggcgtatgattgtaagggattcggatcttcaagttctagctcgttcgcgcggacacatacttcaagcactcaagctggataagtgctctggattctccaccgatggcctctactatatcggtcgttattgcaggaacttaagagtcttgtttttagaggaaagctcacttgttgagaatgatggtgactggctccatgagcttgctttgaataatacagttcttgagacactgaatttttacttgactgatattgccaacgtcagaatccaggaccttgaacttatagccagaaattgccccaacttaaactctgtgaaaa

SEQ ID NO: 44613 - DNA, 483 bp, Glycine max
  Clone ID: PAT_MRT3847_140284C.1
aattcggctcgacctcgagccgaatcggctcgagagaaagcactctacatacttgaggtgttgtcaacacttccagagggaagaatggctttgaaggagtgtccaaatatcattcccaatgtggtgaagttgctgatgagagtctcagagaggtgcacacaatttgcattgtcaatattgtgggctatttacaagcttgcccctgaagagtgtgcctccaaggctgtggaggctggattggcagcaaagcttctgttggtgattcagagtggctgcaaccctgtgttgaagcaaatgtcttctgagtttttgaaaatgtgcagtctgaattactcaactagcatcttggtttccaagtgtatgctcaccacaacaatacaatgaaagactagagagattttgtttatagcttcatcatattcagtcaaattgtattcatatgtttatgaattttatattattccctcttttttttctttttat

SEQ ID NO: 44614 - DNA, 162 bp, Glycine max
  Clone ID: PAT_MRT3847_140285C.1
ctagtatatcttaataactagtttaagatactatgatgagagcacggttcccattactgttgctgggactagcattcctggacttcaggttctgtctcattgagcattgcttagtggcgtcaagtgaggcccaaatacaacaagtatctccagagctgccat

SEQ ID NO: 44615 - DNA, 835 bp, Glycine max
  Clone ID: PAT_MRT3847_140286C.1
cgaggaaccaaaattaaaagtttgcgatataaagcaggataagttgtgaggttcctttgaaggctccaactggttttggagggggctcctcggttaatggagggaaatttgttcgtgggatataactgaggaagaactggggaaattctgctgttgttgtgagatcacgtccctacggaagtggcgaaataggagggaggacagtctatggggttggtgagtaaggacatacatgatcggcatgccctaaaaaacagccagttgctgcaactacaacctaatgttttgggggaaactcaaagataagttgtgcggtgtcctttgaagaaaaaaactggaactcatgcaagctccacagttaatgaagctaatggtgataaaccaagttccacaggaagtgacaggatagatggagctgatggtgataaaccaagttccacaggaagtggcaagatgaggaggaggacatgctatgagtgtggtgagaaaggacatacatttgcggcatgcccaaagaaacaaacagttgctgcaactacaacctaaagtgtgtaggaaaactcaaacagatcactgttcttgtttcttctagcaaatagtttgattgtagtttataaaatacaatagtgctgcattcataactggtcggatttacagtttcctgcttcccttgttattgttatccttgtttcctcttgaaatgaaaattctgtctttgttataagcaaagaaaagtaggaagagattaaaaagttactactagtttgagattttgttcacagatagatagacaatttgatgcaaattaatagtaaatccaaactttctttttgtt

SEQ ID NO: 44616 - DNA, 513 bp, Glycine max
  Clone ID: PAT_MRT3847_140287C.1
cctcgtgccgaattcggcacgaggggaagcaaccctatagttaggttgatgaatataggggtttatcattacccaccaaaacttgtcagaataatgccccatttgaaaacaggagtgtagcgaacagtcaaatggatcaagtttgttcttctttttttttttatgtattatgaattttatgatactgtgttaattttctagtaggacattttctgtatttgatgaccataaactgataaataatgtattttatatgaacaatctatagcccttatttttttgtttaaattgaatctttcttggtaactaatatgaattttgttagtcttatgttatgagcagtaatttgggctaattggaaatttaatttcaattactgctttgttgtaattgatacactactagcatattggtataattgcttggaattaattatattgaaaaagtactgatatttttatactgtgtctatgctagacaagaagcatatatatatcaatttattactgaaaa

SEQ ID NO: 44617 - DNA, 635 bp, Glycine max
  Clone ID: PAT_MRT3847_140288C.1
gagaaacttccaaaaaataaactcttttccttttctttctccctcctactacttattaagcagctctattctttgccaaattaaaattgaaatccaaatctgaggagaagagtacgggattgcccatgaaggaagataaagtcagtctctttactcttggttcggttactgtgtttgaagtttgaagtttgaagtttgaagtttgaagacacaatggtattcagtcaaagttactagaaaagccaaaccaccgccttgcttaatagtaatgggttatagtaataatatggttgcaggctttgtagatagaagtagcagaagaagaatcaatagccaaatgcgttttatgggggcagtgaagttgagagctcaactcaattatcaagccaagattttcttcactaacaagccggagagatcccactctcacactcctctctatgtatttagtatttactttcaaatttcattgcacaccaaaactcaacagtcatttcttcactccaattcctccttcagagtttgcttctcacgccccaacacaatctctcttagcctctgtgggaccctctcgccattggagactgaacagcacgctccaggttttgccttcattggctcatcatgtctttact

SEQ ID NO: 44618 - DNA, 401 bp, Glycine max
  Clone ID: PAT_MRT3847_140289C.1
gttcttacgcgtccggcttgtttctgggtcttctcaagatttgtgcttctgcctggtggttcggatctaaagtacacagtacacacgaatccattattcaggaactatctgactccatcactagtcgaaatctaatggatcaaagctcccatggttatgcatatagggagggagcaaatgaggttgaacgaactctaaagatggtaactacaggggtaattgatagccaggctggcatggcatgaagaatcaggtgtctggtctagacccaactatgacaatgtcacccaatgtatagacctgccaagaaatcataaaaagctagatgaaaagaccaatggctacattctagtaaatgctaatggtggcctcgatcatatgagatttgggatatgtgatat

SEQ ID NO: 44619 - DNA, 2258 bp, Glycine max
  Clone ID: PAT_MRT3847_14028C.1
cccccccttcgccttgagctcctttctctgttcctaagaggagttatgggggcaaattgaaaacgcattcaattacaacaaacacgttttttttttcggttaatgttgttgcattctcttttccttttgccgtaaacgggggccctcgcttttctcataagccactgaaaaattttgctcctttcgcccctaaactttaacagaggtcgttgttctgtcatatgatggagattggattatgatctaaatatatattatttagtattttaattttgatttcatatttaggaatcaagtgaattgcaatcagaagaaaataaagtctccaatgagaaaaataagaaaagaaagctgaaaacaccggcccagcttaaggccttggagaatttttataatgagcacaaataccccacagaggaaatgaaattagtacttgctgaggagttaggattgacagaaaagcaaatatctggatggttttgccacagaaggttaaaagataaaagattgatgaaagatgaagctgttgctaatgggcgacaagatcgttcaagtggtgtcatccaagatcgtggcagtggacttgggcaagattcatgcggaagcagtaagcatgctgatcacaggtatctggatcctaaggaggttgagagccatggcctctacaatcacgaattgtcagttgcagatatgacccacagacgtaggaaccattatcctgaaaatgttagcggggtggatgacacatcatctgagagcagctcatttttgcaagaaaggttttctcaaggtcaggatccatatgatatggagccttctagacatcttacacctaatggagctcttccacccctaaatcccaaaggtgcagttaagatggggcacaaaccatcaggatatttgaaagtgaagggcgagatagagcatgctgctataactgctgttagaaagcaattaggaaggcattatctggaagatggtccactacttggtatagaattcgatccacttcctccaggggcatttgaatgccaaactgcagatccagctaatgaaccgtactctgttacaaatcctctgctttcgaattctccagaaatctctgctgcaaaaagacaacccagtattagctctagatatgattcatattatactaaatttcgttcccaagattcgcatatggaaggagctgactttggttccttgcatgaatctgatttccaggataaacaagataagaaagcatgccagaatataaaacaaaggcaatctttatacggttataccaatcattttcctggaaggaacactttcccagatttgtatgaagactctactggagaagcatctgcttataatagcaataagagtcatagaatgagcactaaacatggtgttgaggggatgcgatctgattctgcttctaaccatagtgatcactatgaagagaagcttacagttaagcagaaaaccttgatgctgcatggttatgataacatcaatccaaagaatatacaaaggagtgaacatgtaaaatctaaaccttctagttcaatccataattcccgtgttcctatggatactgaagaacgggggttatctgctaggatggcaaaggaagagatgtttaagggggacaggaaagcaaaaaatacatactgcaatgtagatggagcaggaatgctttcaaatgaaattatggttgcaaaacgagctaaagttgacatgcttcaacaatacaatgtgaaaaaatcacctgttgctgagatggaacaaaggaaaattcagagatctgctgcagacttgccttctagctttagcgaggatgaaactgctgacaccaattcctcactggattattaagtgatgttgataaatgctaacaagtgtgtgggatttctctaagccattgggtatgtacagcctaaaatgacacatacattttctctgtaacgtgggaaccattgtttctggcagcaatggcagtgactcgctccatttgctgttttttgtgctcacctatttgcctttgtaaaagaaaaaaaatacaccccaggttattcttttgatgtaaaatctcatttcctgaagctacttgtggtaggtttaatgcagcttatatacttgtcacttgtcttttattgatttaattatggtagtgtgtatggcatcctaatttgctccaatttgatctcttgttttggagtgttggctacttctaatttatgatttaacaatttgatctcttgttttggagt

SEQ ID NO: 44620 - DNA, 274 bp, Glycine max
  unsure (1)..(274): unsure at all n locations
  Clone ID: PAT_MRT3847_140290C.1
gaggttagaacacaacacacttnctctctctcagnctctctctctagaatcacgatcatgatngtacngcaanaacagcaccancaatttctgngncgcgttnttnctctgatctcatgnntcaatagtgtcnttggtcactnanctctaattccggcttnacnttcncancctatnatnccactacaatccnaccgatncntaatatggacncggtggccgcngcatgnttnttcgncgccgtggttcngtcggngggtngcgggtcgcgtgt

SEQ ID NO: 44621 - DNA, 269 bp, Glycine max
  Clone ID: PAT_MRT3847_140291C.1
cctaattacagtagcttttcacaactattagttgcccgtcaaaaagctgattggggggttttttggaaaccaaaggccactaacaccataaatccaggttctggaccagctagcgcatctgaggatctagttgcagccgacccaactgggcatcttcaagttgaacccagtgctcttaactcctaagaagctactgcaaaactggataggaagatccaggattttcatcttcgcacactgtcaacatgttatacttccaaaccatacca

SEQ ID NO: 44622 - DNA, 169 bp, Glycine max
  Clone ID: PAT_MRT3847_140292C.1
ggggtttatttcttcttcactggttaaatatttttcctgaataggaagaacatcagcttctcttaaatatggtccattgctcttgctaatatgcacaacagtcggtatcatttgtacactttggaaggatatgttgatgccaactttcagatgttgaacaaggaccaaa

SEQ ID NO: 44623 - DNA, 273 bp, Glycine max
  Clone ID: PAT_MRT3847_140293C.1
aaactattggatataatgctttgagcttaagcatagttaatcttacggacacaagtgactttttaaccaacttgcaatgaagcttaaaaaattagccaaaggatgctttctgcgatcatgggatccaccataatcatatgcgacgcttgccatgttcagacatagggtaccataattttggacaccgtgtagttccacatttattacctggatccccatcatcggtttaagtccataaaaggcaaaacaccctgacggacctagatgttagca

SEQ ID NO: 44624 - DNA, 1593 bp, Glycine max
  Clone ID: PAT_MRT3847_140294C.1
atggataatgcacttgatcaaggaacttctcaaggtgatgatcgtgctgataatccaaatcaatcaatggaacaagatatgagagtagaagaacggggagtaatggctcaaaacccatcaatggaacttggaatggacttcatgcgagaagagatgggagaaggtggtgtcttgcacaacccagatcaaattgagatgacttttcatgttgagaatagggctcatgatgacatgggtgatgaagatgatgatatgggtgacgaaggtgatgaggatgaggatgatgatgagggagaggatgaggacgaggatatagcagaagatggtgggggcatgatgtccttggcagacactgatgtggaggatcatgatgatgttggctttggagatgaatacaatgatgagatgattgatgaagatgatgatgattttcatgagaatcgtgttatagaggtgaggtggagggaagctcttgatggcttggatcacttgcagatacttggccaacctggatttatagatgtggctgctgagccttttgaaggtgttaatgtggatgacctttttcgtcttcagagttttgaacgccgccgtcagactggtaggtcttcctttgagagatctgccacagaagtaaatggttttcaacatcctctccttgttagacctccaccatctggcgattttgtctcaatgtggtcgtcaagtgcacctccacctctaacagattattctgtgggtatgggctcattgcatctacctggaagaagagtgttaggtaatggtaggtggactgatgatggtcagccacaaggaagtgctcaagccgctgccattgcgcaagcagtagaggaacaattcctagctcaactgtgcagtgtagctcctgaaagcagtcctgttgaacgacagttacagaattctggagaacaagagaacaagtctgatgctcttgcatcacatgatgatccaatattgactgctggaactgactctacttctcagcagattgatagtcaggagcaagaaaatggtaatggaatcagagctcagcaaatcaatgatggtgctctttgtgaggaagagataaatgtagactctggtgctcaagatacagctgaagacctgcaagctaatgagcctatgttggttcaaccagtttcattgactatcatgccaaatggtcttgattgcacagtgattgaagaaaatgccactcatgatgagaatgtagaaatagctcaggcatttgtcaattcatctattaattctgatgctgctatacaatgtgaaagtggtgctgatgttcctactagcatccacaatgtgccagttgagtccatggaatgcaatggatcatcaaatgctgacgggcagcctcctaatgttgagttaggggactctggttttgaaactcttaatccaggtgattcccatgcatcatcaatttatgctagtgctgatgttgatatgggtggcactgatgctgaaggaaatcaatcagagcaaccaactgtatctgaagacagaagaaatgagatgttatcaactcagaacgctgacgttgcgccagatgcacctcaggccgatcaa

SEQ ID NO: 44625 - DNA, 352 bp, Glycine max
  Clone ID: PAT_MRT3847_140295C.1
acttcctatagcttatccgtcatttactgcagtatcgacgctctgacctattgccattttcctaactatttcgaggcacgagtcggcatttttgctggcgtaataacgaatttgagactgatattggctactgaaagttctcacccccgactagtatacgacacgcacacggtggcgcgcgaaagaaaccctcagaagacgtatgtaggtgatatgcataactgattaacgagttgatttgcagcagggcatattcgcgaggtgcctatgacatctgctcctgatgtggccatggggctccgcaactagctgacgattgccacctgcgcgctgatggatcctgccggcgacg

SEQ ID NO: 44626 - DNA, 398 bp, Glycine max
  Clone ID: PAT_MRT3847_140296C.1
aaatggacaacactagattatgtgcattattggggaagaaacgtggtggcatattaagcaagagacataagtcatccacccacccacccaccaagccaaccccacttttaactgctaccggatttcaattatacatagcatgggatgacggccacaagcgtggataaaaagaaacccaacctggttatatacttgggggaagagggcgacccatctgacatataagacatggggggggccaggcaaaatatggaggtgcatgtatatgaccctggtgttagtgttgagtcagcaaactaaattgcacaatcactggcgcacatcacacatgagtggggcctcttgcaactcaaaagcagaagataacaatgtaccatgacgcgacccatgcaccacct

SEQ ID NO: 44627 - DNA, 398 bp, Glycine max
  Clone ID: PAT_MRT3847_140297C.1
gggattaaaaaggaggcccaaaaagccaccgcccctttattaaaaaagaaacgggaaaaaaacaaaaaaaaaacccaatggggggccaacacgggcagcaaccagaggatttagggaacaaaaattacaatccttaaaaaaagaaaaaaaagcccaaaaaaaggcccctggaaaattgggccttggtaaaaaaaacttccaaagggtaaaggggcacaggtagccgaggccattggaaaaaaaattgggggggtgggggaacggggactttaaaaaggggaaaaaaacccccggttccaaaataaaaagggccaaattttctttggattcggaaaaaaccattccccccccaataataaataaaagaattctttgcaaaccaaaaaaccccatttttt

SEQ ID NO: 44628 - DNA, 412 bp, Glycine max
  Clone ID: PAT_MRT3847_140298C.1
ggcattaaaaagggggcccaaaaagcccccgcccctttattaaaaaagaaccgggaaaaaaacaaaaaaaaaacccaatggggggccaacacgggcaaaaaccaaaggatttagggaacaaaaattacaatccttataaaaagaaaaaaaagcccaaaaaaaggccccttgaaatttgggccttggaaaaaaaaacttccaaagggtaaaggggcacagttagccgaggccattggaaaaaaaattggggggcttggggaacggggactttaaaaaggggaaaaaaacccccggttccaaaataaaaagggcccaattttttttggattcggaaaaaaccattctccccccatttatcaaaaaagaaattcttgggtaaccaaaaaaccccatttttttggggcccaaaccc

SEQ ID NO: 44629 - DNA, 157 bp, Glycine max
  Clone ID: PAT_MRT3847_140299C.1
atacgtgtcgtcatattacaactcatctgttggttctggtctgcctcctcacccgtacatgtggagtccgccacaacctatgatgccaccttatggacctccttatgcagcaatttatacacatgtaggggtgtatactcatcctgcattatctatc

SEQ ID NO: 44630 - DNA, 893 bp, Glycine max
  unsure (1)..(893): unsure at all n locations
  Clone ID: PAT_MRT3847_14029C.1
ccacgcgtccgctttccaccttcaccataagctcctttctctgttcctaagaggagttatgggggcaaattgaaaacgcattcaattacaacaaacacgttttttttttgttaatgttgttgcattctcttttccttttgccgtaaacgggggccctcgcttttctcataagccactgaaaaattttgctcctttcgcccctaaactttaacagaggtcgttgttcaccgcaattcctcaccccaatggaagaatcaagtgaattgcaatcagaagaaaataaagtctccaatgagaaaaataagaaaagaaagctgaaaacaccggcgcagcttaaagccttggaggatttttataatgagcacaaataccccacggaggaaatgaaattagtacttgctgaggagttaggattgacagaaaagcaaatatctggatggttttgccacagaaggttaaaagataaaagattgatgaaagatgaagccgttgctaatgggagacaagatcgttcaagtggtgtcatccaagatcgtggcagtggacttgggcaagattcatgcggaagcagtaagcatgctgatcacaggtatctggatccgaaggaggttgagagccatggcctctacaatcacgaattgtcagttgcagatatgacccacagacgtaggaaccattatcctgaaaatgttagtggggtggatgacacatcatctgagagcagctcatttttgcaagaaaggttttctcaaggtcaggatccgtatgatatggagccttctagacatcttacacctaatggagctcttccacccctaaatcccaaaggtgcagttaagatggggcacaaaccatcangatatttgaaagtgaagggcgagatagagcatgct

SEQ ID NO: 44631 - DNA, 623 bp, Glycine max
  unsure (1)..(623): unsure at all n locations
  Clone ID: PAT_MRT3847_1402C.1
ccacgcgtccgctccgaacgcgtttctcgcatgactcccgagcagattgaagaaatccgatccaggcttaatcttgatgttgctgtcgcatctgactctcctcctgcacctgcgcctgctccaatagaatcgtttactgatatgtgtttgcatccgagtatcatgaaggacattgcttaccatgaatacaccaggccaacttcgatccaggcacaggccatgccaattgctctcagtggaagggatctattgggttgtgctgaaactggtagcggaaagactgcagctttcacaattcctatgatacagcattgcctggcccaacctccaattcggcgcaatgatggtcccctgggcattagttntggctcctaccagagaacttgctcaacaaatagaaaaagaggttaaagcttttagcagatctctcgagtcattaaaaactgccatagttgtgggcggaactaacattgaaaagcagaggtttgaactaagagcgggagttgaaatagctgtggccacccctggaagattcattgatcacttacaacaaggcaacactttccctctctagaatttcttttgttgttctggacgaggcanaaagaatgcttgatatgggt

SEQ ID NO: 44632 - DNA, 238 bp, Glycine max
  Clone ID: PAT_MRT3847_140300C.1
atggagagctgcaagagggacaggtgttaaatgtgccataaaactttgcggtggcagcaatatcacagatcgacatgttcgagtaattatcattcacgacgaaagagagaccctcgattggcactcttgccagtccagaatcatttcttaccgcatttccggatgaagtgattcaaccaccttgaaaccgagtgaggctgcaggccaccaaggtcatgattcgattcaccatcaacat

SEQ ID NO: 44633 - DNA, 418 bp, Glycine max
  unsure (1)..(418): unsure at all n locations
  Clone ID: PAT_MRT3847_140301C.1
cgcgtacgtacgctaggatcctagagcgcgcgctttnttnntttttttttttttttttcctggaacgaaacgaaaaaacactggccgatcggcttcgggggtcttactgcataacgggctcctaaatctcatgcccgaaccacgcctataaaataaaccaaagttgatcatgaattaatgtgacaccctccctaaattaactatgcctactacacacgaggtcacatggtgcttaattatcacctgcgtttcgtatctcactttccaaaatgggcctgttttggtccattccaagaatcatgtgttatcactctcaacacatgcaacctgactgttttagatcgagacctgcttttaccactgatcaccatgtcccgttccttggcacccctagcatgtcacctattggcccatttat

SEQ ID NO: 44634 - DNA, 405 bp, Glycine max
  Clone ID: PAT_MRT3847_140302C.1
atttttcttcgtctgcgaccgatgaagaatattgaggaacagattggaaagtcttgacattagggttgttaagtcccttctggagattagcaggcaacattcttgggcagaaatagtccacaacaagctcatctgtatgttggcaaacatgttttaccaggcttctaatggacctgcaaaagctaatttagatgtccccgcattttatgttgaacaagttgttcttgttggaggaattagcttcatttgtctcaagataaatgaagtgtgcctggctactggagtgcgacccgtgaagaagaacaatactggtcagacagaagccggatcgaagacgatggatacaagccgagaagactcgaaaatcccggacggagaacaacgctggaagaagtgatgacgcgg

SEQ ID NO: 44635 - DNA, 456 bp, Glycine max
  Clone ID: PAT_MRT3847_140303C.1
tggcttggaacctttgggctgatttatgtgcttgtttatgtgcttgcttcggtgagaagatgatagaaggggatgggcccgacggtaacgacgctggggacccgtccttcgacctgcccgactccgacgtcggtgaggactcccccgaagagcccacaagactcctcgaactttaagaagaaatcggatttaaagcaatcgtacgaggtccagagacgaatttacccaaagaactcattcattaattcaagagatcggatttaaggttccagtcccaggctagccagacgacacgcccgtactacgccacttgcagtcctaatccctcgcaatcctccgcacaggtaaaggccctaaattcctaactcacttcctctccgtccccgttaaaacgccacggcgaacagggaaggaaaaagacggaaaaaaacgcgatcggcctacgcatcgacaccg

SEQ ID NO: 44636 - DNA, 236 bp, Glycine max
  Clone ID: PAT_MRT3847_140304C.1
gtaaaataaatgatgactggtgtttgtcttttcccaaaattctaacacaaagggtgtacgtcgaaacttataaaaaaaaaaatataaacactatgaaccaaagcatataaatggtcggccttctcttaagaatacaagattacggtcgcgtgcttgcaaccgcagatctcttttatattatcaccaaaattcaaaacactatccatcttttaaaaacgattaaacttcataatccc

SEQ ID NO: 44637 - DNA, 238 bp, Glycine max
  unsure (1)..(238): unsure at all n locations
  Clone ID: PAT_MRT3847_140305C.1
aagttaaactcggacttcgcttcaaccgaacataaaatggcgtttttcttggcttgttttgcaaattataacaaagtggccactgccttggggggcttttcttctaaaatttttacaagactgtggtgcttagtttttgggagcaaaagaaggactttgaaggcaggctttaaaaaatgaagagccgagggcgaggagagggagaaagattnaggagttggagaaagagaaagaaggg

SEQ ID NO: 44638 - DNA, 292 bp, Glycine max
  Clone ID: PAT_MRT3847_140306C.1
aaacccaccaaaaaccttttttttaaaggggacaattcccttttgggttttacaaagcaaaagcctaacaaaaattggggggggggggggggggggtttttttgatcaattttaacaataacgcgggggggcatccccatttttttttttttttcttaaaccatgccacgtggtttgatttcaggttgggccccccgggataactaaagtttttttgaggggggactttttttttttcatggtggcggggtccctattcaaaaatggggaccgacccttgggcctaattttg

SEQ ID NO: 44639 - DNA, 239 bp, Glycine max
  Clone ID: PAT_MRT3847_140307C.1
attttttctttgcatgtatacacatacattaagtgtattcgtaaggcatctttattttttgtgtaggtttaatttcttttatttgatatatgcaacatacaattacttttttttataagacaaagatggtggagtaaaatgttacactagtacttgtgacttgtccattacaagaaatatcataacaagagaagcttactagtggggatagatcactactcataaaaaaaaaaaaaaaa

SEQ ID NO: 44640 - DNA, 597 bp, Glycine max
  Clone ID: PAT_MRT3847_140308C.1
tttaaccaatggtcctccaatctaaaggaaggattctgtaattagggtgtgggtggattcttgtaacacatttttgtgtctccagctctttcccagtctatattctggaaaagcaggattcacatctattcctatgtactttcagtaccactggtactagtctataaatataatatatttttgctgagcaaaaaaataaaaataatgtgcactctatgtgcacaagagctaaagctggaaaatctggtggatagcagctacaacatcaatatggaatcttagaaatgacattatcttcaacaataagccttttgtcatctctaaattggtggataatacaattttcctctcttggtcctggatgagggggtgggaaaaggattttcatgttccttttcaccaatggtcctcagctatggcagtagcttttaagtaatgtttgtcttgttgggatgggttgtttggtttttgttgggttggtagcttctgtttattgcggtttgtttcaggaggctctacctcctgtggtctgttatagtacctctggtactttgtatcttctatctttaaactaatatattatatttttggccgttc

SEQ ID NO: 44641 - DNA, 246 bp, Glycine max
  Clone ID: PAT_MRT3847_140309C.1
tcttctagatctccaacgaacgccccatacgtgctcaatcttacatacactttcattctactgaatcactgttaaatcttcacggcactcatacaaccactgtccatcactcatcaccaatctcacatatctaacccatacggtacccaactgaaccgacatactgcacatgctcttacaaccagcttgcactattacaaataactcttaacctatctatcctttatacatgaaagcaatctcaac

SEQ ID NO: 44642 - DNA, 608 bp, Glycine max
  Clone ID: PAT_MRT3847_14030C.1
cccacgcgttggctcgagggaatgcaaagactgattggaacaagccagcaagcattgaacttgtttcttctccctttgtcttaccagaagctcctttcctgttcctaagcggagttagggggtcaaattgaattcatttgcaacaaacacctttttgttaatgttgttgcattctcttttcctattgccgtaaacgggtcctgtcctcgcttttctcacaagccactgaaaaattttgcacctttcgccccaaaactttaacagaggggtgttgttcaccgcaattcctcaccccgatggaagaatcaagtgaattgcaatcagaagaaaataaagtctccaatgagaaaaataagaaaagaaagctgaaaacaccggcccagcttaaggccttggagaatttttataatgagcacaaataccccacagaggaaatgaaattagtacttgctgaggagttaggattgacagaaaagcaaatatctggatggttttgccacagaaggttaaaagataaaagattgatgaaagatgaagcttgtgctaatgggcgacagatcgttcaagggtgtcatccagatcgtgcagtggacttgggcagattcatg

SEQ ID NO: 44643 - DNA, 373 bp, Glycine max
  unsure (1)..(373): unsure at all n locations
  Clone ID: PAT_MRT3847_140310C.1
gctaatcctagggcctgcaactcctcgctggcaacaacagnagggctaccatnagncgcgggnctgagagcgacgcgggagacgggcggngggggncgccggaggacgcngcggcngggctgccggggctgccggcgcggngncgacggngcnggggggggggggggggcgcnntccgngcntncgtgcgcgggcntgcgncgccttggcgggtgtntngtgtnccgtcnnnttcgttctctgggcgtngtgttcgctctggnttgttgggtggggctcgcgcggttgggggggggggggtggtgggggggtggtggggggggtgggtggctgggtggggtgttgtgggggggggggtggggggtttggggtg

SEQ ID NO: 44644 - DNA, 497 bp, Glycine max
  Clone ID: PAT_MRT3847_140311C.1
tgaagatatctctttctcttcaataactcatttttctcttatcatatttggatactcattgccgtctgcacagaaagttgttgaatttggagccatagttactgggtccaaggcctaaagcttccaactttgttttatttcctggtaaataacactgttttcgatcaatttggctttctttttgttgtcgattcagatgggttcgtgccaggaactgtttcttcgttcctaactcctatattcagtgttccggagaaagctttcaagtgttatagttgttaattgctattcttctttcttagtttctgctatgctatgaggctttgagttctctgtaaagtgggatagacattttatgagttaaagttgaattaaacatctttgagcaatgaagattctgctggttttctagcatgaaatgttttccagaggtggtgttgataattttgatcattgaaagtttgtattattagtgtttttatcggatatgagtcggt

SEQ ID NO: 44645 - DNA, 260 bp, Glycine max
  Clone ID: PAT_MRT3847_140312C.1
actcgagccgaatcggctcgaggccggaggtatcagatacgttatttacatggccggacttgacagctaaactaaatagtgagctactgaataatttgggcaactttatcaaccgagttttgagttttattgccaaacctgcagggcaaggatatgattccattatcccctctgttcctgataatgtaagtggtgactcccatggtccgaccaaaaagttggctgataaagttgctgcatatatagaccaatacatagaa

SEQ ID NO: 44646 - DNA, 913 bp, Glycine max
  unsure (1)..(913): unsure at all n locations
  Clone ID: PAT_MRT3847_140313C.1
caagcccggaattcggctcgaggataaggagtctgtcgtgtcttgtgtcccagctctttatatttttctcatagcctgacctttgccgaacataacggcgatttctccaaaaccttcaattccaccttcttcttctcatcttcacaccctacccctttattcttcttcacacacaattccttcaactctctttctctctctctctctctctctaaaaatgtctcatgtagtggtcactcgatccattcacacctccctcacgcgccccacctcaggatctgcacaccacagagcccaaacgttgttgaagcctccaacttttgcttccaaagtgttcccacaacaaaggaacaacccctccaaagtttgctcccgaagttgcctcgtcaatgcgaggaaatctgcacccactgaagttgttcccgtctcacccgaggatgattcaaagattgaggaagagttgcagcactcgcgtggtatgcggcaacttggtgacacttctgttggaatgtggtcaaaacccacttttaggaggaagacaaaggttgtttgcaccattggtccttctaccaacaccagggaaatgatttggaagctggctgaggctgggatgaatgttgcccgattgaatatgtctcatggagaccatgcttctcatcagaaaattattgatttggttaaagaatataatgctcaatccaaggacaatgtaattgcaattatgcttgataccaagggtcctgaggttaggagtggggatttgccacaaccaatcaatttaacaactgggcaggaattcacatttaccatccggaggggtgttggaactgcagattgtgttagtgtgaactttgacatcaaatttggaggggataacaaagttgacttctatgctgnttcttttggtaagatg

SEQ ID NO: 44647 - DNA, 262 bp, Glycine max
  Clone ID: PAT_MRT3847_140314C.1
tgcacccctccgggcagctgcgaatactgctggtggtgcgaaaaggcaggtatatgtcttttaggagcaaggctaatcctacacaaatggaggaggataactgactccattgcttgacggtggcaaagacactacatgcaggtaagattaatcctcttgaaagtttacaactatagcaatgcttgaagggtatattcactacttgtgtgaagagcgcaaaagtctgaaggatactaccatctcatattacgactaccagtca

SEQ ID NO: 44648 - DNA, 143 bp, Glycine max
  Clone ID: PAT_MRT3847_140315C.1
tgcgttccagtttttattctcagcagccatgtgcagaatcctcgcagtgttgggccgcgtcgagaaatattacgccacctgggcacacatgatcgcacagtatcgcaggttgcggtatagaggtcatgatcagagtggcatag

SEQ ID NO: 44649 - DNA, 261 bp, Glycine max
  Clone ID: PAT_MRT3847_140316C.1
ctttaggtgtccctgctcctccttttacatacgtggctcacgctctggcagggtgagccagcgactaggtcgtggactagctcgacaatttcaagggtggcttgacttgccattctgattacaagtccctcatttataacattcatccaacgcttattgctattggcttactaggtcatgggggtgaaactattattagtgacaaagctttttccacaaagaattaagtgcacaaagtgatacaccttgttttccatgcca

SEQ ID NO: 44650 - DNA, 254 bp, Glycine max
  unsure (1)..(254): unsure at all n locations
  Clone ID: PAT_MRT3847_140317C.1
gngncgangcacgcgtacgtnaggncgganttnggctngaggatcgctctctcactcttccnganancatgngngannaacnggacggngannnnncgcangcggaaggcggcggncnnnggnnggnnnncnggngcnnnnnnncnnncggcangngcccacggcgggnncggcnncncgcnncnnggggngggcgngcagccgggnntacggtcnnnnncnngggngnactgagaagncanngnagcngngan

SEQ ID NO: 44651 - DNA, 1669 bp, Glycine max
  Clone ID: PAT_MRT3847_140318C.1
cgcccccgtccgcccacgcgctctctagtatctccctcgcacacaccctttctttccgttctcaaactcactcacactctctctactgctagattcgacgattcccgaagtgccttcctcctcctcctccttcttcccctctaatcggatccaaatccaaatccaaatccagttcaaagaagatgcaatacaagaacctggggcgatctggcctgaaggtgagccagctctcctacggcgcgtgggtgagcttcgggaaccagctggacgtgaaggaggcgaaggccctcctacagtgctgccgcgaccacggcgtcaacttcttcgacaacgccgaggtctacgccaacggccgcgccgaggaaatcatgggccaggccatccgggagctcggctggaagcgctccgacatcgtcgtctccaccaagatcttctggggcgggcagggccccaacgacaagggcctctcgcgcaagcacgtcgttgaggggaccaaggcctcactgaaacgcctcgaaatggaatatgtcgatgttctctactgccaccggccggatacctctactccgatcgaggaaaccgtgagggccatgaatcatgttattgataggggctgggccttctactggggcactagcgagtggtctgctcagcagatcaccgaggcctgggctgtggcacagagattggaccttgttggtcctattgttgaacagcctgagtataacctcttgtccaggcacaaggttgagtctgagtttcttcctctgtacaccaactatggcacaggcctcactacatggagtcctcttgcctctggagtgctcactgggaaatataagaaaggagttataccaccggatagcagattcgctttggaaaattacaaaaatctggcgtcaaggtcgcttgttgatgatgtgcttaggaaggttgatggattgaagccgattgcggatgagcttggtgtgccattgtctcagcttgcgattgcgtggtgtgctgctaatcctaatgtttcctcggttatctgtggtgctacaaaggagtctcagattcaagagaacatgaaagcaatcgatgtcattccattactgactcctgttgtgatggagaagattgaagctgttgttcaaagcaagccaaagcgccctgaatcataccgatgaattgaagtttttccatggtggacacatatatgcattagatgggaggctccgtcatccccgtgcacttgagtgaaaattcttgttgaaaattattggtgtggttgatgtgatttcttgggacttcttttctttgtcattttttctttctggcactgattatgccttctcttttatgggttcaaactttccaaattgattttggaagcaaaggatttagatcttggattctaggtttacataggtcttccagattaatacatacccattgtttggatagttttaatattttttgaatatgtcaaactattatttggattttgagagctcaatccaaaatatttttcttgaaccatctaatgggacaaggcatggttatctttgatccctggatttctttcttacttgcttaccctagtttgggattaaatgtctcaaaaaaaaaaaaaagcaggcatttttgcttaaaaaaacccggattaaagatctcattgttatgcttt

SEQ ID NO: 44652 - DNA, 765 bp, Glycine max
  Clone ID: PAT_MRT3847_140319C.1
tttatttctctctttcctttatcaactttctccaactgactcacacacacactctctctctctctctagtacctcctcctcctcctccttcttcttcttcttccctggcatcggatccagatccaaatccagtttaacaaagaaaatgcagtacaagaacctgggccgatcgggactgaaggtgagccagctctcctacggggcgtgggtgagcttcggtaaccagctagacgtgaaggaggccaaggccctcctccagtgctgccgcgaccacggcgtgaacttcttcgacaacgccgaggtctacgccaacggccgcgccgaggaaatcatgggccaggccatccgggagctgggctggaagcgctccgacattgtcgtttccaccaagatattttggggtggacaggggcccaacgacaaggggctctcccgcaagcacgtcgttgagggaaccaaggcctccttgaaacgcctcgacatggaatacgtggatgttctctactgtcaccgcccggattcctctactcccatagaggaaaccgtgagggccatgaaccatgttattgataggggctgggccttctactggggcactagcgagtggtcggctcagcagatcaccgaggcgtgggctgtggctcagagattggaccttgttgggcctattgttgaacagcctgagtataacctcttgtccaggcacaaggttgagtcggagtttctttctctgtacaccaactatggcacaggcctcactacatg

SEQ ID NO: 44653 - DNA, 560 bp, Glycine max
  Clone ID: PAT_MRT3847_14031C.1
ctttagcgctggctctctctgtgctggtggagagcccgccggcctcctccggctggaacaggagaaggaactactgtgcccaccaccgcaagaaggtagtgttgggatgcacctgcttaccatccgggcgttgacagctgagtccagagaactgggggcaaggtgcctgcctctgtggctctggctcccctagacccaactactccatgaagctggggataaacgaaaacttgccaccacaaatctgcatgatgctggctagcgagaagatacttgttggttctctgacgcgtctatgtgatgttgtgtctgctaccctgactcatgacatttgctgaacagactttgacgactgtgactctacccagaagcacgaccactgtgtgtccatctcaagagattcacctcagctcatccatggctctgccccggtatgctgtatgctagtgctgagacctggtcattggagctggcgcctgctgctgagtatacagactgacctgtgtaacttatgacattgacaggttctgagcagacgaagatgacgatgatgactaaga

SEQ ID NO: 44654 - DNA, 1106 bp, Glycine max
  Clone ID: PAT_MRT3847_140320C.1
ccacgcgtccgctttctcccatgcataggtaaacacactgatctctctctctctctcttccacacaattgtgatggtatccaagtcttcaaatatagaaattctgttcctttcacaaaagacgcgtttctcctttaattgtataactcaaatcctaaacagtgctgctgctgttttacaagacactatttttagtgaagaatcgaacatccttttacgttgttgttgttgttgttgttctcgtgttctttttaaagaacctagtattattagtaatagagttgatgggtgattcggttgcatttgaattctgaagttgttgtgtgtgatgttgatgtagtgaaacctgaaatgcactgcaattgggggtctaagctaacggtgaaaattggacatttttgtttgtttctgagggttgtgttgtgttgacaccggaaagtaatggcatcgtctcatggtaatgcacactcggatgccgcgaagatggaacaaataatcaccgagttcttcgcgaagagccttcacataatacttgaatcaagggcactctatgtgtcctcccgtaattcctatggtgatcaagctgtttcgtcaccgtgttcgtcgtcttcgtcttcatcaaatgtgcgaccgggctcgaggtggttcaatttggcgctccgggagtgccccgcggcgttggagaacattgacctctggcgccagaacaatctagagtgcatagtgattgatgtgattctggtgcataggcctctggtgagtgtgagtttttctcccaaaagggttattcctaggagttcttcactgaaggaaagatgcccttttggctggaacactgatcaggaagaattgggggttgtgggaaggagtgaaaagattgtggagaggtggcttgtgcagtatgagagtaggaagacaagggattctaattctggcagtaggagatcaagcaatgtttctttacataacttgtataagaaatcaactttgcttctgaggtcttggtatgccactgttagacttttacctgcctataaacttttccgagaacttaattcgtctggacagattaaggaatttacccttggacacccgggggcttccttt

SEQ ID NO: 44655 - DNA, 640 bp, Glycine max
  Clone ID: PAT_MRT3847_140321C.1
cccacgcgtccgcttgcattgcatgagctaaagctcgaaaagaaaacgattcctctgctatgctttgctctgtaagagtgtgggtctaagtctgatgtctctgcctctttatccgcgcatccgtgtcgatcatacaattcatcatctcatcactccgaatctatgaacgccaaaggttccctgaatttttttctattgttttaataagaaaagaaaaaaaaaaaaaacaacttttgggtcttccttcggatttgaggattttgaactacaattacggagcttataggagatattgttacagagattatcgtataattagttacagatttttgtatttattttttgtgtgttttctagttttatcatcttcctttctttctttatccctctctcttatcctgttccacaaacaagacagcgactgagtctgaattctgaaactgtttttgtagcctcctccacgatctccaactgtgttttctgaaacatgttgtggttttcagaataattcaattaaaacctttttcactgtccccccaactcacccttcacttatcttctctgcttcaaccatccatggcgtgtttcaactttgaaccttgggggagtctttgagattcttcaattttgcaaacaaacc

SEQ ID NO: 44656 - DNA, 304 bp, Glycine max
  Clone ID: PAT_MRT3847_140322C.1
ctcactcaccaatctattgcacacactgattatcttatcggaaccactcaaattggggtttaatgctagaatggggggaaacatccatctaagcatagcatgaaagatgctgctgataaatatcaaggcccaaacttgtatgtaaaaactttagattattgcatatttgattaacaactctaggagctggactcctcttttgtaaccattacctattgctaggttatgtgagacctacatttcataagccacttatcaagctatgttgcattctctactccagtactgtcatctatagctcttt

SEQ ID NO: 44657 - DNA, 437 bp, Glycine max
  Clone ID: PAT_MRT3847_140323C.1
caagggttctggtggcgaaaagcttgatgataaaggcttctccacttttcctggtaatatcaactgccttgtcttcagtgtccctgaatttgccaaaactttggaacaaactcaaggtagcatctctgaattcatcaaccccaagtatgctgatgccaccaagactaaatttaagagccctactagacttgaatgcatgatgcaagactatcccaagctcctcaaggactgcggtagagttggtgtcactcaaattggcaaagaattctgcttcagtgcttgcaagaacgatctccaatctgctgttggtaaagtcaagagtggattgccagctgaaagttccagctcctgtgaatttgatttttatcaattaaacacagaagtcttgagaatcgctggtgttaacatccaaaaaggcgaacccgtcaaccatggcg

SEQ ID NO: 44658 - DNA, 330 bp, Glycine max
  Clone ID: PAT_MRT3847_140324C.1
tattcccgtctcttgggttgaaaaaaaaaaaaaaaaaaaaaaaaaaaaaaaaaaaaaaaaaaaaaaaaaaaaaaaaaaaaaaagggaaaacaatctaaaaaatccaaaactaacatgggcgggcctgctaagagatacctattttatagggccacctaagtaaaatttaaatggcccgttttttggcaccgtaaatactggaaaagccctgggtttacccaccttaatcgggttaaaccccttcccctttccaccatttggggttttagcaaaaaggcccttcccgatcgcccttccaaacagttgagccccctgattggcgattggcac

SEQ ID NO: 44659 - DNA, 345 bp, Glycine max
  Clone ID: PAT_MRT3847_140325C.1
ggctcgagcattagttgactcgaattatttgtcaaagacagacacatactatattgggcatgttctatatgtattctcagcgtgctgtaaggatgtgaggcctctttggcaagaaagagcagggagaaagagacaagagctgcagggttgtgggaaggaggaagaactgatgggtatggtctatgcatgccttccacacttctgcggaaaagaagattccaagtcttccaaacatcaagcgcattagtgacactaccatttggtactgcaacacactggctgtggattaacacactttacagtcacatacacgctacactgcatcattgtggaggaaagttcacc

SEQ ID NO: 44660 - DNA, 533 bp, Glycine max
  Clone ID: PAT_MRT3847_140326C.1
cacgcgtccgccccctctctctctcggagcctggaacaccatagcgcttgtttgcgaataggaacccgctggtgaaattcacctaatatgacgggaagaagctgcggctacagcccatcaacttcaccttctatgcgctaccctcgaagaaggccagtcttagccctaggggccgttctcgaggatgggatctggatttgccaacaagtcttctggatcgaaaccttgcatatatcgcaggccaacacgatctgcatggtccatctgacccattaggggctgttaaggatgtctacctggctaaatattattatactgctgagccaaaaggctttgtgtttggccaatctggggacccagctgatgctgcagatgcaaaatatcacatggcacggacgaattcttcttggtcgagagataactgtagaggtcgctgcataaaacagagagaaacctgctgatgtgagagcaacacaccacatgaaggatcgatcgcatgattacaggccatcttcacgaacctattcttctaa

SEQ ID NO: 44661 - DNA, 906 bp, Glycine max
  unsure (1)..(906): unsure at all n locations
  Clone ID: PAT_MRT3847_140327C.1
ctcaactcgttgagaatgtcaaagctggtccaaatcgacgatttcaaaaacacggttgagaatgtcgaggcgggtccaaatcgacgatctgattaacgacgacgtagtaaacggtgattcctctccggttgaaccggacaagctccgtaaacgggaccacatcaacgtcccttctcaccccttcttgatgaagcttttgaacaagcaaggggaggttcttggactatgtgcggacacagtttttaagttcacgggttcagggaagatgaaatgccgcattttgttgattacggattttgcgatttacattgttgaccctgagactgattcgcttaagcggaggatagccctcgcagcggttgagaagatttatctcagtgaactaagtgataactttcttgcagttataattccgacagagtatgatttacttatagctagcgctagaaagaatgaaatcgtcactgcctttgttgaagcttatgaactcgaggtggtttcttccaataggtttgagtataatgcagcatctgacttggttaaggaaattgaatttgaggaagctgaagggggcgtcaaaacaagaattttgaggaagtgaacttcttttctattttcgtgataacatctgtaaacttggtaggagacccgtacaggaaatgattgttaatcgattgtgtaggaaaggttcttttggtacagtgtttcctttccaaagattaattacgctattattcttttatcagaaattttagaagagcagaaatatatagtttcaatctgaaaccagattcaactggatgtatgaaatggaattatatctaattttttaagctaacacgatatcnnaaaaaaaaaaaaaaaaaaaaaaaaaaaaaaaaaaaaaaaaaaaaaaaaaaaaaaaaa

SEQ ID NO: 44662 - DNA, 296 bp, Glycine max
  Clone ID: PAT_MRT3847_140328C.1
ggggggaaaaataacacaaatttattcaacacaggggttttaaaagcagacatattatccttaccatatattatcaagtggtacctttttagaatggggaaaaaaacagtcccacagcagattatatacgacttttttaactacaatataacaaaatgttgctgggacgaataattggttggattcaaatttaaaaagcgggggggggtgggggcttttaaatggaatcaggcggctttttgtattttaacatgaagctaaattgccacttttggttaggccttaaaaaccatgaa

SEQ ID NO: 44663 - DNA, 446 bp, Glycine max
  Clone ID: PAT_MRT3847_140329C.1
gacctcggcttccgctcgagctctagccgctgagcctattcggttttaggcgaaagggtgtgagaatggggagcaaataagaagatcaaagggtaggagcatctaaggtttcataaaggcatacatttggcacagtaactaaaggtgactatgactacacataaccatccactatacaaaagcttgagacaggaacgataaagtcatggaactcaaacacacctgtactcgctcaatatgaagccaattttatgcaattctacattaccaacaaaaccggaatggccgtcaacaggccaatctccaagtgaacctaaatagacaagcaaagcatagcttgatgccattagaagttatgacccaaagccttgactactgaagtgttcgaagttcaggagtctacatctacccggatgaaacccttggcttctttttcgaaacgtaat

SEQ ID NO: 44664 - DNA, 1911 bp, Glycine max
  Clone ID: PAT_MRT3847_14032C.1
gcgtaataatcctgtttaattaactaaaggctagcttcataactcttcccctcaccccaccaaaacaccccctttagtttcctggtattcttcttccacgtaggtttaatttggaggacacaagagttttcaaagcatcattggtggtggattgaaagacttggtgagtgacatcgtacacatgggaagacactcttgttgctacaaacagaagttacggaaaggcctttggtctccagaggaagacgagaagcttctcaatcacatcaccaaacatggtcatggatgttggagctcggttcccaaactagctggtttgcagagatgtgggaagagctgcaggttgaggtggataaattatctaaggcctgatttgaagagaggagcattctcacagcaagaagagaacatgattgttgaacttcatgcagttcttggaaacaggtggtctcagattgcagcacagttaccaggaagaacagacaatgagattaagaacctatggaactcgtgcctgaagaagaagctgaggcaaagaggcattgacccaaccacacacaagccactctctgaggttgagaacgacaaggacatgaatatgatgccaccctcaaccgacaaaagcactcagaaagcctctgtgggatccaatgaagtagtgagtaatttggttgatcatcatcagccaccaaaaaccatgcctaattcttcatcagagagataccctcttgaagtttccactactagttccacccaggaactgttcctagataggtttggcaccacccccaccacctgccacgaaaacaacaacaacacttctgatttggtaggatcatacttctccttccagcacttgaactatggaacaacaacaagcatggccctctcttcaaaccccaacacctctctttgtttcattctaccctccacttcttcagacattaataataacaactccatcataacctcctcctccatgctcccttcaattttcccaacacaacatgtgaagctccaatctaataacaacaacccttcttccatttcatctgatggggttcaaaactgggaaacaagtaacaacacaaacaaaaacaatgggaatatgcagttacaaagtagcacaaactaccttgacagcacgtggggggtggcagagtctatgaagattgttaacattaacaaagaggctcatgtagtgcctctacaagcagaacaagaagatctaaaatggtctgagtatctttataccaataccccgtttattctgggaaacaacacagcgcagaatcatcaaattcatacctctcaatctatctatagtgaggttaaaccagaaacaggtttcataacagacgagtcatgtgctacatggcaccattatcagaatcagacaccagctttactttccgatatatatagcaaggatctgcagagattttcagtgactttcggacaaaccctgtaacgtgtgtgtacgtaattaatatatgtggaaaattcaattcaacgaaagagaaaagatgttgccgacttaattttctaaccaatatgatgatgatccaggtcagaattttctctagtgagttctgaccacaggtgtgtgcaaaaaaaaaaaacttcctttctttctttctatattgtaaattttgttacagtgtaatatttgtgattaattccagcttcttattccacccaccattttgttaatcaaacatttatgtagaggcgctactgctgaataaggcttgttccaatccaaggcttctcttctcctcttacaaaatattcttcagttgttaattatggatgtgtagcttgtgagttgtgagtttttttttttttttttaattcgtgtgtacacagttgacagcattaattgttatacattttttttaccttaattcc

SEQ ID NO: 44665 - DNA, 2828 bp, Glycine max
  Clone ID: PAT_MRT3847_140330C.1
cggacgcgtgggtttcgcgtccgcgcccatcgaaattcaaatttcatttcatcacgctcttccgtccgtaaaccctaacaccaccaccagcttcaatcgaagcgattccttctccgaagcctcacatggcttcccgcatcgagaacaggcctcctcgcatcctctccaataaaaagggggccactgaagaagttttctccgacaagcgtagaaggattgggtcggagagaatggagagacagggaggccgaggcagggctcccttgggtgctctaaaggcagacgctaataatgatggtgccagtgccgagggctccgagtgcagcaccgttgacttcaccaaagaggaagtagaggcgttgctgaatgagaagatgaacacgaaggagaatcgctatgataataagaaaaaaatggaccagatgggtgatctcattaaacggcttaaactctgccttcgatggtttaagagagtcgaagaaggctatatccaagagaaagagaagcttcagactgacctagaatctgctgagaagaaatgtctggatattgagaatgagatgaagattaagattgcagagttggatgagactatatctaatttgagggtgacaatttcctctttagaagagagaattgcaaaggaagcgtcggataaattggaagctattgcttgttatggaaaagaacaggaagccagaagtgcagctgagcagatgcaagcttctatttcaactgagcttgagagagttcgggaagagaaatcaagcggtgttttgcaggccatttcaaatgaggatttgtacaaaagatcacaagagtataatatgagtctgcaacagtacaatagtcgccttcagtcggatcttgaaataactaatggggcacataaacgactggagatggagaaagcaaccattgttgagaaccttagcaatgtgagaggccacaacaaggcattgcaggaccagttggcatctcttaaagcttcacaggatgaggctgcaaagcagaaagaaatgttaacaaatgaactcaaattccttcgggaagaattgaaacaaattagagatgatcgagatcgccaacagctacaagtacaaactttgactggagaagtagaaaaatacaaagaatatacagggaaatcatgtgcgcagttggataccttgacaattaaaacaaatgctcttgaggggacatgttcttcccaaagggaccaaataaatatgctgcaacagcagttgattgctgaaaaggagaagtcaaagttggctgatttatctgcttcagaaactagaacagtgtttgaagatcagaaaagaattatacgtgaactccaggaacgactggcagagaaagaattccaagtaattgaaggggagaagttaaggaaaaaattgcataacactatcctggagctaaaaggaaatattcgcgtgttctgccgtgtccgacctttgctaccggatgatggtcctggaacagatatggttgtttcatatcccacgtcaaccgaagctcttggccggggtattgaattactacagagcgggcagaagtacccttttacatttgacaaggtatttaatcacgaggcttctcagcaagatgttttcactgagatatcgcagctggtacaaagtgcgcttgatgggtacaaggtctgtatctttgcctatggacagacaggttcaggctcgagccgaatcggctcgagtacggctgcgagaagacgacagaaggggttgataccacgttctctagaacagatattcgagataagtcagtccctgaaggatcaggggtggacgttcaaaatgcaggcttcagtattggaaatatataacgagaccctcagggatttgttatcatcaaatcggtcaagtggtattgactcaacacgaatagaaaacggtgttcctgtttctggaaagcagccatacactattatgcacgatgtcaacggaaacacacatgtttcagacctcactataaagaacgtttctagtgcaagtgagatttcatctcttctgcaacaggcagcacaaagcaggtctgtaggaagaacacacatgaatgaacagtcatcacgaagtcactttgtctttactttgcgtatatctgggaccaattcgaacactgaccaacaagtgcaaggtgtgttaaacctgattgatttggctggaagtgaaagactgtccaggagtggggcaaccggggaccggttgaaggaaactcaggctatcaacaaaagtctctcctctttgagtgatgtcatatttgctttggcaaagaaacaggagcatgtaccctttaggaattcaaaattgacataccttctccagccatgtcttggtggggattccaaaactttgatgtttgtgaacatctcacctgatccatcttcaactggagagtcactttgctctcttcggtttgctgctggagtgaatgcctgcgagattggtatcccgcggcgtcagacatccacacggtcccttgattctcgtttgagcagcggctaaaagagaggccacactcattatccataataaccaaagtaactgtcatttgtaatgctttggatgggataaaagttgtctttgacccatgtaactgtgttaacttttagagaaatgagcttgtataaaattgattgtagaggctaagctttagcctcaggggtgcaacaactgattatcatttagttgtgacattattatattcaatttattgaaacagcttgttgattgtaatttctatgtaaaatgctatagcggcagaattaatgccttaaccatttgattattcttgcaacttcaaaa

SEQ ID NO: 44666 - DNA, 1956 bp, Glycine max
  Clone ID: PAT_MRT3847_140331C.1
tggacgcctgcaggaccggtccggattcccggtcgaccacgcgtccgctcctaaaaacccctccacctctccacgactgcgcttccacccaccaccactcctcctccgacaccgaccagtcctccgcctgccagaccgacatcctcggcttcctcgaagagctcctccagaccggaatccagctcgactgggacgaaactcgtgatccttatttcaccaactgctcctcctgccgttcaaccaacaacggcatctgcggcttcaatttttcctccccaaactaccctttccagtgcttccatttccaccccgaatccacactctcccctccctggttccgcaaatttaaacccagcaaaatcgccatcttcaccaccatcatcaccttaacctccctaatccttataatttcagccaccaccgccatgctccgcagatcaaaagcttcatcagcaacacaacaagaccctaataccctcttgctccacaaccaccggtccgcaagcctcctccctcccgcttcacctacgaagatttagctctttcaaccaacaacttcgattcaaaacggataatcggcgacggcgggttcggctccgtctacctagcaaacctccgcgacgggcggctcgccgcggtgaagtacctccaccgccaccacgccgtttccgccgcgttctccaccaaatccttctgcaacgagattctcatcctctcttccatcaaccacccgaacctcgtgaagcttcacggatactgtagcgacccgagggggcttcttttagtctacgattacatccctaacggaaccctagcggaacacctgcataaccgtaagggctcgctgacgtggcaggtgaggctcgacatcgcgttgcaaacggcgttagcgatggagtatcttcacttctcggtggtgccgccgattgtgcacagggacataacgtcgtcgaatattttcgtggagagggatatgaggattaaggttggggattttggactttcgaggcttttggtggtgcaggataataacaccacgtcgtcttcgaacgggtttgtgtggaccgggccgcaagggacgccgggctatttggacccagattatcaccggtccttccggttaaccgagaagagtgacgtgtacagttttggagtggtgttgctggagcttatttcggggctgagagcggttgatcagaatagggacaagcgcgaaatggcgcttgcggatttggttgtttcgcggatccagatggggcagttacatcaagtgctcgacccggttcttgactgcgccgacggcggcgttgccgccgtcgcggagcttgctttccggtgtgtcgcggccgataaggacgacaggccggacgccagggaggtggtggaggagctgaagcgggtgcgcaacagagccgttacggcggcgaaggagtgagtttttttattttgtttttaaattacggggccgagtgcgcatgtggagtttgactgtggggggggggtgcacttgtgtcggacggtaacgctgacttgaccccactgaagctactatgatgaggttgttttttatatttgaaattgttactatactatgatgttagtgccacgttggtgttgcacgcacgagggtttttttttttgtttttttttaattctatcttctatggttacgttacgtaacgtcaatgggggaagtgtcagtgaccccgtaccggtacggtgagttttttattagtactgcgagtgggagcctacctaaattgagctcacttattggtttcactactacctcatatatgtctcggtatatataccatatcttgtataagttgtaactctttttgcaaagtacatttttccattttcaattataggataagttatttaaaaaaaaacaaacaaagggctactacctagtagtacctcgactaatctcgaattgtacctgcacgagta

SEQ ID NO: 44667 - DNA, 249 bp, Glycine max
  Clone ID: PAT_MRT3847_140332C.1
cagcacattgtattgttgaagcgactgatgtgtgtactatggacataagaataagcgaatttgtgtatttttactagtcatgactcagtataaagagaggctagattaacaattatatgattatgtatagccaattcaccaagcatgaatcgtgttttggtttgaaagatagctgcctatctacccagtgaccttaatacttgtaaagccgtttaataaaatatatctggaacctattagaatattggg

SEQ ID NO: 44668 - DNA, 193 bp, Glycine max
  Clone ID: PAT_MRT3847_140333C.1
atctcatctcgtccatgtcctccgggttcttctctgtcggggctgttctatagcgagcggaagaccttttccgtgttcacgtcggcgctctccttcttccaccgtggtggagaagctggagtccgtggcgcgcgccctatgattcttggtcaccagggtgaaaggctgtattgtgaggatggaggccaaggcc

SEQ ID NO: 44669 - DNA, 421 bp, Glycine max
  Clone ID: PAT_MRT3847_140334C.1
gcttttcttgcgtccacgctggcgggcaaccatgatcaagctgtgctcctatggaccatagcctggctttacaggccctgaggttgttgcccaccactctgcagctcatcgcactgctgactgtgtggaacgaaatgcaaacggacagaccaccaccgtatggtcatcctaacaagaacaagatcccgccaagtcactattgaccactgtgcaggaccgaattttactggaccaaactgacaatggcatacactcatacacaaagttgcaatgacgcactcgccgagagccgctgcttgaacgaaaggctgtccaatggcaagattgggacgtccagcaatgcagcagtcaaatggactgattgggcctaatgctacaagtgtttttaacaaacagtaacagatcagcgcattctgatgca

SEQ ID NO: 44670 - DNA, 761 bp, Glycine max
  unsure (1)..(761): unsure at all n locations
  Clone ID: PAT_MRT3847_140335C.1
ccgggattcccgggtcgacccacgcgtccggctgcgagaagacgaccgaaggcggacgacagtgccttcagctgtcattaagttctcgcacggcacagagagaaagagatggattcttctccttcaccagacatatacatcccagagcaatggtcagaggctgcagagtccattgcacacagttcaatgcctcctattgctcttatatgtggtgccaagaattgtgggaagacaaccttctcccgctatctcctaaatgtcctcttgcacaaatacaccaaagtagcttatctggatactgatgttggccaacctgaatttactcctccagcttttctttcactaaccattgttcataaagtaactccagatttgacagttccatgcctgaaaacaccagagaggtgccttttctttggtgatgtttcttctaagagagatccatcaacatacttaagttatgtatttgccatatatgattattaccaaaagaagtattgcatctatgaaaagggagaaaatccttgtaagggttaaggttgcctcttattggtgaatacttcctggctgggtgaaagggtggttggttacgatgtattagtgggacatgttgaattatatttctccaacacatgtagttaagataagcatagccagtggaaaagaagaatctacctgctggagatttctggttagatggagaaacacgagaaaacatntaacctaattgaaaataattcctgctcatcaggactcattaa

SEQ ID NO: 44671 - DNA, 2697 bp, Glycine max
  Clone ID: PAT_MRT3847_140336C.1
tccggtccggaattccctcgatcgacccacgcgtccgcacaacacaaaacccaacacaaccccaaaactcgctcacaacacagcagaatgtacccattgcttgcgatctaaattcacaatgacaatgtggtgaaaaacgctcggatttgaagatggacatggacgtggaagaagcttctgcacctaaagagagaaagcccgttttggtgatcttggtgggcgctccagggagcgggaagtccaccttctgcgaagaagttatgggttcctctactcgcccttgggttcgcgtttgccaggacactattggaaatggtaaagcaggaaataaagctcagtgcctaagcagtgcaactagagcattgaaggatgggaagagtgtatttattgataggtgcaatcttgacagagaacagcgttcagaatttataaagcttggtgatggaccccaaatagatgtccatgcagttgtacttgatcttcctgctaagctttgtatttctcgatcagtcaaacgaactgggcatgaaggaaatttgcagggtggaaaagctgctgcagttgtgaatagaatgcttcaacataaagagcttcccaaattaagtgaaggctttagccggataacattttgtcagaatgaaagtgatgtaaaaaatgctcttaacacatacagcacacttgggccactggatagtcttcaatatggctgctttggccagaagaatcctgattccaaaattcaagttggtataatgaagttccttaaaagagcagaggtcccagttgctgctgcatctagagagagtggcattgaagaccctacttcccagactccgggtaaaaataactcctgctgcaaagataagcaaacattttcctcaattcctgataatgacaactcagagacgaaggaagtagaaaaccaagcagttggctctgttggttcccatgccaatcaagtttctctggatgatattcccactctggcatttccatctatttcaacatctgattttcaattcaaccatgagaaggcagctgatattattgttgagaaggttgcagagttctcaaataagtttaggaatgccagacttgttcttgttgacttgtctcataaatcaaagattctgtccttagttaaggctaaaattgcaggaaaaaacattgatgcccaaaagttctttacccatgttggggacattactcatctttattccaggggaggtttgcgatgtaatgtcattgctaacgctgccaactggaggttaaatcctggaggtggaggtgtaaatgcagcaatttttaatgctgcaggtcctgaactggagtctgcaacaaaagaaaaagtacaatctctttctccagggaatgctgctgttgttcctctaccttcatcttctcctttgttcaccagagagggtgtaacccatgtaatacatgttgttggacctaatatgaacccacaaagaccaaattgtctaaataatgattataataaaggctgcaaaattctccaagatgcttatacttcactttttgaaggctttgcatctattgtgaggaaccagacatggcatccagtaggaaaaagtgaaaaccttgaaaggaagtctttagagttgcaggttcagtctgattgttccagaaattatttcacaaaaactgatcaaaagagtaagagagatgttgatcatggattgggaaaaagtaagaaatacaaggggactcgggatgactctggattgacctttactgattctaggaatgaaaatgttgattcagagcatagaactgagaggagcatgactaagacatggggatcatgggctcaagctcttcaccaaatagctatgcatccagaaaagcttaaggatgacttgcttgaaatttccgatgatgttgttgtattgaatgatatgtatcccaaggcacggaagcatgttctggtgttggcacgaaccggaggtcttgattgccttgcagatgtccaaaaggagcaccttcagttattgaacaagatgcatgatgtgggtttaaagtgggctgagaagttcttgaacgagaatgcttccctggtatttcgtctcggatatcactcggcaccatcaatgcgacaactacatttacatgttattagccaggacttcgaatcaatacatttaaagaacaagaagcactggaactcatttaacacagctttctttcgtgactcggtagatgtaatagacgagatctctagtgatgggaaggcaaaattgaaagatgatgacaaactactgtctatggagttgaggtgccacagatgtagaagtgcacatccaaacataccgcgtttaaaatcacatattagcaactgccaatccccctttcctgctcacctgcttcaacacggacgtttggtgcgtgcaccaggagaacctcatagcaatgtccagtagtactagttttctgtctactctttttttgtgctcggcattttttgtctactctactgctgagcaagactagttttgagcttgtcttttttttagtacatgagataaaatcaccaatgtgtagttaaagattgaagcacttttgcacgatgatattagatggtttgacgtcaactcctgtagggggaacatttgcacgatggactgatcattcctaaagactgcattctctattaacatcgctacaaattgatttgct

SEQ ID NO: 44672 - DNA, 1706 bp, Glycine max
  Clone ID: PAT_MRT3847_140337C.1
tttcggttctatattaatcgctttaatgtgtttttacttccataaagaatggttcaccttcttttttttctgagtgtgtagtccaatgtttctccccacttaaattttctcttttcaatcgtattgcaattgatctcagggccatcgaaaggtggtcaaagaaagactaagaaaacaaagactgatataagtgttttgtttatggactggaatttgcgctgcgagaagacgacagaaggggaagtggatcaggcaaacttacccaacatggaaacaatggaaggctcaagcagatatggaatgtatagaactaagggggaattttctgttgacttgaagcttggccaagtgggaaattctggcagggaatcatcagtgttgactaagtccaaagatggtggtgctgttggagtctccaaaatgatatcctcatcttcttcagggtcagctaagagagctcgttcccttagcaacgggacacaaacagtgtcatgccttgtggacgggtgccactctgatctcagtaactgcagagactatcataggcgccataaggtctgtgaagtccattccaagactgcacaggtcacaattggaggccagaaacaaaggttctgccagcagtgtagcaggttccattcactggaggaatttgatgaggggaaaaggagaaactctaaaaaaattataatattttccttccatgacttgcaatataccaacacactagaaagtcaatgactaaatttagtagtaattttatcaggcacacagttgctacctttctcaagttcacatgagtacccatccacaactgtggtgaatcctacttggggtggagttcttacaacttctggtgatgttaggcttcatgggcacaaccaacaccaccaccaggtgcatttggctgataaacaggacctttttcttggatcttctccagccggttacaaagaagggaagcaattggcattcatgcaaggtgaccacaccctcaacaaccggagcccacatcttccaggtgcttccgtgggccaggcccagatgtttcttaggaccagcctgtattcagaaagcgatgggctgagatgcaaaatgttctgtgatagcctaacaagttcgatccaagacaacaacacctctcgtgctctctctcttctgtcatcaccaccacaaccgctcagtcctggaaatggattaaacctgatggtgaactctcactcgccccttatgcaacccttgggcctgagcctgcatgataacagcctgggctccgtggaccctgttttgggccccaatgattcttcatcaatgtataacataggttctaatggatctcaggggaatgaggcccctccactatttccctttcaatgggaatagactttataaggggactcgtcctttggatgttgattctttccctcgtactatttcaatgttcaatttatcttttaatgaaggcaatgaaccattatctatcacgtttaacaaaatggtgtggaaattttcatgtctttaaaagtgttgctgtgtactatcaaaaactatattcccgtcacctttttgtctttttttattctttgaagcagcaccacatttcaatgagaaactctacttgctcatacaatgacatgtgccagtgcgtaacttacaaaacgcacaaaaaaaattattgaagtaatggtcctgatcggacgcgtggg

SEQ ID NO: 44673 - DNA, 490 bp, Glycine max
  Clone ID: PAT_MRT3847_140338C.1
ttttttttttttttttttttttttttttttttttttttttttttttttttggttttttttttttttacaacccccccccccaaaaaaaaaggggggaaaaaatttttcttttttcccaaaaaaaaaaaaaaaatttcgcgtccttttttaaacaaagtttctacaaattttccctgacctaaaaatgggaactttccgttcaaatttttggaaaaacccgaacttttttttttgaaaaataaaatttaatcctatccctaaaaaaaaaaatgggaaatggtggggaaaataaaaaccgttcaaaacgaataaaatatttaaataaataaataaacaaactttttcaaaaaaaccaaaaaacttgtgtatgggaaaagcccttggtggttaagctaccatttgcttttgttttatatacagagtggtccacccatggggaaagcagcctttttttacttaaaaaaaaaaatttgttgcttttacccaatgg

SEQ ID NO: 44674 - DNA, 245 bp, Glycine max
  unsure (1)..(245): unsure at all n locations
  Clone ID: PAT_MRT3847_140339C.1
tgattggctcccnagggtttaacctttctggctgtgttnatatgcgtttcagcgctgtacactgngtccttactgttgcgggggatgggcaaatcatggccttgttatgagcttcttcanggnatcatgccctcaggctgaaagaacatacatacacagaacnagtacaagcttactctacaagcgccacaagaacactgactttctcctggctcnggaactcttccatgactntgctgttcaga

SEQ ID NO: 44675 - DNA, 532 bp, Glycine max
  unsure (1)..(532): unsure at all n locations
  Clone ID: PAT_MRT3847_14033C.1
ataaccaactctctgacttaaggacgcagactccaggaagaccatgttaaaagtaaggacttttttaaatttgaatttgccaggtaccttcatggatcagcacagcttgctcttagatagaaggaggatcgtgtttgaaaatttgcttttatttcaagtccataaatgttcatttatgcagttgtaaattacgatcattacctacaaaaaaagttgactattttgtaggcttactaagacaaatttcaatgcctctactacgtaatcattgcatgaattatcatagccattttaattgcactgcagcaagcttagcagattgaaacacgcttattcttcactcctccggcctcacggtctttgcttgaggccaaagaagggaatgtttctaaatgtggaatagcctgtgtccagaaacactaacattagcaaactttttgatttattaatagtaatttctaatccatacttatcatttcatcttctctccttttaaaacactcntttggacttggcttcctatgattggatg

SEQ ID NO: 44676 - DNA, 514 bp, Glycine max
  Clone ID: PAT_MRT3847_140340C.1
tacggctgcgcgaagacgacagaaggggtcctcttgatatccgcatgaattccaacccttttgcaagtgtattctcagtagctaaataaatatcatatctatagtaataaatactacaaaaaaatattataataattgagaatagaaatctgtaaccacaaaaattagtacacttttctcattattgctccttcatttgtatctctcaaagttataaaattaatgattgggtatttgttcatattgtccatgaacaaatattgttctcatactgcattaaaatgcatgctcatacagagttcaaagaatagaagagtttacaaagcaacttgaggcaggggatctgaaacttcggccaaggtttatgttgtgtacatgggaagcaaaagtggggaaatcccagatgataacctgaaggaaaatcatcaaattcttgcttctgttcatagtggatgccaaatggcattactatggtagtgaataacattggaaattggacttcaatggcattact

SEQ ID NO: 44677 - DNA, 334 bp, Glycine max
  Clone ID: PAT_MRT3847_140341C.1
acagaagttggaagattcttttttttgcctaggaggcttattatgtatatcagtaggaggctttacccaaccagtatttggttcaaattacaccatgtacttcccatgatgtatcaaatttttctaaagccaactgttcgagcacctgtaaaaacccgggggaaaattcattgattggttggcatcaagagacatgaattaacgagtccacccggcttgccttatgttcctttggtgcacaaaataactctgtgtctatgtaggggtgttacagattatcatgaaccaatccattcttcctgcagcttcggttgcggtcctttttggcaacctg

SEQ ID NO: 44678 - DNA, 423 bp, Glycine max
  Clone ID: PAT_MRT3847_140342C.1
gccccaaccattcgctattttttcttatacccacaaaggttttgctttacaccgacgaaagcccgcctaaaacatatatattacaccaacttgcaagcttatttttgactatggagcgcccccttaaagcgccgtctcttcccccaaagtatattttatatctctgctacgaggaataaaactatgcagtgatcataacgaccacgtgggaccgattttttatactcctctatggcaattggaccgggtaaatgtgccatatttctagggcatatttatgaaacgtgcggggcctggtaaacttgtatgaacccggtgggggcaaaaatgacatttttgtccctttaagttgggcccggggagcctaatcaaccctcttttgggaatcctttgagctggggaaaggcttccctacaagaaaaa

SEQ ID NO: 44679 - DNA, 346 bp, Glycine max
  Clone ID: PAT_MRT3847_140343C.1
gatcgatgccatctctgggggcttgattgagaataaattggcgttcataggaacagccgatccagtgaatgttgtgagcaaacatccgcatgtataggcagacagacatactctcagtaggtccagcaaaggagcccgagaagaaagaggagccaaagaaagaagagaagaaagaggagccaaagaaagagggtgaagccaaaaaggaagaggagaaaaaggaagagcctaagaaagaagaagagaagaaggaagagccaaacaaagaatattagaagaaggcagaggagatgaaaaaagaggcaccacccccctccaccaaaacccagtattagagttggtcaag

SEQ ID NO: 44680 - DNA, 220 bp, Glycine max
  Clone ID: PAT_MRT3847_140344C.1
gctgcgagaagaccacagaatgggcataacaagagacaaaaacaagataaaacagccatttaagaggaggtggataacttgaagaaggtgcgatcaataatttataaataaaggaaacataatgggaatggaaagaatgcttatccttaacagcaaatcttcattccaagtttaaagaagggttctttcacattctaaatgccaaaaaaattttgttttt

SEQ ID NO: 44681 - DNA, 425 bp, Glycine max
  Clone ID: PAT_MRT3847_140345C.1
gaggagtcaaccaagttctgttcgtaattgtgaggaaagattttaacattcaagtgaaacaatatataggcatttacatagtgtcttagaagctgtgtgtatgtttgcaaaggatataattaagcctgttgatccatcatttagagatactcttgatgagattctaaaagatgctagatatcgcccttattttagggattgtattggtgcaatagatggtactcatatacgagtttgtgttccctctcatttacaaggagtctatagtggtcgaaaaggctacactaccactaatgtcatgattgtttgtgactttagcatgtgtttcacttttgtttgggcaggttgggagggttctgcacatgatactaagatattttggaggctttacgtaagcctgcattgcattttccacatcctcctca

SEQ ID NO: 44682 - DNA, 322 bp, Glycine max
  Clone ID: PAT_MRT3847_140346C.1
tcggttgaggtcattattggcatgcatgggggcaggaaagttaagggcttccaataccagtggattttgcaatgggggtaaagtggccacccttaaccattatgtggccttatgggctcattcttgtgatttaaggttctcgtcttttggccaccattcctaagtccatttaacagaaaactgtttggaatcaaatgccaccagtgagaacaccttggaattttgattttagcaggcaaagtttttgccagttttttattgaccttctcggggaaggaatcttattggacaaaactggaaatgggatcacactaatacaaaa

SEQ ID NO: 44683 - DNA, 354 bp, Glycine max
  Clone ID: PAT_MRT3847_140347C.1
cggatttattcctttggtccttggtgatcagagtacattaatattttctctcgtagatatgaagatcgtactggtgcaaacgctggcggggtgggcttaaatcaaaacccaaaagtgtgtcattttgtggctacagcattcctcatccttcagataatcgtgttaataacatcaggcccaatcctcgctcgcaacgcccacttcatcaatttccgggcaccgaacctctaccctgaatccctaacgtgggacccactcgcgcatcactttctcctcgcatccctccgccaactcatcatctccgccgtctcctactcggtggtcgtggaaaccttcatgtcagacaccgacctt

SEQ ID NO: 44684 - DNA, 582 bp, Glycine max
  Clone ID: PAT_MRT3847_140348C.1
gtacgtatagctaggatcctctagagcggccgctgttttttgttttttttttttttttttttttgagaacaaatttaaatattaattaacaattatctcataaaacagtacacattataaaactattttataataagttgaaatatcttttaacctaaatttattagggattttaatttatacataattatgtaaaatttaatcatcaattgatataatgtctaacctttttctcctgagagaaatataatgtccaaccttaatctccttagatattatttctccccaaactttaagaaataagtaaaaatacgaagatatgatcataatccatttatcaataaattaaattgagcagaaaattgaatattaacaaatacaacataaattaggaaacattatgatattattctataccaagttgaaataatatagtaacttctacccaaaaagtatagtaatatatttaaaataattttggttcgattatatttactatgattgtcctgtgtttgttgaggacttttttgtaatctacttattatattattttttactaattggcaacccttctgtcgtctt

SEQ ID NO: 44685 - DNA, 420 bp, Glycine max
  Clone ID: PAT_MRT3847_140349C.1
ggggaggaaatagggcaaattgcccatctttttttgttcacagggctgggccttttctaatcaaatgaattgaaaaacaccggaaaaattggcttccccaaaactcaccctaaaaatcaatttgcttttttaatctgggggttaattgttcttgattataaaccctgtaagaaatgttccctcaagaagtttttacttttttttctttaaaaccaatttcaccgaggttttgttttgccataaagtttttttccatgcaacactgaaggtttttttttaaaaattgcctgcttttttaaaactggggcccaacattttttaaacaattgaaatttttttttttttggaggccacacaaatgcttggggcccaatgaaaatatccctttttgggaaggcactggacggaccccctttttgc

SEQ ID NO: 44686 - DNA, 1292 bp, Glycine max
  Clone ID: PAT_MRT3847_14034C.1
tttttgttttttttttttttttggaatgaatgaccttcactcttttagatattaatagtcttggcttaaaccgaaaacaaaataaatttataagtgtatcgaaacaatacagtgattttgcagattacttcaatatatgctttgtcagattttacattgtaaagttcaatgccacaaattttacgcatccagcaatccatggtgctttcatccagatcttgaatctaatatcccccataaactgctagcctttaagacacatatgacattttgctatcttcaattcaatcattaccaatatattgtcggtcaatctgttcaagaacctcaagtaagcattcctccatgcttgccaaagtagcattggccctaataagctccaaaaccctgcgaagaatcccaaccccaagctcatgtataatgcttcatagaaaactgaattgtcatcttcgccatgaattgctggttcttgaggctttactgttgtttcatctccagggcaacttttgttgagttgttcaccacaaagaccaagatttccttcaaaactagaggcatcaaaggtttgcaactgtcttcctcaagggattcttccaatcagtcagttgttagataagtctaacatggctaggcgatcaattttagagagagtagaaggaatttttccagaaaaatgatttcttgataaatcaagaaattctagagaactcaaattcccaatgtcagaaggaatttctccacggaaatagtttcttgataaattcaaagaaaccaatccaagtaaatatccaatctcttttggtacttcacctgttaaatcattgcttgagagatcaatgctctttagaagatactcggattcaaaaacatatgtttttgaccttgacaggtcaggaacacattagtgtcataaatattatagagcgtcactagaggtgaaattttccgtatccttataagttcccttgggattacactcctgtccgtcattgcagtaaaattgctcagacatgttggaattcctcctgacaagtgattccttgagagatccaagagatgaatttggctcaaatatcagagatgtaaaggaatacttccaaagaagttattaactcgcaagctcaagattttcaattgttgcagactttctccaatccatgagggtactggaccagacaacaaattttcacccacatctaatataactaaactagagcagttcttcaacgtgagtggtaattctccacttaaattgttgtttcgctggaccaaagcttcgagttcaacaagag

SEQ ID NO: 44687 - DNA, 1670 bp, Glycine max
  Clone ID: PAT_MRT3847_140350C.1
cggacgcgtgggctggacaacgagcatctcgtagatgcgtaagagcaagcagttctcaaataggtgtgcttcttatgggactttgcttcttaacgctcggatctgctggggtaaggccatgcagcataccatttggtgttgaccaatttgatccaaccacagatgaaggaagaaaagggatcaatagctactttaattggtacaacaccactttcacaatggtattgttggtcactcactgtgagctggtctatatccaagactctgtgagctggaggatagggtttgggataccaactgtgtgcatgctatgctccataataatgttctttgtgggcacaagggtctacgtgcatgtaaagcctgaaggaagcattttttctggtattgctcaagttttagtgactgcatataaaaagagaaaactcaaccttccaatgagtgaggagaagccagatggagttttttatgatcccccactaattgggatcacagttgtgtcaaagctgcctttaaccaaagaattcagggccttgaataaagctgcattaataatggagggtgagctaaacccagatgggaccagagtaaatcaatggagacttgtcagcatccaacaagtagaagaggttaaatgcttagcaagaattatcccaatttgggcagcagggattcttagtctcatttccatgactcaacaaggaacatttactgtgtcacaagcaatgaaaatgaatagacaccttggagccaaattccaaatcccagctggttctgttagtgtcatatcactaatcaccatagctttatggcttccattctatgaccgaatcctagtgccaaaactcagaaaaatgactaagcatgaaggtggtatcactctcctcctaagaattggaattggcatggtgttctctattctatctatggttgttgctggctacgttgaaaaagtgagaagggattcagcaaattcaaatccaactccactaggaattgctccaatgtcagtgttgtggctagccccacacttgatccttatgggtctatgtgaggccttcaatattataggacaaattgagttcttcaacaggcaatttcctgagcatatgagaagcattggtaattccttcttctcgtgttcttttggtgtgtctagctatgtgagtagcataatagtcaacatagttcatcattctacaagaacacatagccatccggattggttaacagatgatataaatgctgggaggctagactacttttactacctaatagctgggttaacttccctcaacctagttttttttatatatgttgcaagaagatatcagtacaagggaaatgtggacctccttgatgaaactcatcaggtagagcttggatctcacaaagcctaaatttaaagagatttatataaagattatgttgctatatatgtacgaagactttatagataaatgaaagtgttttttttttcaatttaaaaaaaaaaaaaaaaaagctatatcacgttgttatatatatatatatatatatatataaatcgagttggttcaaaaaaaaaaaaaaaaaagggcggcattacccaccaccatcacactatcacttgcaaccccaataataataatgccttcccttcaccgaacgtatctgtcttaaacttggcc

SEQ ID NO: 44688 - DNA, 934 bp, Glycine max
  Clone ID: PAT_MRT3847_140351C.1
cgctggtgtgccctcccgcgcgggtggccttacccctgcctctttgtcccacgcgtccgcccacgcgtctgcccatgcgtccggcaaagcaatggcttcgtcttccctcacttcagttcctctctcctcttcttccctcaatattccactttcttcctccaaaccttcctctagctttttatcttctccaattcccgcattctctcgcactcccaaaaccctgtttgccgaatcaaaatcccacttttacccaaagagaaacgataatgggttttccatcagagcccaaaccctagacttctcggattcattcttcgaagggggtttcggctccgaagacgacccctcttcccccggtggacccggcttcacgggcgtggaggaaaaggaggaaccccaatgcccaccgggtctcagacagtacgagactatgatggttttgaggcccgacatgtccgaggatgaacgacttgcactcacccagaagtacgaggaggtgcttgttgctggaggtggcatgtatgtggaggtttttaacagaggagttattccactagcgtatagcatcaagaagaaaaacaaagcaggggagaccaacacttatttggatggcatctacctcctgttcacctacttcaccaagcctgaatcaattacccctcttgaggagacaatgttaacggatgataatgttatccgatcaatgagttccaaaattaggaagaggaaatattagtttcttttcaagtctccagtaactctcctttaaggagatgcttatagagcaatgttatatttatcatttgttattatgtatttttccccctttcatttggattcaaggatttttgtaacatgattgaatttaattaaaagatagatgtaggtgctatcacttgcagtctacagagttgtggcaatcaagttgtaaatt

SEQ ID NO: 44689 - DNA, 651 bp, Glycine max
  Clone ID: PAT_MRT3847_140352C.1
actccgtgctggggtttatattttctacgtgggataagattgccaagccaaaatcacaaattcggctcgagtctgtacagaacttgcatcatatcttcccagccgtcgtgaattcttagcggccgtcctttttatttttcctttttttttttcaatagtgaatatttgtgtacaaacaagcttgcttgctaaggctttgtatattttttgactatggcaacagtaagtttatttagaagcactcgttttgttcgagtatgagctatagcagactgcaacatattataagttgagcaagatgaaagaaatgaaaatattaatattacgagaaaaaaaaaaaaaaaaaaaacaaataaggttttctgttgtctattaatccaaatgtgatgactgatcgttttttattttcttctcaaatttcaaaaatgagatcaaggggaaacgatgtattaaaaactgaactgaacctatttgtagaaactaactaaacatgtaaaccagtctttttttatctcgatatcttcaattttacactaccatctaattttgtacttgcctctttattaggacagcagcagcacttaccagcagaagacgtagatttattgaatcattcatttgccacagcacagtttctaaaagtttaaaaca

SEQ ID NO: 44690 - DNA, 417 bp, Glycine max
  Clone ID: PAT_MRT3847_140353C.1
ggaaaggttattagaccacatgatttaagaactcactttcgatcctaaaaaattctctgaactgtcacactgtctgggctagtcgataaagctgcgcataacgactaacaatgaagtacaaacttaactcgatggaacataatgaaccaacattggaacctgatctttgacactgtgatccggctaagattgacattatacactccactactcacttctgggcttcaaactctaggtagcctctcatcatgaggcgggaactcagaaaggctgggtggttacaacatctgcattatcggttataccaatcgatgcctgcatgctgtctatggagaatgctccaactgtacaaaaacttcaatcatacctgttacatcatatgagtaacagccaaagctactatattctaggacagtc

SEQ ID NO: 44691 - DNA, 458 bp, Glycine max
  Clone ID: PAT_MRT3847_140354C.1
gcgctcctgaattgctgcttctttaagcatcatttatctatataacaatatgcaattatgtgggttttaacttacttgcgaccgtatgcactcttcttcctctcctgtttgatcttttttggtagtgttttagccacttgccctagtcttcaacatttatgatttgatcgtacctgtaaatcatttggtttgcatgtagtcacgtatcttaaacttctcatcacgaaagctttaaactcaattcttggtggtttaagtaagagctttatacctgcagtttaacactcccttaaaaaattggcttgcaatattaatgttaaagctgtgaatgggagtttgttttgcattcagctactttgacattgctgatgatggtgtaaataataatgtaattctgatgactaatttatattatgtcatgttcttccaatgcttaaaaattgttttgatgaaatatt

SEQ ID NO: 44692 - DNA, 451 bp, Glycine max
  Clone ID: PAT_MRT3847_140355C.1
aaaaataaagacagtatcacttactactatggctgtccgagtatctctgatagacaagtctagaaaatatgcttacaaaaatatctgattaatcttttctatatctgctgtcatgatctcatctcactctgtagctccttatctcataaaatccacactccttcgtcaaccaatacctctcctcgacatctcttgtgaatcctggactagataagcaaacatgtctaacacatgaatcataactgcgaccacgaccgatcttgacccccacaaaataacacaacattcaactctagttacagtcattcttaatgacatacacctcacacattaacacagctatgaacacagacagctctatctcagttaagatccaacatgctcgccgaatacagaagaagccttggacgactgcgcgcacgagatggacttatctatccgcagagatagg

SEQ ID NO: 44693 - DNA, 109 bp, Glycine max
  Clone ID: PAT_MRT3847_140356C.1
caaaaagaagtctgatcctgtccagtcattatgagaagcttcagcagtctacgcagaggagaacatagacaagtaccagctcaaaatctctcagggagatcactagatg

SEQ ID NO: 44694 - DNA, 207 bp, Glycine max
  Clone ID: PAT_MRT3847_140357C.1
ggcgggcgtgctccgaaccaatcacactgctgaattttcagagacaactatgcacacatgggtaagagtctatacctccttacacgtgataagcttctctcgcactacatccgttacaatgaaattgatattgcaatgctgtgggaagttgagggcaagtgcgttgtctaggtagcagttgatgttgacattggttcaaacccttct

SEQ ID NO: 44695 - DNA, 418 bp, Glycine max
  unsure (1)..(418): unsure at all n locations
  Clone ID: PAT_MRT3847_140358C.1
tccggaattcccgggtcgacccacgcgtacgcccacgcgtccggtcagattgacactttcttaaactttcaagagcttgctttcccttttgtcttgctgtatgttgacattgatctctcattcctttatctcttcctcgattttgtgttcaagagaccattgaagacatggcaagagagtcaagaatccacaccaacaggatttatcctcgtctgcgtgtggcttagtcaagggtcatgaattgtatactgtgtaacagaacaagatttgggtggctaaggtagcgccacatgtttgtacctcacatgccagagtataccaacctgatgataagtacaaatcaaaacagagaacaatttttggacctttntgtggaaaatatatttttagcttgcaaaaagatgaccaattcatgtgc

SEQ ID NO: 44696 - DNA, 326 bp, Glycine max
  unsure (1)..(326): unsure at all n locations
  Clone ID: PAT_MRT3847_140359C.1
gagngnnggggngaagagtattgtgtttcttnttgatggtagtttgggaggtngaggccgagtgagcactgttggtccgatctctttgctgcctctccttctcttgctcacagggagaggtaggctcgttgggggaccttttggccttttaagtgagtcggacgcgcgatctccnccctgtgcacgagtgggtccttcccacgctctggctcaggtgagttgcgttttgacgccagattcggcagctgcttagtgttgtgccttggggtccctttgcctttgtgcttgctggcgatgcccggtcgcgtgggtcggcccggcaattc

SEQ ID NO: 44697 - DNA, 567 bp, Glycine max
  Clone ID: PAT_MRT3847_14035C.1
ggaacaacaacatagttcatcctcttccttctttctccaccaaaccttaaaccttaaaccttaaactcgcatataacccaatcaaatttgcctttagattctcatttcccgtcaaactatctctctctctctctctaggaatccaaaatattccaactaaacctttcttccttttcatggcagatcctacccgtctttcattcagttcaatctcatacctgtatgtgtatctctaatgcaatcagttaatgaatgagaagaggaatccaaaacgtcaaaaaccactgcctttcagcatgcctgtgacagactcaaatgatccgcagaattttgatgataacattcttttccctgttgaagagattgtacaatacccgttgcccggatatgtgtcgccaacttcaataagttttagtcccgatgatagtttaatttcttatttatttagtcctgataactctttaaacagaaaggtttatgcatttgatctgaagaccaatacacaagaattggtattcagtccccctgatggtggactcgatgaaagtaatatttctccggaagaaa

SEQ ID NO: 44698 - DNA, 288 bp, Glycine max
  Clone ID: PAT_MRT3847_140360C.1
gttcttaaatgaaaagccccaacctatgcctggaaaaagggtcaccaataccctcccagtctttgaacgcaaccttctttattcccttaaattttggttttttgggtgtaagggatatttaaaaggaattcctaatcttaactacattttaattggaacaaaatatgatgaatagatttcctaattttttaaaaaatgttgtatgtcccttgtaaattgtaactacctcctacttttttgctgtataaaagatgtaacattataattgtactttttatgcctgctttg

SEQ ID NO: 44699 - DNA, 533 bp, Glycine max
  Clone ID: PAT_MRT3847_140361C.1
gtaccagagtcctgtcacaacaaaccctgaggggacatcgaaaggtatttaggggttgtaagggatctgaccgatgacggcataagtaggcagctattattaaagcacacgcacatgctggtgcggggagagtatttaagctaatatgtgtggtgaaggtttagtgatacggacttttaaagtgccccggacccgggttgtgctcgtcagcctggtcaaggtcagtcatcctcatcttcggatccccgtcccatgcgctagaaatcatcgcggaacccatcatcactgctcggttaggtgcccctcacgccacactcacaaccataaccaaatcggtcccggccgtgctaactcagcctggtccggctacactatccaaaccaacaaatgtcttctatcgctcccgttttatagctgttcaaaaagccttcagaccggtatatctggacgtcaatgccattgtctgtacgttcgtgtgtcggttggtgagtttcctcgtattcaggttcagtgtcttcgtagtcttatgcttg

SEQ ID NO: 44700 - DNA, 174 bp, Glycine max
  unsure (1)..(174): unsure at all n locations
  Clone ID: PAT_MRT3847_140362C.1
tgcgagacgacagaagggngggtgcgacgannatatccccgtttccctcgggcctcgtgactattgagccatatagtggcgcattcgcgcgtgcgtccttcggctcttagcttcgcgtgacttgagnaaaagaggaatgtagggtcacggaggggtttcagtcctgctggcatc

SEQ ID NO: 44701 - DNA, 290 bp, Glycine max
  Clone ID: PAT_MRT3847_140363C.1
ggttcagtcgatgattagccagatggaatatcagtattaagtttccacatcatcgtcatcacactgacaggtaacactacacccttccaggtccagagcatagataccaccgacacagtgactgacaagattcaagtgacggaatgcattcctccggatcagcagcgtttgattttcgccggaaagcagcttgaagatggaacgaccctgaccgattagatcatccagacagagtcaacacttcatctcgtgctcacgcatcatggtggcatcatatgaacttctctcat

SEQ ID NO: 44702 - DNA, 356 bp, Glycine max
  unsure (1)..(356): unsure at all n locations
  Clone ID: PAT_MRT3847_140364C.1
ggtgcacttgaatgagagagagatatcctgaagtgagggttttcacttggtggtgaccacctatagtgatggaactgatatttacatagactccaattacattcaagatatatggccattcaccactaaacttgggctttcgttttcggtcttctaggcaacgtgatctcctttatggtgttccttgcgctattaccatctttttaccaaatctacaagtaaaaatcatccgaagggtttcaatcactaccttaagttgttgcactgttcagttcaatgctctggatcnactatgcattttgcaaactggatgctatcctccttctcattactattaactcctttggatgtgtgat

SEQ ID NO: 44703 - DNA, 191 bp, Glycine max
  Clone ID: PAT_MRT3847_140365C.1
aatcgaaaagataagactgcgttttgggagcaggtccaaccacaacagatcgactcgacatctttcacaaaagtgataacactcattgttgttacccagaattttaattcttttattattgaaccatgtgcactgccacttttttggatagggtaaccaaatatgtctgtaccctacatacatatcgcaaa

SEQ ID NO: 44704 - DNA, 298 bp, Glycine max
  Clone ID: PAT_MRT3847_140366C.1
acctaagctttggatgtgcggctcgagagacgacataagggacaggtgatcatgcccccttatattatgtttctgatgtctcctacagggctgcgtaaacctaatgtactttataaaatttaaattgcataaccttacggttctccaatataacattatttctaatctaagactacatcttaactacacatatcattcatcacgacttaacattagcaaaatctattctaatctaatctaaagtttttaataccctcttatcattttgatcacataaataatttcacacctcgttctt

SEQ ID NO: 44705 - DNA, 699 bp, Glycine max
  Clone ID: PAT_MRT3847_140367C.1
caaaaataaatttatatatatatatatatatatatatatatatatatatatatatatatatatatatatatatatatataaactgcattatttgtatcattcatattaaaaccataaaagaatcatactttattacataacagccagcgaaaagttaaagatgtcatattaataaggatatcaatagaggaaaagaggtaattctcaagttaagaacttgttgaagagaccatgcatgaaattttttcatttccatatgaggaagaaagacccatggcatcattatcctcaatctaaagtcaagaacttgttgaagagcccatagaatttttccatttccttaggaggaagagccacaataatactcacccctccacctccatcaatgggaggaaacaacaaaataatatccttcctatgatacaccactggacaacaatactttggcttcccccacggatactccacttcctcaaaccccaatctccaccatgaagaaaccaaaacctccctattgggacaccctttgtttgtctctccccaatctatgatagaccttgcatactcatttgtcatcctagttgctccctcacgcaccatttcaactagtttcataaaaggtaattcttctaattccttacactctgtcgtggcataaacggttcccctgcgttacccgcgtatgatttaggctataaa

SEQ ID NO: 44706 - DNA, 720 bp, Glycine max
  Clone ID: PAT_MRT3847_140368C.1
gcctaacatcacttgttttgggcttggatggcttaacattttcagccattgtcagttatcaagttgaatggttgaactatgttgattgatttgaaatcattaggtttcaattgattgcaatggactagacttgacatttgtgatgcataaaaagtccctaatcattacagagaccagtacaaaagctgacaagcctctctttgaggtttgggaacgatctaatagactgtcgtttaactttatgaaaccaacattagttgaaaatgttggtcattcatgcccacaacagattatgttaagcaactcatgggaatgtttaaggagtactcataatttgacattattgctaagttgattatggggaatctaacaagtgagccgacgaacaagaaacttgacttgcttagcccattcaagatcatgtagttgaaatatcaaatttgacaacaaagttgaagttaatgaatatggaagtgagtcttttcttgtactattcatcttaaattcttttcttgctgaatttgatcagttttaggtgaattataacacccttaaaaaagattggaacttaaaggaaattaagtcaatgttaatgcaagaaggaagattaaaaaagtgaaagacaactctatttatctcatgaggaattcaataagagcaagttaggtaaggaagcacatgggcaaatgcttaatgaaggtcaacaaggtagaagtctgt

SEQ ID NO: 44707 - DNA, 427 bp, Glycine max
  Clone ID: PAT_MRT3847_140369C.1
ggggttgtgttttcttttgggatttctttttttttttctttttttttttttataaaagtgtttttccccccccggggcccaaccaggggaaaaaaaaattttgtgcacccccccaattttttgaacctttcctaccgaagcggagtttacaaaaaaaacccccaaaaatttttgttaattacagcagccggagagaaaaaacacgctttttttggaaccttattaaaccggccaaaacctttaaaaggcccccctttaaaaaagcagggatattccaaaacccggccctttgccaagtgtgattcccccaaatgtgccacgtttggcccccgcctttatttttataaaaaaagtgtgacaacaccgacccccttgtccgcccaaagggggcccaaaagcatgggccccccccttgaagcgccccctt

SEQ ID NO: 44708 - DNA, 260 bp, Glycine max
  unsure (1)..(260): unsure at all n locations
  Clone ID: PAT_MRT3847_14036C.1
aaggcggcttcggaatcacaggctacgatgcggttgcccatatgattgaagagatcccaaatgcgtcagtcgaaggacccaagattatgatctactgtgtcatgatcggcactgtgaccgggtttctctttctcatgattctcttttcgtctcaggtggcgatnnggagncattnantnggggggtnaggccccccnaancnaanncctcaaaatgnnaaaaancggggggcnnanttttnttccccantttttcccctt

SEQ ID NO: 44709 - DNA, 133 bp, Glycine max
  Clone ID: PAT_MRT3847_140370C.1
gtaacaatatgaagcccgtgccttatgaaccataattatactgccccctctcgacatcatacctccgggggggaaaatttacactttctacctgaataacccccttttagttataactataaagacaaacccc

SEQ ID NO: 44710 - DNA, 362 bp, Glycine max
  unsure (1)..(362): unsure at all n locations
  Clone ID: PAT_MRT3847_140371C.1
tttcgtctcgaggagagatgcatacctgacctatggtttntttatcattcctctacccatttccagggtaagcttaggatctcctatctgagccttactcatgtgttcttaatcttcaaggaaccctttactactctaaagtttccatattgaacaggaaaaaataaaatagagcttgctctgagagagtgtgactgatagggaagatttggatcattgatccaatggtgagatatcttgtgatggttacttattgagaaaagtgttgctattgattaggtaatttcttgatagattatgcaagcattcattctgatcagttttgaattttgataggctcatattacaatatggtggattaa

SEQ ID NO: 44711 - DNA, 455 bp, Glycine max
  Clone ID: PAT_MRT3847_140372C.1
gccattccaccatacaatgaatggatccttaattgcatgaggttctcgctccatctgacacataggaggaactagcggctttagagggcgttgaaacttctaaaggctgcatgtcagctggttaatcaaaagatggagcgctcgaacttaaacatgacacagtggggggaaccatcctgtgcattgaacgattgtgatatggatcttgagagagcctgttgagagcatgcgaatatgcgttcagtactcattgcgtcgcttgaacgatttgattgatgtgcacagcattgatagcgcagagctcatgacttgtaatggccaagcctattgattgatgctgctggagacagagcaagctttttatttacactacaagatgtggtgattgctgaaaaccttggtcggctggcacaggagcgtaaagcatccactttacttgaacccacgacactcat

SEQ ID NO: 44712 - DNA, 543 bp, Glycine max
  Clone ID: PAT_MRT3847_140373C.1
ccacgcgtccgcccacgcgtccgacggctgcgagtaagacgacagaaggggacggttttgttcttcacagtccacgtcactcgccttgcaaaaccaatccttccacttctttgctgggatcaatatatggctctgattctgcgtgctaccaaaacaggcgagactgtcatgcttacctctgattgaccatcagtacagaggcatacagcaggaatcggcccctacttcttcacacgaggtggtctaacaaaacgtccagaatttctcaagcatcaatgctccggcgaagagggtctggtgtggcaaccccgcgatggcccctgtactagagaggcatgcgatcgctccgtacgatcatagggtaaatgatgacaaggcttgacttttatgttgtggatgggaccatgcgcagaatgaatctatggagccaatttccatgcttagagatcgaggatgaaccactaaaagagcgggtacctagacttggacaaggcgcatacctacctccagtggaggaaggtgctcattactgccacgcagcac

SEQ ID NO: 44713 - DNA, 2062 bp, Glycine max
  unsure (1)..(2062): unsure at all n locations
  Clone ID: PAT_MRT3847_140376C.1
ttacggctgcgagaagacgacagaaggggatgtttgtgtgatgaaaagcaatgcagttgaaagtgatgttgatgtgcatgagttgaaaaatagtgcagtagatagtgaatctgaaccttcaaatggtgcagttcagagtgaaattgtgtctgagatgaaaaacaatacagaggagagggaagctgaaccttcaaatggtgcagttgattgtgaagctgaacttccaaatggtgcagtggaaagtgaagctgaaccttcaactagtgctgtcgagagtgaagctgagccttcaaatggtgtagttgagagggaaactaaaccttcaagtggtgcagttgagggggaaactgaaccttcaaatggtgcagtggagagtgtagctgagccttcaaatggtgcaattgatagtgaagctgaaccttcaaacggtactgtggagagggaagctgcaccttcaaatggtgcagttgagagggaagctgcaccttcaaatggtgtagttgagagggaagctgtaccttcgaatggtgcagtggagagtgaagttgaaccttcaaatggtgcagtggatagtgaagctgaatcttcttggaattcggctcgaggtgaagctgaatcttccaatgttgcagtggagagtgaagctgaatcttccaatggtgcagttgagagtgtggctgagccttcaaatgatgcagtggagagtggagctgaaccttcacaaggtgcagtggagagtgaagctgaaccttcaaatggtgcagtggagagtgaagctgatccttcaaatggtgtagctgagagtgaaaatgaaccttctgtggatgtgtgtgagacaaaaaacgatgtagtgaatagtgaagctgaaacttcaagcggtgcactgcagagtgaaaaagaggcttgtgttgtgtctgagatgaaaaacaatgcagtggcaagagtgaagctcaaccttccgttgatgtgtctgagaagaaaactaatgcagttgacagtgaagctgaactttcagttaaaggtgggctttctgttgaaagtgaaggtagtaatcaaggagatgaagattcaagacctgcctcagatgctttggatggacagaatgtgggtacagaggtagtgaaaaagccattctactatttgatcagggttcccagatatgatgatgatgaaaacataaaagagaagataaaaaacgctcttcaccaagtagaggagaagactaaaattcgagatgctattcgaatcgaaagccagactataaaggccagttgtaaggatttcgaccaagagtttagggctgcaatagcagcccatagagctgctcgtgacttgctcaaatccaaacgccaggaaatagattcagtccaatccacaatgaacagattaaacaatgcaatttctgttggggatatagatgacaagataagaagcatggaacacatgatccagcatgaaactttgcctctaaataaagaaaagcaattgatacgcgagatcaaacaattgaagcagaaccgtgaggagttgtcttctaatatgaaaaagcaggatcaatcacaacaatctgtagacaacaaggatgacaatattgaagagcactttaagcattacagcttttgaagaaggaaatggaagtgcttagaaataatgttctgaagtcagatacagaaactaaagccgcanagaagttgaataatgatgaatgtgcaaaactgaatgagttgcgtgctccagaacactccgctgatgattctcggtgtgagcttatgcttttgttgatgtgtcgaaaaagaaaactgacacaatttatggtgaagctgaactttcagtgaaaggtgggctttctgttgaaggtgaaggtagcaatcaatgagatgaatattcaagacctgcatcggatgctttggatggacagaatgtgggtgcataggtcgtgaaaaagccattctactatttgatcagggttcccagatatgattattatggaaacatgaaagagatgataataaatgctcttcaccaagtataggagaattctaaaatccgagatgctattcta

SEQ ID NO: 44714 - DNA, 560 bp, Glycine max
  Clone ID: PAT_MRT3847_140377C.1
gctattattctaaagatgacataacaagaggccctttttgggactacaaattcagctccccacacatgcaatgcccatcaaacacatactcttctgatctctgtttccagaatagaatagatggctgcaattgtgtgccagtcaagattacacagacttatgttggcatccccaaaacctcctcctcaacaacccttcaagtcttgttgcttctgggaagaatccaattatgctaaaccacattatgacgatgaagacaattacaaagccgacgacaccccaacagattggagctccattcaagctctttcaagtactgtgactgtgagcaactctatatatgaggtgaaacaatcatcatcgctgctgagactcagccccaagagtttggagctctgcacggagaaactagggaatgagacaggaagtgatgacatcacagctgagactggcattgatgacttgctctcttcttcagaaattacaagggagcagaaaagtaagaaagtgcgtgaagcagctcggacttttccaccacctttgagaacgataagaggatc

SEQ ID NO: 44715 - DNA, 256 bp, Glycine max
  Clone ID: PAT_MRT3847_140378C.1
cccacgcgttttttcagtatatttcaccggccaactcacaccagtgacgacacgggtacctatgttgtggaattccataatactaatgcgtagaatgccagaacaacagcagaaagagaacgaggctgtagatcaggtgaggcatccactccgacacatcatacaggaactcttcaaatacaaggtctagaagattggggaggacacagtgaaggttgggatgtcgagcaaagcacaagttatcccataaaagaac

SEQ ID NO: 44716 - DNA, 760 bp, Glycine max
  unsure (1)..(760): unsure at all n locations
  Clone ID: PAT_MRT3847_140379C.1
gaataaaatattatagacttaaatatttttttaatttctgtaaatttatatatttttttaattttgattattgtattttttttgttcatttttagtccctattagtttgtattgtttccatttttgtttctataggatattttgtttatttttagtttttataaatttgtgtttttcgaattttggtttttgtaaacataaacatacgatgactataaatgaaaaaaattaaaatcttaaagaattaaaattaaaaaaacataaacttataagaactaaaaatgaacaaaaaaacttacaaaaaatcaaaattgaaaaagcactaacctagatggactgaaattaaaaaaataaacttaaagagtgtacaaacatatttaagtcaataatgtaattaatgtttaggcccctttagaacttagctaaaaataagcattatttcctaaagcctaattaatgccttagtaagttcataagtaataatgtgaagctacaacatatataattcttgaactaaatgatgtgtatagctagataggcataaaaaaggcgactatattggtcttatatatttggttggtgtttgtgatgagatactcctcanatacaaaatanattagaaatcctaaaagaattgccaatagagtattntaaatagtaaattacatgaactaaaatattttattttcaaattattagaatttaaaaattaatttcaaatttaaatgacanantanatttattccanatttttttagct

SEQ ID NO: 44717 - DNA, 3008 bp, Glycine max
  Clone ID: PAT_MRT3847_14037C.1
gatcatggacatctgagatgagcgccacctactgaaacaacttagttcatcctcttccttctttctccaccaaaccttaaacctttaactctaaactcgcatataacccaatcaaatttgcctttagattctcatttcccatcaaactatatatatttctctctctctctctctctgtatccttggaatccaaaatattccaactaaacgtttcttcctttcatggcagatcctacccgtctttcattcagttcaatctcatacttgtcggtgtttctctaatgcaattagttgttgatgaatgagaagaggaacccaaagcgtcaaaaatcactgcctttcaacatgcctgtgacagactcaaataatccacagaattttgatgacaacattcttttccccgttgaagagattgtacaatacccattgcctggatatgtgtcaccgacttcaataagttttagtccagatgatagtttaatttcttatttatttagtcctgataactctttaaacagaaaggtttatgcttttgatctgaagacctatacacaagaattgttattcagtccccctgatggtggacttgatgaaagtaatatttctccagaagaaaagttgaggagggagaggttgagggagcgtggtttaggtgtgacacggtatgaatgggtgaagacaagctcaaaaaggaaagcagtcatggtgccattgcctgctggggtttatatccaggacattccccattcaaaagcagagctcaagctttcaagtgtatcaggttcacccattattgatccacatctctctccagatgggtcaatgcttgcctatgtaagagactgtgagttgcatgttctgaatctcttgtctaatgaatcaaagcagttgacccatggggcaaaggaaaatggtttgactcatgggctggcagaatatatagctcaggaggagatggatagaaaaactggatattggtggtcactggacagtaaatatattgctttcactgaagttgactcttctgaaataccactttttagaattatgcaccaagggaagagctcagtcggtttagaggcacaggaagaccacccttatccttttgcaggagcttcaaatgttaaagtgcgccttggggttgtttcagtagctggaagctccattacttggatggatcttctctgcgggggcacagaacagcaaaacaacgaggaggaatatttggcaagagtcaattggatgcatggaaacattctcactgctcagatcttgaacaggcaccacactaaaataaagattgttaagtttgatattagaacaggtcaaaggaaaaatatattggtggaagaaaacagcagttggatcaatatacatgactgtttcacacctcttgataaaggagttaccaaattttcgggtggatttatctgggctagtgagaaaacaggatttagacacctttatcttcatgatgcaaatgggacttgtttaggacccatcactgaaggtgaatggatggttgagcaaattgccggtgtgaatgaggctacaggtctaatatattttactgggaccttagatggtcctctggagtccaatttgtattgttccaaactttttgttgatggaagtcaaccacttcaggtccctgtcagacttacgcacagcaaggggaagcacattgtggtccttgatcatcatatgcgaaattttgttgatattcatgattcccttggttgtcctcctagggtgttactgtgctcgttggaagatggaagtttaatcaagcctttatatgagcagtcatttacaattccaagattcaaaaagcttcaacttgagccaccggagattgttgaaatacaggctaatgatggcactacattgtatggagctctgtataagcccgatgcttcaaagtttggacctccaccttacaaaactatgatcaatgtttatggtggtccaagtgtacagcttgtttgtaactcttggcttagtacagttgatctgagagcacaatatttgagaaaccaaggcatcttagtttggaagttagacaacagaggaactgcgagacgggggttgaaatttgaaagctatttaaaacacaaacttggtcaaattgatgctgatgatcagctaaccggagcagagtggcttgtcaaacaagggcttgcaaaaggtggtcacattgggttgtacggatggagctacggcgggtatctctctgccatgacactgtcaagatatccagatttcttcaagtgtgcaatagcgggcgcccctgttacatcatgggacggatatgacacgttttacacagagaagtacatggggttgccatctgaaaacaagttgggatatgaaagcggttctgttatgaaccaagtgcagcagttgaaagggcggttgttgcttgtgcacggcatgattgatgagaatgttcacttcaggcacactgcaagacttatcaatgcacttgtggcagctggaaaaccgtatgagttaatagttttcccagatgaacgtcacatgccaaggcgtcatagcgatcgagtttacatggaagggaggatgtgggacttcattcagaggaatctgtaaaataacttgttattccatctttggttgaatggccagagtagtttctcaagtttttttttacccaatagttggttttatttcttcttgccttaaagctgctttgatggctatttttgcccacttcacaccctaaaaagaaactcttctggctatcaaataactgaataagcttttaatgtgcaataattaaaaaactctttagagttgccctcgcttccgccgttttgttttatcttcgggtcgcccgctctctttgtctccagcacgtccaccttataatttctttctttttcaccatcaagttaaccttataattcctcgtactgcttacaaggaattgttccccccctcctttggcacttctcctttcttgcctttgcttaataataattgaagtt

SEQ ID NO: 44718 - DNA, 483 bp, Glycine max
  unsure (1)..(483): unsure at all n locations
  Clone ID: PAT_MRT3847_140380C.1
catgtggatcctagctgcctaaggttgaattagggccgccctcttggaaattgagtgaaattgaggagcacggcgggcctgcttgttccgctcctccagggccttgccccccccccccccccctcgcccccccccccctctccagcccctcttgggcttctttttttccgcctttttttannnccccatctctntatatcccccaaaaccacttcttccccctggcgcttcggcgggctntcctcttcccctcccccccctcccctgctcccccccccctcccccccccgtcacctcctcccccctccttaccccccccctcccccccccccccccctatcccctccccccccccccccttcgtcctcacccccccccctccacccccctcccccccctctttattttttcctctttctcctcctcctctctccccctctcccccccccccctcttcccccgttccctccccccccccccccc

SEQ ID NO: 44719 - DNA, 270 bp, Glycine max
  Clone ID: PAT_MRT3847_140381C.1
gaagggggacaagaaaaaccttggttcttacattgaaccatatgctatatttttaaaagggggcacaaataaggggatgtttcccctggattctccaacaccttctggtatgaacaatcgcaccagatgatttacccacacatgtaaagcccgtccgggtcttataatacaatagcaacaaacacatgctggtatttgtttggggccaacaagttaactttttagaccagcgtttatttgggggggaaaatttttttaattgcgtcccaa

SEQ ID NO: 44720 - DNA, 544 bp, Glycine max
  Clone ID: PAT_MRT3847_140382C.1
caatataaatatatatgcctctgaaaagggtaaatttaagagagaaaagaggagcaaaacaaaactgatacctacatgatcctatatcctagctcttctacatcataatgatcatattctgttttgctaaatagtgatacaacaagcaaaacttacagtaaccctactgtccacttcgatcgacggagaaagtacaaaaataaaatacaaaaatctctttacaaacttgtaactttctactttcaaaatcaaccttgtacaccgtacctatagtctataaatctaaaattcacatcataactgatgcctgcctctaggttccaaatgagaaatttacaagatactcagaattgaagcctttaatgttcctaagtttcacctttcgtttatgcccctcgattactgtcttctcattctttactccccaattaacagtacaagagatacttgtacagtgtattaatagaatcaaaatgcccgactggctaactctagctttggcatattaacacaacggcattgtcaaattcataactgtaatgat

SEQ ID NO: 44721 - DNA, 162 bp, Glycine max
  unsure (1)..(162): unsure at all n locations
  Clone ID: PAT_MRT3847_140383C.1
ctccagtcgctnggatccctatcaagagtgctttaggtgatcctgaaaacctgaattcctgatgcgttggatctaccagtgagcaacttgaagatggaggttataagggactgtacgtccacccttttgctgactggcttggatggatctggacaaacaact

SEQ ID NO: 44722 - DNA, 820 bp, Glycine max
  Clone ID: PAT_MRT3847_140384C.1
aatttcccgcgtcaacagggcgaaaagaagaacagcgacgaactggcgcaaaagatggccaagctgtgcgatgtgtacgtcaacgatgccttcggcaccgcgcatcgcgctgaagccactacgcacggtatcgccaagttcgcgccggtcgcctgtgccggcccgctgctggcagccgaactcgatgcgctcggcaaggcgctcggccaaccggcgcgtccgctggcagctatcgtcgccggttcgaaagtgtcgaccaagctgactatcctgacgtcgctggccgagaaggtcgataacctgatcgtcggcggcggcatcgccaataccttcatgcttgcttccgggctcaagatcggtaagtcgttggtcgaagccgatctggtcggtgaagcgaaagccattatcgacatgatggccaagcgtggcgcatcggtgccgattccggtcgatgtcgtctgtgcgaaggagttttccgcaacggctgccgctaccgtcaaggatgtgaaggatgtgactgatgacgacatgatcctcgacattggcccgaagactgcctctcagcttgccgaacaaattgccaaggccggcaccgttgtctggaatggcccggtcggtgtgttcgagttcgaccagttcggcgaaggcacgaagacgctggcgatggcaattgccaattccaaggcgttctcgattgcgggcggcggcgatacgctggcagcaatcgctaaatacaacattgccgacaaggtcggttacatctccaccggccgtggcgccttccctgagttcctcgaaagaaagacactgcccgcagtag

SEQ ID NO: 44723 - DNA, 322 bp, Glycine max
  Clone ID: PAT_MRT3847_140385C.1
cgtcgcgcctcatggatcacacctttatctgctgaagaacatgtggctcatgaagaggtatatgaagacctagaagattattatgctgacggggatgatgatgactggggtgaagcttgctgtggtggctcctcaactttgctgtgcatcggcaaccgactacggggagataacgtatatgtcagggccgctcgtggcgaaggtcaggactgcacatctgatgcacgcgcgggattgaggacccagaacttcttctcgcctgccgtagacgaaagcggttgggcttgtcatgacctgcgcatcggcgaggaggtctcacttg

SEQ ID NO: 44724 - DNA, 451 bp, Glycine max
  Clone ID: PAT_MRT3847_140386C.1
aacttgcacactgttctggatgtcgcatcgattggcttcaaagagacggaattcttcttcgtggagctagatagattgcttagacctggtggttatttcgcttattcatctcctgaagcttatgcacaggatgaggaggatctgagaatttggagagaaatgagtgaccttgtgggtcgtatgtgttggcgaattgctgccaagagaaaccagactgttatttggcaaaaacccctaacaaatgattgttatctgcaaagagaacctggtacccgccctccactttgccgatctgatgatgatcccgatgctgtttggggtgtgcagatggaagcttgtatctctccttactctgaccgtgatcataaagccaaaggcagtggattagctccttggccagctcggttgacttcacctcctccacgacttcaagattttggctattcaaatg

SEQ ID NO: 44725 - DNA, 256 bp, Glycine max
  Clone ID: PAT_MRT3847_140387C.1
aattcggctcgagctcaatagtcaattgctaaagaaaactcattaattcatttttattaatgatcagcgctgcatttacacgcttgctcatgccgggactgaatttattggataacttgtcacctttgaaatcacgtttcacttctttaataaaatactactactaccaggtagtatttcttttctttttcacacgtcatcgtggacaatactctttatgaattatcttgggataataataagcaaagatttgtcc

SEQ ID NO: 44726 - DNA, 1506 bp, Glycine max
  unsure (1)..(1506): unsure at all n locations
  Clone ID: PAT_MRT3847_140388C.1
aaatnnnnnncggatgtgtggnannntgtggcgggagattanngnnaacagacnnnctgtgtgaagnnnnaggttttattaccctnacattcatcatttgattgtttgttcgtttatgctatctagtttattgggttttgatctagttgtttgccgctgtacggtaacnnggtagtgtgggagttcttgtgttggtgggtttgtaacaggaacaatcaatgtattatgcatttggggattgttacaatgtcacaggaggagtttgggacagcgcggttgggtgtttgactctttgatttgatggcgtcttggtttggagaaattctactactccttttactgttttcttgataatttttagtagtctatagtatctcctctcctaattgaatatcctcttcatcacagcggcacgagacctcccatttgcaataggagtgatttctggctcgagccaggctgaaatctgcaggagcatggaaatactggttcaatagtgttattgtgataaaatttagctaatttgatctaatttttttaatgttgtgtggtgttcaattgggttggatcttaaatgttttgctgttcactctactaaatttttctagcaatgggaattatattttacaagcatggtttgggggatcttaaatgttttgctgttcactctacttaagaatgttccttttagcagataagtttattttgtcttgtttatttgattgatcatgctaaatgtattgaactttttatcatgttattctgcagcttagtattttaaattgtgttgtgcaacaaaataagtggatgagacattgagttgcctggaattatttatgattttcttttttttaagattagtttttttttcttgcttcttagatgaagctttgttgatctaggtttgtgcactttggtgttcttaggtgtagctaagttgatgatgggatcttaaagaaaatgtgctttcattttgccagaatatgtcagcaagagctcaggatgatctgatttaatttctttgattagtttgttctatctagattttcttgtgatctttttgttttgtagttctgaaaataaatttttgattttcttaggagtggcaaaattgaagatgggatcttatagttattcctttaattttaccagagagcccaggactatttgctttaatttctttgatttcaaaaccttgttttgtcttctttttgtttcctgcatccaacccacttgaattgaattttgagcttgtttttgtgcagtttgtgtttggaacgatgttgtgttggaacattgaagctcttgcatgatttaggtgactacctgcagttagaattcttgggtttatcttttgatttttagactcctttatgatgacaattttaagtcaacatttgacaatttaactttacggattgatcgatgaaatatgtcctggatttgagtatactaccatgtccgaacttgctatatggatttagattttttcattataggggaatt

SEQ ID NO: 44727 - DNA, 624 bp, Glycine max
  unsure (1)..(624): unsure at all n locations
  Clone ID: PAT_MRT3847_140389C.1
gtaagttagacagtatggagctacttgatgttttattccatgatagaatatgccctcccatatctgaggctgtcttggcattacacagttaattttgcaagctatttaagtttctctcttttagtgatagagatagtatcaacatggatggtgtttttcaagcaatgatcatgtgataagatttttcaactgataactaatgtcgtccttcaacacttttgattggcgtataatatgtcattaggatgaattgtaaatgcaatgaaattaaacagtaaatgggcaactttacattttatggaaccttttgtgattgcagccaactgaatcttcactttctcattgtggtcagcagttcaaccaatggcttaagagaaaatatgttccattacttttatttataattattaggaaataaataaagtaatcaaacatattttatctcttaagccaatacttgaactgttgaagacagtgataaagtggacattcagttggggatgcaatcacaacagatccataaaatgtanagttgtccatttactgtttaatttcactaaatttacattttataaaaaatatttccattttataaattctattaacttttgaagaacatctgca

SEQ ID NO: 44728 - DNA, 284 bp, Glycine max
  Clone ID: PAT_MRT3847_14038C.1
acggctgcgagaagaccacagaagggggagcacttaatgtgagtgtgagggggcagactattgaaggggcttggagaaatcttaattggatgcctcagggaattgacaaggtcaagggcacttgtgccgggtgacttcgtgctttattccacaagcttgtcgaaagtttggcacttagaagggacctggcttgttcttgttgcttggtttgaaattccgccctggctgatgatattcttaaagggggtggtccttggaatattccccgggcttgacattttatt

SEQ ID NO: 44729 - DNA, 161 bp, Glycine max
  Clone ID: PAT_MRT3847_140390C.1
tctttggctttttttcatataaccccggggttttttcataggggggggcaaatttgcggccctcacacgtgttttattaattccgggcgggggctaccctctcgtataccaaaaagtctccacgcgggcccactttcttatgacgttggaataaacaaaaa

SEQ ID NO: 44730 - DNA, 669 bp, Glycine max
  Clone ID: PAT_MRT3847_140391C.1
cctcttccatctatgctcacttgacacctgtgactgtgagccatacacaggaaatatttttgtcagacttctccatcaaattttacctcaataagatagtttgtaaagacaacaaaagaatcaccattcaatacatataactgtttcttcatccaacatgcaaacattaatactctatatttactggacatttgatgctttgaaatgtaagaaattaatattaatatattttgcatctaagtaaaaatattaaagatgcacaagggcagatggataaaataaaatcttaaaacactgaagaggtcaatgttattatattcacctgttacacttctctaacattgactgggattaattacattgcagattcttgaacttttgaagataagatcactacaaaataactaaacaaatggttaagccagttcaacctgtaaattattctgtgggcatcaacgagttggagattgatgtaggtattttgagaagcttaaaattatgaaagtggcaacttgtcaagccatagttcaaccgtccaaatcaaactgcacaacctttatagttttccacaagctggcataaaatgttttgatttttttttttttgttactttatccttcaaggcctatgcaaaagaattaaatgttaaagtaaaattggctacaaaaa

SEQ ID NO: 44731 - DNA, 424 bp, Glycine max
  unsure (1)..(424): unsure at all n locations
  Clone ID: PAT_MRT3847_140392C.1
gtcgtgcctgttgcctcacttacactctgaatagaccatcgatcaagcaatgctgggcgaagaagagcatctcatcatcatccatgtgaaccacgactggaacaaaacctgcgtacagatgaacgaagtgttaacatcagtgacgaagacgataaataactttacgataatatacctagtagacataacgaangtgcgcaatttcaacaccatatacgaactctacaacccttccacgataatattcttcttcaagaacaagcacatcgtgattgatgtcgcaacctgtaacaacaacaagatcaactaggctctcaagaacaancgaaagttcatcgacgtgngtgagaccgtgtatgggagggccaggagaaaacgaagtctcagcgtcgctcccgaaaattactgcgccaagtaccgttac

SEQ ID NO: 44732 - DNA, 350 bp, Glycine max
  Clone ID: PAT_MRT3847_140393C.1
ttgcctttttattttttttttttttttatttttttttgtttattcctttccaaagaaaattatgcaagtggagacctttgaaccaacaaatacgctggcctcaccataaaagcgcgcccagtgcccccaaaaatggggggcaaaaaaggggccacacaccgcgtagggggttcccccgaaaaggaaaaaacccctgctgggatccctcccaaaggaccgggaaggagagcttgaaccgaacgaaaccccggggccgtcaagccaacaaaggaaaggtttcacgttgggaatctggccaaaggtgacaagtttggcgttcacccgcagaagctgaggtattctcacctggc

SEQ ID NO: 44733 - DNA, 1272 bp, Glycine max
  Clone ID: PAT_MRT3847_140394C.1
ataggctttccgttccggttcaaaaatcgccaaggcatttgacgccgcagcaacgaaaacccgaaaataactgcacagcataagcttgtagaattgtactgcatcgcaaagccccatgttgatcgtgttcatttgcatcttccttttcttcatctttctttacaagttcctcatcgcttatggcgatttcactttgatgtctaagaagcaacctaagcgccaagagattgaagataaggttgtttggattactggtgctagccgtggaattggggagattctggctaaacagtttgcaagtttaggggccaagcttattatctctgcaaggaatgaagctgagctaaaccgagtaaggacacagctgaaaggtaagcatgcacctgatgacgtcaagatcttaccattggatttatcatctggagaggattctcttaggatagctgttgagaaagcagaatccttttttccggattctggtgttgattacatggtccataatgcagcttttgagcgtcctaaaacatcaattttagatgtaactgaggaaggtcttaaggctacctttgatgtcaatgttctggggacaataactctcacaaagctcttggcacctttcatgttgaagagggggcatggtcattttgtggtgatgagtagtgcagcaggaaagacacctgccccaggtcaggctgtatactctgcttctaaatatgcgctcaatggttacttccataccttgcgttcagagctttgtcagaaaggaatccaggtaactgtggtctgtcctggtccaatagaaacatcaaataatgctggatcaagggttccatctgagaagcgtgtgccatctgaaaggtgtgcagagctgactattattgctgcaactcatggcttaaaggaagcttggatatcatatcagcctgtgcttgctgtcatgtatctcgttcagtacatgccaactattggttattgggtcatggacaagattggcaaaagtcgagtagaagctgctgaacagaagggaaacacctattctttgagcttactgctcggaaaaaagaaggccacttgatgcccatctgttcatgttctccaaaaatttgtatcaaatatttttagtcggaggttctctatcaaattgaataacaccctttctgacaattgacagaaaagttgtatggatttcctaattgaacaattaaggtttacaaatatccaataggcgctgccatgtgacacctagtagatagctagataattcggccagta

SEQ ID NO: 44734 - DNA, 473 bp, Glycine max
  Clone ID: PAT_MRT3847_140395C.1
gagaattcgagcggccgcttttttttttttttttttttttttttttttagggtgacaaggggtttacccttgctcctacgtatccctaggggttatggggaaatcacacttacgtagttttttgtagaaaaagagcttgggctaggttgattttattttattttattattttttaaaagattttggttttgtggtaaactttgtgaattcaagcaagtcaaaaacttagcatgtcactcacaaaatttactcacactttattgaagcactgccaagcaagtcggagatccaacatggaatgcgcggaacgtgaaaaagaagaattgagtgatcatttatttgagaattttaccttttttagaaaagactttaattttgtggtaaactttgcaaagtcaagcaagtcatagacccaacatgacattcacaaaatttactcacacgttattgaaacaccacaaagcatgtcaaag

SEQ ID NO: 44735 - DNA, 269 bp, Glycine max
  Clone ID: PAT_MRT3847_140396C.1
atcacgcgaacgcgcgcatgtcctgtactaactagtagtatgattcttccattcataagggctgttttcacattccaggatgaaatcaactcccctgagtctcctgctactctttacaaggccctagttacagatgccgacagcagcatcccaagcgctcttgatcacgacaagagcgtagacaacgtcaagagaaacggcgacccaggaaccatcatgaagatcactttccttgtagattgagagaccaagtttgggctgcacaaaat

SEQ ID NO: 44736 - DNA, 322 bp, Glycine max
  Clone ID: PAT_MRT3847_140397C.1
aaaggaaaggggcacaacctcggggactaggatttacatttcaaagcatcaacaagttttaaagggttttacaggataatttgcacaagcacaacacagggtccattggggcccttttgaatacatgacccattgataaacatatagcccaaattttaggaatgttttattatatattaattccatgttcttattggcccaagtttagagccacactagtttagtttatacatggcataaataacggtttaacccatacaactttaggggaacattttttactgcgggttatttggtccatggggctgatttgtcccgctag

SEQ ID NO: 44737 - DNA, 1189 bp, Glycine max
  Clone ID: PAT_MRT3847_140398C.1
cttttgctttcttcaacaatccaaggtatataaagagagtccacccaattataacacacagaatatcaaagtattaaattccaactcttacaagcttttaccaatctttcacaactcttgttcaaggcgaaacagcttataggatgaagagcaaaatcttgaaggcactaccaaaagcagttgcagcagtcaccgtgacatttcaaaaccatccattcagcccaggcagggatcacaaatcaaagcctatcgtatctatgattccccatgaagctagaagaaaaacccacgatagaggcaataacggcattgatgaaatttattcccaagaacccacttcaccaaaaatctcctgcatgggacagatcaagcacaagaagaaacaaatcaaaaaatcaaagtcaaagagcaagtccatgacaaaagaagcgaggaacgttgctagcaaaaaaacatcctcagcttccagagacatagaggtaaaaaagcacgtttccacgtttcacaagatgttattattccatggggcaaagccaaaatctgagggaaggaaatccaacgcttctgcgcctggagatattaacaaggatcttgctcttgcggacgcagcacgcgcaccgcgcgtgagtcagatgagaaggttttctagtggacgtgacgctcttgctgaatttgattggaaggtgtcgccagatgaagaggaaattgattactattcggatgaatacagagtggatagtgatggcgaagaagaggaagagattattatccctttctctgcaccccttttggttggtggtggagttggtcatactcgtgggggtgtgcttaatttgaagccacgaaaagaaattaacctgtggaagagaagaaccatggctccacccaggcctcttcaattggacagagcaaactgattatttgttcattacaaaaatgaagattaatttgatttttcgattttttttaatggctatgttttggttctgaaacattttctgtgcagaactgctgatagatttaattaggtacagcaaaaaaatggtgttggcaacatgttgtgataggcaagtatcatattgtgaatgaatatatagcatcaaaattacgatctgtatcctagtctaatcaaaagttaagatacaaatgccattcgtcaaaaaaaaaaaaaaaaaacaaaaaaaagaat

SEQ ID NO: 44738 - DNA, 227 bp, Glycine max
  Clone ID: PAT_MRT3847_140399C.1
gtaccgaaaaacaacctaataaaaaaggtggcttttttagggatagaccatgtttggaaaatggttcctttcaacccaaacattcttttttttgaacgaaacacctggtgagcctctcccttttcttttttaaaaagggcaaataaacgtttttggggattcatttggtgatccaaacacactatgcataatgggttttggttttgcactccacttcccccacattt

SEQ ID NO: 44739 - DNA, 337 bp, Glycine max
  Clone ID: PAT_MRT3847_14039C.1
ggagggatgatctgtaattttggggttgggcgagtgtgttgatcggattggaggcaggcaaagtgcaaatcaagcgattatcaatctttggggcggtgctgttgaattctgcaatggcatcagcagcgcctaatgtcgatctcttcgatgcctattttcgccgtgcagatttggatcgagacggccgtatcagcggtgccgaagccgtttccttctttcagggctccggattgcccaaacatgttcttgcgcagatttgggcatttgcaaaccaaagccagagtgggttccttgggcgggcagagttttacaatgcccttaatcttgttactgttgc

SEQ ID NO: 44740 - DNA, 272 bp, Glycine max
  Clone ID: PAT_MRT3847_1403C.1
ccgtcgatacgcatcggctcgagcacacactcaccatttgcctcttccatcttttccttctaccattggtgtctctgaagtctctctctttcatctagtatgttttgggtgtccttccattttaagttgcctgtcatggcttcgtacaccccaatgacgtatcctcattactggggtggctggatttattgcgtctcatgttgccagtcggcttgtgcggtgctagcctgactgctgaattgttgtgcttcataggcttgattattgttcta

SEQ ID NO: 44741 - DNA, 391 bp, Glycine max
  Clone ID: PAT_MRT3847_140400C.1
attaagaaaagaaaattaagagtggtgaaaagtggcataatcagcatctggggcacacatggagaaaggagaagaatcaaaatccataagggtcataggtggtgatgggggaagtgttgtatgaagcacaaatcaaggtattggcgtgcctcaatttgaagacatggttaagatgaaaaccagccatgtaattttaattgagccgcgtcaatatctcatcttgcacttctttccatcttcatcccaatctcaaatcctccctggtatgttcatgttaattatttctccaatcctcattaatttttttttcctctctctcttaattatacagttgtccttaattaatttcccgagttatataatgtatttcttttcaaacatatacatatct

SEQ ID NO: 44742 - DNA, 1307 bp, Glycine max
  Clone ID: PAT_MRT3847_140401C.1
catatactgcatttgtcagcttcaccaggatgtttattcgtgccagttgaccggaggactgaggactaggagagccaacaaccagaggatgagtgtttccgatgccagttggaggagagggccaacaaccggaggacgagagagccaaaaatgcttgatttttaacattacattcatcaaaaggtgatcgcaaggaccagaaaattcttgaaagtcttagagctgaaaggaaggcaaaaattgatgagctcaaagagaagacaaattattacattactcaacaactcattcagagctgaaagtcttagagctgaaaggaaggcaaaaattgatgagctcaatgagaagacaaattattacattactcagcaactcattcagagatatgatacagatcctgcagcaaaggcagcagctgcaactgttttagcatccaagttgggtgcagattcgggtttgaaagtgtatgtgggggatgaatcttctggtgtttcaacagggaagaccaaggatgttgaagttgttcagtctagtgggcttcgaaatcgcaaacaagtgacctctagatccactagtccagggacaactacaccaaattattctgatcaacaattagttggtgctgggaaaattgatcaaacccaaactcatgagcataatcagcttgtagttgttgtgcatcacaatcctctggtatcaacaatgcatttgatgtgctaggctgctctacatgcagcaaggcttggctactaatcattactgcatacagtttaaattgtgtttttgtctacttgtttcctttcaggtcttgctcggaaggaggatttcccatttattacttattactgcccacactgtcacgccctgaacaaaccaaagcaatcggatgagcgtatatctggtttaaattcccataacactcagtctcctaaaacagatgacggtgaagaagttaaaaatgctagtgattctgcagtccggagtgtaataagaagcgataatcccgtaaatactagccctgagattgaggaagtatctgaaccggctatttcagaggagaaaagctagttaaaagacaagcctgatttggggatggactgtttagatgacatgtctaggcccctgtttcaggtcacagaccaactataaggaaaccaactacagaccaactataaggaaaccaactttgtagttggtttccttattgctgttgtaacaggaagagttttgataactttgagacttgtgatttataaattataacacataaattacatggcttgcttatgaattaaagcaattttggg

SEQ ID NO: 44743 - DNA, 170 bp, Glycine max
  Clone ID: PAT_MRT3847_140402C.1
aaatcacaaacagtgtttcttaataacaattatggtatgacaattactggtttgaaagaagcaagtcctggagggggtaaaatttaaattcactttgaggaactgcttgatagcaattccacaatctttgggggagaactggtttgagaacattttaataatttaatcaa

SEQ ID NO: 44744 - DNA, 1897 bp, Glycine max
  Clone ID: PAT_MRT3847_140403C.1
ctcgagcggatcgagcggctcgaaccgaacttcgtaactcaccaccaacctacgcgccgagatctataccgccgaacattctcgaaccctcccagatcgaacaagttcgtgttcattcctctctctctcttttcctttcataccatttctcaattctcactttctttcttagaaagaaaggggtgagagtgatgggggatgaaaaaggtgagaagaaagaaaaaactagtcccagtgccagtggagggaacgatagcaagaagaacgagaagaagaagaaagggtttatttcgcgaatttggaacgcgattttcaggtcgaaccgcgacgactttgagaagaggcttgagtatgattacaaaagaggaaaacatggctgtgactagattgagcaacagatctcgctcttggaggcgaacctctcgccaactaattctattctctgttttatttgaggtcattgcttaggatatgctattatgacaacaagatcaatggatatgaattggaaaatgagggcaatccgagttttgccaatgtttcttttgcctgccttgtcttcagctacatatactgcatttgtcagcttcaccaggatgtcttcacgataggtgatcgcagggaccagaaaattcttgaaagtcttagagctgaaaggaaggcaaaaattgatgagctcaaagagaagacaaattattacattactcaacaactcattcagagtaatatgatacagatcctgcagctaagacagcggctgcaactgctttagaagttaagttgggtgcagattcaggtttgaaagtgtatgtgggggatgaatctcctggtgcttcaacagggaagaccaaggatgttgaagttgttcagtctagtgggcttcgaaatcgcaaacaagtcacttctagatccactagttcagggacaactacaccaaattattctgatcaacaatttgttggttctgggaaaattgatcaaacccaaactcctgagcataatcagcttgtagttgttgaacatcacaatcctcaaagttcaacaatgaatgatggaggatggattgctcgaattgcagcattgcttgtgggtgaggatccaacacagtcttatgcgctcgtatgcggtaactgccgcatgcataatggtcttgctcggaaggaggatttcccatttattacttattactgcccacactgtcacgccctgaacaaaccaaagcaatcggatgagcgtatatctggtttaaattcccataacactcagtctcctaaaacagatgacggtgaagaagttaaaaatgctagtgattctgcagtccggagtgtaataagaagcgataatcccgtaaatactagccctgagattgaggaagtatctgaaccggctatttcagaggagaaaagctagttaaaagacaagcctgatttggggatggactgtttagatgacatgtctaggcccctgtttcaggtcacagaccaactataaggaaaccaactacagaccaactataaggaaaccaactacagaccaactataaggaaaccaactttgcaacaggaagagttttgataactttgagacttgtgatttataaattataacacataaattacatggcttgcttatgaattaaagcaattttgggatttccatataatttttctttctattttttgtccggatagtcttatttcaaaaatgagattgtgtaaagggtttaaactttgaatgttgttgcaacttgcaaaggttgtgtttagatctggtcaatgtaaaatttgttgaaactatatccatggatcattcttgatggacaatggcatcttgtgatgcatgtaacatgattccccccgatggatattggattgttgttatttaaaaaataaatagg

SEQ ID NO: 44745 - DNA, 337 bp, Glycine max
  unsure (1)..(337): unsure at all n locations
  Clone ID: PAT_MRT3847_140404C.1
cggccggatttcgggcgaggagccccgntgctcacaaacaagggtggacttacggatgatgaaatgactgatgctcgggggatgatcctgttcggagtttacatgggaagaggatggcattagtcacgggaggacttggcttctaaaagtgaaggaccagnnannatagagaagagaggcccccgaggcaggagccagaccacaatgagactacaggcccaagccgaacaacgagggggcccggggacccgacgggggggccgggaagggaaacaagcggagggaaagggggccccaggaaagacgacacagcacggagagagggggcaggaaaggg

SEQ ID NO: 44746 - DNA, 698 bp, Glycine max
  unsure (1)..(698): unsure at all n locations
  Clone ID: PAT_MRT3847_140405C.1
ctctttggtggtggcaatatccctgcgtttgttttggcttccgtgtgtgctcttgccggtgctgtcattgcaactctcaaactgccagatctctctagcagttcattccagtcaacaggttttcatattggctagccattgggagagatctaacctgataatatctaacttgtacgtggtcctgtgaaatcgggagtacacccaaaatatggagagctggcacggtgattgcgtgttatgttgctttccaacccacaaaaggcgcatgccatattcaaattcattctttttgccccccacattgtggttgtctgtattttatgtaatgtaatgttaactgactgcacagtagaagaaagctttggggcatatagtaacacggttttgtaatatgttattcactcacttatgcgttgtttggacaagtgaaatatacaggggaaaaaaataagagaagagatagaagggggatggaaatgaaaagaagtaaagtagaaaaaaatatgttgtttagatgaaaaacaacaggtgtttttttttttttttgttttctttaattactgttttagtcactgaatttcaggtatatatttttgtagtccctgaaatttaaaaatatttttttttagtctttgaattttgaatattgtattttttgtccctgacataataaattgacatttntgtgatgatttttt

SEQ ID NO: 44747 - DNA, 255 bp, Glycine max
  unsure (1)..(255): unsure at all n locations
  Clone ID: PAT_MRT3847_140406C.1
acgcgtgancgacaacagaggagntctttctngntttccatgtanttctctttgtccccgggggcttnggggtccaagnaaatgttttgcntctggnaagcatttgtnggtttcggatntgntgaaatctagttttgattacngtgtnaggcacttcttggccaaatctgctgggattcagactgttgtcttagtgcctactgattttngggtngtggagaggggtctntnangananttggtgagagttttgat

SEQ ID NO: 44748 - DNA, 253 bp, Glycine max
  Clone ID: PAT_MRT3847_140407C.1
cccacgcgttcgcggacgcgtgggatttaattcacaaatttggtccttcaattttataaatccctgcaaaattggtcttggaagtccaattcggacattgactgttaacctcagacgttgactaccacgtgtcaacgcttgagtgggttcctgcaattcacacatttggttgtctagttgtataaatatctttataaattgttcctgcagacaaaaccaaaactgcgctgattccatttgctcgccaaggaga

SEQ ID NO: 44749 - DNA, 286 bp, Glycine max
  unsure (1)..(286): unsure at all n locations
  Clone ID: PAT_MRT3847_140408C.1
gttgnaggcagngtangtnagcncggaagtcggntcgagcaggaatgngttnacagancntattgtggngnaantnnanaaaancnnatngnggntaaataggtggatgggaaaangactntngnagagggangttgncgnagngtnaagaganngcntcttgngagagggggaggagnggaggaaagagtgnnangcngcatggganatggcnntgnannatcntgnaatnnggagatatnnngnnggagatgtngttgngaagangntaagangantagtgagc

SEQ ID NO: 44750 - DNA, 161 bp, Glycine max
  Clone ID: PAT_MRT3847_140409C.1
accaccaccaggcaaagcttcaacagcaaatgtgtggaagaggtcgtggtactggtggtactgttaatgctcctaagaaaactttgctaaaacccctacactgggtgaaagttgctcgagcagccaagggaagtctatgggctgattcacagaaacaggat

SEQ ID NO: 44751 - DNA, 598 bp, Glycine max
  Clone ID: PAT_MRT3847_14040C.1
cctttttgttttttttttgtatgaagattggtattgatggaattcaaggcaaagtatcaataggggatccaccaacataaaggtgtgtcggtgatttaaagtagaagagaaaattttatataaaataggtccggatagtgtgaagggggatacaaaaaccgggtagcgaataagaaggttgagtaggatgtatattaaataggtatttcgaaataagatgttattatgtttgaggaatgtgcaagcataaatggtcaatgaaattgatctttaattaatgtagtactactttagtaatgtagtgacttagtttgggtacttcttttgctcaactcattaattaagaatgcatgagattctgcttatcaaaaaaaaaaaaaaaggagaaagagtaatgtagtgactaaaagagaatttgtattgctggtttcctacggaactattatggattatttgtagtttcatgtgtaaattgaaagtgaatgagaatggaagtatagggctatgaagccagactgtggtcttttagattgaattgtggttgaaggggttgatcattcactgtctctaattggatgattgtgtgacacattaattt

SEQ ID NO: 44752 - DNA, 763 bp, Glycine max
  Clone ID: PAT_MRT3847_140410C.1
atagtccttactgtctctcactcacgaacgctagctgaattcattaacatctctcgatagatgcatggtcgagaccaccttcatcctgatccactgatacgaatgtcgccgacgccccattgcggagattctcaccaaatgagatagacatcgcatattacttgaaacgcctacaactccctcctgagcaccaccctctttgctcgagaagcactatgctgtcttctctgcccagcactttctttattgacatgatgaatcacgttgacactggcccatgaatgttcacctaatcctgtaagggtataaatgtctgttagcaaatgccccaaaatatcatcgtagccactagcccagcctcaatgctgcaactagcaactattcaaggtgactttgacactgacgctgcatgcgattgctagccatgacactcctgctacctacaccgctcaccttgcaaactgccttgagcgaccctcagctccctgttcattgcgatacctcaccacactctcggaccaatgaggaatacgctcgtcgtcgaatattatcttcattgcgttctgagactgctcacatcaccatctgacatgacgtgctgcattgtgaacacctgccgaactctagctaagacacagcgatcggggtctcttcgggatgcctacaaggatgttgctgcagatgatgctcaccattcgccctggtctctcacgagatgtcatggctgatctgttcttctatagagaaccagaggaggctaaac

SEQ ID NO: 44753 - DNA, 1388 bp, Glycine max
  Clone ID: PAT_MRT3847_140411C.1
cccacgcgtccgcccacgcgtccgtacggctgcgagaagacaacagaaggggatcgacatttccgttttgcccccattggccaattcggccactcttctctgaaaaagcctccagcctccttcttcatccatcttccctctccaccaaaatcctccgcggttcgttccgttattcatcgaaccgttctctcaagtctcgtacttggcttagtttacaactcaaaacttcaccgaacgcatttcattcaccaattcgtccaagtctcgtatcaatcaatcagcctatccgtcttgcggttggagagatcggaggggagagcagccatggcgcatcgagtagaccacgagtatgactatctgttcaagatcgttttgatcggagactcaggtgtaggcaaatccaacatcctctccaggttcactcgaaacgagttctgtttggagtccaaatccactatcggagttgagttcgccaccagaactcttcaggtagagggtaaaactgtgaaagcacagatctgggacacagcaggtcaagagcggtaccgtgccattaccagtgcttattacagaggagctgttggtgctctacttgtatatgacataaccaagaggcaaacctttgacaatgtccaaaggtggttgcgtgaactgagggaccatgcagattctaatatagttatcatgatggctggaaataaatctgatttgagccatcttagagcagtttcggaggatgatggtcaagcattggcagagagggaaggtctctcgtttcttgagacatctgcactggaagcaaccaacattgagaaggcattccaaaccattttgacagagatttatcatattgttagcaaaaaggcgctcgctgctcaggaagcagctgttggtaccatacttcctggtcaaggtaccaccatcaatgttggggatgcatctgggaatacaaagagaggctgctgctccgcttaatgtgacatgtgaggaaaaagcgatggtagcagatagtattttttccccccaattctgttttgcccctttctcttttcatcttttttttttcctcctttctttatgggtgagagacacatgtagagtacatttacttcatctagttgcaaaaacaaagtctgtgaaattttataaaacaatagtcttgctagttcctttgaattatctcttccgtgatgttatagtttcgcatgaattaatgtaatattggaacgaacagatattgatgatatagtgtcgtggttaatggggaatctaacatttcagagaattcatgttatgtaaaatacgcgcctccagttctttctctattcaaaaaacaaacagatattgatgatatagtgtcgtggttaatgggggatctaacatttcag

SEQ ID NO: 44754 - DNA, 259 bp, Glycine max
  Clone ID: PAT_MRT3847_140412C.1
cagagggatcaacttccccttttgtggtcttttcgcagccgtacccttttgtggtcttttcgcagccgtacccttttgtggtcttttcgcagccgtacccttttgtggtcttctcgcagccgtacccttttgtcgtcttttcgcagccgtacccttttgtggtcttttcgcagccgtacccttttgtggtcttttcgcagccgtacccttttgtggtcttttcgcagccgtacccttttgtcgtcttttcgcagccgta

SEQ ID NO: 44755 - DNA, 296 bp, Glycine max
  Clone ID: PAT_MRT3847_140413C.1
attaaataaggtggtatgctagctgtttttaataacagggaaagggtacggcccccactcttattctgtttaaaaaataacgccccctataaattatagttaagttgcacaactatcaaccaccccttaattgatggcgttaaaaattttaaacgctagataatatgggtttggcttctttaaactttgcaaaaaaagcctggggactgaaaaaaaaaaaactcgttacatatttaatgactagtccttgttgatcgtctaaatgtaaattgctaaaagaaggggatcccaccctc

SEQ ID NO: 44756 - DNA, 212 bp, Glycine max
  Clone ID: PAT_MRT3847_140414C.1
aaggccccattttaatcaaattccccaaaaaaaaaatttttttttaatccgggaaaattgcaattttttccttttttatggaacccttttccctaaaaaatgcattttgcccccaaaaattttaattgcccgctcccaaaaaattttttcaaaagttttcgaaaacccctttccccttgggaacaaattttgcctgccccaatcctttttta

SEQ ID NO: 44757 - DNA, 495 bp, Glycine max
  unsure (1)..(495): unsure at all n locations
  Clone ID: PAT_MRT3847_140415C.1
cctcacgcgtccgtttgtattatattttataattaatggccgctgataattttgacgctcaacgtattttgaacattttggccgagagggacaatttccaaagtaatgaactcgccgatcagttgtccattgaccaccagcgactgatcggtgccatcaagagtctgcaggtcaaagaagggttggtttgcacttcggaagtcaaaatcaaacgcatcgaattgaccgcggaaggcgaggaaattatccaaaagggttcccacgagttcaatgtgtacaaaatcgtcggagaaaagggcatttccgttgccaaagggctgaacttcacgacgactgtgcagaagcaggaattggatttgacttcggagatgattgcttcgggttcgtggcgtggcaagcagttcaaacagtacaatttctccgcgatgggcgtgccgnccccctccggccatctacaccctttgctcaaagtgcgtgccgaatttcgcgacattt

SEQ ID NO: 44758 - DNA, 348 bp, Glycine max
  Clone ID: PAT_MRT3847_140416C.1
agacgctatttgtttttctgaaccacgccatgacaagcagagttgtcaccaagactgacactactgcgtgacacttcaccattcgcggttgcgcaccccaatctttgtgagaagcaccatcatcccaccatgactcactgcgataggggagagatatatatggagcttacctttccactataaaagaaggtaaagcatccaaacaccaccgtcaacacccgtgccagaacggtcacctctaggcttctaaacgctacagatcatgctgtccatatgcattccgagacactgatcaaactcgatacgcacagggtctgatatgacaagtgcacggccttgctgtgagag

SEQ ID NO: 44759 - DNA, 281 bp, Glycine max
  unsure (1)..(281): unsure at all n locations
  Clone ID: PAT_MRT3847_140417C.1
gccgcnacctgctncttcgctccanacactcnctttctctctcctcnctcttcnctcgccncagctnccngttcgngaaggggtttagggntcngntcatggncgctgttgagttgacgttnccncttgacgnggcagcctcccccaattgatgggatcggagggnttctcgntaattcaaatgntgttgcngtgtnacncctgngcctgagnttcctcctgcnatactttgtaganactcaactctctaagattctagtctgctgccccatctcgagggt

SEQ ID NO: 44760 - DNA, 518 bp, Glycine max
  Clone ID: PAT_MRT3847_140418C.1
acgagaagcaattccacaagaccatggctccccaatttctcatcctgtcccttctcatctcatgccaagccctcacttcaactaccaaagcctccgaagacaccggtttcgtcggctcactagaccgagcaacgctcggtctagagaaaaaaaatcaagttagccatttccgattctacttccacgagaccttcaccgcgaacaacgctaccagtgttcccgtcgttccagcgttgcccaagtacaacaccaccacctccttcgggacggtgggggtaatggacaacgccttgacgacggggccggagcgtagctcgaagctggtggggagagtggaggggttgtatgctgccacctcgcagaccgagttcaaccctgtggtggttttgaacttcgtgttgaccggagggaagtgcaatggcagcaccatcacgatctgggggaggaacccgatctgctcagaagtgagagagaatcctgttagtggagggcagggggtgtctagactggcgacgggg

SEQ ID NO: 44761 - DNA, 333 bp, Glycine max
  Clone ID: PAT_MRT3847_140419C.1
tacggctgcgagaagacgacagaaggggagagacgcacatatctgtactttgggtctgctcactcgctcttctccgccacttttgaatctattgtatcaacaatcatgtcggactaagaggaccattgtcgagtcctagggcgactgcggagcctccaaaacctaccctcagcaagccggtaccatccgcaagagcggctacatcgtcatgataggcccgccctgcaaggttgtggaagtttcgacttccaaaactggaaagcacggtcatcgctagggccactttggtgggattgatattttcacttggcagaaacctggcgattctgggcc

SEQ ID NO: 44762 - DNA, 1205 bp, Glycine max
  Clone ID: PAT_MRT3847_14041C.1
ggtaatgagattgagcaagggtatttttgaaattgagacactaaagaggattaaaattgtacgttgggcgaaaaatgagaatcgagggatgatctgtaattttgttgttgggtgagtgtgttgatcggattggattggaggcaagcaaagtgcaaatcaagcgattaatcaatcttcggggtacgaaatttgatgtttgttgggcttttatgaatcacaattaaatgcatggtgtgatctgaaaaggcaaaggagaactaaaaaagtgtggaatcaattgaaatcaggcggtgctgttgaattctgcaatggcatcggcagcgcctaatgtcgatctcttcgatgcctattttcgccgtgcagatttggatcgagacggccgtatcagcggtgccgaagccgtctccttcttccagggctccggtttgcccaaacatgttcttgcgcagatttgggcatttgcaaaccaaagccagagtggtttccttgggcgggcagagttttacaatgcccttaagcttgttaccgtggcacagagtaagcgggaactaactcccgaaatggtaaaagcagcattgtatggcccggctgcatctaagattcctgctcctcagattaatttcagtgccacagtatctgcacctgcgcctgcacctgcacctgcacctgccacagtatctgcaccacttagtcgccctgctagtcctttacttggaccaagggggggcagttccaaatttgagtggtaaccagcaaaccctcccttctcagggaaatcagcttgcgaggcctccagctactgttgccactcaaggaatggctcgccctgaaacccctggcatttccagttatggcaagatgggtggaactccagaatttactaagtctccagtagcagtgagaggaactagtcccccatcagtccaggaggggtttgggtttggatcaaatgtgcgcacggccacctgcccaatatcctgcctcccccataaagtcatcagatcaattggtttaggattctaaaccagtggttgcttctgttaacggtgattcttccgatgcattttttggaggagatttattctcagctagctcatttcagcccaagcaagcttcttctccacaaggattttcttctggcacttcagcgctttcttcagctattgttcctgtatctggaggaaaccagcattctactaggacta

SEQ ID NO: 44763 - DNA, 291 bp, Glycine max
  Clone ID: PAT_MRT3847_140420C.1
ccctcttctgtacgtgcccgttacccttgctttgtggcgccttgggatgccgaacttgtcggtacgtgccctcaccggtgtaggcacgtgccgctcaatggccgggtcgcgctcccgctatcgtatgtcccatgtccggtcagcctctagttgggcccactggggccgttatgcttgcgtggcatcccgtgagcgtggatccgacatgggttaattggtgcctgcccctgctgtcgctgatcttctcttcattgtcactgctgcggttgcagatgagcatgcttcctttga

SEQ ID NO: 44764 - DNA, 296 bp, Glycine max
  Clone ID: PAT_MRT3847_140421C.1
cctgggcgcaaaattatctgaggggggccttttgaaaacgaccccgttattcaccaaggccggcattgttgaaaaatactgatccctatatggggctagtataaggaaacaattctagactatggatgttagtttaaaacacttaaattcttctgctagttctgaggaaagtttgctgctaataggaaggctgtgggtatttggggctgctaagagtgctgtaaagtgaaggttggaggcgcttactacattatcactgccttggctgtcactgtcctgtgcaccattctgagggc

SEQ ID NO: 44765 - DNA, 131 bp, Glycine max
  Clone ID: PAT_MRT3847_140422C.1
tcgatgttcagagtgccgacacaatcgaagtctagtgtacgggccacagctttaaaagctgccccaaacttggagctgggggaaaccaccaattttttttgcggtttgaggaccaatccttcaaccgcgcc

SEQ ID NO: 44766 - DNA, 424 bp, Glycine max
  unsure (1)..(424): unsure at all n locations
  Clone ID: PAT_MRT3847_140423C.1
ttctctgctgcgagaagacgacagaaggatgcggctgttagaacaccacaggggggggatcctttgaatactattcttcaagattcacacggctcgttcctagcacaccaatcgtaagtgcacaagagggaaggctcctctgaagcagcttgaacccaaagctggacgtctgtgtgtaccaactactggtggtgtgacaaagcccaccctatatagaactggtaccagcgctgttcaatggagcaagacttaccataagagtgccgagcttttgatccggcctcttcccttccagaggctagatcgtgaaattggtcangactgctagactgatctgcgtatccagagccgcaccgagcttgcattacaagaagctccttatgcataccttgatgggctctgtgtggacactaacctgtgtgcc

SEQ ID NO: 44767 - DNA, 377 bp, Glycine max
  Clone ID: PAT_MRT3847_140424C.1
gaacctttgggctgatttatgtgcttgcatggtcgtgagtagatcatagacccgtccctagttgataatctatatcgtattggtttcggaatgacagtcagcggtctctctctctctcgctcgctgtcagcatacctagtacataaagcgagttccactaagcacgatatatttgaagggacaaaatacattaatttcagtacgatatgtacgtcagctgatgactaacgtatggtacaggtatagaaagatacatacataaataatattgattaaaaaccaagtaagaacaaacaaaaactagatggctcactcggcttacgtaaatccatgtatgtacgtaagtcaacattcactccacatacatagtcattcac

SEQ ID NO: 44768 - DNA, 379 bp, Glycine max
  Clone ID: PAT_MRT3847_140425C.1
gcaagtctttgtaaagacttcgactggcaagaccatcaccctcgacggcgtatcctcggactccatagatgatgctaaggactcgatccaggacaatgagggggtccctccacaccatcgtatgttgatatatgctggtatacatctagtggatggaacatcccttgcttattacaatattcagaaggagtctaccctacacttgtgtgttcggctaagacgtggcatgcacattttcggctagactctgacaggaaagaccattacccttgaagtggagagtcaagatccattgacaaatgtgataaccagattccagatcaagatggcattcccccagaccagcagaggcttatctatgctgggaaacaagctggag

SEQ ID NO: 44769 - DNA, 343 bp, Glycine max
  unsure (1)..(343): unsure at all n locations
  Clone ID: PAT_MRT3847_140426C.1
agaagacgacgcagaacgtattgattcgataagaccatctctgccgctggcgacacgaaggtgagggagtcatgtgcgttcgtcaacgggctactacgcnttgtctttgcttgccaggtggtggtgcagacagacggagagtcgtgagtcacaccccacggctccaagtttgagtaaagataccacacctgtgctgtgatctggaagaacgaacgtttcgccatgggcacgtacaaaggcttgctgcatcgctacttttgcaccaggatctgttgagatctcatcaaacactactctagccatgctaattaataaatcgcagcgaggccaaatgaattgcatc

SEQ ID NO: 44770 - DNA, 160 bp, Glycine max
  Clone ID: PAT_MRT3847_140427C.1
gggacgcgtggggagaggtcaatctaccttctcatggctcgccaacgcggatgcccctttcattagatggcaaattgtgggatacatgttcatgtccgggcccgttgttacaatgcatcatgtctggtaaatccgcggcaaaacacatcttgtgcgaatc

SEQ ID NO: 44771 - DNA, 281 bp, Glycine max
  Clone ID: PAT_MRT3847_140428C.1
gaagtttctaatatgactttctccctacattatattgtacagttcttttttcttcatagcattttgtaattttggctgatgacaaaatacccccctgtggctttttccctcagctgttgcaggggggggagattcttgaaaaagccgcattgatcttctcacaaggagggagttgcttacatctcgttcatctcaggagcgtcctgcaccaactctgaagcctcatggccgtccatattcggatgctcccgtgcttgataaaacactggctacaccccagg

SEQ ID NO: 44772 - DNA, 174 bp, Glycine max
  Clone ID: PAT_MRT3847_140429C.1
agggatagcaaaatcgtatcgccagtttaatcaccagtgttcaacccaattcccttcctcgttttccattaagagatcaatggcacgtttcaagcaaaacgctcccaagtccaaccgaagaaatggtcccaagaaacaattggtaaccaaagccgctcgcaagtcaacccccgg

SEQ ID NO: 44773 - DNA, 229 bp, Glycine max
  Clone ID: PAT_MRT3847_14042C.1
gctggagtgccctcatatgctacggatccgttgtttacagaacacgtgagcacatatatactcaaataaagtgtgactgacttggacactctatcataaatcgaaacttttatataatccaattttggaacactctagcaaactgaccccgaatgatccaaatggttattaaacatggcggatagaatacaatgtatgttcgtgatgcatacatgtttcaagatggaac

SEQ ID NO: 44774 - DNA, 428 bp, Glycine max
  Clone ID: PAT_MRT3847_140430C.1
ttcgtctacgcgtcacgcccacgctgttcgtccacgcgtcctgcttaattagcgttcatgaatatgtcaatgccttactttagtgggtctaaattgaaaagctttctagctggtcataatattcaccattactgatggtattgacaaaactagtgcgactttgcaattaataaagttagcagattgtgatttttttaagagaaactttaagcagaagtctaatgttttgagggtggttcctgaggacaaggcgagtttatggtcacatcttcattatgtttcgaggtaaaatctggaaatgcaagaagcttaacttgttaaacatgtaaatgagatacgagaattgtatttgaacagtccagaagatgcttgtcattagagaaggaaagctctctcttgatagatagtgttgcaaaagcttatgtgcc

SEQ ID NO: 44775 - DNA, 1068 bp, Glycine max
  Clone ID: PAT_MRT3847_140431C.1
ctatcactgattctgcacttattatttagatcgtttagcatttaacatgcttagtgaaaaatgaaaatgttactttacagcctttccttttctaatgctgtgaaatgcggtgtcttgtgtacttccagtaccaagttcacttattattatgaagttgtgatatctattttccccactttataggccttggagctgtctggaacactgcaaaagtggagtcagggtccattgttgctatctctggccttggaactggtgggcttgctggaagtatctgcaactgcaattgtaggtgtttatgcttttgggcttctattatggctcagcatttacactcgacaatgtgcatagggtgctaaaactgttggtgcatcccggattattggcatagatattgatagcaagaggtttgaagagcaatgaacttggtcatgaccgagttcattaatccaaatgaacatgagaaaccagttcagcaggtcatagttgaactcacagatggtggggttgattatagttttgagtgcattggaaatgtcttggtgatgaggtctgccttggagtgctgccataagggctgggggacatcagttattgtgggtgttgcagcatcagggcaggaaatatgtactcgacctttccaattggtgaccgggcgtgtatggaaaggaacagcctttggtggcttcaagagccgctctcaggtgccttggcttgtagacaagtacttgaagaaggaaatcaaggttgatgagtacattacccccagtttgagtcttgcggagatcaataaggcatttgacctcatgcatgaaggaggatgtctccgttgtgtgcttgcaatgaatgtatgaggtggtagtctagttagtttagcctttgcttttccctcttatggtagtggttgaagtaaaataaatcgttagtgtctataattcatcacgtcatgcctttataataatatgaacgttgtattcctaagttactttagcatgaaacaagtgatgagaatgccttttgtaaaaaaaaaaaaaaaaaaaaaaaaaaaaaagcggccgctctagagga

SEQ ID NO: 44776 - DNA, 808 bp, Glycine max
  Clone ID: PAT_MRT3847_140432C.1
ataataaatatctcacatcaaaagatcacattaatactaaaaaatttaactaccggcaaaaaacaattgcatcaagtgattcctctatctgaactgaaccatcccttcacaatcgggagtttgtattaacaaattgaaatcctaaagctagagaaagggccaaaacagaagaaaaactgtgtatatgcttgcaatcaacaagcacagtagtaaataaatatagcctacattttgcttatggcatgaccaagaaaagtaactaccctctctacaaacgttacacgtaggcggagctgggggaagcaaaatgcttccaaagattagtgaaaacaagaaaaagctaggaacatcaacaacagccacccttacccttcttttcaccagcattgatttcttgactaggaacaattatcttggttcccttcagaagccctgaaataccacttggatctgcatcatcattggcagtaagtgttttcttgcttataagtctgtatatctcagttagaatggtcagaaaggcagtttctacattagtggactcaagtgctgatgtctccataaagaataggttctctctttgcgcaaactcctccgcgtcttcagttggcaccgctctaagagttccaagatcacacttgttgccaattagcatcacaacaatgtttttgtcagcatggcctctcagttcctctaaccattttgccatgttatcaaatgattggcgtttagtcatgtcataaactaacattgctccaacagcaccgcgataatatgcactagtaactggacgcgtgggtcgaccggg

SEQ ID NO: 44777 - DNA, 1367 bp, Glycine max
  Clone ID: PAT_MRT3847_140433C.1
ataataaatatctcacatcaaaagatcacattaatactaaaaaatttaactaccggcaaaaaacaattgcatctagtaagttatacagtttccattcctctatctgaattgaaccatcccttcacaaccgggagtttgtattaacaaattgaaatcctaaagctagaaaggaccaaaaacagaagaaagactttatatgcttgcaatcaacaagcacagtagtaaataaatataggctacattttgctgataataggatgaccaagaaaagtaactaccctctctacaaatgctacatgtagccggagccggggagggaagcaaaatgcttccaaagaagagtgaacacaagcaaaagctaggaatatcaacagcagccacccttcttttcaccagccattaatgtcttggctaggaacaattatcttggttcccttcagaagtcctgaaataccacttggatctgcatcatcattggcagtcagtgttttcttgcttacaagtctgtatatctcagttagaatggtcagaaaggcagtttccacattagtggactcgagtgctgatgtctccataaagaataggttctctctttgcgcaaactcctcggcatcttcagttggcaccgctctaagagttccaagatcacacttgttgccaattagcattacaacaatgtttttgtcagcgtggccccgcagttcctctaaccactttgccatgttatcaaatgatgggcgtctagtcacgtcataaactaacattgctccaacagcaccacgataatatgcactagtaactgccctgtacctttcttggccggcggtgtcccatatttgggcctccatgtcctttttgtcgttgatgagcgttttggtctgaaactcgacgccaatggtggctttagaatcgacgttgaattggttcttggcgaagcgcgcgaggagctgggtcttccccacggcggagtctccgaccagcaccaccttgaacacgtagtcgatcttgtggttgtattcgccgtacaggttcgacatcatccccgcggaagaagaattcaatcgccgatcgtcgtcgtcgtcgtcgtcgtcgatcactacgcgagatggaggaaggtggcggtgctgctgccgtcgttgtcgttgtcgttttgatgaaccatcgccttcttggcttcttctgcttctttgttagtttggtgtttcttatgatcgaggcggggttgaacccatcatcatttggtgaaagaaagaggaaaataacgacggtcgttttggttgggttgacaaagaatagaggaggcgtgaggaggaaggaaaagggtggtggcggtttgggttgggaattgggatggaccccctcgagcc

SEQ ID NO: 44778 - DNA, 385 bp, Glycine max
  Clone ID: PAT_MRT3847_140434C.1
ggattcctcaatgatctcttccccagctgatacctctgtcaaccgtgccggtgccggcatggttgctccattcactggcctcaagtccatggctggcttccttaccagtaagaccagcgatgatattttgtatgatgttatctacggtgtatatttactatgcttgtgtgtgtgttcacacgtatgttgagatttaagttatatagtcgttttatacttgtcatacctttatgatgcacaatttgcaatgagagtaaaatacgtgattaggaaggagatgggtgcctttgtctgagtgtgtgatatagcacactttcttgtatcttgagtacatcaggatctatttatatactactatgtacactattggaacatgtggaaactt

SEQ ID NO: 44779 - DNA, 202 bp, Glycine max
  Clone ID: PAT_MRT3847_140435C.1
caaaatgatgactattaattctgacatctgtgcaggaaatttagtttacttcaatagcactcaacctttcaatttataagtgttggggctatgaataaataatacatgcactattaaccctgttacactaacaaggggaaaataatgggtgggcgtgagactaaagttggggggggggccattaaaaatattaatcgggtgg

SEQ ID NO: 44780 - DNA, 392 bp, Glycine max
  Clone ID: PAT_MRT3847_140436C.1
ggcaccggcccggacggacctggcggtccgacccaggcgctcgttcgcgcgaagacgacagaaggggaagaggggaggggggtgcagaaacgcggaaagaaccaaacccgaaacagaagaagcggagcagcaagcgagtgacagccaccaggcagggggcgaaggcacagccgcggcaagggaacaaactgctccgcctcgccctacaaaaggacacctcctagctggcacaagaactcatcgcaagaagaagaacacaataagagcaaggaggcaaagaaaggggggaccccggctcagaacggcgtcaatcgcagagaatcccacggcaaagctcagggcaataagcgccactggcaggaaaaacccacggacccccaaagacgacggac

SEQ ID NO: 44781 - DNA, 808 bp, Glycine max
  Clone ID: PAT_MRT3847_140437C.1
ggctcgagatctaatttaaaacacctctatcttctagactccatcatcatcttcctctattggttgttctatgtctgctcatgaactaactccctctcaatcccctacctaatccctttcaatttccccatttttttttcctaataaatcagatatgtaaaatcctaatttctctaaccctaacaaaacccccaaaattcaaagaagaagctggagatctgcgcgagttcaagatcgtcggagggaggaggagatccagtggtgatggatgagagaaagaggaagccaatggagtcaaaccgcaagtccgcacgacgatcgcggatgaagaagcagaagttgcttgaagacctaaccgacagaggaggaagcatatgttgagatggaagctccgaatgatcctcagagcacagaccatggaacttgtcggctggttaaggtttctgaactccattctcgagattgccgatgaggtcggcagcggtggtgaatccttcgagattctgcagattttgaactctctcttgatgccttggtaaatccctcaccctatgatggcgtcgcctgacatgtttctccatggaaatcaaggcttgtttgcttggtagtatttcaataggctaggtttattgttgatgttccttcgagatgtatttttttctatataaaaagaattgagatttgttttgaaagatgaagattgaagggagaagaagataagtgtaggtctgaaggatgactggaaaaagggttttaatgtttgatttatgtattttttatgtattttgacagttttctaatgggtagt

SEQ ID NO: 44782 - DNA, 385 bp, Glycine max
  Clone ID: PAT_MRT3847_140438C.1
tctcatgaatatgccaaatgctgttctttcaatgtgtagatattgtgtcggatatctcggctttcaagtatctagaatgacttctccctacttttaatgttcagtctctttcttcattgcattagaaaatttggctgatgacaccctcaatttggacgctctttcccatcacctggtgcagtccgtagagatacatgaaaaagttgtcttgcaattctcacaagaggaattgctcacagctaggtcaactcaggtgcgtcctgcgacaactctgatcgctgatgggtgtccatattagtatgctatggtgcatgacttttgagggtcttctataccacatgattctgtcataggtgatatgactactaccactaacatctctggt

SEQ ID NO: 44783 - DNA, 273 bp, Glycine max
  Clone ID: PAT_MRT3847_140439C.1
gcgacacttatgcaacctgcttttatttgcgccactctactacttcccaaaccgcgttcacgattgatcgtgtgaaaatgagcaccatttatggccttatgatcttagttcggggttggtttaaatatgcattggctcgatgatgagatcggtctgctcctacggaaatgataccagaagcgctacttattggagagtcgacgctactattgtctgtcctatgcaccattaagatttgcctggcttcacacgcaatgtctataagagtgatca

SEQ ID NO: 44784 - DNA, 336 bp, Glycine max
  Clone ID: PAT_MRT3847_14043C.1
ctatagccctgcacaattgctctcttgcagataggattccggttctggccaatatcatcctgagcgggctacaattaattgtcctgttcatcatccactaattcacatgactgaaagaaattatgctagaacgccagatgtactcattgaatatgatgcatgtacaattgcaaatgattgactatcattggatgtcgccaacgatggaaatcacaaacaaatcgttggttttcatgttgctggacgcaacggaagactgtgatatgcttaattgataccatatgttgaacctgttgaacctgctcaaaacgctagacactactctgactttttaac

SEQ ID NO: 44785 - DNA, 388 bp, Glycine max
  Clone ID: PAT_MRT3847_140440C.1
tttttttttttttttttttttttttttttttttttttttaggggaccaaggttacaaaaaatttttagttagagcaaaatttttttgttgtttctctgggggccaaaacaattgaataatttttttggggaccaaatatttttctaactttttttttacaaaacctttagagatctcccaaaaaccaattttgttttccaaccccgtaaatgcaaaaaaaaacccccctaaaaaaaaaaaaaagagttggcctttcttttatgagggtgcacaaaaacaccttttttccaatggggggtttttgggcgaaaatgagagggggggggatttatttgagggggaaaaaaaaaggcccggggggggtggccccgggccctgttttatatat

SEQ ID NO: 44786 - DNA, 1349 bp, Glycine max
  Clone ID: PAT_MRT3847_140441C.1
tgatgattcatattttcaggggaggggcaacaagagtactggagacaattttcatgctgctccaaacattgatcattcataggactttgtgagaaaggatcttaaagaatggttatgctggatgagggaagaaattgggtatgatgggtggaggcttgactttgtcagaggattttggggtggttatgtaaaggactacctagaagcaagtgaaccatactttgcggtaggagagtactgggattcccttggttatacatatggagaaatggatcataatcaagatgcacatgggcagaggatcgttgactggatcaatgctactgctgatgcatttgatgttacaacctaagggattcttcactctcttaagatttgctgggcagattggcgcgtgtctgctcctatcgggaatcccaccggtgctctggggtggggacctggtcattttgaaccacctagtggatcccaaagatggtcctcagctttggggcgttggcgctttcccagtggggaggcatcgcagggttatgcctacactcttactcacccaggaacaccatcagtgttctatgaccatattttttctcactataaaactgaaatagcaacacttatctctatcaggaagcggaacaagatccactgcaggagtacacttaaaatttgcaaggcagaaagggatgtttatgcagctatcgttgatgacaaagttgctatgaaaattggacctggtcattttgaaccacctagtggatctcaaagatggtcctcagctttggagggaagggactataagatttgggaggcatcataatataattgtttgtatcttaagtgtatgttcctttggaaaatcaccaccaccttgtatatgtttcttaggaggcaagtataaagacagaagagtagatgatggtatggcaagtcacaattgaagtgagttgaaatgtgccactgttgctgaacgtatatatgctgcattgaagcaaatattatagagaaggttgcagagggttcatttcagccaaatgctggctcttctgaaattaggaagccttcatattatatatacattattatgtttacaaagtatacaatatttagatagtatggcaagattgtataaaattgccattgatagcacataattcttcaacaggttcctggatctagatggcaatgtattggggaaaatttggattgggaggttttggacaaaaaggaaagggagtgtaaagttttattttttgaattaagagtatatagtgtttataaataaatgaataagagatgaaaatttcatgatacggggcccccccccctaccagccccccccccccccgaaa

SEQ ID NO: 44787 - DNA, 453 bp, Glycine max
  Clone ID: PAT_MRT3847_140442C.1
tgagggtctacaaaggaaaatatggtcagatccacctgattgcatctcttgctgctggattaagggggtatcatgatgagtgtggtggagctatcgttgatgaggtactggaggagattagagttgggctggagttaaatgactatgggatgcagcaaagacgcattgcttacatgcgattcttgggggagctttacaactatgagcatgtagactcatctgttatttttgagacactatatctcattctcatctatggccatgggacacaagagcaagatgtgctggatccacctgaagattgttttcgcataagggtgatcattactctgcttgaaacttgtgggcattactttgatcgaatttgacttacaggatctgtttgtggacttgcgtcccaatatggttcgtcacaattctattggagaagtgaatgcagctctcgtagaactc

SEQ ID NO: 44788 - DNA, 1095 bp, Glycine max
  Clone ID: PAT_MRT3847_140443C.1
gctaaagttcgtcctccattgcatcagtatatcagaaaattacttttctctgatcttgataagtctaccattgagcatgtgctgaggcaactccgtaaattaccatggaatgaatgtgaaccatatcttttgaaatgcttcatgacggtctacaaaggaaaatatggtcagatccacctgattgcatctcttgctgctggattaagtcgctatcatgatgagtttgctgtagctatcgttgatgaggttctggaggagattagagttgggcttgagttaaatgactatgggatgcagcaaagacgcattgcttacatgcgattcttgggggagctttacaactatgagcatgtagactcatctgttatttttgagacactatatctcattctcatccatggccatgggacaccagagcaagatgtgctggatccacctgaagattgttttcgcataaggttgatcattactctgcttgaaacttgtgggcattactttgatcgtggctcttctaagaggaaacttgatcgattcctaatacacttccagaggtatattttaagcaaagggacactgcctctggacattgaatttgacttacaggatctgtttgtggacttgcgtcccaatatggttcgttacacttctatcgaggaagtgaatgcagctctagtagaactcgaggaacatgatcggattgtttctgctgataaggtcagcagtgaaaaacattctggcactgagaagcctttaattaggaccacttccactactgcagtggttggcaatggacaaagcattgataatggtacggaagaaaatgaagtgcaagatgataatgacagtgagactgattcagggagtgacacaattgatgtggagggacatgatgaagagttggatgaggagaatcatgatgatgggtgtgagactgaggatgatgatgatgatgatgatgatgggcctggaccagcttctgacgaggaggatgaagtccatgtgagacaaaaagtgaccgaggtggaccctctggaagaagccaatttcgatcaggagctcaaggctgtagtacaggagagtatggaacagcgaagg

SEQ ID NO: 44789 - DNA, 270 bp, Glycine max
  unsure (1)..(270): unsure at all n locations
  Clone ID: PAT_MRT3847_140444C.1
tcttcnccctcacgtngnnannagatcantccncncacnncctnnnncnngncacagcncgctanaanngttncagcncnnngcnagacngccactnnagngttnacntnctcagcanttnagacnntananatacnantctcgcntanntacanaagcatnnnntnagctcttacnactggaaangnagncnanaggnactaangnacggatgaactctnnggtnttgntatnaaagnncacgttncgcgctgggtagnattcatnann

SEQ ID NO: 44790 - DNA, 2146 bp, Glycine max
  Clone ID: PAT_MRT3847_140445C.1
atattataggtttctttctgcattctctctttctctttttgttttgtttacttgtttgttctctttctttcaacctttaacccttccaaaccaacaaatataaaaatcaaccctctcttcttcttcttcttctctctccgcgggttgaactccaagaacctcataaaaccttttctctctcttacatcactctctctctctctctctctctctctctagatctgttcaaatccgaaaccatttccgctccaatttccaagagcaaatcctaaccccttctctctgtatgatactagatttcccctcctcaaaggcgtagtttttgtgtcgatttgtaaattcattcggtagcttaggttagaatttttgtgtcaagtttttagggttttgaatcggtgagatgaatcacaacaacagcaacaacaatagagcgaggtaccctcctgggatgggacttgggcgcgggggtttcaatccgaacctgagccagaacccgaaccagaaccagaatcatcacgcgttccaggctcggccgccgtaccaccaacagcaacaggcgcaatatgtgcagaggcatttgttgcagcagcagcagcagcagcagcagcaacagcagcaacagcagcagtggctgagaagggatgccaacgccgtcgacgaggttgagaagaccgtgcagtctgaagccgtggattcgagttcccaagattggaaagcaagactaaagattccacctgctgatactcgctataagacatatgatgtaacggcaactaaaggaaatgagtttgaggattactttttgaagcgtgagctgctaatgggaatatatgagaagggttttgaaaggccttctcccatccaagaagaaagcattccaattgctcttactggtagtgacattcttgctagggctaaaaatggaactggcaaaacagctgcattttgcattcctgcattggaaaaaattgatcaggacaataatgttattcaagttgttatactggtcccaacccgagaattggcattgcaaacttctcaagtgtgcaaagagcttggaaagcacttgaaaattcaagttatggttacaacaggtggtaccagcctgaaagatgatatactgcgcttatatcaaccggttcatttactagttggaactccaggaagaatattagatcttaccaagaaaggtgtttgtattctgaaagattgcgctatgcttgttatggatgaggccgataagcttctgtccccagagtttcaaccatctatagagcagctgattcattttcttcctacaacccgtcaaatcttgatgttttcagccacatttcctgttactgtaaaggatttcaaagacaggtatcttcaaaagccttatgtcatcaatcttatggatgagctaactttgaagggtattacacaattttatgcattcgtggaagagagacagaaagtccactgcctaaatactctattttctaagctgcaaataaaccagtctatcatcttctgcaattcagtgaatcgggttgaactacttgccaagaaaatcacagaacttgggtattcatgtttctacattcatgcaaagatgttgcaagaccatcgtaacagagtgtttcatgacttccgcaatggtgcatgtcgaaatcttgtttgtactgatctttttactagaggaatagacattcaagcagctaatgttgttattaattttgattttccaaagaatgcagagacttatttgcacagggttggtcgttcctataggtttcgctttcatctatataggattgaacaagaacttggaactgaaataaagcagattcccccacaaattgatcaggcaatttattgtcggtgattggctttaaataccagtgttgtgtttacagttgcggctaatagcagtggttagtgtgaccgtggctcaagtaggtgggtgagaggatctgctaagctagtggcaaattgtgtattattggaacctggcatgagaggatgcactgtcaaaaactgggtattacccattactgagtgctttcagattaattctggttttgggagccctgaaacattgttgagacctttaaaaagtttaatattggcttttatctgccagaatagttattgggttcaaaaa

SEQ ID NO: 44791 - DNA, 718 bp, Glycine max
  Clone ID: PAT_MRT3847_140446C.1
ccacgcgtccggttgaactccaagaacctcataaaaccttttctctctcttacatcactctctctctctctctctagatctgttcaaatccgaaaccatttccgctccaatttccaagagcaaatcctaaccccttctctctggttttgaatcggtgagatgaatcacaacaacagcaacaacaatagagcgaggtaccctcctgggatgggacttgggcgcgggggtttcaatccgaacctgagccagaacccgaaccagaaccagaatcatcacgcgttccaggctcggccgccgtaccaccaacagcaacaggcgcaatatgtgcagaggcatttgttgcagcagcagcagcagcagcagcaacagcagcaacagcagcagcagcagtggctgagaagggatgccaacgccgtcgacgaggttgagaagaccgtgcagtctgaagccgtggattcgagttcccaagattggaaagcaagactaaagattccacctgctgatactcgctataagacagaggatgtaacggcaactaaaggaaatgagtttgaggattactttttgaagcgtgagctgctaatgggaatatatgagaagggttttgaaaggccttctcccatccaagaagaaagcattccaattgctcttactggtagtgacattcttgctagggctaaaaatggaactggcaaaacagctgcattttgcattcctg

SEQ ID NO: 44792 - DNA, 1303 bp, Glycine max
  Clone ID: PAT_MRT3847_140447C.1
gtccggattcccgcgtcgagcaatggcccgggcaattgcaatggttcctcaacctctgctgacccttttcctctttttctcccttctctcaattgccaactcttctccttcccaacaccttcagatcgccaatgccgaacgcaggattgatttgacttctcacattattaaggtgtacttgacattgaaggttgaaaatttggggacatctcctgcttcagaagtacatattgccttttcgcccactgaagtagaacatctagcaatagtcaaagctgctgcaacttctgggaagaggaagaagaaaacttatgttcctctagatgtcaaatctgctgagctacctgatggaccaaatggaactaagtttttctctataactttgttaactccactaagtaaaggtgaaaccacaacactagaggtgctttacatattgacacattctctggaacctttcccagtagaaataagtcaatcagagtcacagttggtttatttccgtgatagtgcaatattattgtctccctatcatgtcaagcaacagacaacttttattaagactccaagcacccgggtagaatcattcacagtggtggaccccactaaacgtgctggtacagagttgaaatacgggccatatgaaaatcatcccccgtattcatattctcctgtacttattcattttgaaaataacaatgcatttgctgttgttgaggagctagaacgtgaaattgaaatatctcactggggaagcattcaagagattgagtattcatatcttgatgttgtcggcagaactgtggtggttctagaaaaaagaaatgcagttcctgagcataatgctccttttcaggtgtactacagttttaaccccatattcatgcttgctgagccattgatgctggtatctgcatttttcttgttttttgtggcttctgtggcatatcttcacattgatctttccatacgcaagtgatgaacacctagctagtttcttgaaaggcagtgactgagcagatccaaggttccttatttttgaaggtcatattgcattttggcaattttgtatggagttaagaggattaattgcagttatagatatacttgtttgtacattttttcccaggcaatttgatcttgtgccattcatccaactagcttaaaaccatttcttccatttaagaaaacataggatatgttcgttaaaggccatcctaaaggcacgtaatgggaagaaacttgtaagatcttgcttactaggtattagaaatatttatgtgatacttagcaatcaatatac

SEQ ID NO: 44793 - DNA, 273 bp, Glycine max
  Clone ID: PAT_MRT3847_140448C.1
aattaccaaaacctcattttacaaaacatgtttacaggaaacgttcatgaagaattatacctcgattaatcaagtcaacaaaatgttataaaatttcaagccaaatattacgtacaaaattaaagaataatacgttaataaatcataaaagatgttaactgattaaaaaactgataattgtatttaaaatttacattttaaattaaattctaaaaataatcaatctattttatataaaaattttaatacattaaaaaaaatataatctgtaat

SEQ ID NO: 44794 - DNA, 1076 bp, Glycine max
  Clone ID: PAT_MRT3847_140449C.1
cctcgagccgaatcggcctcagtcactcactcaacaaactagtgaattgttatggacactagtgtctctccctctctcctactttctctcctcttctttgcaagagtcttagggcttgcagtggcagtgcttgtcctcatatgggcccttgccttcaaatccagcttcctcactacctcactctcccaacaagacctcatctatgcagttcttcatcctctgctcatggtcattggctttatcctcttaagtggagaagctattttggtgcatagatggttacctggatcaagggggttaaagaaattggtgcatttgtggcttcaaggggtggctttagcttctgggatctttgggatttggacaaaattccagggcaaagatgggattgtggcaaatttctatagcctacattcatggatgggtttggcttgtgtatccctctttggagcccagtggttgattggcttcttgaacttttggcaccgaggagaggtgcgaagtgtgaggataaggatcttaccatggcatgtattccttggcctgtacacttatgcattggcaatagcaacagctgaaactggattattagagaaattaacattcttacaaactaaaagaaatgtacctaagcacagcaccgagtccatggtggtcaatagtttagggttgggtcttgccctcgttggtggctttgttattttggctgctgtttcacccaaatatcaaacccatcaaagcaaactttggatcaggttggaaatggtattagcggttggtactgatgatggttgtctagttgtgccgttggtttctgttgattccaaagtcatgagacagaattgtttttcattagtgatttggttttgtattctcaatttcatttattcattcattctcatggtcaatgagttatcacacttgtctttttttgctttggtattgtgatagttattgcaacattgtgttgtgtttattgttttgcaactgaaataataaccaatgtgttttagagatgagcttcttttgaatttacaagttttcttgggttgttggtgaacatttcaaacctttta

SEQ ID NO: 44795 - DNA, 1470 bp, Glycine max
  unsure (1)..(1470): unsure at all n locations
  Clone ID: PAT_MRT3847_14044C.1
tcgcactagcagggcagttggtgtcgactccttcccacagccgacccacgcgtccggggtgatgcacaagttattattcttagtgaatccgaagaagacaatgatgtattgatgtctcatactcgtataactgggtacaaaaatatggccactagtgatgcagttgatgtttactcagtgctacagcctggaattattgatccatatagggaagatcacaatcctggagtttttaataatcccagtgaagatgattttggtatgccctccctctggccattgcaatctggaactccagcagtcccgggattccaattattcagttctgaagtggaggatgatgtgtcagacgcattgattgatttgcatcatggcaatattaattgctcctcgtcactgaatggttatacgttggctccagatactttgggatctggcactctcataccagattcctcagcaggtcgacctgacgatgatttaaatggtgggttggttgacaatccactggcatttcccagagaagatccatcccttcagatttttctccctacaaaaccagcagaatcatctatgcagcatgaactgagagatcatgcagatgggtcaaatggtgtcttcactgaggattggatctctcttagtcttggaggtggtgccagtggcagtaatggtgacacttcctctgcaaatgaattgaatttgagaccacaaattacacccagagaagatgccagagattctttgacagatgctgctcctttgcttcttggtgtgaatgatgttagacctgacaaggcaagtaggcaaagatcagatagccctttctcatttccccgccaaaagcgttcaaaactgaagaaagttgagcagcatttttggtcctcaggaaatggaagatgatgtgatttgagacacgacttggagtattttccccattgatggtgagggtgttggctgcaaagattcccaattctttatgcttgatattcaagttgtccatatgacatactgaaaggtcggggccagcggcatgctattattccccattttcagctaggaactgatggtactggtatagtgctgtaaagaatattatatctgcaattttgtttctgctgagagcaattaacctgtaaatgttaagccagcagatctaatagtaaaatctaaaatagtttaatcttattcacacccatgtagacacccaattttgtaacatatggttgccaatatttgtaatatatttaggattaaagttgcctcctggattgtaatcctggtgaggataaacattttttctgtttgcctgtgtattatttagtctgcacagctggagtaaaatagttgaaatatgacattcaatatagcaaaaaaaattgtgcccctggataggtgctgttagacaaattgtgatatcctgttctttcgtagggttctgctgctaatattaaagtaaattgcanctgt

SEQ ID NO: 44796 - DNA, 1939 bp, Glycine max
  Clone ID: PAT_MRT3847_140450C.1
ctcggaatacgtttctttctgtgttgttcacttgtttggtctctttctttcaaccttaacccttccaaaccaacacatataaaaatcaaccctctcttcttcttctctctccgcgggttgagttgaacttcaagaacctcataaaaccctttctctctctctctctctagatctgttcaaatccgaaaccatttccgctctaatttccaagagcaaaccctaatccgctctctctgtatgatactagatttcccctcctcaaaggcgtagttttgtgtcgatttgtaaattcattcggtagtttaggttagaatttttgtgtcaagtttttagggttttgaatcggtgagatgaatcacaacaacagcaacaacaatagagcgaggtaccctcccgggatgggacttgtgcgcgggggtttcaatccgaacctgagccagaacccgaaccagaaccagaacccgagcctgaaccagaatcatcacgcgttccaggctcggccgccgtaccaccaacagcaacaggcgcaatatgtgcagaggcatttgttgcagcagcagcagcaacagcagcagtggctgagaagggatgccaacgccgtcgacgaggttgagaagaccgtgcagtctgaagccgtcgattcgagttcccaagattggaaagcaagactaaagattccaccagctgatactcgctacaagacagaggatgtaacggcgtctaaaggaaatgagtttgaggattattttctgaagcgtgagctgctcatgggaatatatgacaagggttttgaaaggccttctcccatccaagaagaaagcattccaattgctcttactggtagtgacattcttgctagggctaaaaatggaactggcaaaacagctgcattttgcattcctgcattggaaaaaattgatcaggacaataatgttattcaagttgttatactggtcccaacccgagaattggcattgcaaacttctcaagtatgcaaagaacttggaaagcacttgaaaattcaagttatggttacaacaggtggtaccagcttgaaagatgatataatgcgcttatatcaaccagttcatttactagttggaacaccaggaagaatattagatcttgccaagaaaggtgtttgtattctgaaagattgcgctatgcttgttatggatgaagccgataagcttctgtccccagagtttcaaccatctatagagcagctgattcattttcttcctacaacccgtcaaatcttgatgttttcagccacatttcctgttactgtaaaggatttcaaagataggtatcttcaaaagccttatgtcatcaatcttatggatgagctaactctgaagggtattacacaattttatgcattcgtggaagagagacagaaagtccactgcctaaatactctattttctaagctgcaaataaaccagtctatcatcttctgcaattcagtgaatcgggttgaactccttgccaagaaaatcacagaacttgggtattcatgtttctacattcatgcaaagatgttgcaagaccatcgtaacagagtgtttcatgatttccgcaatggtgcatgtcgaaatcttgtttgtactgatctttttactagagtctcagacattctagctgaagggaaactttgaggaaatcggatttgcttttgatgggtttgttgaaggcatggttggtcaagtagtactcacatggctgagggtaaggggtttggttgcaccatgattggatatctttgaatgagtaagaggaagcaatggaggagaatagaaagggagcaagtagaagggtcattaggaagggaaatggtggtgccatagtgagggctagcctatggccaaaagaggtttttttggggtttagaattatgggagggtggagagaaaagtactaaagaggtttatttgag

SEQ ID NO: 44797 - DNA, 2254 bp, Glycine max
  Clone ID: PAT_MRT3847_140451C.1
cttgttttctttcttcctttcaatctttacccttcgaaaccaacacataaaaatccaaccctcttcttttctctccgtgggttgaacttgaagaacctctgaaaatcctttctttctttcatcgatcactctctctctctagatctgttcaaatctccgaacatttccgctccaattttcatttccctgaacaaaaccaaaccctaaccctttctttctgtatgatacctgattcccccccagaggcgtagtttttgtgtcgatttgtaaattctttcggtagtttaggttagaattttttgtgaagtttttagggttttgaatcggtgagatgaatcacaacaacaacaatagagcgaggtaccctcccgggatggggattggtcgcggaggtttcaatcccaacctgggccagaacccgagcctgaaccagaacccgaacctgaaccagaatcatcacgcgttccaggctcggccgccgtaccaccaccagcaacaacagccgcagtatgtgcagaggcatttgttgcagccgccgccgccgcagcagcagcagcagtggctgagaagggatgccaatgccgtcgacgaggtcgagaagaccgtgcagtccgaacccatggattcgagttcccaagattagaaagcaagactaaagattccaccagctgatactcgctataggacagaggatgtaacggcaactaaaggaaatgagtttgaggattactttttgaagcgtgagctgctcatgggaatatatgagaagggttttgaaaggccttctcccatccaagaagaaagcattccgattgctcttactggtagtgacattcttgctagggctaagaacggaactggcaaaacagctgcattttgcattcctgcattggaaaaaattgaccaggacaataatgttattcaagttgttatactggtcccaacccgagaattggcattgcagacttctcaagtgtgcaaagagcttggaaagcacttgaaaattcaagttatggttacaacaggtggtaccagcctgaaagatgatataatgcgcttatatcaaccagttcatttactagttggaactccaggaagaatattagatcttgccaagaaaggtgtttgtattctgaaagattgtgctatgcttgttatggatgaggccgataagcttctgtccccagagtttcaaccttctatagagcagctgattcattttcttcctacaactcgtcaaatcttgatgttttcagcaacatttcctgttactgtaaaggatttcaaggataggtatcttcgaaaaccttatgtcatcaaccttatggatgagctaactctgaaaggtattacacaattttatgcattcgtggaagagagacagaaagtccactgtctaaatactcttttttctaagctgcaaataaaccagtctatcatcttctgcaattcagtaaatcgggttgaactccttgccaagaaaatcacagaacttgggtattcatgtttctacattcatgcaaagatgttgcaagaacatcgtaacagaggggtattcgactttcgacattcatcataaggtgttgcaagaccatactgatctttgtgcttcatgacttccgcaatggtgcatgtcgaaatcttgtttgtactgatctttttactagaggaatagacattcaagcagttaatgttgttattaattttgattttccaaagaatgcagagacttatttgcacagggttggtcgttcagggaggtttgggcaccttggtttagcagtgaacttgattacctatgaggatcgctttaatttatataggattgaacaagaacttggaactgaaataaagcagattcccccacaaattgatcaggcaatttattgtcggtgattggctgtaaataccatggttgtgtttacaattgtggctaatagcagtggttagtgtgaccgtggctcaagtaggtggaagaggatttgcagagctagtgacaaattgtgtattattggaacctggcatgagaggatgcactgtcgaaaactgggtattattggacccattgttgagtgctttcggattaatgctggttttaagagccctgaaacattattgggacctttaaaaagtttaataactgccagatagttgcttggtccggtttgtgtttctgttgattacatttgcagatcgatcattttaaataaatctaaataattttagtgtgtttggactgattttgaagtggtgt

SEQ ID NO: 44798 - DNA, 187 bp, Glycine max
  unsure (1)..(187): unsure at all n locations
  Clone ID: PAT_MRT3847_140452C.1
atctcgatttcgctcgaggcgacttgcactcacangaaactcaccatntacaccccacatcttatcttttctccatcccatccacccccccttgtattatctttcctcctaccacagcaagtgtctcaaccacccncnccttctaactcccctttatatctccaatttctatcatcaccactctttt

SEQ ID NO: 44799 - DNA, 683 bp, Glycine max
  Clone ID: PAT_MRT3847_140453C.1
ccacgcgtccgcaagaacctcataaaaccttttctctctcttacatcactctctctctctctctctagatctgttcaaatccgaaaccatttccgctccaatttccaagagcaaatcctaaccccttctctctgtatgatactagatttcccctcctcaaaggcgtagtttttgtgtcgatttgtaaattcattcggtagcttaggttagaatttttgtgtcaagtttttagggttttgaatcggtgagatgaatcacaacaacagcaacaacaatagagcgaggtaccctcctgggatgggacttgggcgcgggggtttcaatccgaacctgagccagaacccgaaccagaaccagaatcatcacgcgttccaggctcggccgccgtaccaccaacagcaacaggcgcaatatgtgcagaggcatttgttgcagcagcagcagcagcagcagcaacagcagcaacagcagcagcagcagtggctgagaagggatgccaacgccgtcgacgaggttgagaagaccgtgcagtctgaagccgtggattcgagttcccaagattggaaagcaagactaaagattccacctgctgatactcgctataggacagaggatgtaacggcaactaaaggaaatgagtttgaggattactttttggagcgtgagctgctaatgggaatata

SEQ ID NO: 44800 - DNA, 622 bp, Glycine max
  unsure (1)..(622): unsure at all n locations
  Clone ID: PAT_MRT3847_140454C.1
gaaagaaaaactcgaagaaaaagttttgggtttaggtgtatgtttctcttcattgagtttggccaacgaaattgttctgaggagtcatgtaggtgattgtgcaatgacatcccttctgatatcaggttttaatcctcccacaaagcaatccaatagagcttcttgtgtaattccttgtactcgattagctaaagccgtgaactgcacgtaatatgactgaactgaaccaatttgagcaagtttaaacaactgagatctaggacattcatacggtgatgggccaaattctgtctctaaggctcgcgtaaaagcaatccatgttttgaatgaattttcacgagtcatcatttggtagcagggcacaacctctttatccaagtgaattgaagcaataattaatcgttgctcacccggtgttttatgatagttaaaaaactggtcagccttgaatatccattgtaaaacatctgatccatctaantatgggaaaatcaatcttaacattcctaacctgaaaagggtgattgttcatagccagtgatatactcccaggatctcaagttttatccttgagtgtcatctcagggggttgttctaaggtctcaaaccgagcagcatattc

SEQ ID NO: 44801 - DNA, 1060 bp, Glycine max
  Clone ID: PAT_MRT3847_140455C.1
gatctttttgctaagaggaataggcattcaagcagtaaatgttgttattaattttgattttcccaagaatagggagacttatttgcacagggttggtcgttcagggaggtttgggcaccttggtttagctgtgaacttgattacctatgaggatcgctttaatctatataggattgaacaagaacttggaactgaaataaagcagattcccccacaaattgatcaggcaatttattgccggtgattggctgtaaataccagggtggtgtttacaattgtggttaatagcagttgttagtgtgaccgtggctcaagtaggtgcatgagaggatttgcaaagctagtgacaaattgtgtattagaggaccctggcatgagaggatgcattgtcgaaaactgggtattattgtacccattattgagtgctttcggattaattctggttgaaagccctgaaactttattgggacctttaaaaagtttaatattggcttttaactgccagatagttactgggttcagtttgggtttctgttgattacctttgcagatttattttgtcagtacatgtttttagtattgtagttttataattgaatggtttagggataacatacctttttatgaaacatattccttgcctatgctattatcctaaggcaaattctaacccctttgggcactggttaaggaattcaaaatagaaacttttcattcaagtgtcattaaatatatatctactatgatttccaatgcattttcaatgtgaattttaataaaaactttctattttggctcgaaatagagtcaatcattcatcaacattttcaccagctaccttacctacatctcccttcttttctctgtctaaagtctgtccttgtccattgaattttaagcatttttctgttgtgtgctagctctgttcttactattgtttcatgttaaagtgttaagtgatacaattgctttcctcatgagcagcaatggtttatttgtaagtttcagtgaaagagcaaaataaaggccagcgtaggaatgctgcaattttcattacttt

SEQ ID NO: 44802 - DNA, 578 bp, Glycine max
  unsure (1)..(578): unsure at all n locations
  Clone ID: PAT_MRT3847_140456C.1
atgaaagctttttttttttgttnagggttttttaaataaccaaaatgttattgggggggaggatgaaaaaataagaaagagaaacagccccggacaaccgactaagcatccggggggggaaaagaataaaaacaacaaaaacatcggtatgggggaaaacccccggggaaacccaagggggaaaaaaacaccaaaccacccggggggggggccagcatctacccgggggaaaaaacacccttattagaaacccaaaaaaaaaaggaggaaaacccgccccccataaaaaaaagagaagggaatacaacctttttgaaaaaaaaaaaaaaaccccgaccacagcttgcaaacattttatgcacacaaacggaaaaacccattggacagttgaagacaagctcttaagaaggggcacacaactccaaaaaacagagacagcctgtcaaaaaaaaaggggggaggggggggggggcccccaaaagacaaaactctcgggcggaggccgcccccactgtgagcccacgagaaaataagcaactgacccgcggaggacaaaaacccttttgaatgagagggga

SEQ ID NO: 44803 - DNA, 326 bp, Glycine max
  Clone ID: PAT_MRT3847_140457C.1
caccccacactttggctgtaacgagtgcgctacataattgaaacacgtccttccacggtgcaacttacttccagggatgcagaccctattttctaggaggctctgaacagaggacgctacatatgagaacacttcttaaaaggggttccctttagaaccctccacgaccgcgaaggacaacatgcaacccggaaacctcatgaacatggtgaaccgccgcggaaacacgatcttcctgttgcttatcagaacaagagatccatggctgacctggatggatacgttctttgccctgcctcttaactttcacatggactatagagtga

SEQ ID NO: 44804 - DNA, 359 bp, Glycine max
  Clone ID: PAT_MRT3847_140458C.1
atttgattttttttctatattgtattgcatatgcaaaatgttaccagcagcagttaatttttgaagtttaatcattaataaaaaaaatgttaaacacctcaatttttgtttccatgtttataaccagagctacacacaagacacagttttgttctgtgcagcatattctatagttttcaacagaattgggctagtttcaaaatctagtcattagccaatgaatgtagtgccaaacctaagaaagtgacttaaatataaaacttttctataacttgaggcaaaggagtcaggaatgcatttgctctggtcctatacttgtatctatttttaagttgactcattggcctggcatgttgtgc

SEQ ID NO: 44805 - DNA, 290 bp, Glycine max
  Clone ID: PAT_MRT3847_140459C.1
aaaaaacataaaaacacacattaaagattaccaaggagtagatgtatctagcataacgtgcggctgcatgcgaggtataaggtttactagcgcgtaagagcaaatgcatacattagacatgggattgccacagatgagttgataggacgagctggacaacattattatatggcaacgatcagaacaaccttatgtgatgtgccttgatcgcgtacaggtttaagccagataggcttttatagcaagagcatagaaccaatcgcgatttgtaacagttgcggagcttgaag

SEQ ID NO: 44806 - DNA, 267 bp, Glycine max
  Clone ID: PAT_MRT3847_14045C.1
tgttgccctgaaaaatgatctgaaacttcatccgtattttgaacatggagaagaaaaagaaaaacctgtaggtgatttgtccccaaggttgggggatcctagccaatatcttgatggcacacgaatttacatacaaggatcattatgggatgggtttgcagatgggaagggggacttcactgatggaccttatgaaattcaaaatcccgaagatttctttacagataagttttataattatggattcaatcccgaaggtggttctgt

SEQ ID NO: 44807 - DNA, 313 bp, Glycine max
  Clone ID: PAT_MRT3847_140460C.1
gatcttaatcacaccatagacacaaaaaggaattcaccagacttgtataaaaggtataattggacatggacaaaatatcgtaagccgtggggattgactgacaggagataacttacattccatgaaggccgcatgggaagagggggcaccgtatgaacgaccatcattgcctaagtctatctgagcaacgttagcacagcatggcccattccacacataacagagatcaggaccctcgactatggccaaatggctggctgcccaactttatcaaagttgggagacacctatgattccgctcactgattgctct

SEQ ID NO: 44808 - DNA, 960 bp, Glycine max
  Clone ID: PAT_MRT3847_140461C.1
ctttactcttactttttcaacaggcgaggaggcgaacaaagaatccgtgaaaagattcatgcactccaactcgcccacactcttttcccaactcgtcactctcacaacataatcctcactttttgaaatttcaaatcggttcggttcggtttctaacataccttcacaaaaccctactttgctccgctccttcttttctcactcagtaaatgggttggaatctcctcttctggctcgtcatttgtttccctgccaacattgcccttctcgcctccactttctaccaggttttgatcctgtcggatttggaatctgattacatcaacccgttcgacgcggcgtcgcggattaactacttcgtcctcccggagtacgttgggcagggagcgctgtgtgccctctgcctcttcactggccactggttcatgtttttgctcactgttcctgttacttgctatcatctcaggctgtatgtgaaaagagaacatcttattgatgttactgaagtgtttagggtacttaatgctgagaagaaatatcggatagcaaaacttgctttatacttaacggttctcattgttactatcttcaggcttacattaaccgccgtctactatttaggcatcgaagacgatgaagacataggaaacctttggtaacccacaacatgtgcagtatgagtgtatgacactctgggtaagttgctgggagggtcccctttttggtgggaatttgtgacttaatctgtaccattagttgtacagaaatagaaatgttagtcattaatttgaatgaaagattgcgaactcgtgtatccccattgtttgatagtctttttttcacttgaaatagcttgttgcacgaatctattctttgaacatttttgttttcctggggatacgtgtcttccttacagcaaaattttagcggctaacttgtgaacatttttgttttcctctc

SEQ ID NO: 44809 - DNA, 226 bp, Glycine max
  unsure (1)..(226): unsure at all n locations
  Clone ID: PAT_MRT3847_140462C.1
attactattcatgatatnttggactctttagaaactttttaaagccaaacaagacctaccattgaaatccatttttattgaccaattagaattccccaccattaccaatacttgtctcaaaaaatccaattttcatacattataaaaactttcaaataacattcaaaaacaccttctcaaaattgaacattttcgcgtagaatatgtcaaatatatattgtacttt

SEQ ID NO: 44810 - DNA, 371 bp, Glycine max
  Clone ID: PAT_MRT3847_140463C.1
agtacggctgcgagaagacgacagaaggggatttgaagccagagaatgtgctgataagagaggacgggcacattatgctttcggattttgatctctgcctcaaatgcgacgtcgttccgaagctgctgagaagcaaaaccagttcagaaagcagtgtcaagacccgaaggagttcagcaccatcttgtgttgcagcccccatgcactcatgtttctctgcctcaagcaagagaaagaaagtggtcacaacagctatcataggggaaaatatggatgtttatgaagatcaaagtcagcacaaaggccatgattattgcacgtccggccttggcgaacatgacacagagatagtggcagagcccatcaatgca

SEQ ID NO: 44811 - DNA, 359 bp, Glycine max
  Clone ID: PAT_MRT3847_140464C.1
aacaaaaaacatttttttcctttttttttggaaaaaaaaaacggtttggggcctggaaaccatccctcagcattcatttaaggggacccctcgggggttggaaaataccagggtttcaggtaccgtataaaaggattggccaggtttggaggccccatatcatccagggaaaaaaagattaccattctggaagaagggggcttttttttttaaaagcggggtttagggtttttttcacagccacccccaccaaaggtattgggaagagggcaaccgccctgttgggcaaaggttttctgtttgacccacagttctttcggcttctcgattttttcaagcttcagcggcggcacgttttt

SEQ ID NO: 44812 - DNA, 367 bp, Glycine max
  Clone ID: PAT_MRT3847_140465C.1
ggctcgaggcaatgcggatattttcacgtaccacgagcatctcgctcgtgacacaagcactttcgtcccgattgcatcttgagagaaggaggcttctgagctgtatataaaggcgtcataccaccattacgcgaggtcctgttgcatgtccactgaagcacccattaatgaacttactcccgcaggatctacaggagatacagaatctcctacctgaaggcactattcagcgcactggacctatccacatccttgatcctcattggatattgctgtgacgaagaccaccgggcatagccgattcaatgcatggcaagtgggagctaggcgaaacatgcttttcacaaagaggcctcaacattgactt

SEQ ID NO: 44813 - DNA, 579 bp, Glycine max
  Clone ID: PAT_MRT3847_140466C.1
gccggggatacttttgactaccacaagttttacatgaatttttgtgccaaactaggaaacattatttggagaccggcagggactatgccaaattctaatctgctcaagcaaatgactttataatccacttcatgcgggtgtgattaattagaagagcactaactggtccccgagtatgctaaaaattagcatcctttctagctatcataatgcaacatacactgtatgaatagtattgcaaacgggtatcactgtcaacttacaacatggcttaaagtataatggtttacaaaaacaatcttgggagaaggaaaggaaaaaaaaccctattgcaatcatcttgtagttgtagcaaatctaccccacaatggtttacaaaaccaatatattgtttggttcgggcagaaatgtataaagcataatgctttccgtcaccaattctgtcagcgtgtttgggagagctattcaaattctcaaacacgtttgtttgagacatgctcttttgtataaaaaagcgtctttggtcgcaataaattaaaagttaaagtctgttaatcgacattaaaaaagaacaacaac

SEQ ID NO: 44814 - DNA, 452 bp, Glycine max
  Clone ID: PAT_MRT3847_140467C.1
ggctcgagtagtaccaggcggaaaaccatttccgctgaggactgagacgcggtggtggcggctcatggtgaagctcaatagacccgaccaggccgagcccaaaaccgtgctaggccataaaaccatcgaccccaggcccaagccctggcacaatgcccatcatggaaaacacgacaccgtcaaagaaagtgaatccaaggagaaggttgttcacaggaagctttcggagtctgaggagtccggcatgagagtcttaaccattgcaggggaaaacagaggagcgtacacgcaaggctagaggataataaaaatgcagcgtttctgtgatgctaccgtcagagttgcgaggttgtcagaggtgaatcttgtcaaaattcactggtccaccataaaccacttgacaaagtggggcaccgggaaactcgtcatataaagcataaccaacttttaca

SEQ ID NO: 44815 - DNA, 252 bp, Glycine max
  unsure (1)..(252): unsure at all n locations
  Clone ID: PAT_MRT3847_140468C.1
gtaataattcgtgggngccgangggggagggggtggggtgtatttagacnaaccgcggctccacccaacagaggacttncagacagagtccatcaataggagccctgatcggagaaagaacgggcggatgacagtcccagaacagctatgctgaataggcaaaccagaggaggtgctctacctacaagccgaccgacgaggctgaacaccacccttgggaaaggagactctagggccacaagatggggggga

SEQ ID NO: 44816 - DNA, 282 bp, Glycine max
  Clone ID: PAT_MRT3847_140469C.1
cgcccttttttttttttattaacttattcatttaatttaacatgaacacaacaacgttgggaagggcaagtttcaccaaacaaattattttaaaagtgaatttatttacaacattccaagttgtacttggggggggcaaaaagaacacatttttaaaaggaaactatggtggggtttgggaagggataccaaaaaaaacctttcttaccatataaatatagattaaggtttcatattagtgaagggtgcaataatgacattgggacaactaacctcattaat

SEQ ID NO: 44817 - DNA, 451 bp, Glycine max
  Clone ID: PAT_MRT3847_14046C.1
ttctgctgctggttggggacggattgatgatgctggtgtggtcaaggtttatgagatgctaactggcgttagagttgagggaaaactccaggctcaaaggaaagatgtcatgttacaatctcttccacccgagtggccccaagatcatgttcttgatatacaaaccctaaaagaaagcaattcaaaaattttagttgttttggatgacgatccgacaggaacacaaactgttcatgatattgaggtattaacagaatggaccattgagtcgctgattgagcagtttagaaaaagtccaaaatgctttttcattttaacaaattccaggtcactgagttctggcaaggccagtgcattgataaaagagatttgcagaaatctggacgctgcagcaaaatcagttgacaacattgactatactgtagttttgaggggagattcaactttacgt

SEQ ID NO: 44818 - DNA, 497 bp, Glycine max
  Clone ID: PAT_MRT3847_140470C.1
aggggcgggggaattcggtccccatattttaagactagaagccccgggggctacatttgggttccatacaagaaaaaaacaggaattaaaaacccaacaaggaaaaccgaaaacgaaaaggggggggtggacagaaaacaaaaaagaatcccctgggggggggaacaaacgattatttcaggggggggggggaaaaaaaggcaaaaccggggggcttggaaaaattattcatgggctaaaagggggggggaaaaagaaccctgggggggggccaaaacggggtaaataattccgggggggggaccaaaaagggggggccccaaacagagccaaaaccctccctgggatccatactggggggaaacccccaggggggggggggtgatggcaagggggatttcaatccagggaactgggctgtccccggccattttgggggtcaaaaagaaaaaagcgggaagcaaatcccaagaattttggttggttttgggccgaat

SEQ ID NO: 44819 - DNA, 262 bp, Glycine max
  Clone ID: PAT_MRT3847_140471C.1
gggaaatatgaaaaaaccatccagaagttcctcaagtttctttgataggtaattcttcctcagtgatttctaagtaccttgtcaatcgctatgaaaaaactacttttttgtgtcaattgttacttctaaagtgaatattgatatatgagaatcatgtctgctaaactaatccatttattgtaattatagcttctagttttgaaaatataattaaatgtcataaaattggaaacacattctcccgtttgtttaaaactaaaaa

SEQ ID NO: 44820 - DNA, 1971 bp, Glycine max
  Clone ID: PAT_MRT3847_140472C.1
cgcgtgcgtgcggctgcggaaacgacagaagggaattcgatttttttttcctttcatttctaacctaattttcgtttccatccaaaaaatggctctatcgcgcgtggctcaatcgtcgccatcacagtcgaatcttttgaaacccctctcgtcgtacttatccctacgacgccgttcggtgtcgacctcgtcggagcccctcaccgtggagacctcggtgcccttcacctcccacaactgcgatgcgcctccacgcgccgtggagacgtcctcggcggagctcttctcgttcttccgtgacatggcgctgatgcggcggatggagatcgcggcggactcgctctacaaggccaagctcatacgcggcttctgccacccctacgatggccaggaggccgtcgccgtcggcatggaggccgccatcacgcgcaaggattgtatcatcaccgcctaccgcgaccactgcaccttcctcgcccgcggtggaaccctaatcgaggtcttcgctgagctcatgggccgccgcgacggctgctccaaggggaaaggaggatccatgcacttttaccgcaaagaaggtggcttctacggtggccatggaattgttggggcgcaggttccgctggggtgtggcttggcttttgctcagaagtattgtaaggatgagaatgttacgttttctatgtacggcgatggtgctgccaatcaggggcagttgttcgaggcgcttaacatttctgcgctttgggatctcccctccattttggtctgcgagaataatcactatggaatggggacagctgagtggagagctgctaagagtcctagttattacaagcgtggggattatgttcctggattgaaggtagatggcatggatgctcttgctgtgaaacaagcttgtaaatttgcaaaggagtttgctttaaagaatggtcccattattctcgagatggacacatacagataccatggccactccatgtctgatcctggcagcacataccgtacacgtgatgagatttctggtgtaagacaggagcgtgatccaattgagagagtaagaaagctactattgactcacgagattgctactgaaaaggagctaaaggacattgaaaaggaaataagaaaagaagtagatgaagccattgccaaagctaaggaaagtcaaatgccagagccatctgatttatttaccaatgtatatgtaaaaggcttcggtgtcgaggcttgtggcgcggataggaaagaacttagggctactttgccctgatggaaaacttttccttttccttagttccttagttttggacaaatcaaaataatgaagaataaaaggttcagaagatcatctctgcatatttgttgagctttcccctaattgtatatgaaattgattcttcaatagcaatgaggcagaaattaatggtttgccattaattttggaggatctaacactcatattacctcaattgattttgcaagcaactagtctcctgcaaatttggaggatttcgttatgcaaaacctccatggttggcaaaattttgccattattttaattttaggtattcaccagattgtgttcaaatgaaatctttttttttttggctattaacaattcatgtttctttggacagttaaaaatatgatgcctgtacattgcacagattgaattgttgatacaggttggattatgttattttatttttctgctctttacttacgtttatgtctcgctatatatagggaaataaattctgttgattttattttaatgctttttatgtatttttattcaacctcctgaaatgtttttaacttacagatttcacgattatagtgaaattttaatgtgaattgtatatggtgaatcagttgtaatattacaataatcaagtcatattccattagatgatgtgggttatatggatcatatgatgtcatatgatgtcatttaacatggtt

SEQ ID NO: 44821 - DNA, 2268 bp, Glycine max
  unsure (1)..(2268): unsure at all n locations
  Clone ID: PAT_MRT3847_140473C.1
acatcacctaccccttctctgttcattgctcaattgtttccctcacaactcataacctctttcccatttaacctttgaaaaaattccatactgtaacaacagatcaccatggctctatcacgtttgtcccaccgcagcatcggatccactctcacaaaacccttctaccacgactcagcctcagtccacacctaaccctccaacctcaaacaaagtaacaaaaacccattttttcctcttctttgcatcatcattctcattccttctttctaaactaaccaactttttttcaaacaaattcgattctttcttcatttttaacctaattttcttttcgatccaaaaaatggctctctcgcgcgttgttgctcaatcgtcgcaatcgaatcttctgaaacccctagcgtcgtacttatcactacgacgccgttcggtttcgacttcgtcagacccactcacgatagagacctcggtgcccttcacctcccacaactgcgacgcgccgtcacgcgccgtggagacctcctcggcggagctctttgcgttcttccacgacatggcgctgatgcggcggatggagatcgcggcggactcgctctacaaggcgaagctgatccgcggcttctgccacctctacgacggtcaggaggctgtcgccgtcggcatggaggccgccatcacgcgcaaggactgcgtcatcaccgcctaccgcgaccattgcaccttcctcgcccgtggcggaaccctaatcgagatcttctccgagctcatgggccgccgcgacggctgctccaaggggaaagggggatccatgcacttttataggaaggaaaggtgggttctacggtggccatggaattgttggggcgcaggttccgttagggtgtgggttggcttttgctcagaagtattgtaaggatgagaatgttacgttttctatgtacggagatggtgctgccaatcagggacagttgttcgaggcgcttaacatttccgctctttgggatctcccctccattttggtctgcgagaataatcactatggaatggggacagctgagtggagagctgctaagagtcctgcttattacaagcgtggggattatgttcctggattgaaggtagatggcatggatgctcttgctgtgaaacaagcttgtaaatttgcaaaggagtttgctttgaagaatggtcccattattcttgaaatggacacatacagataccatggccactccatgtctgatcctggcagcacataccgtacacgtgatgagatttctggtgtgagacaggagcgtgatccaattgagagagtaagaaagctactattgactcacgagattgctactgaaaaggagctaaaggacattgaaaaggaaataagaaaagaagttgatgaagccattgccaaagcaaaggaaagtcaaatgccagagccatctgatttatttaccaatgtatatgtaaaaggctttggtgtcgaggcttgtggcgctgataggaaagaagttagagctattttgccctgatggaaaacttttcctttgaatttcttttccttagttttggaccgatcaaaataatgaagaataaaaggttcagaagatcatctctgcctatttgttgagctttccccaaattgtatatgaaattgattcttcagtagcaatggggcggaaattaatgttttgccatgtaattttggaggatctaacactcatatgacctcaattgattaagcatgcaactagtgtcctgcaaatttggaggatttcgttatgcaaaacctccatgattggcaaaattttgccattattttatttttaggtattcacaagattgtgttccaattgaaaccattttttggctataagagtctttggacagttaaaaatttgatgcctgtacattgcagattgaattggtgatacaggttggattatgttattttcaaaaaaaaaaaaaaaaaaaaaaaaaaaaaaaaaaaaaaaaaaaaaaaaaaaaaaaaaaaaaaaaaaaaaaaaaataaaaaaaaaaaaaaaaaaaaaaaaaaaaaaataaaaaaaannnaaaannggggggggcccctttaaagggaccaagtttacccccccggggtggaaaagataaactttttttttagggccccctaaattaaattccggggccgggttttaaaccggggggatggggaaaaacccgggggttccccaattaatgggcttggggaaaaaccccctttttgcccgtggggaaaaaaggaaa

SEQ ID NO: 44822 - DNA, 806 bp, Glycine max
  Clone ID: PAT_MRT3847_140474C.1
gttcaaaccactcagcttcgtcttcataccaccagacagcacagacatgttcacctcactccacaccccaatccttcacccccgttactgtcaccaccctacaccgtcctgcacccaattctcccctctcgccctcccacccttccaccgcaccctctccttcctcgcccctccgccgctcctcccggccgcgcccgccctctccgccgcctccgccgcgaagcccgacaagtccggcgagcagaagtgggtgcacgagggtctcatcatggagtctctcccgaacggcatgttccgcgttcgcctggataacgaggacttgatcctcggctacatctccggcaaaatccgcaagaactacgttcggatcctccccggcgacagagtcaaggtcgaggtcacccgctacgactcctccaaaggacgcatcgtttataggctccgcagcagcaccccctcctagtgtttgtaaaaattactcacacaatccagtttcactgcatcattcttgtaaaaaaaaaagaatgataatgcttcacgttgcaatttggtgcaatttatttcagtttaattttcttcttttcagtcactcttgtcttattattggtagttgttagagtaaccaatgttttcagttcccaatccttgatattgcaggaaaattgcagatgagtgcgatactaaaatgttgaccgtgagtgtgttagatttttaccttcagtgatgtatttatggtgaaactgggtgaatgtttttatttggataaactgaagcttaatgttctaaaaaaaaaaaaaaaaaaaaaa

SEQ ID NO: 44823 - DNA, 373 bp, Glycine max
  Clone ID: PAT_MRT3847_140475C.1
acgagggtttggaactcatcaaatggagagagtggagaatggtaccccaattgttcatcagtgaattctgtcattgattatcagtggtctgattgggacatgggaggaagtgttcaatccaataatcagtggaatctttgtgatgaccaagtgatgaattgcttgtggagtactggcattggtgaaataaattatggtgttcatccataatcctaatcatttgcacaaaattgcttgcaattaagttgtttatatatagtacgcaattttattttataatagcttcgtgggattaggctgggggaaatttaattagaagtgaaagggggttacttgatttgtcagtgatttgtgcaatttgcaagatgtcata

SEQ ID NO: 44824 - DNA, 509 bp, Glycine max
  Clone ID: PAT_MRT3847_140476C.1
gttcaaaccactcagcttcgtcttcataccacaacacagagacatgttcccatcatcatctcccacctcactccacaccccaatccttcaccaccgttactgtcaccaccctacaccgtcccgcacccagttctcccctctcaccctcccacccttccgtcacaccctctccttcctcgtccctccgccgcttcttccggctgcgcgcgccatccccgccgcatccgccgcgaagggcgacaagtccggcgagcagaagtgggtcctcgagggtctggtcatggagtccctcccgaacggcatgttccgcgtgcgccttgacaacgaggacttgattctaggctacatctccggcaaaatccgcaagaactacgttcggatcctccccggcgatagagtcaaggtcgaggtcacccgctacgactcctccaaaggacgcatcgtttacaggctccgcagcagcaccccctcctaatgtttgtcaaaattactcacacagcaacaacgta

SEQ ID NO: 44825 - DNA, 537 bp, Glycine max
  Clone ID: PAT_MRT3847_140477C.1
gttccggatcttctcaacgacccacaatttgccgggtttctggaattttccaatttgtttgaatttgtataaacttagtaattttctctgctcaccaagccgttggtttctcattgctcacgccaaagatcattctttcttcttctgaattgaagaatggcacaagatattgctactccaccagttccttttgattttgaactcttggttggtgatcaccttagaactgtcacagcctcatccaacagcagcaggacagacccatggattgaacctgaaaggttgaaactcagacacaggattggtcggggaccctttggtgatgtttggttagcaactcatcatcaatcaactgaagattatgatgagtaatcatgaagttgctgccaagatgttacctccaatcagagacgaacatgtgaagactgcattagagaaatcagtgaattatagcggctagggtgtgctggctccttggaagtctggctacttgggaaaggttattgaaaggaaagatatgcatcattatgaattttt

SEQ ID NO: 44826 - DNA, 193 bp, Glycine max
  Clone ID: PAT_MRT3847_140478C.1
gcctgaaaatcttcacatacagggagggcaatgccgaaaccacatccgagcgaaattctgggaggtggtggtccccgagcaccggatcaattaccacgggaaggtcccagggggacaacaagtgcaacttgagcgaattcaccgtcttttcacgaaaacgagtgggaaggttcatgcccatggcatccttatg

SEQ ID NO: 44827 - DNA, 288 bp, Glycine max
  Clone ID: PAT_MRT3847_140479C.1
ccaaaacctttattcatttaaacaccctgggcctccaaaatggtggatggggaaccctttccaacctaacaacttccaattacccaattttcctacaccaaatttttttcattcaccccaaattaaagccccagccttaacttttttacttttattaattttacaaatttggaattgaaagggaaggaaaagaacttctttaaactgaattttaaaagaaggtggtttcatttcaaaattaatggcattcacccacttattattaactttttcccattcattttttat

SEQ ID NO: 44828 - DNA, 420 bp, Glycine max
  Clone ID: PAT_MRT3847_14047C.1
gctcgagccgtttcaaccaaaatggagaagcgattaatctccgtagaccgttgggcagagggaagcgaagcgtacttcctcacccacctccactccgaccacacccacggcctcaccccctcctggcaccacgcccccctcttctgctccgccgtcaccgccaaactcctccccttcaagttccccggtttcgacctctccctcctccgcatcctccaccccggcaccacccacaccgtcaccctcccctccctcaccctccacgtcaccgtcatggacgcctgtcactgccccggttccatcatgctccttttccgcggcgacttcggctgcatcctctacaccggcgacttcaggtgggaagccacgtgcgagcgagcaaccaagtcccggcacgtgcttcgcgacgcgctccggcac

SEQ ID NO: 44829 - DNA, 298 bp, Glycine max
  Clone ID: PAT_MRT3847_140480C.1
gcaaaacttcatcttggagcaactgaacgtgtatagcaccaagttcggtacagacaagaacgagctcgtcaggtagcatttgctgaggaagcccgtctaaaggactaagatgccaagaaattttatatggaatggagataactagaagatgaacttatgcgagttcaacatcatgttgaacattttacgcgttttaatgaaccatggtatagcaacatgcatttaaatccgagtatattgacagaatatctataaggaatagggaacttgaaatacaaaaaaaaaaaaggttgaaaaa

SEQ ID NO: 44830 - DNA, 538 bp, Glycine max
  Clone ID: PAT_MRT3847_140481C.1
agctcggaattcggctcgagctcgagccgaatcggctcgagttctattccattctcactcaatggaccctcccacatcctacatttcctccgatgagctccgcaagcacaacacgcgccacgacgcctggatctccatccacggcaaggtctacgacgtctcctcctggctccaccgccaccccggcggccccctccccctcctcagcctcgccggcaccgacgccactgacgccttcctcgccttgcaccccccgaactccgcctccctcctcctccccgccttcgccaccccccacctcctctcggaccactccgtctcccccgcctcctccgactaccgcaagctcttctccgacctctcctctctcaacctcttcaaccgcaagggccacaccacttccatcctcctctcccttatactcgtccttttccctctctccctctgtggagtcctgctctctgacagcacgtgcgtgcacgtgctgtccggagcattagtaggcttcctctggattcagagcggctggataggccac

SEQ ID NO: 44831 - DNA, 308 bp, Glycine max
  Clone ID: PAT_MRT3847_140482C.1
cacaagcctacatacagattgtcaaagatttcagcgcatagcttttcatgatatgtctgacttggacatattcccgagcaagagataacaagcacctaattggctgtggtaacctatcaaggccaacactgggggaaaggaatgctctctccggctagctcgtgtgaagatatgcacttcttttttggtacctacttactggaacaatgatgctagcttgcccacacccccaggaacagaggaacccattcaagcgatgccgcactttgttaacctgtatctaccggctgacatcgatcttggctcct

SEQ ID NO: 44832 - DNA, 649 bp, Glycine max
  Clone ID: PAT_MRT3847_140483C.1
attgagaaaaaaaatggggtaaaatggaagttttgcagctgctggggattctgtttacagcatcaaagctgttgatgaagatcccattgtcagatttcatcgttctgggctgtggttgatcccaattggtccaaagcacgatactttctttatggttttctggacacccttttgcttggtttgatggtattttgttccttgaagttgtagttgatcaagttcgttcacttgtcacccattgtctgaacagctgaaacctgaagttcccaaaactgatcaactggagctgtgtccaatttggcaggtagttaggtaccagacatggtgaaacagtcctgaacagtctcaaattagaaagattctggtggtggaaatctatgattcttgtagtgtttgcctagatccaatatcaagctttagccaaatcaaaactagctgtgttgttgttctttgctgtagtcatggcaactttgtctcattccgagtcccggcgctcgtattcttggtggtgggatagccacctaccaaagaattcaaaatggcttcaggaaaaccttgcaggtctctctctccctgtatttatgtgtttctacaattatgctagaggaatctgaatatattgtttgaacttgttacattaaaaaaaaaa

SEQ ID NO: 44833 - DNA, 227 bp, Glycine max
  Clone ID: PAT_MRT3847_140484C.1
ctcaatttctgctccctaaatcatgcttgcgtttcgatcggaacccttgttgcagttccaaggaaccagggtccttggaattggcccatttaaggccttgggggttaaattcccccccccccggaggttttgggggccttcaaccccccggtttcggggttcgaaaaggttacttggtcgtggcttggtgggggaaccaacccaaattttggtccggcgggggaatg

SEQ ID NO: 44834 - DNA, 344 bp, Glycine max
  Clone ID: PAT_MRT3847_140485C.1
tattgtagtgtgcagaaaataaaattgaatataaatttttctgttgctttaggaggcagacgcgaaaagggaaaacttcatagaagagaggggacagacgagaacatacagattggcgtgataatgtcatcacgtccctaaaaatggttatgtaaaactacacttaatgattacacagttgacaacttgcatagcatacccaatgagtatgcatgcaatatcgaaataagcagaatgattgggaccaaaatataaacaagacaaacaaaacaaaaccttagttcaagaaaacaacaaaagtgctgatgctaaccacgatcgatcatcaaatattgtgttgcaaa

SEQ ID NO: 44835 - DNA, 366 bp, Glycine max
  Clone ID: PAT_MRT3847_140486C.1
aaaaaatttttttttttaagaaaaaaaataaaaagaaaaaaaaacaaaaaaaataaaactggaaaacgggatggtcttttcaaaggttccagctggggggtcccgctttaatgacgcagtatcttttctttgggtgagccttctctggctttgctggactgtttctgaatgctggtatctggctttcccccccgatacctatcttgggaggcttgtcacctttccctttttgagcggttggattattgggcccctttcccccacgggccgattttcgcaacagtcgtgccggctgatggtacccttccatgcgccgtttttattggcttttggaccgccttatttaccgttacctggcctggttcc

SEQ ID NO: 44836 - DNA, 475 bp, Glycine max
  Clone ID: PAT_MRT3847_140487C.1
ttttttttttttttttttttttttttttttttttttttttttttttttttttttaaccttttttttacctttgggaattggaatacttttagcagcttttacaatatcaggacaggaaacaggcacatttttttccatctttttcgggggtcaaaagctttgccattctcagccccacccttataacgggaaaaactactaggagttacttggggcttctttccacttttcgggttccttcccttttccatccccgggtggagggcgccttcatttccctggtctcggggggactcaacttcatttggggaaccattagggagctttccataaggttccctcactccaaatttaacggggctatttatggggggcaagggcccaacttccggggtcttctttttcttcttcttaaggaactcacccccatccacattttcaggtgggaacccaataaaaccatcaaggtcttgac

SEQ ID NO: 44837 - DNA, 554 bp, Glycine max
  Clone ID: PAT_MRT3847_140488C.1
gtgtttgatatgatcccatcattgaaagaaaaaaaaaatgtacaagccagctcataattaccagtaaaacaactctcatcatggaacatttttcaaccaaagaataatgtctaaataaactttcttcattggctatatctcaatgtacaacattcatacatagggggagatggtccattccacaagctcctctatatttactttgcagtaggcaaaagggggtctctagcagcaaagttaccaggtttccctctcaaatttgatagaaccaaatacaagaatcctgcagaaaagaagcttacaaaccatgcattgttgtagatcacaacaaaagtgttaggaactgaagttgcaattccaactttttgcaagaaaccaggaaccacaggtaaaactccaacaactagtgccagaatagccgccacattaaaccctcttgaatacctatatgccccataaggactcctagagtacaagtcactaatattcaaatatgttttttgtataatatagtaatcagctagaacaattcctgctataggccccatcaaagc

SEQ ID NO: 44838 - DNA, 774 bp, Glycine max
  unsure (1)..(774): unsure at all n locations
  Clone ID: PAT_MRT3847_140489C.1
ggctcgttctgcttggagagcgttggtaaggcttgctgtcgtccctgcttctccgattggcacctgctgcagattggaagtgtccataggggatctcaccgtaggggccctccgggtggttgccctccggtcggtgcgggtctgtgctgtgcatgccgttggtgtgcctgccgtctgtgccactgcccccatttgcagactgccgtcttggtgcctcttggctctcaatttctcaccacaaatggtctttgcctcgttggacaccgcctctgggttcacccgcattgcggccaccctgagcgctgctcgccggtggctatggctttcttgccgccgggtttctggccgcctccttattcctctcatccaaatccctgttagcagtgtccttcttgggcaggtcctccttgggctgtcggtctgagctattactgtttgatccattgctctcatagtgccatggctgagtgtaggagcctggaatgtaatctagaacactgtttctatgcatcaatttgccatcaaacattttgttctctctagtttgatgacctatttgtcccatcagagggagattctgatgtggtcctgggtaatgcatcagcttttctttcatgtaatcacttccaggtacagaaatttcttgataatttggtccgctcatttggttcactggccagtctgatggtgtattagatgttagttgaatgagcttctcangggggatgggtacccatgtattgttcatttcaaattgtctgtcatcttggccta

SEQ ID NO: 44839 - DNA, 724 bp, Glycine max
  Clone ID: PAT_MRT3847_14048C.1
gcaccggaatatgcaatgcatgggcatttttctgtgaagtcagatgtttgtagttttggcgtattagttcttgagatagtaactggaaatgcatgggctgatttccataaggtcggttatttttagttttggctaactagttcttgagatagtcactggacacaaaaatggtgatatccataagagcggttatgtagaacatctaataagctttgtatggacgaactggagggaagggactgccttaaatatagtagatcaaacactgcacaataattcaagagacgaaataatgagatgcatccatattggattactttgtgttgaagataacgtagccaatagaccaaccatggcaacagttgtaatcatgtttaacagtaactctctcgttcttcctataccctcacaacctgcatattctacgaatgtcaaaggtccatcaagatcaaatgaatcaagaaataacttcaagcaagcatcatcaaatgaagtctccattagtgatctagatccccgctagatttcagtgtagtggtgactctcagaagcattcattcattcagctcatgcaagccaaacaaatgctctttgtttagacattaagaatgaatttttattttaattgtatgatgtttttaattttattttatctcactcatttaataaaattgtttttataatcttatggttttgttatgagtaaaagttttttataagttta

SEQ ID NO: 44840 - DNA, 962 bp, Glycine max
  Clone ID: PAT_MRT3847_140490C.1
ccacgcgtccgcagagaaaacatctttttgaccctaagaaaaagcgaaagatactttgtgatgaacaacttaggtctttaatagggaggaaatcagtaaataaaaacagcatacaaaatcttctcgcacctcactttgctgagaattccgaagaaatggatgatatcagtagtagttctgaagatagggattgcaatgaaccagtcaatttttcaagaaagagaaaatcaatttcatgtacagaatctcaacatccaaacctagtttctgaagagcgtcaaagctgtttcgcagccatagttagttcaaatctcaagcttgtctatttgaagaggagtttagtggatgagctttcaaagcagccagaaacttttgatggcaaagtgctaggaagttatgtaagagtcaaatctgacccatatgactatttacagaagaattcccatctgctcgttcaagttgtaggaataaacagatctttaaacaatggtgaaatcaacaaggaaattatgcttcagctttctaatgtgccaaaagctgtacctatctgcaaaatttctgatgttgacttttctgaggaagaatgtcaagatctgtatcagagaatgagaaatggtctgctcaaacagcctactgtactggagcttgagcagaaagccagaactctacatgaagatataatgaagcattggatcccgaggaagttagtattgttacaaaaccttattgatcaggccaatgaaaaggggtggaggagacaactttctgagtacatggatcaaaaactgaagcttgagacaccattggagcaatcacgtttattgaatgacattccaaaagtaattcctgaaatagttgataacactctgtccctgaaggcttccccaacgaaagataagcttgagcaaaatggcttgtcagaattagccagtggaaagacttgtaactctgctggacgccat

SEQ ID NO: 44841 - DNA, 573 bp, Glycine max
  unsure (1)..(573): unsure at all n locations
  Clone ID: PAT_MRT3847_140491C.1
ccacgcgtccgtacggctgcgagaagacgacagaaggggaataatattgcagtgcgtttcagtggtggaaagtggaaaccgtaatcgccaagctggaaagaaaacgctccatttctgcgccactctctgccttatcgccccatttccgttccaacattgtcagagagcaacacagattagtcgtagcagtgagaggcatcggagggggaataaaacatggtttcaacagcaacagaaacagagcaagattagaaagcgccagggtgcgcacgttagcaccgaaccccgtgggttcctctcccctaactcgcttcgcccccacggcattcctacgctgatccacactcaaaacgcatcacaaaaaacaccgtttcgcaaccctaacggaggaggggggtaaaaaaaaaaactgaaaaaaatgtttcggataacgagattctcggggtttttctccgccgcaatgtttgtgattgttcttgttactctcttccccttccttccaatccgaagccattcgatcctccaccgattttccttccggaaagcccctccgntccgcaatgccgccgaatg

SEQ ID NO: 44842 - DNA, 386 bp, Glycine max
  Clone ID: PAT_MRT3847_140492C.1
atcaggctcttgctagttgaagggtgtccatgtggttcctttggaagagagtggtatctcagaggaatctgtggaaaatggaactgaaagtgtttctgcacaagaggaagacactgagcagtattttagctttctgaaagtcttgactgaggtgaacaattggaggaagcaatgtgaagtagtagaacagttaaggctgctgctgagggatgacgaggaagccaggatttttatgggggcaaatgggtttgttgaagcacttttgcagtttttgcaatcagctgtgcgtgaaggtagtttgatggctctggaaagtggagcaatggctctcttcaacctggctgtgaataataacagagataaggaaattatgttatcggctggag

SEQ ID NO: 44843 - DNA, 361 bp, Glycine max
  Clone ID: PAT_MRT3847_140493C.1
agggaaggtaagcatgcggttcgagtcaagctgcactacacacaccaagacaattttctttaaaacctatgaagtgccaagcgggggtgtacattataggaaggaggcgaccccacacacccacaatcctgactaaagaccctttcaaagttcttgctaaccataaacgtgagttacggagccatatccctcattcactacatagcactcaagaggcaaaacatcagtgcaatgaaaggactctacccaaatgtactcctcccaccaggcacaatccacaccaaaagaggttggttgcaccttcaccaccatctattgcagatgaggaactgtagaacactggccatgtccacagcaaaat

SEQ ID NO: 44844 - DNA, 1874 bp, Glycine max
  Clone ID: PAT_MRT3847_140494C.1
tcgtgtccccgtgggcggacgcgtgggcgcttccctgtgcggccgcgtgtcttttgtttcttccttcgtagggggataagagagcaacaagtaatgatggatgcgctgataaaggtgcagttcaacgcaccaaaaccataaaaagcgcttctttcgtcttatggcttgtatgaggaggaagaagcactgcgtcaaaggccaacatcgtttttttctttcccacccgacgacaattcttcgcttcttctgccccttcttaatactcttcttcactccaatagcatctgtgcaaccgtccagcggttcctattgtatacatcatggtaaggttgctctacccattctgtctgcttttcagcattctactgcaagcggttcaccggaaacctatgagttataaattatggttggattgcaaataatatttctacaccctttgaagttgttactcttcactgagcagcgagaataaggaatgttaaaatgtaagaatctactatgattatcaccgaggcatttaggcgtatagtggaactggtcttgaaattgcttcccgactcccccatgcgcggcatcaatacatgagttgaaattcagaccatgcgtggaaatgggtaaaagaaaatgttccgtcatgtcttcctgattcatgcatttgctgaattgaagtaggctatggatttttcggtcgaggtttctagtggagttcggctgggcgcctttgcgcagttttacattgctaccatgcaacttcgtctcgttcacctgattcacagttctacggctaactcatttactggttttccagtttcttaccctccctcctctggtaaatttgataataatgttaatcagtatatgaagtatgtactggagttctgagttctgattggctctcctttctccttgaatgcttaccctttactagcctatgcgggttatcctgaacatattgatataaattatgcactttttgaaccaacaaagggaatttatgatccaatgtatcatctgcattatgataacatgcttgatgctcagattgatgcagcctatgctgctttggaggatgctggatttgacaaaatggaagtcatagttactgaaacgggctgggcctcaaatggagatcaaagtgaagctggagcaaatgcaactaatgcaaggacatataattataacctgcgtaaaaggcttgcaaagaggaaaggaacccctcatagacctaaaaatgttgtgaaggcatacatttttgcattattcaacgagaacgagaagcctgggcattcatctgagaagaactatggactgttcaaggctgatgggagtatatcatatgacattggttttcacggacttaatgctggacattcatctcttttatctcttaagaatatcaatactcaaggtttgtcccagtcatacgtgatggtattctttttatcttctttgataccgctgattttctggagttagtgatccttatgatatcagcctgctcggcaaaccagttcctggcaatgaaatgagtttgacttggctccacttcatgtctcactatagatcaaattataccattgattgtcatatttcataaagcaatatctagaaatgttgatgtttcagcaaatgtgtaattatttcacttgagaaaggattttccttcgaagagtattagaatttttcagtttttactaatacattccaaattttggacagcagtttcaaaaaaaaaaagtcacaaaaaaaaaagaaaaaaaaaaaaaaaaaaaataaaaaaaaaataaaatgaaaataaaaaaagtatgcctgcaccaaaggacaaagaattatcaaatgcggcaagaacgaaaaaaaaaaaagggggcgccttt

SEQ ID NO: 44845 - DNA, 530 bp, Glycine max
  Clone ID: PAT_MRT3847_140495C.1
gaccggccccgaaaggccaaccacggaaccccaaaggggacccggaaaaaaaaaagggaaaaaaaagaaaaaagggggaaacagggggaaaaagggatcccggaaaaaatccacaaagcaaaaaaaacggaaaaaaaaaaggaaaacccaggggggacgaaaaaaggaagaagcccaaaaggggggggggaaccaaaaggaccggggtaaaaaaaagaaaccgggccccccgccggaaacaaagaaggcaacccccccgggggaaaggccaaacggccaagggggagccgggggggaaattgttccccccgggggaacggcaaacaaccaatggccccccccccggggggcggaaaaaaacggccggccccggaaaacgggggttgaacaaaaccagcaaaaatcccccccggggggggaaaaccggggaaaaaaacaggaacggggggggaaaacgggggaacccaacaggaggagaggcgcgcaaacccgaaaccccgaccccaaaagggcgcccaaagccccaaagg

SEQ ID NO: 44846 - DNA, 748 bp, Glycine max
  unsure (1)..(748): unsure at all n locations
  Clone ID: PAT_MRT3847_140496C.1
ctcgagccgattcggctcgagtggagagggagtgagaggagaagcgataaatcacagatctaacgaacaacacaacaactgcagcatttatccgatatctcaacctcctccgatcttggagctctggttgcttctgtttcatgagataaggccccatggcaagcaatcctggaaatcatgccccttcaaatgggtctgtctatgtatgcaacttgccctatgggactgacgatattatgctggctgaatattttggtaccatcggattaataaagaaagataaacgtacagggagaccaaaaatatggttatatcgagacaaagaaactaatgaaccaaaaggagatgctaccgtaacatatgaggatccgcatgctgctgtagctgctgttgaatggtttaacaacaaagattttcatggcaatacaattggagtttttatagcagagtcaaaaaacaaggatgagcaagcatataatgcagcagttgaacctgtagttgctgatgatgttggtggactagaggaaactaccaaggatgttaatggtggtagtggaagagggnnagtgtcaaaatgattcttcaggcaaagcatggcaacaagatggcgattggttgtgtctgaatacaagttgctccaatgtgaactttgcttttcgtggtgcttgtaatcgctgaggaactgctcgttctgctggtgcttctggaatttcaggggctggtggacgtggaaagggacgtgctgcac

SEQ ID NO: 44847 - DNA, 478 bp, Glycine max
  Clone ID: PAT_MRT3847_140497C.1
tgcaagtggacaaatcggcaaggtagtcagctgatatagcgactgcgacctgaagccgtgagctatagtcacacacactggacctcgtgtgaaagaactgctgatgcgctgaaaccctagtgccaccatctacgtgacgagaaccacagccgcgctagctccagtgcgcgcattgttatggaacgagatctacaagaagcacgagaagaacgagttcgatggcaagtgatggatctacttgcgtgaccctgcatgcagctcattgctctctaaggaggacatggacaagatgcacaagacatatgctgacaacttcaagctcgactccgctcgctgcagagagctcactaacgagcacggcgagaagatgtacatccccacacgagaggctcaatatgcataacagctgtgcgacatactgaagaaagagtacactactgcgcacatgtgtggactattaggaatgcatgtgggcatc

SEQ ID NO: 44848 - DNA, 561 bp, Glycine max
  Clone ID: PAT_MRT3847_140498C.1
gattgttgggggcgttgaacttaatttgattattttaatcttttgcaattcagaaatttggattgttgggagcttagccttagtaaggtttattagttgtgacaatttatttatgggcaaggggcttgacttcaattttacagcccttaaggtgtaattgctagagaacatggagcttttacttgaacatagttgttcgatcagtgctggataccattgtgttaactgtcaaatacttttcagatacctgtggatgcttccaacttatatctttcaatcatttcagaacttctatacaaatacaaaagggatgccacaatgattagataaaggatggcatttcattgtacttatgagtaatactaacttttgaaaaactgttatctgtattttaatttagcatttgtgttttttttttgttaatattatattgattttgcatgtaacttggtggtgtcttgtattttttaaagttgctgcatccacttgttagtgtctagtcctgttctgtatctttgcttcctagatatagatgttatagtctaatcgatgtactatggc

SEQ ID NO: 44849 - DNA, 304 bp, Glycine max
  Clone ID: PAT_MRT3847_140499C.1
ttagtagatgaatgaggtacattggatcttaacctaacattcattcacgataagaggggcataacacccatacgcgaacataacatcatatagcaggatatgctatgcttgaacagacggcacatgtataagaagactctaagaaacggctgaacgggagaacgagaaaatggagccgactattttaagcagctatatgcttcgccattgggtttcggagaagagtgttgaatcactgggctcaagaaaactcaacacatgccagaccagtatggcaggccacgtacaaagggggacaggcccc

SEQ ID NO: 44850 - DNA, 982 bp, Glycine max
  Clone ID: PAT_MRT3847_14049C.1
acgcgtccgaaggggggtagtgcttcaaagtttttgcttgactgtgtctgtgtgattatatgcttctctctgataagggcttgtgagacatttcttaatacagaaaggggtaccccctcaaaggtgaaactcgaagtgatgggaaaaaaggctaaaaatgcaacctatatatctggaaatgaagcagggaagatctcaaaagaaattcagaaagtggagaagcgaaggattgttaaaagcacactttgtaatgatagaagttccagaagtcactgcatggtaatccttgatgtcccaactgtgggagggcggctaatgcttgtggacatggcaggatcagaaaatattgaacaagctggtcaaactggatttgaggccaaaatgcagactgcaaaaatcaatcaaggaaatatagctctgaagagagtggtggagtccattgcaaatggcgattcacatgtgcctttcagggacagcaaacttaccatgcttctgcaggattcatttgaagatgataagtcaaaaattctaatgatactgtgtgcaagtcctgatcctaaggagacacacaagacaatctctacacttgaatatggagcaaaagcaaaatgcatagtccgtggccctcatactccagtcaaggacgatgaatcttcttcagctgtcattttgggatcaagaattgctgcaatggatgaatttatcttgaagctacaaatggaaaccaagcaaagagagaaagagcggaacgaagcccacaggaagcttttgaagaaagaagaagaaattgtggcattaagagctaagctaaacatggcagaaggcaaaggaactcctccaagtgaggaagaaattaacctgaaggtaaacgaacgaacccgacttctgagacaagaagttgaaatgaagttggaagagtgccaaagaatgactaatgaatttgttgaattggagaggaagagaatggaagagagaatactgc

SEQ ID NO: 44851 - DNA, 261 bp, Glycine max
  Clone ID: PAT_MRT3847_1404C.1
tcacatgtctacgaatatacttatcatgagatacattattgccattgcgatatattatggatagcatgaatgttacattgcgggttgtgatcatgttcatggccgtggtgggtgtaccgatgatggtgcaagcattggcatgcaatgatgttacggtgaacatggtacagtgcctatcctacctgatgcaaggatgaacaccttcaacactttgctgtagtggagtcatgatgcttcttggctctgctgttaccgccgttg

SEQ ID NO: 44852 - DNA, 441 bp, Glycine max
  Clone ID: PAT_MRT3847_140500C.1
accgagaatgttgcagtcacttctcatttcaccttatcttacaaccaaacgtgtaacataatgttcaacatattattctctcaactagctctaccctgggttcgtctgtacagaaacagcaaacatggacacggagtcatatgtccctcatatatgcattagaaacttgtctgtccacacatcattgatatgtgcaaaactgttaacaaaagagtcgtttaactttatctaagggaggactaaccactttcttcattgatcttcttgtaatgatgtgtaatccttcaccattaaaatctccccacataacttacgtgggacttgctccaactttgtcccctcttgccatgcttgccctactgaaaccccaggtcctagatagcgaacatacacaacaattggatcgttgaaaggataaggatgtttaactggtcttgaaag

SEQ ID NO: 44853 - DNA, 521 bp, Glycine max
  Clone ID: PAT_MRT3847_140501C.1
agctacaagaaagcgtttcaatctctgcagattgttgtcgatcaaaaagtgttcagaaatatatctttgggccttaaatcccttttcttcaaaggattgtggttgaacaattaaacatgacaagtactatatagcaccctcgacaagtccttccactactagtttcggaggtcaagtgtaggaagaaacctaaaatttccaaatcaatgtaacacctcgtccaagatcaaccagcccaaatttatttccccaaatttattgaagttccaaccaaaatgtaacaagacaaagttaagtattcttttggaatattatcagtaatcttctagatcaccataccctcaagtcaatatataataccttgatgtttgagagtcaggtttgcagttcccgcatgtgccaactgccttctcaagccatgcataactgcaaagatgataacaccatcacacccatctgatcttctctctgacattcactccaaaccagggtacacttgtattagtgagagccaaccctcc

SEQ ID NO: 44854 - DNA, 1711 bp, Glycine max
  unsure (1)..(1711): unsure at all n locations
  Clone ID: PAT_MRT3847_140502C.1
agatacgacgacgctcgagcagaacatccacaccgcatcgctcgtggttccatcctttgtgtctgtctctctcttcggacacaaagcaacactttccatgtccatgtctctgtctcttcttcgtatcttctcttcgccccacctttccacctctctcttctttccaactccaactctttcttccctctgcccttctttcctttccaaattaccaaatgccccctctcccctcattgttttatgccacagggacgcctcagcttcgaagcaaggtcacctcggagtccctgaaggtgcagaacgtgacagtgggagcgaagaagatgatgatgctgttgaacaacccatgagggccagttacgacgacgacgaagacgaagaagaaggagctcttagctccttagtttttcctgaaagatgggatgtattgggtctcggtcaagccatggtaagattctcaggcatggttgatgataatttcctgaagaagttgggattatacaggtgaacgaagaaagcagcaaatcatgaggaaagaggtagagttttgcaggccatggatgggtgcggctataaagctgcagctggtggatctctttctaataccttagttgccctcgcaaggcttggaagtcgctccgaaaaagttcctgctataaatgtggcaatgaccggtagtgtagggagtgatctattagggggcttctacagggaaaaattacgccgagcaaacgtgcaatttctttctgcaccaatcaaggatgggactactggaacagttatagttctcacaactccagatgcccagcgcacaatgcttgcatatcagggcacatcttcaactgttaactatgatgcatccttagctaatgcagtttccaagacaaacatacttgtcgtcgaagggtatctatttgaacttcctgataccattaaaacaataaccaaagcatgtgagaaagcacggtcgaacggtgccttggttgcaataacagcttcagatgtctcctgcattgagagacactttgatgatttctgggaaattattgggaattgtgtggatttagtctttgcaaatggaaatgaggccagagctctttgtaattttgaagcaaaggaaagtgctgcttcagctgcaaggtatctgagccactttgttcctctagtatccgttacagatggtcctacaggctcttacattggtgtaaaaggagaagctgtatatatccctccttctccatgtgttccagttgatacttgtggtgctggggatgcatatgcatctggcatactctatggtcttttaagaggcatatcagatttgagaagcataggctcattagcagctaaggttgctgccactgttgttggacaacagggaactcggcttaggatttcagatgcagtcaaattggctgaatcttttgaatttcaacttgattcctcctctgttggcactgatcataatatttccagcgtctaatcagagattgcactttgaattgaattacattttttttccataagatcaatgtattccttgattaatattatgtttcaaaagaatagccttgtaaatactctcattgtaaaaagaattcaattgcttaggcccaaaaaaaaaaaaaataaatcctgttttcatcatggttactattatgcgagctacatcggtatattctatcatcatcgtcactgttaaaaannnnga

SEQ ID NO: 44855 - DNA, 1881 bp, Glycine max
  Clone ID: PAT_MRT3847_140503C.1
tttttaagcccccgttgcacataaacaaaaaaacggggtaattgtttaactatatgaaccaaatagctacaagaaagcgtttcaatctctgcagattgttgtcgatcaaaaagtgttcagaaatatatctttgggccttaaatcccttttcttcaaaggattgtggttgaacaattaaacatgacaagtactatatagcaccctcgacaagtccttccactactagtttcggaggtcaagtgtaggaagaaacctaaaatttccaaatcaatgtaacacctcgtccttttttttttttttaagatcaaccagctcaaatttattgaagctccaacaaaaatgtaacatggcaaagttaagtattcttttggaatattatcagtaatcttcttgatcaccatttccctcaagccaatatataatttcttgatgtttgagagccaggtttgcagttcacgcatgtgccaactgccttctcaagctgtgtgatcaatatcaggatgatcttcattataacatccagaatgttaaatagccatccaaaaaattaatccttgtgagaaaattatgcattttcagtctcacgcaaataaaaacatgaagaaaacattacactttcttagactacagcttttgcccagtttggtattgcctttataaacccttaaaaaagataactgtcttcgacaagattttcaaaaaaaaatttggcaaagcaacattggtatgttgagttttataaaatgcttcttttgcagctttaccagatattaactttcaccaaagacagcaatatcaaatggacctttctccaagaaagattgtacgtaaaaaacaaattgaaatcccaagcgaaatccagaagcccaacttgttaaagattataattagaatatcttcagagattaattaaaagcttctgaaagtgaaaagtaggcaagtttccgaacttaactttcccagacaataacaaaagaaaagatcatacccatgcataactgcaaagatgataacaccatcgcacccatctggtcttctctctgacattcactccaaaccagggtacacttgtatatagtgagagccaaccctcccaccaagtgtggccatttcttgccttagaagtgaatggaaagacccaagctccattagtggatgcagatgacagaagttatgaacatatatattcaagctagtttggtagcaaagacctttgtgtctggcacgccaacccctcaagcaaatataatatggtatgacatgtctagattagttgccaacaaagttaaacataacatctccactaataaaaaaaaacaaaaacatgtagaaactaggaaaacaagctaacttacacccaaagaactgagtgcttattttcaatgcggagtaaaaagatgaacaaagtcgggataacgattcatttcaataactgttcaatctttcattcagaaaggataaagaaaaaatgattttctcgaacaagaaccttgaatatagaggggacaagcgagtgaaaggatgatggaaaggaaaattatgacaaaagataaaccttgtttaatgttgttcctcatcatacttcatttcactttcaatctcccagccaaaaaattaaatggaaggaaaaatggtttgcaaaagggatccagaagaaataattgatattcaaatgatacacagaattaacaagtaaataatagtcattaccaataaccataaaaaattactacaacagtaatcctcaaatccccaaagtacatacccatttttggataagaacatgatacttttgaaaaagatggtagtagccctcaaaaaccaagacagaatgccagacacacacgcaaaacatgtaacttatactcgagtcagttatgc

SEQ ID NO: 44856 - DNA, 184 bp, Glycine max
  Clone ID: PAT_MRT3847_140504C.1
atcaagcatgtggcggtttaacgcagattctaggagacgcatgaacttcattcaccacagggcgagcgattccgatgtcagactgaccccgaagacaagatatgccgagtatcagctcgaggagaacacatccagtgctgatggttctgctactacgtgctcatagtagaccctagacgtgaat

SEQ ID NO: 44857 - DNA, 411 bp, Glycine max
  Clone ID: PAT_MRT3847_140505C.1
gtcagcatctatttcaaggtttcgtcttttttgtgccttttttcccccagaaattcataaattcgtggaagttcgaggctcgatttgtccaagcatggattctgcaagggatgcgagtggtgtggcagggaccgtgctaattcccatgcggtttgtgtggccgtacgggggaagaagtgtgtatctaagtggttctttcacgcggtggtctgaacttctacaaatgtcgcctgtggaaggctgcccaactgtgtttcaagttattcatagcttggtacctggtcatcatcagtacaagttttttgttgatggagaatggcggcatgatgaccttcaaccttgtgaatctggagaatatgggattgttaacactgtttcattggctactgatcctaatattttacctgtttt

SEQ ID NO: 44858 - DNA, 3077 bp, Glycine max
  Clone ID: PAT_MRT3847_140506C.1
cttgtttcttctgatgtttcaatagggtttcgaatttttctctgtttccctctgagactctctctatgctttggttttctcagatttttccaaattcgcggctcttccaggttgaatttggtagttttttcaatctagggttagggttttgtgcgtgctagtcaatggtttgttgcgtgcaaatttcatgaagagtgttatttatatttccgtacccgcttcagtttcttcgtaggttctgttgcagtgagaattgggcactttctcctttcgattttccggtcgaatcaagcatcaaaatctgagatttttcttttttgcaagtggtttttttagatttggggtagattttttttttgttttctttttattttggcgtattaacaatgaattcatatcctttctttattttcggattaaatcattcgcacgcgtccgtacggctgcgagaactacaggatggggtcttttttggtatttttcttttcacggtcggattctttcctacttacgcatcttcgattttcttttctcaacctgtttcttcttatgtttcaatagggtttctatatttttcttttttcccccagaaattcatcttctacttttgcattatctgatttttaaattcgtggaagttcgaggcttgatttgttgtagtttaattaatctgcggttaggttttgtgttgtcagtccgaagtttctttcgtactatttaatgagcgtgttgtttttatttccggacctgcttgagtttcttagtatatacttgcattgaattggtgccgcatttactctacgaattgaacaaggtggcatgatgcgatgagatgatgttctatgagggtattctcagtgtaacactctgaatttgaagtaaaatgttcagtccaagcatggattctgcaagggatgctgcgggtggtgtggcagggacagtgctaattcccatgcgttttgtgtggccatatgggggaagaagtgtgtatctaagtggttctttcacacggtggtctgaacttctacaaatgtcgccagtggaaggttgtccaactgtgtttcaagtgattcatagcttgctacccggttaccatcagtacaagttttttgttgatggagaatggcggcatgatgaacatcaaccttatgtagcctggagaatatgggatagtctaacactgtcttattgggccactgatcctaattacatacctgttttacctccagacgttgcttctggaaatagcatggatgtggataatgatgcttttcgccgaatggcccggttgaccgatggtactttgagtgaggtgctgccaagaatatcagatactgatgtacaaatatcccgtcagcgtatttctgcatttctatcttcacacaccgcttatgaattacttcccgagtcaggcaaggttgttgctttggatgttgatctaccagtgaaacaggcatttcatatattgcatgagcagggagttttcatggctcctctttgggacttctgcaaggggcaatttgttggtgttcttagtgcttcggattttattttaattttaagagagctggggaatcatggatccaatctgacagaagaggagcttgaaacacataccatatcagcttggaaagaaggaaaatcgtatctaaatagacagaacaatggacatggaactgcattttcaagatgttttatccatgcagggccatatgataatctgaaagatattgccatgaagatcttgcaaaaggaggtttcaacagttcctattatccattcatcttctgaagatgcttcatttccacagttactacatcttgcttcactttcaggaatacttaaatgcatttgtaggtattttaggcactgctctagttccttgcctgtacttcaacttccaatctgtgcaatacctgtgggcacgtgggtgcccaaaattggggaatcaaatcggcggcctctagcaatgttgagaccaaccgcttctcttgcgtcagccctaaatttattagttcaagcccaagtaagctcaataccaatagttgatgataatgactcattattggatatatactgtcggagtgacataacagctttggcaaagaacagagcatatacacatattaatcttgacgaaatgactgttcatcaggctttgcagttgggccaggacgcatatagtccctatgagcttagaagtcaaagatgtcagatgtgtttgcgttctgatcctctgcataaagtgatggaacgcttggcaaatccaggtgtcaggcggcttgtcatcgtggaagctggcagcaagcgtgtagaaggcattgtttcattgagtgacatattcaagttcttcattggtggttagttttggattggtgaatggagaagtaaaatggtatgtgctgtggttatgacacttaagcatccatacaactagccatcatcacttgtccaaaccattgaaagtgctttctacacggtgattttatctctcatttcattgtaatacaattggattggcctcttgctttattgcctctttttaagattttaggctgagaaagaggcctgtaaattcagagtatttgattgcccaaaatttattcatctctccccattcgtattatcttcaaatgtattgtgctcctgacatagataccagcaaggtgggggagcacaacttctgtaatcattccaatctgtgaagatatcaagtttgaagaaaaaaaatgaggatgaagattgaaataatgttgttttatatttgttgattaataatccttagggtttgattgtttaccttaagaacttcagccggagtagcttatgaataaagaaccgttgcatatgaagttgtatcattagaggagctgatgtgaacaaaaaactataagcaacaattgtttgtataagtgatcggtgcttatctcaaaatggggcatctgtttaagcaactctcttcagttgcacaagtaatggtaatgactagggatgtttaaatccaaactgatttaaaataaaaataaaaaattgaaccaacaaaaaaacccccccccccccccttcctgcctcgagcc

SEQ ID NO: 44859 - DNA, 445 bp, Glycine max
  Clone ID: PAT_MRT3847_140507C.1
attaagcagcgcaaaatgttttggaggagtccttaagagattctcacatcaaagtgcagttaacaagtgtgaaatgaaattccacgtttatcttccaccaaaagctgaaaaggagaaagtcccagttgtttggtttttatctggattaacttgcactgacgaaaattttgttatcaaatctggagctttcagagacgcatctgctttatgtctcgctatcatttctccagacacaagcccacgaggatgtaatgtcgaaggagaatctaaggattgggacttcggagtcggtgctggcttctacgtcaacgccactgaatccaaatgggccaactggcaaatgtattcttacatcacccaagaactctggacaatagtaaactccaacttccctgtcaacggcaagcattctatctctggtcacagcatgggaggtcacggtgct

SEQ ID NO: 44860 - DNA, 209 bp, Glycine max
  Clone ID: PAT_MRT3847_140508C.1
aacaaacaaaaaagttttttcacatccactcttttatagaacagaaggaacatatccacaaagtccttcacgaatagttcttcatttttaaatagttacaggggctatgttaaaactttttttttgattggcaaaggctattgaaccaaagcacttgggtgggaaacaaaaagggccccccccttttatagaacagaaggaacatatcc

SEQ ID NO: 44861 - DNA, 254 bp, Glycine max
  Clone ID: PAT_MRT3847_140509C.1
aaaaattttaagcccccacaaaacctcacaaaaccattggtaaaacaaatacccttttgattaaacactgataaaaaatccaaattattctgatattatgtcataaacaatcctttctatatcaaatacaaataatacatgctatataaaataatattctaaacatagtaaccacatcaaacattataaattcacaaacctctaaactcaaattaactttaatacaacccattacctaaaatcactattcctta

SEQ ID NO: 44862 - DNA, 452 bp, Glycine max
  Clone ID: PAT_MRT3847_14050C.1
ccacgcgtccgctctattgcgaactctgttgctgtgttcagcgtctctagtcgttcccctcctcacgagaaggggccctgcgtgacacgcctgctacacctatgagcacgagattattttaggctagaacttggagtttgagctccaaccgtatccatgctgggcttactggtgccttctaaagacaaatgcagaccgacatctgcggtacgaagcgctttaatctgggtaaagatcttacacttgacctatgacgactgagatctgacacttttcaaactctattcaaactttacatattaaacctgctttggtgtgaacatgcactcacaggcgtgtgatgcgctgaatgtgcggcgcatgaaggctgcagtgaatacattaaaggtatgtgttcggacactcacattggagatacaaaaccagcttctagctgagatggaaaccatact

SEQ ID NO: 44863 - DNA, 648 bp, Glycine max
  unsure (1)..(648): unsure at all n locations
  Clone ID: PAT_MRT3847_140510C.1
cttgtttcttctgatgtttaatagggtttcgaatttttctctgtttccctctgagactctctctatgctttggttttctcagatttttccaaattcgcggctcttccaggttgaatttggtagttttttcaatctagggttagggttttgtgcgtgctagtcaatggtttgttgcgtgcaaatttcatgaagagtgttatttatatttccgtacccgcttcagtttcttcgtaggttctgttgcagtgagaattgggcactttctcctttcgattttccggtcgaatcaagcatcaaaatctgagatttttcttttttgcaagtggtttttttagatttggggtagattttttttttgttttctttttattttgggcttcgtagtgcattgaattggcgcggcattcactggaatttgcgacgtgggagctggagaagctgcgatgaagtgtggtgcttggagggtattcttaaagtagcactcaattcgaggtttaatgtttggtcagagcatggattctgcaaggaatgcggntggtgtggcagggacagtgctaattcccatgcgttntgtgtggccatatggaggaaggagtgtgtttctcagtggttctttcacaaggtgggttggagcttctaccgatgtcg

SEQ ID NO: 44864 - DNA, 471 bp, Glycine max
  Clone ID: PAT_MRT3847_140511C.1
cattgaccctattcctttctttattttcggtttaaattaactaacatcaatttttgtggttggcttaattggtctcgagtcagcatctatttcaaggtttcgtcttttttgtgccttttttcccccagaaattcataaattcgtggaagttcgaggctcgatttgtgcattgaattggtgccgcatttactctacgaattgaacaaggtggcatgatgcgatgagatgatgttctatgagggtattctcagtgtaacactctgaatttgaagtaaaatgttcagtccaagcatggattctgcaagggatgcgagtggtgtggcagggaccgtgctaattcccatgcggtttgtgtggccgtacgggggaagaagtgtgtatctaagtggttctttcacgcggtggtctgaacttctacaaatgtcgcctgtggaaggctgcccaactgtgtttcaagttattcatagcttg

SEQ ID NO: 44865 - DNA, 917 bp, Glycine max
  Clone ID: PAT_MRT3847_140512C.1
cattgaccctatttcttttttttttttcggattaaattaactaacatcaatttttgtttttggcttcagtgataaattgtcagcatctatttcaaggtttcgtcttttttgtgccttttttcccccagaaattcataaattcgtggaagttcgaggctcgatttgtgcattgaattggtgccgcatttactctacgaattgaacaaggtggcatgatgcgatgagatgatgttctatgagggtattctcagtgtaacactctgaatttgaagtaaaatgttcagtccaagcatggatcctgcaaaggacaatagtgatagttgatggtaatgacctaattcccatgatatattgtcggagtgacataacagctttggcaaagaacagagcatatgcacatattaatcttgatgaaatgacagttcaccaggtaagtctctctctctttcattttttcattctgcgtatctataaacttctgctgacaatctctgtttttgaaaattaaaaatttcaaatctgttctggtttcattgcttcctcattaatttggtctagcagtttactgagcctactagcctaggggtcgtggaggatgatcttaagcattagtagatttattcagctgtctttctctaacaaattcttcttttacaaaatcacgtatcgttggcatcatattgaatagggtcgactagaaggctttgatttaggggttttctcttgttgaaatgtataatttcctttactcttaaaatagttcagccccatatcttgaataacatttgaagatatgtttctttttcttgattattggctgtgaatagatccagtggatgacactcaacaaacatttgatgaataaatagattcttaagaatattatggttgatgcagagtttgattatttatttttc

SEQ ID NO: 44866 - DNA, 743 bp, Glycine max
  Clone ID: PAT_MRT3847_140513C.1
cagcctgctgatggttatagttgaaggagaccagaagggagcctttttccttactttattgaattcaaaatagtacatatatatagagtacaaaagatagggagagaagagagagagagaggctatgacagtgacaatgcactgttgccctctgaaaaaagctaccaactaagttactacaaatggctaaactacaaggatattcaacactccccctcaagctggagcatatagatcatatgcaccaagcttgttacatatagtctgaattctgggtcctcttaaggacttagtcaaaatatccgctggctaatcattagaaccaatgaactcaatggcaatctccttggacagaagcttctctcgaatgaaatgacaatcaatctctatctcgagccgaaggtcctctcatggaagactaggtttgaagcaatgtgaagagcagcctgattatcacaatataacttcatttgcaccactttgcagaatttcaactcttcaagaatttgtttaacccacataagttcacatgtaaccatagtcatagatctgtattcagcctctgcactagatcgagcaacaacaacttgcttcttacttttccaagagataacatttcctccaatagagacgcagtatcctgatgtggatctcctatccatgggacagccagcccaatctgcatcacaattcccagatatttgtgtgttacctttgtcttcataaagcagttccggctcgag

SEQ ID NO: 44867 - DNA, 1140 bp, Glycine max
  Clone ID: PAT_MRT3847_140514C.1
attattctctgtttccctctgagactctctctatgctttggtttgctcagatttttccaaattcgcggctcttccagtttcttggtaggctctgttgcagctaattgaccctattcctttctttattttcggattaaattaacatcaatttttgtttttggcttcagtgataaattttcagcatctattcatggtttcgtcttttttgggtttctatattatttcttccccccccccccccccagaaattcataaattcgtggaagttcgaggctcgatttgtgcattgaattggtgctgcatttactcaacgaattgaacaaggtggcatgatgcgatgagttggtgttctatgagggtattctcagtgtaacactctgaatttgaagcaaaatgttcagtccaagcatggattctgcaagggatgcgagtggtgtggcagggaccgtgctcattcccatgcggtttgtgtggccatacggaggaagaagtgtgtatctaagtggttctttcacacggtggtctgaacttctacaaatgtcgccagtggaaggttgcccaactgtgtttcaagttattcatagcttgatccctggtcatcatcagtacaagttttttgttgatggagaatggcggcatgatgaccatcaaccttgtgtatctggagaatatgggatagttaacactgttttattggctactgatcctaatattgtacctgttttaactccagaaatagtttctggatctaacatggatttgggacaatgaggccttttcgatgcatggtccgattgacagacggtacattaaataatgtgttattaccaagaatatcagatgttgatatacagacctctcgtcagcgtatttctgcattcctatctatgagtacagcatatgaattacttcctgagtcaggcaaggtttggaacttttaccatcgacccattatttttggacttactatctagaattacataatttactatttttgttacatctggccacaggttgttaccttggatgttgatctgcctgtgaaacaggcatttcacatactgcatgagcaggtatctttgctttgactaaaattcttatagtgacttttcaaatatgttgaacgattctgctaaaaat

SEQ ID NO: 44868 - DNA, 765 bp, Glycine max
  Clone ID: PAT_MRT3847_140515C.1
gggcgtgcgtacggctgcgagaagacgacagaagggcacacaagcaatttcactatccttgtgttaatttccccttatcatcaccatcatgggtgtttttactttcgaggatgagaccacctctactgtagctccagctaggctttacaaagctttggttaaggatgctgataacctcgtcccaaaggcagttgaggccatcaagagtgttgaaatcgttgaaggaaatggtggccccggaaccattaaaaagctcacttttgttgaggatgggcaaaccaagtacgtgttgcacaaagttgaagcaattgatgaggctaattggggatacaactacagcgttgttgggggtgtggggttgccagacacagtggagaagatctcatttgaggccaaattggttgcagatcccaatggagggtccattgcaaaaatcactgtcaaataccagaccaaaggcgatgctaatcccagtgaagaggaactcaagagtggcaaagccaagggtgatgctcttttcaaggcacttgagggctatgttttggccaatcctgattacaactaaataaagactatagccaaaccaagtgcttgcttattatccagtgtgcttaatttggttgccaatgtaataatgctccttttccttttatagaggaagtgtgagattccattacatgtgtatctcacttcatcaataaattatgatgacaaaacatgttatcagtatcatctaaaaaaaaaaaaaaaaaacaaaaaccaaaa

SEQ ID NO: 44869 - DNA, 459 bp, Glycine max
  Clone ID: PAT_MRT3847_140516C.1
tgctgttccgggggtcgagagactccctagtaggaggagccccccttgataggaggtccacctttgaacgccccttctcgtgaataagtttatctaagccaattttccgagacactataaagggactgttgacattcaataaaccaaagcaacacaacgcagcaaagtcctgaaactcggtgcgcttaacataaatgtactcaggggttccgacaaacacgcagattaaagcgcagataaataaaagcaatttccccaccggcgatcaagaacccagttctgggaacaacagttgcgagatgatggccggacacttcaaactttgtccgaaaaacaggctacctagaattgaagacacagggagtacagagaagaaaccaacatttattgcaaccaacatcccctgatgaaccagccctaatgaaagacttgtggttttgggcagcctttgtgaccttg

SEQ ID NO: 44870 - DNA, 380 bp, Glycine max
  Clone ID: PAT_MRT3847_140517C.1
accaggtcaaccttagtctcattgaaacattataaccccctcaaacactatcattcacttatacctgcttataagctcaggaggcatcgattgtctgtgttagcgactttcgtacgtcttaggttgtgatacaagtaatgtgatgaaagcctctgtttattcatgttttaatttgaggaaccttgaacaaggtatgaaacaagggtttttaatgggttttacttttcaatatcctacaactcaatacttagcgaggatgaaaaagttgcagaaagtggttactttaagctagctttgtgtgtcttgaagtcttacttggaaggctcagatttgctgtaaatctctccagttccccatcatcagaaggtttaatttgttgg

SEQ ID NO: 44871 - DNA, 513 bp, Glycine max
  Clone ID: PAT_MRT3847_140518C.1
taagtcagaagagttccatccgaattcggctcgagcggctcgaggccctggtcaaaccatctcttccattaaatttgccagctttggaactcctttgggtacttgtgggaactatgagcaaggagcttgccattccccagcatcttatgccatattagagaagagatgtataggaaaaccaagatgcacagtcactgtatcaaacagcaacttcgggcaagacccgtgtccaaaggtgttgaagcggttatcagttgaagctgtttgtgctccaactgctgcaaattggaggggttgataagggcaaggaagcacccatttacgtttagtgtgcagtgacttaagttagaccgcaagaaaaagggaacaacacaataataaaaggagcatagttaaaggttgttgtctagttgaataggttgagtgccatagtgtgaaagtagtagctatgtaacgaaatggtggtggtggggttaatggggcttgcatgtataaatttttcatagttagata

SEQ ID NO: 44872 - DNA, 1051 bp, Glycine max
  Clone ID: PAT_MRT3847_140519C.1
ggagagggaaaaaaaggagctttgttttattattactcaaatgaaaactgattacaaggggagtatatatggaggctgaccttattggccccgctgtaaaaaggaaacaaaaaataacttttaacaaactttttattaacagttttaacaaactaactgtttcacagttttaactaacaaactttttactatagctaacatttaacgtattatactccaatacctcctcaaactcatgaggaaggtttttcaaaaaaaaaacccttcacattgagtttgcccttaaaaaactgaaaacgatcttttttttttggagttgaactgattttcaaccatgacctactgcttctttaaattttgctgtcccttgcaatgttttgtttcacaaatctcccaattacaacttcttaaaaacttttggctgtgcatgtttcccttttttgagaccctaaaacactcataaacttgatttcagatccaaagagtgtctttttctgggatattacagttgtacaaaagtggttaacagaaaataacaacttctaacaaaccaactgcttcacaggtctagctgactgactgtctactgtagctaacatttaacatattatactctaataataagtggtctaaatcaatggaaataatggcaaacaagttaaattaaaaagaaaagaaaagaagaagaagaagacaaggaagaagcaaataccgagttttaataccttttaataaatttgttttgtcaaaaagaaatagcaattttctgaacgccatctaaatcagtttttggagaacccacatcaagctagatgttttcaaataattagaccaggaaaaccaatttccaataatcatttgaaatctatgaaatatggaaactcagaaaaacaactattttctagcattcccaaaatgaggcagaatgtccgtctgctaatcttcgacgtcatcatttagagatcttatttcctgccttgcatctcctatatttgcactcaataattccaaaacagttgtgatatgttcactttgtggatgagcctgatcc

SEQ ID NO: 44873 - DNA, 565 bp, Glycine max
  Clone ID: PAT_MRT3847_14051C.1
cgccgcccttcgccccaaactaatcccaaagctcatgcccgccgccacaaccaccatagtctgcagcaccaccaacaacaacaacaacaacaacgtgtactccgacctgaaggcgttctccgccacgctggccctctcctccatcctcctctccgaccctctccccgccggcgccgacatttttgggctcaccccatgcaaagagttgaagcagttcgctaagcgtgagaagcagtctataaacaacctggagtcgacgctgaagctctacgacgcgggcagcgcccccgcactggccattaatgcgagcgtggataacactaataggatgctctacaactacgctaagcacgggttgctgtgcggctgctatgggtcgccgcacctgatcgatagcggacaccatatgcactgaggtgagttcatcacacccggaatactattcctgtacatctccggatgaatcagctgtgtgggtacgagctacctgattgccatcacggacgagatgaaacctaccatgtaggagatcattatccaagttcctctggcttctagctttctc

SEQ ID NO: 44874 - DNA, 314 bp, Glycine max
  Clone ID: PAT_MRT3847_140520C.1
gtctagagctatcacatgtgcaccacaaacagaaaaatacattaattttagatgatgtcaatttacaacggtgattatttataggcgttattccacaagcgaaataaatattacatattgatttcatcataaatttagaattatttgttctaaataagacatatcaacaagtattatcaccaatcaccataaatggaaattaatcataccaactttagaatttaacataatttctcgtatgaatgattctatttagcaacattgacaatcattaattcttaaaacacaccatacccttcttttataattttata

SEQ ID NO: 44875 - DNA, 205 bp, Glycine max
  unsure (1)..(205): unsure at all n locations
  Clone ID: PAT_MRT3847_140521C.1
tttattgtgatatttaattaattgcccttacttcagtacctgacctgattnagggatatgtgacaaacattagctgcgtatagcgtatcccttcagagcacaaacatggatcatcagataacatttcttaatataacctctccttattacgaacttgcgataggaaacagcttttgcattcatcaccccttgaacaatcctttaa

SEQ ID NO: 44876 - DNA, 284 bp, Glycine max
  Clone ID: PAT_MRT3847_140522C.1
gttttctaactgactaccgtgtttttgggggccgtaaatggatgatgcatccccatcatccaaaattaccaaagcttaaataaaatacggcttccaatgaaataaatactggttgaacagggcagcaaaatttagtttggtatagcttacccccgactgacaagaaacgaagaaaccaccggcttctatttcaaaactggggaaaaactaaataccggatctggttttctgctcatactagcccctataaatctaatgtgagggccggcattgctattcgtatt

SEQ ID NO: 44877 - DNA, 192 bp, Glycine max
  Clone ID: PAT_MRT3847_140523C.1
gagaatatggaagcagttttagaataatattattatactaacttagggcgatgaagcaattaaccttttaaggtgcacttttcattagtgtgcatccctcttggtttcatggggattatcatttggttgcttaaagactctcaaaatcttgagtttttaattataaaaatttgtactccaacatgttaatgc

SEQ ID NO: 44878 - DNA, 425 bp, Glycine max
  unsure (1)..(425): unsure at all n locations
  Clone ID: PAT_MRT3847_140524C.1
gggggtcatccttcacacataagtcattgataacatcatctaagaggtccaatgtatggcttggagggatataaagggaagacacatgagtgagaattagactgtgatgaccaaacatctacatgttgatctaccacaagactagactaactcaaccgcgaagagcatggatatgctcataaacattattaccaattactcacccataaaaatttgtgcactacaatgtacgtaaacacaaatgaatcttgtcccgcagggtttgccaggttatgatcaatttgggctgtcactgtaagggacccaagacactactcaccagcattgcactatctantattattatgaaaacgtctaacttcatataagtggaaccttttgacagcctgaggactgctaagaacctgaagcacccatgtaatctg

SEQ ID NO: 44879 - DNA, 424 bp, Glycine max
  Clone ID: PAT_MRT3847_140525C.1
catgaatggcaataacaatattcaaatataattgaacctaatgtctcgtatgagacttacattataaatcctggtcaaaattcaacaatgaaaatagtaaataaataatcacataattaaaaaagccttttttattgcaattccgtataccaaataatcaattaaacacataaaaataaagcattttcaccaagctaaaaaatgatcttgttttgcattggtattgctaatataaatggagatcttattttataatataattatcaaaacattaagaacaatgacagcatttcatcctagaagcatattaaagcattacagtttcaactcaattgcttaaagataagcttataattaaaagaatgcttacttgaccacgagaagcttgcttagcatactttctcatctagaaatcgagatggta

SEQ ID NO: 44880 - DNA, 585 bp, Glycine max
  Clone ID: PAT_MRT3847_140526C.1
tttttgcgtggggcaaaaatcatgaaagaaagctaatatcctatctcaaaagtcagaaatatttttgaagcacgttcgttaaatcacattaagtttatttatttattgagtatcatattaagtgttatcatttttttatagtcgggttaagtatgagattgccaaaaattaaaaacaatttgaattgctatgtatttctgaacttatatttgattaactccagttttgatatattgtagagggtaagcaaagggaagcaacggttcaacattgatctcacaccatttcgtgaataaaaaaatggtaagaaatgctttgttttttcactttatattcatttgtttttgtttctccggctagttaaggttcttttttctttgtgattttttgactaaaattataaccagtatactgtgaagaagtatctcagtcttaaatcttattgtgaaagctgttcttaaaaccattgagatttgagagggtataaaggcaaagattttacgtactacatgaaacattcttcaaaagtgtaataatatacatccattgataaagagtaaagacttaaaatcaaaattgagtttt

SEQ ID NO: 44881 - DNA, 434 bp, Glycine max
  Clone ID: PAT_MRT3847_140527C.1
gaggagtaacaaagaatggattgtattccttggtcggacagacaattattgttgattctacaaatgttgtaactgatgataacacaaagttatggcaccacagattgacacatatctgtcaaaaagggttggaagagttaacaaaacaaggtgcttttaggcaaggcaggattgagccattaaagttttgtgagaattgtgtgctaggtagggcaaataggcagaaatttctcgccagcactcattccagcaatgcagctctcgattgtgtgcatgcagatctatggggaccatcaagaactgagtcacatgaagaggcaaggtattttctgtccttaatagatgacttctccagaaaggtttgggtttactttctaaaatacaagaatgaagttgtcaaggtgtttgaagaatggaaattttagtagaaactc

SEQ ID NO: 44882 - DNA, 269 bp, Glycine max
  unsure (1)..(269): unsure at all n locations
  Clone ID: PAT_MRT3847_140528C.1
atgtattcattaatgacacctattttcacttttgtnatgttttgcttatctttttcaatactgtcttgtgtcagtttcaatttcagacacgcacaaggacagttggctaatctttttctggtagtcttttaaagtggtaatcctttttctttttgttaaatcgtagacccgaaaaggaatctgttcaatattgttaacttttctatgtatagtttgctagtcttactgaagattttgaaaatttcctgaaaacaatatctaacggtttg

SEQ ID NO: 44883 - DNA, 408 bp, Glycine max
  Clone ID: PAT_MRT3847_140529C.1
atgaaggaggacataaagagatttctagtggaatttcatcataatgggggtctttccaagaggatgcaactctacttttatcactttgataccaaggtggatgatccacaagacttggagattaccgtcctatctcattggtgggtaaatggtagtccattagaggagtttgtcccacaaagaggcctaagacaggggaatctactagctacattcctcttcaccattattgcgaaaggattaagtggcatgatgagggagaccatctcaaagaaattatttgaagggttccatattggtaaggataaggtggaacccaacttacttcaatatgcagatgactcttttcattgggaaggcaacaaagaggaatgtggtggttatcaaaagcatgctaagatactttga

SEQ ID NO: 44884 - DNA, 447 bp, Glycine max
  Clone ID: PAT_MRT3847_14052C.1
aaaaaaaaaaacccctttttattttatattttaaaataaagcggaacaatatgggaaaaaaaggggggacagaaaacaaaaaaccctcggaattaacaacctctcaatcaaattagcttatttaggaggggggaaaaatcattctgaattgggttcaggaagaccctaaaagaacaagggaaaacaacatactcccccacacaggtaagccaaggggcctccctggccttaaaaaaagggaggggtccaacaaatttttggggggggggaccctttatccacataaaaaagactatttagcctaaaagaggggtaaaaaaggggggggaattcattctggccgggggaagggggaaaaactcatttcgggacgggaaaaggacttttggggggggattaaaaaaacaaaaaaatccttctcagcgccccattggaggacccccctta

SEQ ID NO: 44885 - DNA, 507 bp, Glycine max
  unsure (1)..(507): unsure at all n locations
  Clone ID: PAT_MRT3847_140530C.1
attgcctctatctggcactgatttggctcttcaggcaacctttaggcttgttgtcctaaatgaatcttcctcaaagttttcaacattggcagatgctaatgttccgggactggatggacgaaatgaaaccatatctttagaatccgagagctacaatggctgttatgtgtatagtggtatgagctctattgcaggagtgaagctcagttgcaaatctggttctgatgctagttttaaccaagcaacaagctttgttgctcaaaaaggattgagccaatacaatcctatcagttttgtggctaaaggggcaaacaggaattttcttttggagccactattctcattcagagatgagcattatactgtttatttcaacattcaaggttgatacaagtttttcttttccctttgaaataaacagtacaataagttttgtatataaaggttcaagcttattcaattacagaaagataattgatgaatatcttnctgtgttattaaaaaaaa

SEQ ID NO: 44886 - DNA, 486 bp, Glycine max
  Clone ID: PAT_MRT3847_140531C.1
ctcgcatacgtcacctacgtatgctggtagtggtgttctggacaccgtgtaggacttgcaaatgattcatacgaaggaagcaacttccgggatcgatcgtgattactgccactagccagtaaacgtgataccacagtggaagcagtacgcaatcgaacatgacagtgctcaaaatgtgacaagacacactgttacattgtaattccatgactgacacagctcagcccgttgcatctcacgcacgtcgacatctcgaaagaactaccacgaatgtccaaagcacgcatactatgagccacggatgacgtgtgacagcggagacttacgcatgctgtgccgctccctgattaaacacctacgagccttgcaatagcacttcgacgatgaggcctagctctgcgaatccggaacgggaatcgcccccgtatatgaagactgctgaccttaacgatgctggcttcgatggttaccgtatcagactgaaac

SEQ ID NO: 44887 - DNA, 2058 bp, Glycine max
  Clone ID: PAT_MRT3847_140532C.1
ggctcgaggtttgggctccattctataccattcacaagatcttggccggcctcttggaccaacatacttttgctggaaaccctcaagctctaaaaatggtaacatggatggttgattacttctacaacagagtccagactgtaataacaaagtacactttaaataggcactatgaatcactgaatgaggaaactggaggaatgaatgacgtcctttataagttatacatcataacgggagattctaagcatctattgttggctcacctttttgataagccatgctttttagggttgcttgcagtgcaggctaatgacatagctgattttcatgctaatacacatatcccagttgttgttggatctcaaatgcggtatgaaatcacaggcgatccactttatcagcaaattgggacattctttatggacctcgtaaactcttctcacagttatgcaactggagggacatcagtcagcgagttctggagtgatccaaagagaatggcagataccttaaaaacgacagagaatgaagaatcatgcacaacttataatatgttgaaggtttcgcgccacctgtttaaatggaccaaagaagtctcttatgcagactattacgaacgtgccttgaccaatggtgtgctcagcattcaaagaggaaccgatcctggagtgatgatttatatgcttccactaggtcttggggtttccaaggctaaaacttaccatagttggggaacaccatttgactctttctggtgctgctatggaacgggaattgaatcgttctcaaagctgggagattctatctattttgaagaggaaggcaaagatcctacactttacatcattcagtacatatcaagctcgtttaattggaaatctggcaaagttttgctcaatcagacagttgatccagttgcttcatgggatccttacctacgagtggcatttacgttttctccatttgagaatactttgactacaaactctacattgaactttcgactcccaacttggactcatctggatggtgccaaggggatattaaatgctgaaactttatctctaccaagtccaggaaattatttatcaatcacaagacaatggagtggtagtgacaagctgacccttcagctgccccttaccgtaaggacagaggccataaaagatgacaggccagaatatgcctctgttcaagcaattctttatggtccttatcttcttgcgggtcatacaactggtgttgattgggatcttaaagctggggctaacaattcagactggattactcctattcctgccagttacaatagtcaactagtttctttttctcaagactttgaaaattcaacttttattttggcaaattcaaatcaatcacttgcaatgcaaaaattgcctctatctggcactgatttggctcttcaggcaacctttaggcttgttgtcctaaatgaatcttcctcaaagttttcaacattggcagatgctaatggtaaatcagtgatgttagaaccatttgattttcctggaatgaatgtggttaaccaaggagcagacaaacctcttctcatcatagattcatcccatggcgggacatcttctgtttttcttgtagttccgggactggatggacgaaatgaaaccatatctttagaatcccagagctacaatggctgttatgtgtatagtggtatgagctctattgcaggagtgaagctcagttgcaaatctggttctgatgctagttttaaccaagcaacaagctttgttgctcaaaaaggattgagccaatacaatcctatcagttttgtggctaaaggggcaaacaggaattttcttttggagccactattctcattcagagatgagcattatactgtttatttcaacattcaaggttgatacaagtttttcttttccctttgaaataaacagtacaataagttttgtatataaaggttcaagcttattcaattacagaaagataattgatgaatatcttcctgtgttattaaatgatgagacaacacattctctaatacactcttttgat

SEQ ID NO: 44888 - DNA, 232 bp, Glycine max
  Clone ID: PAT_MRT3847_140533C.1
tactttacctatatgggtattattggtttcactattaaacgaggattataccaattatcacttcactgtaccttaaggcaaattatgataatagcctttgacaagtaaatctgtctatatctaagctgaataactcggacactctctcaaaatctaagtattctagtgacatttttcggttttggtcatgcacaatatctatttctaaacctccagcactttcaacatactt

SEQ ID NO: 44889 - DNA, 684 bp, Glycine max
  Clone ID: PAT_MRT3847_140534C.1
gccaaaacaaaagttgattttttaaactgttgggaaaaaagaaactagttgctattgtaactggcaaggataggagtaatccaatctgcatgtctagccccagctttatggtctcaatcatcaccaatagtatgaccaacaagaagataaagaattgcttgaacagatgcatattcaggcctgtcatctttcatggccactgttcttcaaccattccacatttcaggtacatggattatcatggtagtagttggcattggcagctgaagggttagcttgtcactagcactccattgtcgtgtgattggcaaaaacatttcctaaactggagaaaacataaatgtcactcgtaggtaaggatcccatgaaacaactggatcaactgtctgattgtgcaaaactttgccagatttccaattaaacgagcttgatatgtactgaatgatataaagtgtaggatctttgcctttgtcttcaaaatagacagaatctcccagttttgagaatgattcaattcccgttccatagcagcaccagaaagagttaaatggtgttccccaactatggtaagttttagccttggaaaccccaagacctagtggaagcatataaatcatcactccaggatcggtccctctttgaatgccgagcacaccattggtcaaggcatgctagtaatagtct

SEQ ID NO: 44890 - DNA, 2241 bp, Glycine max
  Clone ID: PAT_MRT3847_140535C.1
cacaagatcttggctggcctcttggatcaacatacttttgctggaaaccctcaagctctaaaaatggtaacatggatggttgattacttctacaacagagtgcagaatgtaataacaaagtacactgtaaatagacactatcaatcaatgaatgaagaaactggaggaatgaatgatgtcctttatagattatacagcataacgggagattctaagcacctagtgttggctcacctttttgacaagccatgctttttagggttgcttgcagtgcaggctaatgacatagctgatttacatgctaatacacatatcccaattgttgttggatctcaaatgcggtatgaaatcacaggcgatccactttataagcaaattgggacattctttatggacctcgtaaactcttctcacagctacgcaactggagggacatcagtcagagagttctggagtgatccaaagagaatagcagacaacttaagaacgacagagaatgaagaatcatgcacaacttataatatgttgaaggtttcgcgtcacctgtttagatggaccaaagaagtctcttatgcagactattatgagcgtgccttaaccaatggtgtgctcagcattcaaagaggaacagatcctggagtgatgatttatatgcttccactaggttttgcggtttcaaaggctagaactggacatagttggggaacacagtttgactctttctggtgctgctatggaacaggaattgaatcattctcaaagctgggggattctatctattttgaagaggaaggcaaagatcctacactttacatcattcagtacatttcaagctcatttaattggaaatcaggcaaaattttgctcaatcagacagttgttccagcttcttcatcggatccttacctacgagtcacatttacattttctcctgttgagaatactttgtctacattgaactttcgactaccaagttggactcttctggatggtgccaaggggatattaaatggtcaaactttatctctgccaaatccaggaaattatttgtcaatcacaagacaatggagtgctagtgacaagctgacccttcagctgccccttaccgtaaggacagaggccataaaagatgacaggcctgaatatgcatctgttcaagcaattctttatggtccttaccttcttgctggtcatacaaccggtggtgattggaaccttaaagctggggctaacaatgcagactggattactcctattcctgccagttacaatagtcagctagtttcttttttccgagactttgaaggatcaacttttgtcttggcaaattcaaaccaatcagtttcaatgcaaaaattgcctgaatttggcactgatttggctcttcaggcaacctttaggattgtcctagaagaatcttcctcaaagttttcaaaattagcagatgctaatgatagatcagtgatgttagaaccatttgatcttcctggaatgaatgtgattcaccaaggagcaggcaaacctcttctcactgtagattcttcccaaggggggccgtctgctgtttttcttttggtaccaggattggatggacgaaatgaaaccgtatctttagaatcccagagcaacaagggatgttatgtgtacagtggtatgagccctagtgcaggagtcaagctcagttgcaaatctgattctgatgctacttttaaccaagcagcaagctttgttgctctgcaaggattgagccaatacaatcctatcagttttgtggctaaaggggcaaacaggaattttcttttgcagccattactctcattcagagacgagcattacacagtttatttcaatattcaagattgatatatattttcccctttaaaataaacagtataatatgcttcgtcttacaaagaaggttcaagtaatcgatattcaaatgtaaaagaatagttgatgaatatcttcaagtctttggtgctgtgttattaaatgatactcagtgataaccacaattagaaaattggaagtcagctgcagtaaggtgacctttctattcattttatagaaaagaaaagaacagagtggggagagaagtgatgatatatgtcactactcagtgtagctgttttcgttaattatatcagcattcagttgctatgtaataatagtatggtatgatctgtgttttttttttttttttctaaaacgaatatgaatgagttctacttcacacttccc

SEQ ID NO: 44891 - DNA, 304 bp, Glycine max
  Clone ID: PAT_MRT3847_140536C.1
cacaacatatgatgattttaatgatgataccatggatgccaatggggaagctagattgattaatggttatgtgctaaaacaagtatcacaataccttaatgcaattatgaagaagcccaaggtggtatctggtgatgatgattcaccaaaaagagatgatattggagaaaggcgaacgaaacacgagcttcacctgttgactggtactggaattactactgatgatcatgatggtgatgatcagatgactgatcttagacctagtgaggttacccatgattaggatgacggcggaagtggggac

SEQ ID NO: 44892 - DNA, 522 bp, Glycine max
  unsure (1)..(522): unsure at all n locations
  Clone ID: PAT_MRT3847_140537C.1
aggttttggaagctctagaagtacttaagaagaaatcagatgcgcaggccaaagaaatcctcccaattgagaagttgattggagaggcatactcaataattgacaaagctgtgagagtgggcacactgcacaggaacactggagcaaatcgcaagtctcggcttgcccgaagaaagaaggcagtggagatccatcatggctggtataccccagctcctgaagccattgtctgaaagaatcctcttgctagtttacatggagtaaaatgaagtgccagtgaagactttatgcagattttttccacctctgttcaaacattgtatgtagtctttggtgttagtttaaattggtttacagttccatacttcatgtgcactatcatcatgtagagccattaattttaacagcatnttcgtcactagactttattgtacttttctccatattgttgtataatgcaatgcctccttaaacttaataatacttaaaaaaaaaaaaaccagcccggccgctctagaggat

SEQ ID NO: 44893 - DNA, 1581 bp, Glycine max
  Clone ID: PAT_MRT3847_140538C.1
cgcccacgcgtccgttctaaatcaattatttcctttatcttgtttatgtactctgactctgtgagagagtgtttgtactttgtagtagcaagcgagcatggctccgaagaaggttcttctcctttgcggggacttcatggaagactatgaagccatggttccatttcaggcattgcaagccttcggtctcgccgtcgacgccgtctgtcccggaaagaaatccggcgatgtctgccgcaccgctgtccatgtacttgccggcgcccagacttatagtgagacggttggtcacaatttttcactcaatgcaacgtttgatgaagttgatgctgcaagctatgatgggttgtgggtgccaggtgggagggctccagagtatcttgctcatgttcctggtgttgtggaactggtgaccaagtttgtcagtttgggaaaacaaattgctagcatttgtcatggacagttgattctggctgctgctggagtggttaaaggccgcacgtgcacggcttttcctcctgttaaacccgtgctagttgctgctggtgctcattgggttgaacctgacactgaggcagcaacagtggtagatggtgatctcattactgcagctacttatgaggggcacccggagctcattcgccatttcgtgaaggcattaggaggaaaaataagtggttttgataagaaaatcctctttatttgtggggattacatggaagattatgaggtcaaggttccttttcagtcccttcaggctttaggatgccatgttgatgctgtttgcccctcaaagaaggccggtgacacttgcccaaccgctgttcacgattttgaaggggatcaaacttacagtgagaaaccaggacatacttttgctttaacagctacctttgatgatgtggatccctcaggttatgacgctcttgtcatccctggaggtcgagcacctgagtatttggcattgaacgagtcagtcattgccttggtgaagtatttctttgaaaacaagaagccagtggcatctatctgtcatggccaacagattttatctgctgctggtgttctcaagggaaggaaatgtactgcttatccggctgtgaagcttaatgtggttctgtcaggagcaacatggcttgagcctgaccctataagccgatgcttcactgatggaaatctagttactggagctgcatggccagggcaccctgagttcattgctcagttgatagcactacttggtattcaagtatctttctagatgcactttgtgatgtaattaattatcaatgaataaagcttggcagtctccatatgcattttgtatcaaatattatatgtatgttaatgtattttacagtcctgtatttgaaggacctataatgtgcaaaagtaactaattatgcattttactaccccaaatttgacattgtactgtaatttggtatgtcaaatttggtgtagtaaagtaaatttcaaaagttggatatagcgcgataaggtacctgattatctatgtatggactgattttattacagaggagctgaattcagctagttttcaaaaaaaaaaaaaaaaaa

SEQ ID NO: 44894 - DNA, 472 bp, Glycine max
  Clone ID: PAT_MRT3847_140539C.1
gaagaaaagcctccattattattgaagagccacggtaaatctgggtcttgtatctggactgatcatattctatttcatattctaattcatttggccaattagatgttgaaagcctgtggagtgggttcttccccctgccaccagaattcatatgtagttgaatatctcatgatcaacatacatgataattgagatattgtggtcgatgtaaaaaagattgggaacaattaaaatattagacctttatactattactgctgaatgttatggatgtcatgagtgcattgtatgaaactgtcagtagtaattttgattttacattggtgaatacatactgacttttattggagtattgtgaaggagatgcagttattctactgcagtcctgggttaacttagttaagatttagttactaagttagttaagtcagttagctgttctaactgattagtctataaatatagaattgta

SEQ ID NO: 44895 - DNA, 384 bp, Glycine max
  unsure (1)..(384): unsure at all n locations
  Clone ID: PAT_MRT3847_14053C.1
ccataggtgcactggagcttgcagtggtcactggaaccacaatctgactcgatgctacggggatgagaaaagctgaaccggcggtgcccaaatgaaccgactgtgaatgttgtctgatgcctgcaacatagccaaaacgctgctgctgatgaaacgatgggagatcacgcgctaactgtgcactaattagcgcgccagttaccttgccgaaagcttactgagcaccaccggtggcgggtctctgacgaacacaccaagacacaataactttcccagcaacgaccgggaagaagaggatgaaccgnctgctgctcacagcgctttgtgcctatagtaagacaccttcccagtctgtgctgccaacgagaagagcgcgataacact

SEQ ID NO: 44896 - DNA, 672 bp, Glycine max
  Clone ID: PAT_MRT3847_140540C.1
cttgaatatctctcacaacaacctgtcaggttctatccctgactcccttagtgaaatggtgagtttgtcagccatcaacctctcctacaataatttggagggtccagttcctgaaggtggcgtattcaattcttctcatcccctggatttgagcaacaacaaagatttatgcgggaatattcaaggtttgcgtccatgtaatgtttctctcactaaacctaatggtggatcaagtaacaaaaagaaggttctgatcccaattgctgcttccttgggaggtgctctttttatttctatgttgtgtgttgggattgttttcttttgctacaagagaaagtcaagaactcgaagacagaaaagttcaattaaaagaccaaatccattttcaatttggtactttaatgggagagttgtgtatggagacataatcgaagctaccaagaactttgacaaccagtattgcattggggaaggagcgttgggaaaagtttataaagcagagatgaaaggaggtcaaatatttgctgttaaaagttgaagtgtgatgaagaaaatggagacgtgggaagtgtgtaaacctttgagaatgagtgggaaggggtgggggggacacgacacgcgtaacatttgtaaactttacggattttgcttctgtgggatgcacaccttttt

SEQ ID NO: 44897 - DNA, 882 bp, Glycine max
  Clone ID: PAT_MRT3847_140541C.1
ccttggctcagggaagaaagaatagaagagacggaagaggcaaaagcaaataatagaatagatctgactctcattttcagaaagcaaaatggctggtttcagcggcgatgaaactgctccgttcttcggcttcctgggcgcggcggccgccttagtattctcctgtatgggagcggcgctacggcacgcgccaagagcggtgtcggcgttgcttcgatgggcgtcatgagaccggagctggtgcatgaaatccatcgttccggttgttatggccggagtgttgggaatctacggcttgatcatcgccgtcatcatcagcaccggcattaaccctaaagccaaatcctattacctcttcgacggctaccgctcacctctcctccggcctctcttggcggtcttgctggcctctccgctggcatggccattggcattgttggcgacgccggtgttagcgcaaatgcccaacagccaaagctttttgttgggatgattctcattctcatctttgctgaggcgttggcattgtatggactcattgttggcatcatcctctcttcccgtgctggccaatccagagctgattagtataaaatttcctgttgcttgtagcgcactgaaccacggattggatggtgaatgtcgccggggaccaggtcctgttaagagtttagctttgtgatgctctgcattcgtcttatgataaaattgaggttgtcctgaaataaagcgtctcaaacgatttctttccatttattgtatttaattatgttgagtccaaactagattagagatctatgtaataaagcatgtttgtgtttatttcaatagcatttagtattgtgtcgtattcccaaaaaaaaaaaaaaagggggccgctcg

SEQ ID NO: 44898 - DNA, 850 bp, Glycine max
  Clone ID: PAT_MRT3847_140542C.1
tacggctgctagaagacgacagaaggggagaggcaaagcaaataagcagtaatagatctgactctgattttcagaaagcaaaatgcctggtttcagcggcgatgaaactgctccgttcttcggcttcctgggcgcggcggccgccctagtattctcctgtatgggagcggcgtacggcacggccaagagcggggtcggcgttgcgtcgatgggcgtcatgagaccggagctggtcatgaaatccatcgtcccggttgttatggccggagtgttgggaatctacggcttgatcatcgccgtcatcatcagcaccggtattaaccctaaggccaaatcctattacctcttcgacggctacgctcacctctcctccggcctcgcttgcggcctcgctggcctctccgctggcatggccattggcattgttggcgatgccggtgttagagcaaatgcccaacagccaaagctttttgttgggatgattctcattctcatctttgctgaggcgttggcattgtatggactcattgttggcatcatcctctcttcacgtgctggccaatccagagctgattagtataaaatttcctgtttgctgcgcacagaaccatgaattggatggtgaatgtcgccggggactaggtcatgttaagagtgtagctttgtgatgctctgcatccgtcttatgataaaattgaggttatcctgaaataaagtgtctcaaacgatttattttccatttattgtatttaatttgagtccaaactagattagagatctctgtaataaaacatgtttgtgtttatttcaataacatttagtattgtgtcgtaaaaaaaaaaaaaaaaca

SEQ ID NO: 44899 - DNA, 167 bp, Glycine max
  unsure (1)..(167): unsure at all n locations
  Clone ID: PAT_MRT3847_140543C.1
gnanatattgaggatacngagaatcagcttcctacaaatggaaactatganttgnctcntcnggnttcacttncaagaactggttagnatnangtanatggaataccgngtaatggtttatgganacttgcatagtgtanngactcaatcaananncttcatttatc

SEQ ID NO: 44900 - DNA, 308 bp, Glycine max
  Clone ID: PAT_MRT3847_140544C.1
aaaaacggaaactacttgaaggctgaagcaatacatactggaaaaattactttcaaccgtttatgattatgcaccctttttacaatttagggaaaaaacatgtcaaggatcaatgttaaaatatcaacccccccccaagggaagggaaaaacatttaataataataaaaaaatcttgattttgacctaaaagctagccctgactctaccttttttatttaaaaaaaaagcatcctccacattttaaaaaaaaacatttaaaccttttaatccaaaaggatctaaaaacgctcaagcatttgggaggct

SEQ ID NO: 44901 - DNA, 375 bp, Glycine max
  Clone ID: PAT_MRT3847_140545C.1
gagtcaagaacttaatctgtttgcagttgacatcaagtacgagctcatccatttgggcaacttaagattaggaacatgagtacataaaaatctccatgcttattctcttgctattccacaacagttttcttggaaagcaagctttctgaagcagtgtccgacaaaatctaggtttctaataaagaaatttacggggaaaaccgtatagaacgtattgacaccgcataagatgccccgtctcttgttggagaagggaaggtgggttcgccataaatcttttttcttaggacattccttccttcttttctgacggacccgccgtgctttcctgtcttttgctgtggggtcccatctgttggttcccccttgaaagcc

SEQ ID NO: 44902 - DNA, 267 bp, Glycine max
  unsure (1)..(267): unsure at all n locations
  Clone ID: PAT_MRT3847_140546C.1
tngnnngaggngtacgcnnggcnttcggcncgngcggctgcnacntnganccttcgtntnngtggngnanatncaaanncgaattnggnnattgantacatggnanncngcantgntgganttaagnggnagcntgncncgngcngtncngnngaggancanngcaacnngganctacnngaattggtcaacntttgcctaaanntnatcatcgngntcacntcaatccgangagagnncatagacgtncgcntcctncagagcagc

SEQ ID NO: 44903 - DNA, 540 bp, Glycine max
  Clone ID: PAT_MRT3847_140547C.1
caatatcaaaagaaagattgattttatttagtaaacattaaatttaactactacattcaatcaatcacatacacacaaacactaagaatacaatctccatggaattagaggaaatgtatttcatatattttgaaaacaagaccctatgtttatttcttgctaaatgaacaagggctgtagcatagctcaaccctagtcactcctaaaaatgtggaataaggccttatcatacatattacactagaaagaattattaattaatgaatatgttgccgaaaattaacaatctttaaatggatgcactatatggaactccctttccagtgattccaggtcctgaaaatggtttcattagctcataaggcactaacccagctccacatctatttttcaaattatagttaccattccttgagtctataataccttcaatttccttcaatctcttattaaacctttcaaaggacgtctatatagtttgattctcaacccatgatggttccatgtactgcccaatatactcttcatcaggtgaaatga

SEQ ID NO: 44904 - DNA, 231 bp, Glycine max
  Clone ID: PAT_MRT3847_140548C.1
tttctttttaaatgggtggagacaaccttcatgttattccttggatgggtccaacgttaagaaggcggagctaacattggtaaatggaaattgtgaatgtatcaaccactgcctacaaaatctaagttgtaaggaagcacgaacgtatggaatctcgcacgactttgatacaaatgtcctctaggaaccagctcaattgctgggagagcggaacaaacataacatgagggg

SEQ ID NO: 44905 - DNA, 1226 bp, Glycine max
  Clone ID: PAT_MRT3847_140549C.1
gggtttcttggagaaagttcttccttttgtggtggctatgatccgcagccaataatggttgttccccaaccaattgaggggcttcatgaaactggtcctccaccattcctcacaaaaacatacgacatagttgatgacccttccacgaaccatatagtttcctggagcacagggaacaacagcttcgttgtgtgggatccacaggccttttcggtaacccttctccccaaattcttcaagcacaacaatttctccagtttgtcaggcaactcaacacctatgggtttaaaaaggttgatccagataagtgggagtttgctaatgagatgtttcttagagggcaaaggattcttctgaagaacattagaaggaggaaagcaaatcatcatcaatcccatcagcacgcgatgcagcaaggtgtagaagagccttttgttgaggtggggcagtttgaattagatggagaaattgatcggttaaggcgagacaggcaagttcttatggtggagttggtgaagctcagacaacagcaacaaagtaccaaatctcacctccaagaaatggaaggaaggatcaaaatgactgaacagaaacagaaacaaatgatgaatttcttggccagggcaatgcagaatccaaatttcgtgcaacaattggctcagcaaaaggagtgctcgagggagcttgaggaagttttttccaacaagaagaggaggcctattgatcaagggcctaatgttgttgaagttgccgatgacgatgatgagttattaggttgtgctgaagagtgttcagatttcgttaaacttgaaccgcaggaatattacagtgatgacaaggtattagagtttgaggtacctgacttggaccttgctttgaatctcgatgaggagaatattgaaagccagaagagaataatggaggaagaacatgttcaactagaaaatagtagagagagatatattgatgaagtgttttggcaagatttgctcaatgagggtatagaagatcaaggtgtactaggtgttgaagatgtagatgtattggccaagcaactaggttatttggcctaaataggagattatcaaggctgtattttctattattcattgaactagctgggtgacagtatctccttataattccttagatgtatactttctgaccagtttttgtgtagccagactcaatttcttggcccaaatttaaagcacgtggttatcaag

SEQ ID NO: 44906 - DNA, 282 bp, Glycine max
  Clone ID: PAT_MRT3847_14054C.1
gcctcgcgtacgaccattgtatatgtatagtgctacagaaagggtatgggacatgtacatgcgctgtctaatataggacatgagtttagctgctccatgacatatcatctgaaaacaactccactatcgtatatggtaatcaagaattatgcaataatagaactattgatgaataggaggggataatgagacaaattccaacaatcaaacgagcgacaattatgaagatatgcaaggacagattatcatgtgtgcccacttcgataattcactgcaagcgat

SEQ ID NO: 44907 - DNA, 421 bp, Glycine max
  Clone ID: PAT_MRT3847_140550C.1
aaaaaacaaatggaaattagggtttaacccaccggcccggaaattggggtccttaaccccaattaactaaatttccattggggggggccaccgcacctaaaaatttcccgggggctaccctaaagggggggcttccattgggggttaaaaaaaaaaattcccggaaaaggaacaccacggacctgggggctggggttcccgaaccccctaatacagggggaaaccctccttcccccaatttacaaaggtgggggaaaggattgggggcgggaaagcaaaaaattgcctttaactttcccaaagggggtttttgggggaaaatttcaggggcccctttgaaaaatttgcggagccaagtctcaaaataaggggggggcctggccccaagggccttgggggccaacctgtttttggggggggg

SEQ ID NO: 44908 - DNA, 248 bp, Glycine max
  Clone ID: PAT_MRT3847_140551C.1
atacgaataaccaattccaatttgtgctatctcaaatgaacgttgtcatgatgctaacattgaatttatcaagaacatattacagctatggatcccttactttgggattatgcaactcaactcgagcgagtcggtacggacctctgccatgtccaaaccctggttgcaacctatctgtgtcatctccatatcttagagagcgccgccttcacataaggcataccaaacttgctaaaatggcctttgag

SEQ ID NO: 44909 - DNA, 1557 bp, Glycine max
  Clone ID: PAT_MRT3847_140552C.1
ccacgcgtccgcggacgcgtgggctctctctctctctgagattggaagcattgccatcaattcaattaattatcttaaacttattttcatccacttcgataacagatatagatgtagcacagtttaaggttttctctattcatggcatccaaacatcgaattgcagggaccaacattcagagctccccaaagagggcaagaaccatggccacgtcatccacagccattgaacccgcattgaaggaggctttttccagatatactcagtgtctcaatgacctcaatgacaaacgtgaaagagtggtcaaagcaagtcgtgatgtaacaatgaatagtaagaaagtcatatttcaagtgcacaggatgagtaaatacaataaagtggaaatacttgagaaagctgaaaaggatttagcagctgtgacagatcagtacatgtcacgactagtcaaagaattgcagggaactgatttttggaagctaagacgagcatactcacctgggatacaggagtatgttgaagctgctacattctatggtttctgtaaaagtggaactcttttgaagcttgatgagataaacaaaacattgctaccacttagtgatccatctcttgatcctctgcagataaatatccttgactatatattaagggttgcagatttgactaggatatatcagatggtgagcataagtttgctgagaagatatgcagatttgtgcgtgagatatatacagggagcttacacttgtagtgccacatctggatgtcagttctgatatgaaaacaaagatggatatgatgctccaaagtgtcatgaaaatagagaatgcttgctttggtgttcatgtgagagggtcagagtatattccacttcttggatccaacgatccaagttctttcttagtgggagttccagatattgaactatgagttatgcattggacgctttgtgagatccatgtaaatgagagaatagtctgctagaaggttttggaggttgatatcactgcatggaccaatcttgactatattttgcgtttgcacatgatcatcgaagaggaaaattaagacgattcttaacaaagatgagaatgtacgcttctcattttatttgaaaaggttgataattttcacatgatgttattgaaacagggtatctctttctccactgtcccccctccctctctctctctctctctctctctctatatatatatatatatatatatatatatatatatatatatatatatatattgcacatgagggtgttacttgtatcagctgaattacttaaaagttacaagatatctttttcatgctcttttctgtgattaatttgtcctctgtgctatatttggtctttaatttgccatctgaatcaacttagtttgtatcttgaaattgttgtaatgtgacgagctagtttttaattgcattactctggcattcattctttttaccctcaatccccccttctattttttttaaatggcaatagaacaaggaaatatgaggtaataagaccttcttatcttgaggagaaatttttc

SEQ ID NO: 44910 - DNA, 395 bp, Glycine max
  Clone ID: PAT_MRT3847_140553C.1
ggctcgagctcgagccgaatcggatcgagctgttgatggggggaatactatgactaatggtggggccaaaactactccttctgggaacaataaccgcgacactggatctggcaatgacgacccttctaggaacactgactctaatgctacttcaagtgactctcaggaacctaagaaatccaaagggaaacagatggctgctatggcagctgcgattgcggtggtgacagctgtggatgctttcggcattccgatgtatgcctactgcttcaagaggaggaacggagtgttacaggatcctactgaactgttaattcacgctagggatccatcgaatgctgacagtgctagtaacattgctagcgctaacaataccacatggaagcgtttccact

SEQ ID NO: 44911 - DNA, 118 bp, Glycine max
  Clone ID: PAT_MRT3847_140554C.1
ggaacaggcggtggagaggccaactatgcgcgaagttgttcaaattctcgaccgagctatccaaagaccaccatagctcaaacacaacggagacttcaacaactcacagcaactcctc

SEQ ID NO: 44912 - DNA, 418 bp, Glycine max
  Clone ID: PAT_MRT3847_140555C.1
gaggggaaacccaatattaaaggaaataaaactttggggattctgaaaagactaaaaacaaacttggggccattttatggggggcccccaaaactaaagggccttttttttcaattaaaagggggggccggaaaataaaaaaaaaaaggggaagggggcaccccggggaacttaaggttcaaattcttggcccctttggttttggggcccacccgcccatttttcacatttaggggaaagggaccctgaaaaaccatcaaacaggggggacaacccgggggaaataacaatcatgacaagggggaaaaaacaaaaactttaaaaacggggtaacccaaaagggaaaaaacttggaaattggtcacacccccccaaaaaaaaagaaaaagttttaacaggcctttgaattttttagggg

SEQ ID NO: 44913 - DNA, 495 bp, Glycine max
  Clone ID: PAT_MRT3847_140556C.1
ttcgagaaaacccttttcggcttttatttgttcaatttcctcccttcaaacgacatcgtttggaaatgaggactgtgagtgttttcgctctcccacttgtcgctttgttcatcatggcaatctcccgtcttggccaagctcaagacttgcctctttctccagcacctcctccaaccagtcatggaaacgcaattgatcaaggaattgcttacattcttatgctggtggctctcgcaatcacatacatgatgcattaatttttcttattcttattcttattatcatggccagattagagaatatttcagaactttttgtactgtaattattattcatggaatttgttattatttattctgactcactttctccagaggatggtttttcttcttcttctctctcagctcttttttcttctttttttgttcaaatttcctctttaatttgttgtatgtatggggaattctcttttcattattcaagcttccatttttt

SEQ ID NO: 44914 - DNA, 306 bp, Glycine max
  Clone ID: PAT_MRT3847_140557C.1
gagcaaagttgtaagcggaaggttaaactttagtgatcatgtgttgggtttcgtttttaatttctttcccccacttgtatcatcatccatcggaaatactatattagattattggtgtactatattagtttagtttccttgaatatatttgcaaaattattgtaccaaaaataatgagatttttcctttgtttttttgttgttcagtttctaaattcttcggatgctttgttttgtttatctttcttccctcaagaaaaatagtattatttttccagagagaaaaaaaaaaaaaaaaaaaaaaaaa

SEQ ID NO: 44915 - DNA, 190 bp, Glycine max
  Clone ID: PAT_MRT3847_140558C.1
gcattgttcaagtcttcaagaaatgtaaatttagatatgaacagatgattgattaactgatccagttgccacctactcatccctaatttatatggagttgcaaagtaagggtaggactgaggcatccaaatttaacaggaactgtatagctaatatgtatgaaattcaagttagcatgttaaaattagca

SEQ ID NO: 44916 - DNA, 322 bp, Glycine max
  Clone ID: PAT_MRT3847_140559C.1
tccctagaaacgcatgatatgctatataagccatccttaggagcaatatatccgacctcttcaatttattaccagaatgtatgtttcgtactacaccatagactcaatgacattcatatttcccaacaacgcattttaacctttgatagcatcatcaatcacatacagatcagaatatcattcaacaattgaagatcattagcatcatgcatattctatcatacaatgatatagctttcattccaacaaattttattctacaaacacctcaccaagatcaccaataaacctcacccttacttaactcaattataacttcatt

SEQ ID NO: 44917 - DNA, 164 bp, Glycine max
  Clone ID: PAT_MRT3847_14055C.1
acacaaagttttatccaaacacatagctttatcaataaggcagcattcttcacataaatccttcacaaaacatcatcatcatcatcatcatcaccgataacacaacaacatccctctcacaaacatcaccatcctaaaaccatcacatcctactcacccctaca

SEQ ID NO: 44918 - DNA, 289 bp, Glycine max
  Clone ID: PAT_MRT3847_140560C.1
gcggccgcttttttttttttttttttttttgggcagataacacaaatattatggtttgagtttgttcgaaaaacacaaatattggcgtttgagtttgacctacagaaatgccttcggatcaaccatttccagatggttaaaagttagaaacacctatttttatttcaccttatttgccattactgggcccacacatccagatgggattagttgccttgactggaaccccaagaaccgtaatttttagtagaaactgtttttatgacattaggcgtcatggcttggctag

SEQ ID NO: 44919 - DNA, 203 bp, Glycine max
  Clone ID: PAT_MRT3847_140561C.1
aaagcttaatttaaagaatcatattggtgattaacccaacaactttcccaattttttatggccggagatttaattattttccttacaacattcacctcttaaaaactggaatctggggccacatttccttatgaggatttttcccccataaaactgcctataaattattaggggagcccccacatatctcccccaaaaggggg

SEQ ID NO: 44920 - DNA, 191 bp, Glycine max
  Clone ID: PAT_MRT3847_140562C.1
ctcgagccgaatcggctcgaggtttttgcgttgcagacatcgcacacacaacacattcgcgacacaacaagtgattgctctcttttgtcatcctcataatccagaatctgggctccgtaatatcgccgatgccaacagaacgccagaagcgagccatggattcccagatccatggcttgtcctcgtatagt

SEQ ID NO: 44921 - DNA, 451 bp, Glycine max
  Clone ID: PAT_MRT3847_140563C.1
tttattctttttttttttttttttttttttttttttttttttttcgtgttacttcatttatcacaacttttgtttttactcttccccttagaaagaaaagaatcatcaaagataaagagaaaaacaccttgggaaaaaataaaacgctaaaaaactctttggatggggggcacacaaacggcagaaactgatacgtggggggggggactcttcaagggtagaacccccccgaaaaaaagggggaccccccccccctccagggaacctgcccccccggaccctttaaacaaaaaaaaaactagggtaccttccccaaaaccctctaggaaaaaagggcgactcacttttttccatccccaggaaacaaaagagggggccaaaaaaaaacaaaaaaaccctttttaaagggggcgaaaaaatctagcctgggtgcccccgcaaggcacccccc

SEQ ID NO: 44922 - DNA, 157 bp, Glycine max
  unsure (1)..(157): unsure at all n locations
  Clone ID: PAT_MRT3847_140564C.1
aggcaattccttcattattcccttcaaattcaccccccccccttccgacaactncggctactttcccctttccctnctngggttgggcggancaaatggtncgaacttccctcgnctcagggncaggancgnctgnattgcancannancttacaca

SEQ ID NO: 44923 - DNA, 295 bp, Glycine max
  Clone ID: PAT_MRT3847_140565C.1
ctgtgaactaagacaagagcttatatccagggtactgcctaggatgcagttgacccgacacactcatgacgccttggagcttgataatcattgttgtgatcactcgccgaatcataaacagtttagagagctctatttgcagacggctatattatgtacaacttcgcatcaatggaggacatctgacttgacacagctgcaccatgagcccctcctagacaatcattccctctgatgatccaggatatccttcgcggcggactgattccagattaagatcctgttgtatcaccta

SEQ ID NO: 44924 - DNA, 2373 bp, Glycine max
  Clone ID: PAT_MRT3847_140566C.1
agcatcccccatttcctcgccaagatttacaattgtagttgccgtcatgccgtgcagacagataggaagctacttagcactgatagttataattaattaaatacaaataaaagaaacagacagagagagaagagaagagtcattgtttggttgccaaggaaagcatcttcgggaaacgaacagaatgatgatcgactaaatgggacctgcacttccacttccattcgctgtgttcaaatgggtttagcaacaacaatcaccaaccattctcatttgtcttttactatcttctttcacttcggatcaaagtctgcatcaccatcatctttaccctcacctacaccactttcttcttcctcctccttattgcgcttctcacggcgctcttcacgaccatgaacctctgcctcacactcactctcactctcggatctcactcgcagatccaccttcagctttcaccatcactactacttattcgctttttctcatggacccatcttcttctcgtccagctgtagtcatcgacaatggctccgggtatactaagatggggtttgctggtaatgttgagccatgttttattgttccgacagtggttgcaattaacgagtcctttcttaatcaatcgaggaactcctctaaaggcaattgggtggcccagcacaatgctggggttatggcagatcttgatttcttcatcggggatgaggcactttccaagtctcggtctagcagcacttacaatctcagctacccgattcggcatggccaggttgagaattgggatgccatggagcgcttctggcagcagtgcattttcaattatttgaggtgtgatccggaggatcactatttcctcttgaccgagagcccattgaccgcgcccgagagtcgcgagtatactggggagatcatgtttgagacttttaatgtgcctggactttacattgctgtcaattccgtgcttgctcttgcagctggatacacgacgtccaagtgtgagatgacaggagttgtagtggatgttggagatggagctactcacgttgtgcctgttgcagacggctatgttattgggagtagcatcaaatcgattcctattgctggaaaagatattactctttttgtacagcagcttatgcgggaaagaggagagaatgtaccactggaggactcttttgaagtggcacggaaagtgaaggaaatgtattgctacacctgctctgacattgtgaaggaatttaataagcatgacaaagaaccaggcaagtatatcaagcattggagaggcattaaaccaaagacaggggcaccatattcatgtgatattggctatgaacgatttcttggccctgagattttgtctaatcctgagatatatagtagtgactgtactacccctttgccagttgtaatagacaacagcattcagtctgcgccaattgacgcaaggagatcactctaccagaatatcgtgttgtctggaggtgcaacgtgatctaaaaaaaatacgcgttcgtacgtctgaaagacgccagaagggtgagagaaaatcacagcaaggggaggtaaatgtactcagcaatccaatccagagatttgcagtttggtttggaggatcagtgcttgcatcaacacctgaattttttacggcttgtcatacaaaggcagaatatgaggagtatggagcaagcatttgccggacaaatcctgttttcaagggaatgtattaaatcaacgacaaattagttgattatcgatgcagttatttgataagactgttgaatgaatgtctggctggttatcgttatccttaattcacttcttggtctttcttcccacctaaattcagagggcggcggaagtgagtgtaaaatatgtatattaagtgaaaatatgcattttgtttttatccgggcaatctccctaggcagtcagtttcacacggttaatacagttgccagcaggtccagacggtacttaatggttagatagaaaattgatctttgacaaagctggctgaactgaattgcaacttctggtattcagcttaagtgttcgatgaagttctacattatttgtcattcattgatgggactgataattccatgaagtacttttctaggtatatagtaagttaaattcattttgattgaattgtaataagcaccagtgaaggttagatttgcgtttacgtcatatagtttggcatttttgggaacataatgtacaatagtattttgtttactgatgatcagagccagaaatatttttgttgccacgtgaactatttagtgatttgtgatgtacttcaggtaatttgaaatcattcaaccaacatttttaatataataaattaataataagccc

SEQ ID NO: 44925 - DNA, 194 bp, Glycine max
  Clone ID: PAT_MRT3847_140567C.1
gagaaaataagttatagtgacttccatggattggattttgtgggcttttagagatgaagcaagggaaaagatggtgggatcgtcccatgagggtatgccggaccaggtccattggtatctgtctaatgccgaggggccagggaatttttgaagggtaccccttttgccaaaggcttagaattggttctttttca

SEQ ID NO: 44926 - DNA, 257 bp, Glycine max
  Clone ID: PAT_MRT3847_140568C.1
ggaaattagccattctaccgatttagttctttgttgttccggtttgcttgacccattaccccaccaggtcaaaccccttcttaagtccatttccttcaggatcagatgaggcctatattttaagatgtggcttaaccaaaaaaaaaatttttaaaactttggggtccggtaggccattttgttaaggagggattttttcccaaaattaaaaacccatttaaataattttggttttttaattgggggggctttatggt

SEQ ID NO: 44927 - DNA, 203 bp, Glycine max
  unsure (1)..(203): unsure at all n locations
  Clone ID: PAT_MRT3847_140569C.1
atccagcggtgccccccaggnttaannacataatgctgtngatgctgacatatttggtcctgntgatactccctgggatggggacacgntccgttgactctcnatttgctgagaanttcccaatgnaccnccaactgtgcggttnntggacncnctgntncntccaataattatatgctggtagnaagtnttngnnnggnttc

SEQ ID NO: 44928 - DNA, 266 bp, Glycine max
  Clone ID: PAT_MRT3847_14056C.1
tattaaattgtgtttgatctcacagctgcacgtgaccctgtttagtttgaagccctctctctctctatttccccaactccaagaactgagaagctagaagagtagtagtagcatagcaaaacacttgtgctctttccctccttcctccaccccaaaagcagatgccatctgagtgaaaacaaacaaccctccacacctcacattcattgatgagtcctctctccccgatcgatgtctccatccatcttcaccatcattctactcta

SEQ ID NO: 44929 - DNA, 712 bp, Glycine max
  Clone ID: PAT_MRT3847_140570C.1
tgcttctgtaagtataattaatgtcacagaaacacctaaaacaaatggatcagttcctacaacttcgttggctgtctcgaagccagtagacccagtaccttcttcagggtccatccagagattcctagacaaagctgctgatgaaggcttggtaataattcagtctccaaaggtgggtttctttaggagatcacggacgataaaggggaggcgtgctccaccatcatgtaaagagaaacaaaatgttgaggaggggcaagtgatttgttatattgaacagcttggtggtgagctgccaattgagtctgatgtgtcgggagaggtcatcaagatactacgacaggatggcgatcctgttggatatggtgatgcacttgttgcaatattgccatcatttcctggaataaagaagcttcaatagcctcgaatttttggaaaacagtcattcttgccagccatgctgtaattgagtcatacatatatttcattacttttgagttcatgtggtccatagatttaaaaagttatttgtttttagtattagttttgcgtagcaaagacaaatttgttttctcatactttcctgtttgtgttggtgttgtcacgctcacttggcacaaatagccgcctattcaagacacatgactaggaacaagtgattttcttaaaaaataaataaacactgattgatgatgtgtcatgtgctggaacg

SEQ ID NO: 44930 - DNA, 301 bp, Glycine max
  Clone ID: PAT_MRT3847_140571C.1
aagcccaaccaatcaaaactttattaccaacttttttattggacattcatggtcttctttttaaggaaggcaaaattattcccttactttatttcaacttaaacctatattaagaattaattgaagaaaaacctggttaaacccgaataataagggtttaaaaatttaattatataagcgccttaatataccccacactatgaagaatatggccctttataaaagggttgaagaacaataactctcccacacacctgaatattcccttggggaaaaaataacccacacctggcaatcttgg

SEQ ID NO: 44931 - DNA, 300 bp, Glycine max
  Clone ID: PAT_MRT3847_140572C.1
cttgtttatgtgcttgatggtcgtgagaagatccccgacggggatagtgaaatagagagcgagttgccgacccactaacgcctaggggactctactacaactgctagtgctaaccgacgaagacgttgactagaaatacccttgctgtaaggttcgaagaggtgatctattccgatatgccgaatgtggtcgtggtcgagtctactctaattcctactcctacgcctgctcgtctacgtcttaatacagctcataataagtccattgattatggcctcgctattttcgttggttctactc

SEQ ID NO: 44932 - DNA, 354 bp, Glycine max
  Clone ID: PAT_MRT3847_140573C.1
caaaattcatcagcctttcacgtaatcttctctcctcttctctacgcgcactttgcgagatactcactttcgaaggaatccactattacttcgtaagctaaacaaaacaaaacaaaaattactgtgttttctttgggatcgctctgaatatctcttaagaaaagcaacacaacacgcagatacggtaccctttcgttgggaaatagcaatgggggatggtaactatgatagaactttgagggagttctgtattccggattacatattagtgccgggatctgaggtgagaagtgtttcacatgtacctgcttgccctgtgaatgttttcataaacaccaaaagtggtggccagct

SEQ ID NO: 44933 - DNA, 164 bp, Glycine max
  Clone ID: PAT_MRT3847_140574C.1
tgatgctcataaaacaccacagataggtacagttgcaacataattaaaaatctgtatgatgcttaaatatacaccctgtgtcctgctgctactaaacaacacaaaggtacagtcacgtttcaattacatccaggtcaactattagatgttaatatcattcacac

SEQ ID NO: 44934 - DNA, 464 bp, Glycine max
  Clone ID: PAT_MRT3847_140575C.1
acgagccaagatctacaagtcaaaagcagaggaaaaaccaacacaaacacctatctataaatcactgattgaaaatcccccaaacctcttatataaaaacatctgcagtttgtgacagggcactcaacttccccctccaaacaacagagattcaccagattattgtgttccagtttcaccaccaagaattaaactcagagatggaaggttccttgcttatagagaaaagggtgtccccaaagaccaagcaaaacacagcatcatcattgtacatggctttggaagctccaaagacatgaactttctggcatacggatgatttgaaaatagtagtagacatgttatattggattagtgaaataagatctaattggacatgtttgattgaaaaaaaattatgcagaaatcattagacattatagttctgattagatacttggatacaaagcagaggtgtttaatgt

SEQ ID NO: 44935 - DNA, 410 bp, Glycine max
  Clone ID: PAT_MRT3847_140576C.1
gagtgcatcatcgtcaacaaatggggaaaataaggggtctgtgaaactgttcaatcgcctctacatacgcgtgctcaagtgcggcaaacgtatggtttggtttgacccgagtgaagataacgaaatctccatggccaattttctttgtaacatcaccaagatggttaacattgggtatattgatacgaatcttactgatattcactcactatcacatgctcgtgggattattgacgcatacaggaatgttcccctctccaattatggtaaacgtaagggtacacgggaggcacagcttaccaccatgatactctggatgagaaggatgcgtgcgctcatacggttgcatcgaaagaacagggaatgaaaaaatatacgacatgcacatgtaccatgataagtgcatgaat

SEQ ID NO: 44936 - DNA, 695 bp, Glycine max
  Clone ID: PAT_MRT3847_140577C.1
cccttattcactaatcttaagagcccccccccattcacatgttacatatacaccttgttctaaaagccatcatttgctagcctgaagaaacttccattctttccacaatgagcaaacccaaaactcaaagaaaaccaaccatgaccaaaaaggtcagccaaaaccaagagcaacagaaaactgagaaacaaccttcatgggtggtgagaggcctattggcttgtaggaatgtgcaaatccaacaaaatcagcaacagcagaaggaagcaaaaccaccctcagaagcaaaagaaaacaggaaaaaacaggaacagagaaagctgcaagaggaacgagtcccagaagaaaacagcaagaagtgcaagaagatgaaatgctcaggctctctttgtaacaacaccaagatcactgcaaagcccgacacagcaaccccagatgttcacaacaaaaggttgttattaagtggatgcaacaacaacgatgcttccagcagatccatgaaagcacctcttaatgagctcaatggaaccgtgtccgctacttcttctttgtcagcatcttcaacttcttctggcggtggctctttgaggggaatgccgtttagaagactctctggttgttatgagtgtagaatggtggtagacccagttctcgttttcactagagacccctctctcaggagtagcatttgttct

SEQ ID NO: 44937 - DNA, 522 bp, Glycine max
  Clone ID: PAT_MRT3847_140578C.1
gggaaaaagcaaggaacattaaggggggttcgggtccccaaaaaaattcacattttcggaaggccctccccaaacccaaatcgaaaaaccctaaaaaggcttttggttttttgacccccactttccggggacaaatgggggggcataggcccaagcgttggtggggacaggggcagcaaggggatcggggagggtctccaaaggaccctttccggggacaagggccggaacaaaaaagccaaacataaaaaacagggccaatcggccggtctggagttccttccccttaagcccaaaaaaagccccgggggcatcaacaaggcccaagggggcaaaaccgccccccggggaaatgggggcagggacccccccgggggggcccccagcaatacgggaaccttcaaggggccccattaggataactgggggggcccaaatggggaggatgcccggggcggggatcaagcttgggtggcccaagtagtcgaccccaccctcgctgaaaatcggggacccggcctt

SEQ ID NO: 44938 - DNA, 511 bp, Glycine max
  Clone ID: PAT_MRT3847_140579C.1
gaagctcaacgtaaaggctcaaacccaactgggtagttgaaccaccaaagtctcaagaagggtatcagcatttaatagccgaaagataaaatatcttttgctcgacgttgctattagtcagaagccagaaattcgtgtaggtgagtgaggaagagagaaaagaaaaccggtgctgttgaggcagagattcaagagaatggaaggtgtgagccctgagcccttgagatcagaattggattccaaatccaaacaagacacagcgaaagaagaagatgacgacacattcaaagaaagcactgacgccgaggtcactaaaattcgtctcatgagagcctttgttgaaagccgagatccctcttccaaggaagtagatgatttgatgattagaagattcttgcgggctcgtagtttagatgtggagaaggcttcggcaatgttccttaagtacttgaaatggaagcgttcatttgttccaaatggttacatatcaccgtcagagattgccgaagat

SEQ ID NO: 44939 - DNA, 871 bp, Glycine max
  Clone ID: PAT_MRT3847_14057C.1
cggaattaccgcgtcgacccacgcgtccgggaattttggctgtttgagaaaatggatgaagagagaagacaaaaggaaaattacagatctcgtctcatggaagagcatgaattgccagattgggtgtattctccaatgaacaaggatgataaggccaaagatttcaacagtggtgttactggaaagcggaaaagaaaagaagtggtatatgcagatacattaagtgatctgcaatggatgaaggctgtggagaatggggaagacatatcaaagttttcaggtaaaggaaaaaggagagaccaccgctcatctgacagcgttgcacaagccagtgataatacaggagcagaagaaagtttagagttgaggactgaaagtgttcccatggaaaatgagcgaactagtgaagatagtttccatgtgacccctcccgcaaagagattcaagcctgaaggaacaaatttcctgaaacatacatacgaggatgttggaagtggtttgaatcgccatttgttatcatggaatactcacaaaaagaaaaggtcaagttttcttggccaaggttcattatctgatactagagggcattcttcaaatggaagagcaaactggaactgatttgagtttaattagtcatgacctatgggtgccagaattttgcataactatttaatgttattctgcattaagctcttctaacaaaaaaaatgataaggaactttcatgtattatgctagagtcttctcttaagtatgcaacatccatatttaactcaaaaaaattaatgaatgaaaatattcatggttaatttataaaaaaactggtgcaaaaaaaaaaaaaaaaaaaaaaaaaaaaaaaaaaaaaaaaaaaa

SEQ ID NO: 44940 - DNA, 1324 bp, Glycine max
  Clone ID: PAT_MRT3847_140580C.1
gtggtgcgcccacgcagccgcgtccgaaactcccgtcaatacgaaccaccaaagtcaccaccaaaaggttatcagcatttaatagccaaaaaataaaaacacattttgcttgtcattgttattagtcagaagctagaaattcgtgttgagtgttgagttgaggcagagattcaagagaatggagggtgtgagccccgagcccctgagatcagaattggattccaaatccaaacatgacacagcaaaagaagatgatgacgctttgaaagacagcactgaagccgaagtcaccaaaattcgtctcatgagagcctttgttgaaagccgagatccctcttccaaggaagaaaatgatttgatgatgagaagattcttgcgggctcgtagtttggatgtggagaaggcttcggcaatgttccttaagtacttgaaatggaagcgttcatttgttccaaatggttgcatatcaccgtcagagattgccgaagatattgcacaggacaaggtgtttacgcaaggactcgacaagaagggtcgacctatagttgttacctttgctgcaaaacattttcaaagcaaaaatggtgccgatggtttcaaacggtatgtggtgtttgttcttgagaagctttgttcaaggatgccaccggggcaagaaaagtttcttgccattgcagacattaaaggatgggcatacgtaaacagtgaccttcgtggataccttaattctctatccattttgcagacctcatgtttctgattgcaggattgctaccctgaaagattggggaagatgcttattgtacacgcaccttatatgtttatgaaaatttggaaaatgatttaccctttcattgatgaaaataccaagaaaaagatcgtattcgtggagaacaaaaagctgaaatcaacattgctagaagagatagaggagagtcaaatcccggatatatacggaggccaaatgccattagttcctatccagaatagctgattaaaatcattgaaagcctttttggccaatttattttctccaaataatttcaacttctgtaccaggagttaaatgcagattggagttctctagttggtcagattatcttagcagattcacataaacttgattatgcattgcttaatgcttatataaagcaggctattatgcaataaaaaaaaaaaaaaaaaaaaaaaaatcctcaaattccaaaacacaaagtaaaaaaagaaccaatttgctgcttataagctctaccaactgaaatctactagcacttattcttttggtccacccatatgtataagattccgaatttactttgccccc

SEQ ID NO: 44941 - DNA, 207 bp, Glycine max
  Clone ID: PAT_MRT3847_140581C.1
caaaaaatttaagacgttaaggatcttaaaacttacatgttcggggttttacctaatttggaactttaggttgacatttgtactcctacacacttttctggctcataattttgaattccggaaaaaatgtaaacttgaagaaaggttaattttgggccaacaatgatagtactaggttttggctaaattaaagagacttaacttaaa

SEQ ID NO: 44942 - DNA, 679 bp, Glycine max
  Clone ID: PAT_MRT3847_140582C.1
tagggattttcgcttccttttatcatcctgacacaccataaaggatctttctttgagtttattcctttgcgtctccacatgccataaactggctctttcacttttcttttgcctcactgccataatctgttttttcccttttctggtgtctttcatcctttcttatgtgattctcgttacctttttcatctatcctagtcttactactgtgtacctcctttacaaagtctttctcagaagtactcctgtcaggccgatcatttttttctgatttttttctgctttccctacctgaaagatcatctgttgctttttccacactgatgttctttccaggcagttcagatcttgatacccctgaagaatctttagaactaaaaccattaaatctatcaaggcttctttcaatggaattaagcccattatccttaagatcttcagtcaccaccttggaagaatgtgaatgattggattccttggtcaccttgtcatcatgcaacagatcagtagcagcatcattgctacttctggatggtaaagagatggttttgacctgattattcatcaaattagtttcacttctatcatgctcatcaagttgtgcaatgccattaacaggtagatcatgtctatctgacaaaggtttcttaatccctgactgataggcagcatctcttgc

SEQ ID NO: 44943 - DNA, 435 bp, Glycine max
  unsure (1)..(435): unsure at all n locations
  Clone ID: PAT_MRT3847_140583C.1
cacaaactgcaagatgacggtcgtccacatagtctcgttctcggtcaaggacggctccaagctgcagcctctgaccgacgctctgcgggcactgcaatccagctgcaagaggcccgatggaacatcctacattcgatcgctgaagggcgggaggcagaggagtaacgaaggcaaggacaaaggcatgcaggtcacgttcgtcatggaaatggagaacgacgaggacttgcagtactatctctggaaagaccccgctcatgaagagttcaagaaagccgccggtggcgagtttggcgtgtcggacgtggtcgcgcttgatttcacggacggtgaattcaactttgcgtagccatcctgcgatgcgagacatcggtttgcgcgcttggtcangtatacgagccgcttgatgtangtatgcattaatgtacgtgtatt

SEQ ID NO: 44944 - DNA, 329 bp, Glycine max
  Clone ID: PAT_MRT3847_140584C.1
ggggggtttttttttttttttggtttttttatttcttttttttttttttttttttttttttccctccccacccccaatttttttttttttttggaaaaaaaaaaggggacccggggggtaaaagtaataccaaagggttcttaacaaaccggcttggttttttttttcaagggggttggggccttgcccaccctttttttaaacataaaacccaaggggcctaacgggtttttttttccccttggctggctttttcacgatgggggctcattatccctttgacccaggggaagtggcccttgcccccccctcgggaatccccggttttg

SEQ ID NO: 44945 - DNA, 286 bp, Glycine max
  unsure (1)..(286): unsure at all n locations
  Clone ID: PAT_MRT3847_140585C.1
taatgcttaggtctcccacaatatnattattattattatttgaacttaatatgggcgtaaaaataaattagaattttatataaattatgaattcttattatcattaaacagaccttagttagtgcagcttattttttttaagtgcaaattttattcgtgttcagtttaattttgatgctttattattatgtaaaacaaaattgtattattaattaaataaaacatgtttttaatatatttttttaaatattcctataaacataatctttattttgaactatttttt

SEQ ID NO: 44946 - DNA, 262 bp, Glycine max
  Clone ID: PAT_MRT3847_140586C.1
gccatatatcccgctacgccgccctagaagatataaccctacataggcgtacgtgcgattcaatatctgatctatagagtcgcatgtggttctagaaactgatcgccctcatactacgaatgctctgtaccaaccactattaaccaaggtgatccctattgaatacaaaccagattttgcatctgggtatagctttagaggcactcccgattccacacttaacagtattgcaacctgtatggttaatgccacttgccctgta

SEQ ID NO: 44947 - DNA, 266 bp, Glycine max
  Clone ID: PAT_MRT3847_140587C.1
gagcggccgcttttgttagttttcttctttacgttgcgtccgatatcccttatcccttttgcatgggccgaactaaaaattttggagaccttcatctattagaagtcgccatgattttacactgggaccacattgcgataaccgtatctggatcactcattcatcccttcttcactcttccattaccagtggacactcgattggatcctctatcgagcttcgaatccacatttcattcggttggtcccccgctgaaaaatgggctt

SEQ ID NO: 44948 - DNA, 733 bp, Glycine max
  Clone ID: PAT_MRT3847_140588C.1
gtcggggtcggggtcggggtcggggaagaggtagaggaaggaattggggaaggggtggctatggctatcaaggtggttatgcaaattatcaaggatacgggtattaccaggggggttatgcaaattatcaagataatggtgggtattcaaaccggggacgaggtggtgggcgaggtagaggttgggggtatcgtggtactggttatgatggtggcaggggtggaggttcagggtatgaaggtggcagaggtggaggtggttatgaaggtggcagaggtggaggtggttatgaaggtggcagaggtggtggctatgaaggtggcagaggtggtggttatgaaagaggcagaggaggaaggggttatgggcgtggtaggggccgaatgggtggacggacaaggggtggtggtggcaaccaggcatgattgcaaagggtgctattgtcattcttgctaaatgcttgccttgacagtggggttaacgtttttagaatactgtgttgatagtgtgatgtggctcatgacccagcattattaagcagtattttatgtttttgtcatgaaattgaaatgggcaaggttttgttcatctttagatttagttgcaaagcatcttggttttatgattgctgtaattcatttcaactttttatggttcccaaccccatatttttatctgtatctggtttatatatggtttttcttttaatcaaaagttgtttttcctttgatgt

SEQ ID NO: 44949 - DNA, 325 bp, Glycine max
  Clone ID: PAT_MRT3847_140589C.1
gtcagggaaaggcgcaaagggtttgataactgctaaggacaaatataagaaaaaaccaatttctcgctcctcaacatccagtcttcactttcctgttgaacacattcatcatcttctaaagtcaaaggtgacagcacataaaagagttaaagcaacaactacattttattctactaccatcctaaattatttaactacataagtgttaaagttaactaacaatgcaagcaaagatctaaaagtaaatcatattaccccaatacatctacagcttaccatccataaatataaataacttaataccctcatcaaaagaacaatatct

SEQ ID NO: 44950 - DNA, 462 bp, Glycine max
  unsure (1)..(462): unsure at all n locations
  Clone ID: PAT_MRT3847_14058C.1
agatcgagtattacaaatttcagctagtggtcatagtgtcactggtgattgtgcttccaaacacacaaaggtggggagaaaatgggcatgccataatttgtaggattgctcaatctcgcctcagcgattcaaccgcaaatgctgtgaaaaacctgctaccagaatatgcacaaaacgacttaagaaatgtgtgctcatgggctgatcgcgtcaagttttatttgcactggtctgctccattgcactttgttgatacacctgacaacctttgcaattatcaatctgacacggattgcaaggatcacgatggagtgaaagcaagatgtgtagtgggagcgattaagaactacactgatcagctgctcgactatggcatatacactgaatatgacctcacacacgctcttatgttcctttctcattntatgggagatgtgcatcaggctatacatgtggacttta

SEQ ID NO: 44951 - DNA, 341 bp, Glycine max
  Clone ID: PAT_MRT3847_140590C.1
gatggatatctgcagaattcggcttaagcagtgttaacaacgcattttacgcggttgctcacgcccctaccaactgcactcttggcatcactttcaacccagacaatcctatgaaaagcgttctactgctataatcttatctaacttttcaacttacacttgatttactttaaccaacactttcacttgacattattctctccaccttcgccgatgaccatactttccttgacctcactctgatcactggacatacactctctatcaacatcaccattgaacacaccattgttgatatcaccacagatagctatctgactaccaacaatacccgtcttaac

SEQ ID NO: 44952 - DNA, 189 bp, Glycine max
  Clone ID: PAT_MRT3847_140591C.1
tcatactatcactcctaaacccattactactactcttttttattcacttaacattattatcatggagcgcctctatttaatagtctgcctccccttaaatctaaatttaaaacactcaataaactacactttcttaacaacctcataagacatttacccattttttcaccctattaatatcgtataact

SEQ ID NO: 44953 - DNA, 658 bp, Glycine max
  Clone ID: PAT_MRT3847_140592C.1
tatttccatattaatgcctcttgggtggcatttgcgtacaaaatcatacatccatcaaggcagcaacagccaatagcaagttaaactttcagagcacaattccagtattctacctagcaggggccactaaaatagaagaaaatctagcagtgtttaacttacacaagaaatcaaaatattcaaaatcaatttggaatctcctggtaacaccactacaaataagaggtcgtttccaacagtataaacagacatccaaacaaactacacaaattgcactcttcacatgataactcaaaacaaaatgatatggaattccagcatttcactaaaaagtactgtcagacacaggctgccctccttataaagaactctcaaatctcaatcccgaatttcacgtgagtggaggggacagtttcagaccaagattttccattcctaaattataatcagttatcaattccacatctaagaggtagaccatccacagattgaaggtacttgataaaggatctagagcatatctcagaaaaaggggatgatcaaattaacacatcgctgaccaatgaaagcatctatttattttttcaatatcagaaaacatctaattcatctacagtgagtaaaaagattacacacaccagaaaatgaattctggtgc

SEQ ID NO: 44954 - DNA, 275 bp, Glycine max
  Clone ID: PAT_MRT3847_140593C.1
caaaacataccttatcttttaacctcaaactctcttttatctccaattttcacaaattcctttcaatattcttttctactcatactaattatacccattcaccccatacttcaattccttcacacatacattcatctacctacctacaaacatatccctttttctctaaaacatctctaaccttcccaacgctctaataccattattttatcacacatcaattcttaatatctcacacttttatactttaaaacatacccctattactctattta

SEQ ID NO: 44955 - DNA, 372 bp, Glycine max
  Clone ID: PAT_MRT3847_140594C.1
aattcaaatattttgggaatttgcatcatatatatttcatctctcttcaaatacatttgacaaatggggataatatgtatgtaatactcacaatcacagatcacagaggatgccagttaaataaatttagtgtatgtagtatgtaaagaggcagatcccatactcctttatcacaggggaactttatttcaacatactacctcactaagtttttgctttttatttacaaaaaaaagaaaaatcccaagatgccattgattattaaatttccttcagatttctttaaataaaaactctttattattttttcattatatcattcttttataagaatttaaacattcttaatttcttttatcattccattatttt

SEQ ID NO: 44956 - DNA, 123 bp, Glycine max
  unsure (1)..(123): unsure at all n locations
  Clone ID: PAT_MRT3847_140595C.1
ggctcgagctattattttcnttttcaacctgcatatttttgtcaaaaccctaaccgggaaaaggagtactctaaaagacgagtgctccgacacaatcgataacgtgaaagctaaaatccaaaa

SEQ ID NO: 44957 - DNA, 481 bp, Glycine max
  unsure (1)..(481): unsure at all n locations
  Clone ID: PAT_MRT3847_140596C.1
agaaatataaaggatgtagactaagttatatcaacatttgttatttgtatactcttagaattgttatttcttttgctccacattgtcctcaatcttctggattttgcattgatcttgacaaatggaaaatggcttctgtctctttttatcttgttttctctgttctttattggatggggatattgcatatctaatagtgtaaaacatacctttatctttttcagattcgcaggaagatgagagagataatggtcaaccaagcaacagcatgtgatttgaaagaattggtgcgcaagttcatccccgaaatgattggaaaggagattgagaaggcaacatctagcatctatcctctacagaatgtgttcattcgtaaagttaagatccttaaagctccaaagtttgatcttggaaaactgatggaggtatgtcctttttattgcaaattttcttatacctatgnttattatgtctaatgaat

SEQ ID NO: 44958 - DNA, 685 bp, Glycine max
  Clone ID: PAT_MRT3847_140597C.1
ggagtgcttgggcccgagaaaccatccttcttgaataatgagatggattatgactcatgggttcctcctgaaggacaatcaggtgatggacgcacttccttgaatgatagatatggctactaaggtcgggtgaagtgcatcattgttcattgcaagaaggggggtttaggctgtacattcaccttaatatatcggtgagggaccaggtataccatactcatcattgatgcacttatatgtagagttggttatatatgactttcaatgacttccatcctctgttaaatagaagtgaaaggatgataaagtttgttgaagggaccaatgtaacagacatggcagggtgaaagcactatagtaaaatgtagtgacagacagatgcacttgactggtctggtacccttgtccaaaggttgctgcgtgtacagccacatggtctgagtagcgagtgacttctgtttgtgagaagtttggaataagggcaggctacgccattatgattattagcaaagcagtttagatccaaaacttggtcagatgtacattctgcatgctactgtcctttggaaagttttgttatcacttttcagttgtgacaagtgttagtcgttgaagaaatgactctaattaaaggctgtctgcactcttatatttgaagaaatgataacaaaattgttagttgtct

SEQ ID NO: 44959 - DNA, 474 bp, Glycine max
  Clone ID: PAT_MRT3847_140598C.1
gcgctatagtaaaatgtagtgacagacagatgcacttgactggtctggtacccttgtccaaaggttgctgcgtgtacagccacatggtctgagtagcgagtgacttctgtttgtgagaagtttggaataaggcaggctacgccattatgattattagcaaagcagtttagacccaaaacttagaccaatgtacactctgcatgctactgtcctttggaaagctaggactgccttgatgctattatagatgtattatttaaaatgttggtgctttcgagctttgttatcacttttcagttgtgacaagtgtctgtcgttgaagaaatgactctaattaaaggctgtctgcacccttataaaaaaaaaaaaaaacttcgtaccccattgtccagaggctcttcgctatgcgaaggtatgggggagggatattgtacccttatatttcaaaaaaaaaaaaaaaaaaaaaaggggcgg

SEQ ID NO: 44960 - DNA, 351 bp, Glycine max
  Clone ID: PAT_MRT3847_140599C.1
ttggataaaaaaatgaaaacacgacacacgtgactagaagcacataccatgctcattcgtactactacttagtacagagattcccacttatgagctgtcacgtggtgggcgtacttgcaagatacgaatgctaggtcctgatgattctgctctgctcgcgccccgcgggctacatcccatctgctactgccagcggccgctgcaccacagcagagaccaactacgagagtggcatacgacaaacaaacatcactttggtaccaatctataatggacgagcaacgactccctcctacacgggcacctacagcagttgcttggcaaggtcaataatgctgtcatgagcgacag

SEQ ID NO: 44961 - DNA, 600 bp, Glycine max
  Clone ID: PAT_MRT3847_14059C.1
aaaagattgttataagaagcagaatgatgctattcagaatgcttcattgaaagttctatcatggctgaacatgtgttttaagagtatgattctcccttttgagcagctttatgagactgtagacaactttaatattcagatctattccaaaaacattatcagagatcttttagcaggccaatcaactcacaatggtcagcttaatggaattcattgcaataagtttgttgaatcaatctatatgaattcatcatatgacatgctgggaaatatagtggactcattaaagattgaaggtccatattctggggtgtgtccatccagtggatctttaccttgtataaggtattcagtttctttggctgtagagggtgagaatctgaaagaagttattgaagtttgtgatgagtttgagtttgaagtgggaattggtgctgtggtttcctatgttgaagatgttgtgatgcagatgtctgttggtcagtgcgcttatttctcttcaaacttacttactactgagttgatttttgcttcagctggtgattcagtcaaaatgctggcctcgttatcttctaaagactggtgtatggaatatgaaat

SEQ ID NO: 44962 - DNA, 779 bp, Glycine max
  Clone ID: PAT_MRT3847_1405C.1
aaaatagacgagtttatgactcttactgaaagcgttaattggactccacgcgtccgtgaggagacaaatgagaatggaaatgactacatacacgaagtgatcatttaccttgattctatcttgtccccagtgcaacaaattttacccttggatgctgtgtacagagttgggagtggtgcttttgagcacatctcaaattccatagtgacagctttctctagtgatagtgttaaaaggtttaatgcaaatgcagttataaatattgattatgatcttcagttcatagagaattttgcagaggaaaggttctattctgctggtttgggagaaatagacaatgaggttagttttaagatctgcatggtagaagcacgacagttagtcaatcttttgctaagtagtcaacctgagaacttcctgaatcctgatatatgggagaaaaattattatgcacttgaaattaagaaggtggctgctatccttgataaattcaaggattctccagatgggatctttggaagcctggctaataaaaatgcaaagcaaagtgctagaaagaaatcaatggatgtgctcaaaaagcgacttaaggatttcagttgataaaatttggaaacattatttcatgattcatgggaagtagggtataattgatgtatttttcttcttttcttgtggatgtttaacatcataatgaacatgtttctatattgttctatatttttctgacttgtttgtgccttgaatattctctctattttccgattatggcttcattg

SEQ ID NO: 44963 - DNA, 202 bp, Glycine max
  Clone ID: PAT_MRT3847_140600C.1
tcgtccactcttccgacatgtaaccatttctacatcccacatagcttaatgatcactaccaggagcgatcatcttactctaccgaactatttctatctacctaactacaccagctcaagtgcaagtgcttctcaaaaatcatgagcttaaccgcatgactctctacgacacctactcaacattcttaaccgcttctgccaac

SEQ ID NO: 44964 - DNA, 580 bp, Glycine max
  Clone ID: PAT_MRT3847_140601C.1
attgggaaaacttggttttgggaggggttggagggggtttttggtttggcatttaaaaatcaaaatggggggctatcccgaaattgggaaaaccctttttttttttaaaaaaaaccaaactttcacttaaaccccttggggtggtttgcatgaaaaacgttaaccctaaaccaagccccattaaatttaaatttataaaggtaagtttaaacaaattctattctatttaaaaaattggccaaatttttgggggaaaaaaccctattctattggatttttacaaaaaaaaaaaacttttctttttttcaaacccccccttatttttacttttaccaccgggatgtataaattggggggaggcccaagcccgggggggaaaaaccgttgccctgattaatgaaggcctgattaggcccctgttatgggaaaaaagaggtttaaaacttttggggcggttgggccggcgccaaacccccgaagttcaaatttttggctttaaccctttgaatatattcgaggggaatactgaaggggaaaagaaattcaaagatttggtgtgggaaaaccctgtttttttttt

SEQ ID NO: 44965 - DNA, 293 bp, Glycine max
  unsure (1)..(293): unsure at all n locations
  Clone ID: PAT_MRT3847_140602C.1
gcagccatggctcgtggtcccaagaaacatctgaagcgcgtagggctccaaaacactggatgcngataagctgactggcgtgtttgctcctcgtccatccactggtccacacaaactgagggantgcctgcctctgatcattttcctaaggaacagacttaagtatgccctgactggagatgaagtaaaaaagatttgcatgcagcgattcattaagattgatgggaaagtcaggaccgatataacctaccctgctgggtttatggatgtcatcagcattgacaagactggag

SEQ ID NO: 44966 - DNA, 474 bp, Glycine max
  Clone ID: PAT_MRT3847_140603C.1
attaaattgtgttttatctcacagctgcacgtgaccctgttttgtttgaaaccctctctctctctatttccccaactccaagaacttagaagctagaaaagtagtagtagcatagcaaaccactggttctttttccttccttcctccacccaaaagcggagaccatattaggcaaaacaaaaacccctccacccctcccatatatagaggagagctctctctccaatacatgtgtccatacatattcaccatcattctcctctcctttctcctcttctccacacctttcaagtgtcaaacaccatcatgctctttcaatttaaacacaagcgcacacacctgccgtccattttcttctaataataccccttacccattctcatctactccaggctgtggccacccttccttccacctaacttgctgcacccctcactcccaaatcttcatcaacaacttctctttctccatcct

SEQ ID NO: 44967 - DNA, 269 bp, Glycine max
  Clone ID: PAT_MRT3847_140604C.1
ataagaagatgtcacaacatctttgcaccacgcgcgagatcaggggcccttcatgcgaactcttcagggcgcggacacgttctccttagcgagcggcgcgatctcctcgccttcgacccctggctcgccgccggcgaccccgaggctgagcagcacgttctcccagttcttggcacggctcttccaggagagatcctggatcatgcagttcctcaccatctcctcgtacgcaggagtgccgaccaccttgatggcgcgctgcaatgtgg

SEQ ID NO: 44968 - DNA, 519 bp, Glycine max
  Clone ID: PAT_MRT3847_140605C.1
gtttccgtcatcactgtatgacgtcctccttctttgggggggggggggggtgttggcggggtggtgtttgtcttatgtttgggtgttaggggtggtgtaatggtggttgtgctgggtggtgtggtggtgggtggtgtgcttgtggctggtatgagtatgctagctggtttgcgttgtggcgatatcgctgttattactggtctgcgtgtcaatatttttggtatctggattgttcatggtggtacagttctggttctgcaggtaattttgggtaggggtgtcacgtcgtgtggcagggttcccgtctacatggtgtaacatagcgcaatgggtacaataatgcgcagaatttgccatgtggtgggtggtgttgtgccggcccgtggtgtggcggttgtgccctcggggggtgttgtggttgcccgccgagggcccagtcacacacaacggtaattgggtgagcctggggtggtgcgacgtgtgtgacaattggtactccagttctgggggtgttgggta

SEQ ID NO: 44969 - DNA, 251 bp, Glycine max
  unsure (1)..(251): unsure at all n locations
  Clone ID: PAT_MRT3847_140606C.1
gacccacccggccgacaagcccagcccaagggggggggggagagccggaaccancaggngaagacaccgaggnccgaacccaacgccggcccgcaagcaacaagcaagccgcgcggaagacagaaggaggcagaacccccggcggngcggcacggnacgaaagaaaacaacagcggagggggggaannnacanacaccacccanaccaaagccnggcancgggccgaaaagggacaaaaggcagcagccgg

SEQ ID NO: 44970 - DNA, 508 bp, Glycine max
  Clone ID: PAT_MRT3847_140607C.1
ggaaaacaaaggggccggagaaaaaaaattcaaaatttaaaatccccttttatcaaaattaaaaagggggggggttccctaaatttgaaagggtggaatccgggggaatatcccccaactgaaaagggggatcccaagacccaagtcataacaaaaaaacacccgggtcaacccacttaacaggtatccgggtaatggcacacaaacgggggggtaaagagctgagccggcgtccacctttcccgggactcctttttggggcagcactccacaaaatcggaaaactccggggacccggtctcggggaggctcggggggtccccaaaaaaaatggcccacaaaaggggagcccaggggggtctttgacccgcttgaaaaaaggggaagggacccacatagagttcaaataggggcaaacccaaactccaaatttccgcagaaaaaccggtaaagttcccgccatacccttccgggtaaaaccgggcgggactcaagtccccccccgggc

SEQ ID NO: 44971 - DNA, 254 bp, Glycine max
  unsure (1)..(254): unsure at all n locations
  Clone ID: PAT_MRT3847_140608C.1
tgatcnagaggcaacatnancngntgattgggangatgaggaggtggtgaatgggangccccanaganngaaaagcccaaaatgtgaagnagcccccggttgnggtgagtggtagnggccaatgaagaggaatccagcttacaaaggaaagtggctgccccactggttgatantcctgnttatnanggagtttggaagcctcaggacntccanaccctggctgntttgacattnaanacctggnnntgagnctc

SEQ ID NO: 44972 - DNA, 260 bp, Glycine max
  Clone ID: PAT_MRT3847_140609C.1
aatagaaaaaactcatgggcttggtatttaagtgaaagacgacactatatcgccagcatgcttaaaaaaaaagacttgcaaacttaaagggtgtttaatactaagatgagcgatccaacgtctacacgggtatacaagacagaacatatcttctacctgctgcttcagggccttgatgcaggggcccccttgacatacaaccaaatatggctctcaacaacttgtaactagagttgttctaatagctgttgcagctaatg

SEQ ID NO: 44973 - DNA, 356 bp, Glycine max
  Clone ID: PAT_MRT3847_14060C.1
gggaaccccctatgcaaaaaacctcacaaggtatacttaacaaaaaaaaaacattgggggcaaaaccccccaaccctttcagggaaattatctttggataatttaaaaaacaggctagtacttaaacccccgatcttaaaacaacaaatttttgccccaacaacaaaattttttataacttgggaagcccgggggcaaaaagctaaaaaggacctaaggccggcaaaagatcaaatttctttaaaggacaaaccttggccgaaacaaaattttcccgaacgcaaaaattggttccacaaccggtaaacaatgggcctttgcaaccctctcaatttcaacctttttcttgaaaacaa

SEQ ID NO: 44974 - DNA, 445 bp, Glycine max
  Clone ID: PAT_MRT3847_140610C.1
agctcggaattcggctcgagctctaacctacctctttttcttctcttttaacttttttaccttcttcctcctcgatcatgtcttacttcaagggcaagtgccatgatgagcttatcgccaatgctgcgcacattggctcttatggcaacgatgaccttgttgctgatgagcaatacaggacaattggcgaccgcgcggtcaacctcagcgcgcacaacatgcgccgcaacacgctagctgtgcacggaggctgctctttcactagttacagccgtgtcttgaatacgtcatgggcgtcatcatgttctaggtaagcgtcttccacagcacacattccaacaagcccttcgccaatgacgcgaacgaacttcgtgtagttaatggcctccaggttgacatggtctcagacccccttgttggcgctaattaagaagcggccactcac

SEQ ID NO: 44975 - DNA, 265 bp, Glycine max
  Clone ID: PAT_MRT3847_140611C.1
tcttacgcgtccgggctgctagaagacacggggggggggttcggatcacaggggttccttatccatgcggtaattaaacgctgcatcctctcgcttagatacgaggtgcatatacgccagacggcaaaaccatggacggggaacgagagggtcctcctatgggaataaaactggggcccccctactcatggactgggcagaggcaacatgacctaagatcaaggacatccaacgaccaagggagcagataccacagcggatcacg

SEQ ID NO: 44976 - DNA, 788 bp, Glycine max
  Clone ID: PAT_MRT3847_140612C.1
caagttcgccacagttgtgcgtgtcatcgcacacacacaggccaagaaggtcggattcaccaagaaggccgatgtagtcgagatccaagttaacggaggagacatcgccgccaaggtcgcctttgcccgtggactcttcgagaagccagtcgccgtcgacgaggttttctccgagtctgagcagatcgacgttatcggtgtcaccaagggttccggattcgagggagtcacagccagatggggaaccagaagactgccacgtaagacacacaagggtctgagaaaggtcgcttgtattggagcatggcatccagcccgtgtctcttgggccgtacccagagccggtcagaagggattccacaaccgtacagagctgaacaagaagatctacaagatcggaaagggatcagacaagaagaacgcctccacagagttcgatctgaccaccaagagaatcacacccctcggaggattctctcactacggatacgtatcaaacgatttcctcatgctgaagggttccatcatgggaacaagaaagagagtcatcacactcagaaagtcactggtaccccagacatcaagagtcgctctcgagcagatcaagctcaagtttatcgatacatcatccaagtttggacacggaagattccagactcgcgacgagaaggccaaattctttggtccccgtgccaaggctacaccaaccagcccaaccaccaccaacgcttaaaaagggatgccattatagcgacaataatggatgcgatgataaatgcaagcaatct

SEQ ID NO: 44977 - DNA, 275 bp, Glycine max
  Clone ID: PAT_MRT3847_140613C.1
gttttgatgtcaaatagcgttgaataacaaatggaggtatgatcatttgtttttccttcaccctttgcaatgcagggttttatattccttcatgtgaggggcctaacatagataatattgtggcgaacttcgtataggagacgctgctcataatgcacagggtttggactccgcattaaatgatctagcactgttcacacggcacagacctatcaagactccaacctgacctactcttgccactcttaagatcaggaatgctcaaccgctaggga

SEQ ID NO: 44978 - DNA, 307 bp, Glycine max
  unsure (1)..(307): unsure at all n locations
  Clone ID: PAT_MRT3847_140614C.1
tctgnannntagtnagtcggantncgnntngngntntanaangantntatctgtcttcgttttgttgttncttgngntcntcntcgttcgttngttctnnntcgcgtagatnggncaattggnggaganngagangtttgntttnnaggntgagatnaatttgttntgagtntcatnatgaatggtttnatntantnaggatngntattngtganntnataagnangntttgntggtttggnnagattagatttgagatttgaggganangagnagntagngtnggnnagnttgtaatnnnttttnc

SEQ ID NO: 44979 - DNA, 360 bp, Glycine max
  Clone ID: PAT_MRT3847_140615C.1
gaaaaaaaaggtttatcatctgggggccccaataaattaaacttttccaatattttttacgggcaaaacttggttaaatacctgggaaaatgaacccaatgagggggaaaatttattttatagttgaatggaccttttgggaaacacccatttctttccccttaattaattttctgggtttggggcaaatttttaaaaacctgaaatataaagccccttggaaaaaataaccctgtgccttttaaaattatcgggttgtttctcaggataaaaggtagttactccatgcggtgggactttgaaaatactggccatcttcaacattttcaagaatctttgggatggctcccccttttttgg

SEQ ID NO: 44980 - DNA, 368 bp, Glycine max
  Clone ID: PAT_MRT3847_140616C.1
agatctcaaaagtgaaaactagtttatcactaagagaaccaattactggacaaaatgacagtggtactacttactctattgttgtttataggtgcagcagttgcacaaaaagctgccaatgccacagctgccaataatcctgcacaacacgctagcgatgaggaacccattaatcttgtacaagaagctgctggcattggtgatgccattactcctgcagaaggcacagccactaatcttcaagcgcatgagtcaggtagattcaaaaagtttgtgacacattgcaggatcacatgtatgctcaaacatgcagtgcaaatgatccattgcatcatcaggaaggcgcccatgaaataaacatctcccct

SEQ ID NO: 44981 - DNA, 322 bp, Glycine max
  Clone ID: PAT_MRT3847_140617C.1
atttttaattatatcatatatgatgcacaatcaagttgtaatggtaaattcataaagaatctttggagatgagaggagattcggccccaaacataacaaaaatgggtacaaacatagaaagtgagaaggaccaacgttgtgctacaaagtgaacctcctatctatattgaaaagttcgatgtattaacaagtctactggtgaagcatgatggattcaaattaaccactgtccataaatccttataaacacatttgttacaaattggcctacccatttgtcctccttttgttttttcaatattgcatggcaagggacataccc

SEQ ID NO: 44982 - DNA, 144 bp, Glycine max
  Clone ID: PAT_MRT3847_140618C.1
ctcacacacacccaaaaattacatctaaaatttatgacactgtaaaatctacaccttatcgggcatatttcattgcatatattacatacttccttcatactcctactgaacttccaaatatctagactaaaactaactatacaa

SEQ ID NO: 44983 - DNA, 432 bp, Glycine max
  Clone ID: PAT_MRT3847_140619C.1
atctgtaaacaaaaaaaaacaggggtatccggaatacccaatttgttgtggaaaactccaggaacaaaggcggctcgcaccccatcagggtatacacctattagaccacgaaaaaaaatatgttcttctaacaaaattcaggggggcattatcgtcaaagaaaaaattcccatgtgggggggggggggcaacttcttttcttaaaagaaaaacacaggggttgtgtcccaccaatggcaggggataaaagtttgtaaggccctaacccataatcttccttttaaaaggggacttaaaaaggccatgactgaaccggggggagcccaggatttcccaatggaaaatcattagcgttccccaaaatgttcttttttccattatccgacacagctgctgaagaggaacccccccaaaaactctctagaggggggg

SEQ ID NO: 44984 - DNA, 588 bp, Glycine max
  Clone ID: PAT_MRT3847_14061C.1
ccacgcgtccggggggctccttatcttacctccagtttgtctgaggtaagaaatggatgtggtggtggggtatggcgtgaacacagcggggaccaaaccgcaatagatctccgtttcgcggcaaacaaacacaaactagctgtcttcaccggggacgaaaccggacctttctttggcttgctcggggccaccggtacccttgtttattgctgtgactaactcatgaaggaggatgcatctctgaaagtatattggaggacatagagactggcggacctgctgctatgaagagggactggaatgatgaggaggctctgaggaagttgggacaaaccatgggaggttccttaataaacgtgtaaagggattaaggaatattgagggaaactctgccttagtatcaagcatggatgctacaaccagagggaattagctaaggcgatgctgtacaagaccagagcgaaccggttttatttgcagtgggccatcacacatctgtaaataaaacattataccgtgttaggagatatgtaacccatgagctatgcttggatgaccatgggaggcgttcatcttggtggatcacta

SEQ ID NO: 44985 - DNA, 208 bp, Glycine max
  Clone ID: PAT_MRT3847_140620C.1
gggctatgccttgttcacacttcaagtccaactgggtcgtgtgaagtgggttagagatgttataaaagtataaaataattcatatatctctacctaacagttttagctttctagttgattcatgacacaatatctggaagataatgtccccactccccatttgaaaattgatagtcattcccttcatcacaaaaacacaatttttttt

SEQ ID NO: 44986 - DNA, 351 bp, Glycine max
  Clone ID: PAT_MRT3847_140621C.1
ataatttctattacttctgctgaaatcattagtaaataaacagcaagcaatcttctctaaaatttgagctaaagggttaacaccatagacgaaacttattgcgctgaatctggaattctggattctgttcccccattcaaaatattgctattcgaaatctgaatatatgagtgtgctagggatcatcttctatgcttgctgtcacaagtattctgctaattatttttgtttaaaaaacccatgcatggaggacctgggctgggattacatacttgaaatagaatgaagcatattgcttgtagttcacaattcaaattaagtttcaaatttttgtttaattcaaatactaat

SEQ ID NO: 44987 - DNA, 138 bp, Glycine max
  Clone ID: PAT_MRT3847_140622C.1
aaaacgcctttttgtgtgcttattggtctcagacctgagaacccaaacctcccatactaaccggattgctccgcgcgcacctattatctggctcgcactcctatctctgcggactcaacaagctctttggtatcccca

SEQ ID NO: 44988 - DNA, 375 bp, Glycine max
  Clone ID: PAT_MRT3847_140623C.1
tgaaagagtctagcaaccgagttacatcatacaatatatacatggtatggtacgtttaaagagcttaagattgaggggctataaaaatgcacgttattgtttaaagcttctcaattctcaaaggaccaagtactcaagttgaacaaccagtttcctggcttcttgcatgtcagagtctcattaatgaaactgattacgctcttcaattgtctaaaagcattatggatgggtttttttccggcatgttgtcaagaagcatgttaagcacaaactcaaggcctcctcatttggatcttaaaatgtttactgtttgtgtacgggcttatgaaaatattcacaaatatatgatgtttttagaaagaaaaaacaacaaaa

SEQ ID NO: 44989 - DNA, 310 bp, Glycine max
  Clone ID: PAT_MRT3847_140624C.1
aaatggaaacaggtgagaaagtaagataacctcagccaaagagcagaacaaaaattttgagtggctgccaaaaaaactgtcgttgttaaatgtcaatttcaaacttgccacttgcgtggaagcagctagctagcggattaaccgcatggtgtcggcttttcggaccatagcctatgaagtctgaacatgcgttgaggtcaaaacagcaaatggttacttctcacaagctgcacctagcattggacttaacgctgaatattgtgcccctgactgtgaccgctaactggaggatcataagcttttgagaaag

SEQ ID NO: 44990 - DNA, 407 bp, Glycine max
  Clone ID: PAT_MRT3847_140625C.1
cccgagcccaaatccgaactaacgaacccggggacgggacgcaaaaactcttttaaggggccaccaaaaaaaaaaacacggggcggggtttaaaaaccgcgggacgggaaaaacccggggggcccccaaataaaacggctgggaaaaaaaccccctttccccagggggggtaaaaacaaaaaggccccccccaatggcccttcccaaaaattggccaccacagaaagggaaaagggaccccccctgggggggcacataaaggggggggggggggggggttacccgcaaagagaccctaaaactaggcagggccctaaagcccgcaaaaaaaagtttctttcacatctttaccgccaagtggggcgggtatccccaaaaaacaaaaaaaggggggccccctgaggggc

SEQ ID NO: 44991 - DNA, 154 bp, Glycine max
  unsure (1)..(154): unsure at all n locations
  Clone ID: PAT_MRT3847_140626C.1
gggggagagaggggcgtaaacattttctaacgagtgtctttaaggaatctggaaaccccagggggggttaaaaggccggggggccgttaanaaancnccaaatagtaaaagctgggctgtgaaaatgggaatggaatttgaagtcccaaaaccc

SEQ ID NO: 44992 - DNA, 345 bp, Glycine max
  Clone ID: PAT_MRT3847_140627C.1
ataaacacttcatgatgcttacataatcatacccggaaacaaacataattgaactttcaaagcaacaaagcacggaccatgatcttaatacaatttatttcataaacattttcaacaaactcttaacaacttatttcttttccttatcctcatgttcattgtgttcagtaggacacttgttgagatcgaactctgcagtctcattatgctttaaaatggataagcatcaggtggtggcatcaaacacatgtcaccattgaagtagatccttctaggaaaagcccaacccttggccaaaagtaaaagttgcgttatcctttcggaatagtagctctgcttgaacat

SEQ ID NO: 44993 - DNA, 394 bp, Glycine max
  Clone ID: PAT_MRT3847_140628C.1
acgcgacgcgtccgcctacccgtctgtgagaagtaggacgaagacgacagcactgatcaacagcacctggcagatgcacctacgtctttagacatagctgacgcgtggactaagatataaagtctgcgctgtgcaatcggcatacatttgatccttgattgtttctatgcagcgatcaaacaacacagaacactgaacctgttcttatggatttggcgactaagaagacgaagaacaacatgcaagacgtgtaagttgacgatcatgaatagcacactgagaagataagagatgaacgttggccatgctttggtgcagacagtggtagaaactgcatccactggaggtagccgtgaccaaaacgtgatcactcctaaggtgaggatgaacgatg

SEQ ID NO: 44994 - DNA, 263 bp, Glycine max
  Clone ID: PAT_MRT3847_140629C.1
atctctcatatctcttcttattttctccccaatccaactcaacccgggtccgattctttttataaacacatggccattctctttaacctctcaataaaagaatttaaatcgcttcaaataccaagttttaattaaaaattaaaattttaataacttaactgttgtgtaaaacaacccacacacaccaacctttgaaaccaagacaacaccccataatattcaaccaaatcaattctaacttacaaaacttctaaaatgttttt

SEQ ID NO: 44995 - DNA, 350 bp, Glycine max
  Clone ID: PAT_MRT3847_14062C.1
ggctcgagctcagaccgatgttaggtagtagagccataattggtgatgttttttgaacctatgccggacgctattgtcctttagggactctccatcggcgggaaagctgccatccgtataaccttggacctatgtgctgacgagcgtccctacagccactggaagttgccggcgctctagacctaccataaggacgcgatcacgaagcgactagcccaataactccgaaagctagtccttcgtgcgggcgatcgcgaagttcatgtgctaccgcggcctcatgcccacgcgctacacgctcgaaggcgacttgatcgacgcggctcagctcgacgatctagacttattga

SEQ ID NO: 44996 - DNA, 545 bp, Glycine max
  Clone ID: PAT_MRT3847_140630C.1
cggaattaccggaccgacccactcgcccgcccacgctgccggccccgctgaaggaatcgctaaggagggcatcattagcagggggagggggtgctacaggccacctctcaagctctctgcttacatttagggaccacccgatcccgaatcggaaagcaatcgggagcctcactcagcaatgctccatagctgccactctatcagatcatgagaatagcagaactgttgacctgaccagcgaaccgccagggcaaacgacaaggggtagaaggacatgggtcgctacgtgtccactccaaaggattctgggggaaaaagaaggaggccagggagaacaggggagggaacaacgcatgtccccgggctaagaattcctaaacccggcgataatgcacagacactgggggaaaactcggccaagaataaaggggagcgcccggctgcccataaaacccgcatagatggaaaggcgggccagaagggcccacaattacaagacaaaaaggaaaagggccccccaacagggagggacaacactggctgaa

SEQ ID NO: 44997 - DNA, 954 bp, Glycine max
  Clone ID: PAT_MRT3847_140631C.1
tctggtgttctttcacctcaatccaaaccaatcaaaattattcttctaaatactaaaagcacaagtggataaccagtccaaccaaggctccaattgaaccaaactaagatgccagaggcactacaatggagtgtttgaaaagccaaatcccgcttttcaatgcacgttgaacgtcaatccaacatgaaaattcccctcaaatgttggattgacgctcaacgtgatgaaaaggtggatcaaacacaccacaaattaatcattgtgaaaaaaaaaaaagacactgtatctataaactgcatttggatccttcctaccacaagcagctgcatgaaaatgagattttacatccaaaattttaagaaaaggggtagggagtggggtttcttttgttacagaagcaaataagcaagcacaacagcaaatcaagttagtcatgttagtgtgtctttctacatgttactgtgcaaaatggatctgtctctatagactgtacaaaaccaatggcatagagaaaccctacaaatatcatatctgacaacaacacttaatccgctgaggaactggtttcagccgtttcatcctcactaaagctagatggcatctctgcagcagacctttgactttttcttggttccaactcagcaacagatgattgtttaacatcatattgttcaagtggatcaactttagcccactttgcaaccgtcatttcatttgtaagcaccctaacttcatctgggatcacgatattgtttttttatctttctatccccatcaaacttctcttcctttgccatccttttattaagccctcttctttctccagtatccaagtaaacttgagacttatgtactgaatttgaaggtttagatttcacatattcacccctttgtacattcttcaggttgctgttttcatagccatgtagcagagaatctgtctggtgccgaatt

SEQ ID NO: 44998 - DNA, 276 bp, Glycine max
  unsure (1)..(276): unsure at all n locations
  Clone ID: PAT_MRT3847_140632C.1
aggcttgagcttcttggtcggcacncttcgtaaacccancgatcaaatatgaatnaccacancagacagagacncaaacactccttaacantnttcacggttccgccgccgaaaccgaatcgcgttcacgtttagtanaangttcctagattctctcgtttgtgcgttccagtangcncnaagaggnacacaaggaacgatgnagggtncaacgnggagggnggcgagctnngttccttccgccaagcttcgcggagaagaagganaggcnnntct

SEQ ID NO: 44999 - DNA, 1648 bp, Glycine max
  Clone ID: PAT_MRT3847_140633C.1
gatgcaggaaccaggattcacaaaactggtgagtttttccaactctgctgttgtcgtacttgtgtaaatacattgtatttagaaatgttttcattagatcgatccgtagatttttcttggatcttgcatgtattctaggaatgagatgcttaattaatatttttcaacattgcagccctataaataatgttttcatttgactacagctttttccctcattttatattttcttactgggtattatagacaattcttctaccacgaaatcaacaatctgcaaagataaaataaacaaaaagaactcgaaagaaggaggaaaacaaaaagaaaaatttagtaactaccgataccatataataataagaatagtattattaaaagagaaagggaagggaaggtaacacgctatggcggcggaatcgggtggtagtgctacgaacttgaactttgatcttcccgaggaggtggtgcaagtgctaccgtccgatcccttccagcagctcgatgtggctcgcaagatcacttccattgctctatcgacacgtgtcaacaccctcgaatcagacctatcctcacttcgcgcccagatcgccgacaaagacaacctcatcgccgaccttcaatctcagctcgactccctcgacgcttccctctcccaaatcgccgccacactcttccaaaccgaacaggataaggagagcttgctccaggagaatgcttcgctttccgacaccgtcaaaaagctcaatcgagatgtctccaagttggaggttttcagaaagacgcttatgcaatcacttcaggaggaggatgataactctggagcagctccagacattgttgctaaaatacagagtcaagcaagtttgacttccacgtcgcagattggagataatgatgtttcattgccaccgtctgtatcttcttcaacaggaaattcttttgccaaggatcatgaatctgatgccataagacctagagtatcacagaatctcctcttagcatctcaaggttccacccctcggattactccccctggttcccctcctagtttgtcggcatcagtatcacctacgagaacatctaaacctgtatcaccacagcgacattcaatttcctttgcaaccacaagaggcatgtatgatgacaggtcttcaatgttttcctcaatgtccttaactcatggttcaatatcaagctctgatgcaggaacaggatcacaaactggacgaacacgggtggatgggaaagagttctttcgccaagtcaggaaccgtttgtcttatgagcaatttggtgcattcttggctaatgttaaagaattgaattcccataaacaaacaaaagaggaaacgctacggaaagctgatgaaatttttgggcctgaaaacaaggatctgtacactatatttgagggattgattaatcgcaatctccattgacattgtgcttaggagaagttttattccaaattagtaataacggatactatcgtgcatgtctccttatttatagcaacttttttttctcccctctgtataatacaatacttttttttgaacatgaaaaccgaatgacagtcttggcaggactacaaggttgcagttggtttaaatgcagtatggatgggaggtactctagttttaat

SEQ ID NO: 45000 - DNA, 1559 bp, Glycine max
  Clone ID: PAT_MRT3847_140634C.1
aacaaagcaagagcagacatatttttacctttgatatgttccggcttttcattattttatgttcagaaaaaaatgtggtgcaaggctcgtatgtgtgtaaagtaaaaactcgtagtacaagttgaaatacattaggggagctactgcactcagtatattaactcacctattggaaacggcaaatgatcatccaccgggataagaaacagtgggctcttggtcaaaagccgaagaacaatatatatattagcacttcacatatatttctcaatacttgttacagtttccactgaaggggaatcatcacttgctgtcatatccaatttgagggcatgccttgtgacgcggtttgtctgttttctcaatctaacattatcgatgaacaaatctgctatgatctttctcacttcatcatcacagattacaccatcttttatgtcattcgttttatctacattgcaagctgcacttccgtagtccttctctaagttttctacctctgctagtaggatgtccatttggtcatcagatgtcgttaattgattaaaagcatcagttgatgatgatgaattcacaattgtcctaccttcgtattcgtaaggaagactgacattgcactcttgaagctggttgaaaagaaccctgcatttctccagcagtattctccgagccacttctgcctgctccctcttctctctttcgtgcagaagtagtttctcagtttcactgtgttcctttatagactcactaagttctttctttaactttgtttgggaattacggagagatttgacctctttaaccagaactttaacatctgctttggatttggcttctagctctccatactgttttgacaaaatttccagctgctccttagtagcatctaaattctcatacagtacatcattctgctgaacaattgattccttagtcaaatcctgataagaatttctccccgattcagactttaatttcatctccatttccaatgattttcttctaagttcctccatatcccactgcatttgggtaaacctttctctctcaattagaatagcctgctgcaagttctccttatttttctgtttggtagtttcaagttctacttccaaatccttgagctttgttgcgagaaaatcctttgcagctatttcttgatttaatctaactataaggtcctccatatcagtttttgcagtgcctagccttcgctgcatggttgaaagaatcctgttcaatttattgcgttgatctagtggaaggactaattgagtatcaccagtagacttcaactttgtgtggcccataatatctgtctctcttgaaaccaaagcagatccaggaaggtcatgagagccatcaccagatgaatttggaatcccaaaattagacatgtcactacctcgtattgagcttccatcgctttcaacactctcatttgaaagcttacgaacatgaccaaacaccttagcatgcccaggctcagagaaaagctccatgttattattagctaaaagtgaagaatcatataaattaccattatttttgctcgagcc

SEQ ID NO: 45001 - DNA, 538 bp, Glycine max
  Clone ID: PAT_MRT3847_140635C.1
ggtttggatgctttaagttggaggattccacttgttagtgatattccaacaataatatttggagccgatgtaactcatccagaatcaggagaggattcttgtccatccattgctgctgtaagcatttccaaactcatatatacaactaagggatgccctatgtttgatatatactgattacggtaatccaggttgtagcctcccaggactggcctgaagtaacaaagtatgcaggactggtttgtgctcagcctcatcgagaagaactcattcaagaccttttcagatgctggaaagatccacagaggggtgtagtttatggtggtatgattaggtacttaaccagcgtctcttccaattttgtgtctatgtcaaacatgtttgcttaaattttatactttgtttcaaattcatatagggtcccctgttgtattgacctgatttttctttaatggcctcacaatgtatcgggttgtcactgttccaatttcgaattatcaaaggctcacagtctttatggattcaggctgaagcttta

SEQ ID NO: 45002 - DNA, 271 bp, Glycine max
  Clone ID: PAT_MRT3847_140636C.1
ttaagcggcgcttttggtgttttttttttttttttttttgaaaaaaagcatcgttatatggatgtattataaacaaatgtaatattggacattgaaattttaaggacatatataaatatatggccatgaatgagttaaaaaagaatgaaaacgtaaggattttatataaggtcaagaacgtgttaaacgaacaaattataagataggttttaaacggatgttggtatatgtgaaataagactactgtaactgttccgtttaagatagaaag

SEQ ID NO: 45003 - DNA, 345 bp, Glycine max
  Clone ID: PAT_MRT3847_140637C.1
aaaaggacccaaaaaaaaggggcccttaattttttaaaaaaaaaaaaaagctggatgaaaccccagggggttttgtaaacaaaaggggcctccaaataaaaaccctaaacgggggtcctttttttttaagcccccaaaccgaaaaaaagcaaataaccatccctttccttgggggtaaaaaaacattaattgggggcgggaaaaaaaaacccttttaggccccaaaggggggtggcacaaactgaaagcccccaacatccaatagggccggggggaaacctccccccttgacaaagttgttattggaccccaggggctcatttttataaatggcccccccctttt

SEQ ID NO: 45004 - DNA, 1137 bp, Glycine max
  unsure (1)..(1137): unsure at all n locations
  Clone ID: PAT_MRT3847_140638C.1
tgagattattttgggtgagaaacaggattttgctccaagatgtattttacattctatgctaacatcctcagttctactgtaaaatttgatatactggtgatttcaaactattaaatatgtcacatactttaaagtttgtatgctcacctattgtttgtttctgtgaatagaaaggctaactatcatattcaaaattcggtactaagttagcatctgtatatcttcatcaatatcactttcataaatttaattggtactccaggaacaatgttgttgcctgtgccaagcattttgttggagatggaggtacagagaaaggtgtaaatgagggtaataccatactatcatatgaagatttggagaggatccacatggccccttacgtggactgcatagctaagggagtttctaccatcatggtctcatattccagctggaatggaaacaaactccatggtcaccattttctgcttaatgaaattttgaaagaaaagctaggcttcaagggatttgtgatttctgactgggagggaattgatgaattatgccaaccttatgggtcagattatcgtcattgcatctccactgccattaatgctggaattgacatggtgatggttccttttagatatgaaatatttgttgaagagttgatgtctctagttcaatcaggggaaataccaatagcaagaattgatgatgccgttgagcgcattttgagagtgaagtttgctgctgaactttttgagtttcctttaactgacagatctttgctagatgtagttggtggcaagctacatagagatctggcacatgaagcggttcgaaagtccttggttctgttgaaaaatgggaaggatcctagtaaaccctttcttccattgaacaggaatgctaagagaatccttgttgctggaactcatgctgatgatattgggtatcaatgtggaggatggacaggtaccaagtatggatctagtggccggatcacaatcggcacaactatcttggatgctgttaaggaagctgtgngaaatgaaacagaagttatttatgagcagtgcccatcaatagacatcatagaatgtagcgaagtttcctttgccgtagntggggtcggagaaggtcctacgctga

SEQ ID NO: 45005 - DNA, 531 bp, Glycine max
  Clone ID: PAT_MRT3847_140639C.1
aaactgcaggtacatacatgacttgttattaatgggggcaagatggagaatcaattgtttccatgaaacattgcactttaggccaacctattttttgaccaaatagtagcagtaaaagaattattatttcaatcgggtaaccgaaaaatgttacacctgacctgagttttgtggccaacatgatgtggacttttaatcaaactaaaaggcataaataggccatcaagaggattctatttgcagaggttttttatagaactgcagcaaaagaaatgaggaaaccaccctaagagaggaagctgccatgcaagcaccagcaagccatgggggcaatctgattccagcaaaggggttcaagactccagcggcaattggcatgcctaaaatgttgtaaccaagagcccagatgttgttcagccggatgcgcgacatggtctttcttgataagtctatggctgtgatcacatttttcaaactggttttgaccagaactttttttaccgcttttattgcttatttcagttcccagca

SEQ ID NO: 45006 - DNA, 1171 bp, Glycine max
  Clone ID: PAT_MRT3847_14063C.1
ccccacgcgtccgctcacattcatccacttttcttcaaagtcttcatctcatatcctctttgttgtgtcctcacacgagtgtaggaacggcattattgtgatggagagccaggatctttcttcgccaccccacgtggacgcatctcgaccgtcccttgggttccccttgggcactgcccttctcttgatcatcatcttcaccttgagtggcgtcctctcttgctgctaccattgggatagggtgtgttccctccgtcaatctttctctgattccgaaccccaaatgccttcctcacccaccaaatctaagcactccaaggaattgaagcaaaacaggggacaaagcttgccagtgttgatgccaggggatgatgtgccaaagttcatagccatgccgtgtccgtgccagccttcaagaccagacagcatcgttgtcaccgtcgaaatggagaagccaccgcccaaaccgccgcaactaccagtccctttctatttgtaattagctgcttccaaggtttcaaaatgggccaagattcttctccacaaccacaattttcaaaatatcaattatcaaagatcacagcgaatcttctggaaccacagtatcatagatcacgacaaaacttctgaaacctaaatttaaaaatcttggctagttgtgctactgcttctcatcacatgtttctatttcccaccatttgttgtactaatgtatattcattttgttcacccaaattagagtgtaagaaataaaatgcaaaaaaaataaaataataagggataggtagggttgcaggtcaattcgtagattttgagatcaatttcatttgattcaatccatccttgtgtagtatctaaactattaagcagtttctagatggtggatattgcatctgagacgcacgttgaagatgaagctatgcaccagaggcattcagctaggacgaagcagctacccaagcattgtgatatctaccaattaggatagaagggcttggggaatggggtaaaagctgtgggtagatcgtaggcagggaaggtagttacgtgttgttcatatagttagagcttagcaacagcagctaaccatttactgttaagcgtgggtcctcacgttataaaagttgtaaccaacttgaagaggatatggataatccagaagtttcctttc

SEQ ID NO: 45007 - DNA, 489 bp, Glycine max
  Clone ID: PAT_MRT3847_140640C.1
ttgatttgaattttattgtatctgagcttgtacttcagaatagtcaattacagaaggttcgtcttgtagggaggttaaatgggttcccaaactgggttgccaagctacaaaatcttgttatgttgtccttgtcacactccaagttaactgatgatccattgggattacttaaagatctaccaaatttgttgtgcctcagtatcctttactgtgcatatgaagggagctgtttgcattttccaaacggggggtttccatcagtattgaaaatggagcattgccttctctcaaaaagttgaagttagttagtatctcccaactgacggaggtgccttctggtgtctgcagcttaccaaagcttgaggttttccatgcaattaatatgtcaaatgaatttgaagaaaactttcatagcaaccgaggacaacgtgctcaatggataatagagcaggtgccatttgtaagtattgtcgatcgattttggcgtga

SEQ ID NO: 45008 - DNA, 316 bp, Glycine max
  Clone ID: PAT_MRT3847_140641C.1
tcagcacatacttgcactgtatatggtattgccatggttgcccgtgctggaatccttctggaggatttgaagttggaacaatttaacccaacaggtttatatggaccaggtggcctaataacaaaaggatctcggggtgaaggtggaattctaagaaatagtggagggtgaccgattaatggaacgatttgcccttactgcaaaggatctggcatcaaaaaatgtagtttcaaaagcaatgacgttggaaattcggaaaggtcgtggtgtagaacccttgaagaatcacatctatctccactggaataactaaccc

SEQ ID NO: 45009 - DNA, 389 bp, Glycine max
  Clone ID: PAT_MRT3847_140642C.1
ttttgccagagatgatggtctctttgtttcggcgacgaacacactgcgtcgcatccttaatcttaatttggatgatgaatgagacaggaggagcaagaggctcctgtacataaaaaaaaagtgcttttggtttgtgggatgggggttagtgttagattaggggtgtatagaatgaccaaataaaagcatgtagttttagtttgtgtagctttcagtatggtggtggtacccttgacaatggtgattgatgatcatggtggagatcatggaaatgttaggctcttttgggagcagggtttgttttgtgacatggatgaatgggttggaagctgaatggttggtacggttggagtggcacagaatagacttggatgatagtgaagaaagtt

SEQ ID NO: 45010 - DNA, 362 bp, Glycine max
  Clone ID: PAT_MRT3847_140643C.1
ataaaggggtaaaagaggcgagtcccacatgaaaggtgcaaaatttctctcctagttccctcctcccctgttaaaccaaacacagccttatatgacatttggctgttattaggaatgattcccggaatgtcaatcccaaaacttttccaaggtcttggaaggcccattttttgatgcaaaagttattccgcgattcatcccaccctgaggaatctgggtgaatttgtgggattcctcttggctcagctcccagacaaatatggcaaggctctgattcatcctctccttgttgaacctttacacaattgcaatcgccccttgctcatatatccctcttagtgcaatctgggccctgctcttct

SEQ ID NO: 45011 - DNA, 1364 bp, Glycine max
  Clone ID: PAT_MRT3847_140644C.1
tccagggggatgaaatttctctgcaatcaaacagtttaactgtcaactcaaagatggatatggaagtcacaagtagtttacaaactgttgaaattgatgacagccaaagcccatctttgaaggctgcgaagcaattgatttcagagacagtgcagaaaaaatcaactccaaggttggatgaggaggagacagttgcagaactagcaacagatgccccggaacatcctagtcctatctcagttcttgatggctcagtgtacagagatgatgtgccatccccagtaaagcagatatctgaagattcaaaaggtgaggatgctcaagaatccaaagaaaatgagattaaagatcagtggaaccctgaagatagcctttcatttaacagcactggacccctagagatcaatcgcaagaaattacagaacataaatcaccttgttcagaagcttcgacgactgaactccagtcacgatgaagctagaatcgattacatcgcttccctgtgtgaaaacacaaatccagaccacagatacatctccgaaatattattagcttcaggtctcttactcagagatctgagttccgagttgctgacatttcaacttcactcgtctgttcatcccattaaccccgagctattccttgtcttggaacagaccaaggcaagtagtctgctttcaaaagaagaaagcatcccaggaaaagacgctaattcgaagctgaacaaagagaaatttcacaggaaactcatctttgattctgtgaatgagattcttggcgcaaaattcagctcctcccccgagccatggattcaacctaacagtaacagactcaccaagaaaaccttgagtgctcaaaagcttcttaaagaactatgctttgagattgaaaagattcaagccaagaagccagaatgctccttagaagaggaagatgatggtctgaaaaatattctgtgtgaagatgttttgcatggctcagaaagttggacagattttcatggttacttacctggggttgttttggatgttgagagactgatatttaaggacttggtagatgaggttgtgattggtgaatcaacaggtttgcgagtcaagtcattggttaggcgcaggaagctatttggaaagtagtttgttcaattcttccctttttctcactgatattagatccatataattttcttgtcatttgcttataaaaaaaatttcttgtgtcaaggcatataagtttgcttgttagagctttgattattaattttttttttttttgctaaggtgtaaagaaatttgagttaccatggatttgtggcatacataaatacataaaaactaaaaattcctgttaaaaaaaaaaaaaaa

SEQ ID NO: 45012 - DNA, 359 bp, Glycine max
  Clone ID: PAT_MRT3847_140645C.1
cttcgtttaccattatgtcatttttctgtttctcaacctcgatttttccattcgcgcatgtgctaactctattcacgatcttatctacatataatctcaaaattcttaatttcccaattcattgttcgtaacagttatctatcgacctccccaatcgtacctacatctattctcttacacatttggatactgacttctgtacattgaccatttctttgcccttctcaccgagccacactatcaacattctgcacaattcctatgactagggcattgaaaatgatcgttccacgcattacaattcgaatcctattctctacaatggcgcccaggctaaacctcgattttctttcttgccg

SEQ ID NO: 45013 - DNA, 863 bp, Glycine max
  Clone ID: PAT_MRT3847_140646C.1
cacacatagcagggtatgttcagctaagtgggaaccaaatgagtggtgaaatcccttcagaaattgggaacatggtgaacttcagcatgttgcattttggggataacaagttcactgggaaattccctccagagatggtaggtttgccacttgtagtcttgaacatgaccagaaacaatttttctggtgaacttccaagtgatattggcaacatgaagtgtctacaggatctggatttgtcttgtaacaatttctccggagcatttcccgtaactttggcacgcttggatgagcttagcatgttcaacatctcatataatcctctcatatctggtgcagtcccaccagctggacacttactcacttttgacaaggattcatatttgggtgacccccttttgaacctgttctttaacatcactgatgatagaaataggactttacccaaagtcttgaaaaatcccacaaaatggtctttgtttttggctctagcacttgctatcatggtctttggacttcttttccttgtgatatgtttcttggtgaaaagtccaaaggtggaaccaggatacctcatgaagaatacaaggaagcaagaacatgattcaggcagcaccggatcctcagcatggtattccgatactgtcaagatattccacctgaacaagacagttttcacacatgctgacatcttaaaagcaacctccaacttcacagaggagagagtcataggaaggggtggctatggaacagtgtataaggggatgtttccagatggagcagaagtggcagtgaagaagctccagacggaaggaaccgagggtgaaaaagaattcagagccgaaatgaaggttctgagtggt

SEQ ID NO: 45014 - DNA, 258 bp, Glycine max
  Clone ID: PAT_MRT3847_140647C.1
atggctttccataagataaaagtagtagcttcagtgtcccaggataggtatgatagatcaagatttgtatcccaagatgcctgggaccgctatgtagacaatgtccttggccgaaagatccttccgaaaaggaatatgaagttgtacattacagaatttgatgaattcaggagagaaatagagaggaggaattggcataaggagctcactaacttctctgaagggagcatcgaggtggcattagtgaaagaattctaa

SEQ ID NO: 45015 - DNA, 811 bp, Glycine max
  Clone ID: PAT_MRT3847_140648C.1
gttccaaaagccacagagcctaagtactcctcctgatccgctgctattattacttcatacttctcgatggatgagagtaaaacagttcacatagctgtagttcccagcgcaggcttcagccacctgatcccaatcctcgagttctccaagcgcttagtgaacctccaccctcacttgcatgtcacatgcataatccccacacatggtccacccccaagtgcctcaaaatccatccttgaaacccttccctcccaaaacatcacctccactttcctccccccagttgacctgcctcaagaccttgacacagtttcccaaatccaactcacagtcaccctctccctccctctcatccaccaaaccctcaagtccctctcttccaccacaccctctcttgtggcacttgtggttgacacttttgctgctgaggtacttgactttgccaaagagttcaacctcttggcctatgtgtacttccccttggcagccaccactgtttccttgcacttccacatgctcaagttggatgaggagacatcatgtgagtatagggacttggatggccctattgagatgaaagggtgcgtgcctttccatggtaaggatctttactccccagctcaagataggtctagcagggcttataaaatgatgctgcaaaggataaaaaggttcttttttgttgatggggtttttgtgaatagcttcttggagatggagagtggtgtcataagggcattggagaaaggtgggaggtggaaatacaagtaccctcctgtgtatgctgttggaccaattgtgcaaagtgggg

SEQ ID NO: 45016 - DNA, 350 bp, Glycine max
  Clone ID: PAT_MRT3847_140649C.1
cgcgtttagaccttttgagctgccaaattatagcaactttctttctctatccgaagaagaagaggaactgaaaaaacttttgtggaggtgctatcacttcagacttcattggtgtgaagagtgttcgtatactcgctgaacactatcttgtgtgcgagctgaaccctttctatgacctacttggttttgataccaccaccaccacctccaaccaaccaccccttacatacaaaaaagtggtgtcatcatcgtgagaagatcataaatagaattgggagtgcagaaaagactagtggagggctatctttgaagaacgtgtacagaggaatcaggcacaggccgtggggcaa

SEQ ID NO: 45017 - DNA, 996 bp, Glycine max
  Clone ID: PAT_MRT3847_14064C.1
gtaagacgccggcaatgtccgctgtgagagttcaagtttcggcgtgtgcggtttccgccaccgtcaaccaccttcgcctccgccaaaacgccgtcgtttccttcaggaagaagaagcctctcactctcagagtggtctcaatgtcttccgttcctccttcccaacccttcgaaatcgccgttaaagcttccgtcaccacacccaacaggctcggcgactgccctttttgccaaagggtgctgctgacactggaggaaaaacatctaccttatgaccccaagttggtggatttgaccaacaagccagaatgggggtcaaagatcttttctacatttattggatttctcaagagcaaggatcccaatgatggaacagagcaagcattactaagtgaactgagctctttcaatgattacatcaaggaaaatggtcctttcatcaacggtagtgagatatctgcagctgacctatcacttggaccaaagctataccatttggagattgctttggggcattataagaaatggacagtgcctgattcacttacctctttgaagtcttatatgaaggccattttctcgagggaatcgttcgttaaaacaagtgcacaaccacaggatgtcattgaaggttggcgtcctaaagtggaaggctaatattcactgatcacgcactatcatttctatgagactctgaggactataccccaacaaatagcaatccatcaagagttctagacctatatcgttttgtattatataaccttatttatttattcactatgcactatggaataattatttattaagaatagttgttggcctcagattgtaacatgcttgatagggaggccacaagacttgcattgcatgtagatgaaaatagttgcattcccaaaaataaataagaattacattccttattttgcttaagcaagtgatgccctatctaaagaataattttatgattagcaatgggataatgattattgcgccc

SEQ ID NO: 45018 - DNA, 338 bp, Glycine max
  Clone ID: PAT_MRT3847_140650C.1
gggatgaaaactaggagataaacgaatggaagaacatgggggcaaggacgaggggggggcccgaaaaaatcggacgggtgggcggaggggacaacctagaaaaaaaaagagcgggaataaaggacggggaaattttggccaaaccgggtttccttaaagaagaggttattagaggatacatgaagcaaacatataacccgaaagatggagggaaaagaaaccgggggacaaaaggggggaaaaaaaaaaacttaaagcggggggtgcaaaggggggggtgaaaaaaaaaaaaactggcgggcaaaaatggtaaagttattggtggaaaaagggggggg

SEQ ID NO: 45019 - DNA, 187 bp, Glycine max
  Clone ID: PAT_MRT3847_140651C.1
ggactagcgtgatctatcgctagtaatgtgccagagtcctgtcacactgtgctgcggtttcagatgggccagaggcttggctagtttggtcgtaggagccccgtgtgtgcgtggctactccgacgcagtaaatgtaagggccggcacattgggtgaaaagcactctggcggtggggctagggtctat

SEQ ID NO: 45020 - DNA, 351 bp, Glycine max
  Clone ID: PAT_MRT3847_140652C.1
ggtacacatgtgtgtgtggttatagagatctctagacagagtgtggtgaatgtgagtgtctgtgttctcctcggcgctacattttggggaacaggacagtgacatgcataagatatgttctctctccaagtgaacagtggatagggcgcgtatactcggggtgtgatatgcacattttaggcgtgtgctgtggacacacacaatatctgtggttttgacaatactcgagaagagtgtgttgacacaacaggagtatatatatatggagaactatatatatgacactccaacagagttacacaacactcatatttatatgacagagatctcgatctatatcacagagacata

SEQ ID NO: 45021 - DNA, 279 bp, Glycine max
  Clone ID: PAT_MRT3847_140653C.1
gctcagaattgggctcgcggaaagatttcgggagctttaggattactggaatgagtctcaaggtaaccttagacttggtcctcctgctccagacgggtggatttctgagtttagtcaacaaagggagagatatgagagttccgatacatgggctaactcatctgagctggagtattgtgcaagtggttgggtgtctgggtttgtgcattcctaattgtcatcgctagatctcgtgtgatggatgaacatgtctaagtatgctgcaagggagcaatgtcg

SEQ ID NO: 45022 - DNA, 433 bp, Glycine max
  Clone ID: PAT_MRT3847_140654C.1
taaaaccttattttaattccacctttcaaattttattcaaataaccccttttccaccattctttggatggggggtttgggggctaggttccaaaagggcctatttcctagcatctttcctggaaaccccgcaggttaggccatctctgggaatttccccaactttttgaacaccctcagcaaaaatcacacccattcccatgtgcaaatggggttcaatgtggcaatggaaagccccaactccctgggtatcagccctaaacctcaaagcaggcccaccctatggaaatattactgcagtgttttccagccggtgctggggcaaattgaatttccttctcacaacctgattcgaattccccttcctcccccccccaaatcccaaagttatcccccacgccaagcggccaagggggaatcccaccccccccccc

SEQ ID NO: 45023 - DNA, 357 bp, Glycine max
  Clone ID: PAT_MRT3847_140655C.1
ggctcgaggtgaaatggagctaatttttttttaatagagtttatctgtgatcttgcaccgagaaatgagtggctcagatcagcagtatctctctgttttgttaccggcgcttctcttgttttttttttcatggttgtttctgcggatgcagagcaactcatgttatacttaatgtcttaatcataaaaaacataactgatatgcacggcaaagtttgacattgtgaacacttctcatcctacttttgaaatccactcttttatctgctaatttgttatctactctccttgtaatatggatgtgaatgaataatattcggaagattagttcgtaaaatacaatttctattttatttgt

SEQ ID NO: 45024 - DNA, 686 bp, Glycine max
  Clone ID: PAT_MRT3847_140656C.1
gggcattgaaaactgattacagattcaccaaccaaagctatgaatgccattaaaagacaagggaagcacagagaacaaacacacttgtaactaggagaaagataagaacattattttattcaacaacaaagaagggacctccggacttacatgcgggtatcttaatcagacaagcacaaggactcggttgaatcaattaggacacaagtatgagcttctctcacagcaagtttatggtccaattttccagactcaatgaatttaaatcctccaaaagaaacacataatgctcttgaacatcccctgcactcttttgtcctccaatcatggctgcaacaacctcccaccgtttcaggtggttctcgtctaccacggctaaagcgagctcaaacaacttgttctccttccaactccacccacacaaacccttatgaaaatcatccatgtcactagttctggatgacatcttcagaggactatgaggatttaccataattcatttacattatggtacttttgaaaggctattcatatctcacaaaaattgcttattccttggggcagtcatgcctgcaatcaatgacctgcaaaattgccttgtctttcgtttcattacaaagggtacatgagattaattataatttcaacttatgatgataataaaaggttgattcgtatgtgctgaa

SEQ ID NO: 45025 - DNA, 1207 bp, Glycine max
  Clone ID: PAT_MRT3847_140657C.1
ggagaaagaaagaagtaaaagacgtgagtctcagccggggcatgttctgaagtcttcttctctgcttgtatgcaacggccacagccatagtcgcctgaaaccgattgttgttgcagggaaaacacagagatccgggtcgacccgttgcagatccgatccaaataagaaaagatgaatattttcaggttagccggggacatgacccatttggccagcgtcctcgtccttcttctcaagatccacaccatcaaatcctgcgccggtgtctcattgaagactcaagaactctatgcactcgtttttgcttgtcgctacctagatatctttactaattatgtatctctctataataccactatgaagttgatattcttgggaagctcattttctattgtgtggtacatgaggtaccacaaggttgttcgtagatcatatgacaaagatcaagatacctttcgccattactttcttgtattgccctgcttactattggccctattaatcaatgagaaattcacattgaaggaggtcatgtggacattttccctgtatttggaagctgttgctatacttcctcaactagtacttttacagagaactagaaatattgacaatttgactggacagtatgtctttcttctcggtgcatacagaggactatacattctcaactggatctatcgctactttactgagccccactttgtccattggataacatggatttctggccttgttcaaacactactctatgctgatttcttctattactatttccaaagctggaagaacaacaaaaagcttcatttgccagcatgagtttattcttctgttcttgaaaacaagggtctaagtggacaattaacagtaagcagagaggattcacaaatttgtctggacatagtggtttctgatttacaattgcctatttgttcgttcttgccacctcaaatactactgtactaattactaggaagattatagacaaaaagcatcaatttgtttgtgattgtaatttgcaattttaacttgaaaaagtatttagatctagattgtggcacaatgcttaatttcgatcttttactcttccctttcttcatttaacttgggtagtattaatacagataaagatcgttcttgatgaacactttgttttcatggtaaagatagtataggtaattgtggtgaaggattttaaacaggtact

SEQ ID NO: 45026 - DNA, 280 bp, Glycine max
  unsure (1)..(280): unsure at all n locations
  Clone ID: PAT_MRT3847_140658C.1
gnacaacgaaccactntgaagccgctnacgttatccacaacactctcaacnctccttaaaccctaaccaatccaaaccatggcttcttcttccnacttaatgtaantgcngctgcaagntntcntcctcngccgcnatctcctccttcccctcccgccgccgntccaacgcgtcgttctgtcgaggcgcacgcgccgccagggtctccgccatggccaaggagttgcattcaacaaagacggcaccgcaattaagaagctccagagcggtgtgaacaagt

SEQ ID NO: 45027 - DNA, 343 bp, Glycine max
  unsure (1)..(343): unsure at all n locations
  Clone ID: PAT_MRT3847_140659C.1
gtgtgttgggcttctggccataggcccccacccnccaaccggcattttcaaaaagggacaaaaaaaaaacggtcccaacaccccccgcccnnttttccaataaccgagccttggaacaaaacccatgcaaccaatccccacctccccaagtccccaacccaccaacgggtaccccttttccgcgggcccccagtttttagcttaccaccatttcatcctaccccccccctcccaccgcttccaacaattctttggggaacagatataggcctttagccccaatccccaaancccctncccctcctttccccccccctccctaaacagnnncccccccccctgc

SEQ ID NO: 45028 - DNA, 480 bp, Glycine max
  unsure (1)..(480): unsure at all n locations
  Clone ID: PAT_MRT3847_14065C.1
ctttgggctgatttatgtgcttgcatggtcgtgagaagatcatagaaggggatctaagtataatactctcactgaggggaccgatcacgaagttcattgcatcacgcactttcccttccttcgttctcccccgtcccttcggtctccctagaagacgccgaataagccgcggatacaagccgctaattttacccctttaggcggtatacaccataccacgttactaatccggggtgtcgttggcggcggaccgaagtcaggttggataggaaatctaaatcgtttagccatcgccccgtaagaccatctagaaactccttgcggtatattagctcaacctagtacattcgggacaagtttcggaactactcncataggcatctcatccgaaactgagccctgagagaaattccaccgcgtcgaacttcctaaacgggcggtgcccgcggataacgacacctaaaagtacgcgcgggcacc

SEQ ID NO: 45029 - DNA, 463 bp, Glycine max
  Clone ID: PAT_MRT3847_140660C.1
ccaattcattgcagcttgatgggaatggagtctaagtcaatgaccaatgacagagggcggctgccgctatatgctgtagagccctgaatactctcattaatcagatccagcttgatgtggtggcttccctgaactcgggacaccgaaaattcgaggacagcattgctgcgggttcttaagagggaagattccgcagcagatggcttatgttcgtttctttggtgctgcagatgcttctgttggtcatcgctaaggcaacttcatttttcggctctagcataggattcttgatcaacctgcttgtcctcagcagcggcttcatgatgatcggcattaacttcctctgaggccacctgaggatacctccatctatatgcaccaagtaatgagtctggcatcgcaaataaggacacgcgaggaaagatggatgccatcacacgggatgactgccagtactaatggt

SEQ ID NO: 45030 - DNA, 165 bp, Glycine max
  Clone ID: PAT_MRT3847_140661C.1
atgtatgccaacttctcggtgataatatgttctagttccatgattcttatatgaatcagggacgtgtgcaatatgccaaggcgctgtgaatggctactgattcatgcttgcaagtatcatttgtaagcgacgtgctaaataccaaatatcactctgaatcatatc

SEQ ID NO: 45031 - DNA, 511 bp, Glycine max
  Clone ID: PAT_MRT3847_140662C.1
ctatcctccgtgatgattagatcttctatattctagattctgaagggactgaactatcacgtacaggtgctcatataaaattgcttttggtgaatagtgtttaggaagacaacttttcccttagaagtggccatctggctccagtagttgcattcatccttagtgatgaagagcgcgacagaactcggtcatcaagacaatctgaatgaatgatataacatgatgagcttcttacttccatctgaagaagtgaacaaagcgagagtagatccgagattggaaatactacatcgcactttcgcagaattgatgagtgctccctcttctcaagattcaccatagaaactacatctactcgaagcatatccccaatcacgaagtcctgctagttccagagacaagctatattctgaaactagaagtgtagttggagctcagctcgagcagaaaatgcatgtgaccacagatcaatatatggagtcctgatacacaaatcctgtgtgacaaaatg

SEQ ID NO: 45032 - DNA, 202 bp, Glycine max
  Clone ID: PAT_MRT3847_140663C.1
ttctgcttttgcatttttccatatgtcttggcgcaagccccatcgcttttgatcccttcatttttcgcaaacgcgttggtgactcaacagacatctcccatggggcattacccacgaacattcagtcaccattcttatcttcatagcttggcgcatactcacagctgttgagaagaaccatcaacttgctcttattcatgaa

SEQ ID NO: 45033 - DNA, 523 bp, Glycine max
  Clone ID: PAT_MRT3847_140664C.1
aaaaacaactcctccgccattgctcacccaaccctattccatttccctcactccttcactccttcactcagtccctatcaaaatgcacagtgcaacgcacgccgaagcagagcgtcttctcagcatgcaatcccatattcgcgaccttggcttggactcctccttggagctgcacacagtctcggaggacatggtcgggcaaatcacaatctcaccggcccctttgatttaggtgtcaaatttgacggcgacatcgcaggacctacactgcagtctcatggacatttagaattttttatgataaggagacattccagtgctagtcattgcaggtgctggaggttcccttgtctctttggaatcctgtcaagctatggcctcaaaacttctcaattctgtaagggtgcttttatatgatcagggggagttgcacgcaaaacttataaatgctgtaagtgtgttttaaaggatgagaatcgcaatatgaaatctgatcatgagaaaatgaaagctgttagatgtg

SEQ ID NO: 45034 - DNA, 267 bp, Glycine max
  Clone ID: PAT_MRT3847_140665C.1
tacggctgcgagaagacgacagaagggggaatgaagcaagaatgaagcaagaatgaagcaagatttccgttggtactgtgttcctccctttggactgacttcaaagactcgctgaattgatttccgcctatggcacgagtgatgaatgaataagaaaaattataaagcgctgtttgttgattgtcatttcttacatggagggaacgggatttggtgcagcggcaccgacgccattggttaggttgtggagaactgcgtttttgacgc

SEQ ID NO: 45035 - DNA, 549 bp, Glycine max
  unsure (1)..(549): unsure at all n locations
  Clone ID: PAT_MRT3847_140666C.1
atatagtatttatgatcattagattggtttccttgagaaaatgtaaaataatgtaataaaggtcgggtactgccatnnaaagactcactattgaaacaaccttattgataagagattcattacattatgaaattattgtttcaaatttatagctctccattatgcacttctcctggccctgcgctccggtgctgcgagtgccgcatgcagagctccttttcctggttcgtgtggttctacccgcttctggttcaggtactgctttgttccctcctggcttgccctgtgtcagggtggaaatcaaaccaaccttactcaaaggctatattatggattctgctacattgtgaaggaccggtagttaaacccctcgtgtatgaacttgatagctcaatcggtaaagaaatggggcatgacttagagtaggacttatactggtcctagcaaagtagtcaagtattcaagatagttgtttttcagtgattactctgtgtttgacttcttcacaaataaactatannnnnattttattttatatatatttttcaa

SEQ ID NO: 45036 - DNA, 524 bp, Glycine max
  Clone ID: PAT_MRT3847_140667C.1
ttgtctcccttgttaattagtaaggtatatgactggattacaatatgttgtatactataatttaactagtgatgagttcctgcattgcatggatattttaagaagtttaactttgtatgcattatgatgcttttttcttatgcactgcaagagaactttgtttatccttctctttatcaaaatttatttgttctatataccatatattagtgatgggattcattttttttttttgaaaatataaagatataggtgacatgaatgaaagaatagatggggatgttaaggttcatagagaacaaaattttatttaaagattaagattcattcatatagagataacagcataactcaactctcaagtacactcaaatatgaatacagtaagccctgcttgctcagccctttcatgaaagcttttaaacttttaatagtgaatcaattgctggctcctcagcctacgcttttgagaacaaacaaaagaaaaaaaaaattatatggtgcgttcttaaatggcaaagctc

SEQ ID NO: 45037 - DNA, 571 bp, Glycine max
  unsure (1)..(571): unsure at all n locations
  Clone ID: PAT_MRT3847_140668C.1
gagttctggccatnggggccaaacgggcnggttaaacnggttnaaaaggccttccngggggaaaaattttccgggggcctttcccggaaaggnagggnnnnaaccaatcttncaaantanaccaaccaaattccangccacgatcaaagggatnncgcnaagtcccaaaaantcntatataaactggctcctatacccaanacacgnttttctncccaaaaanttccccacaaaatntaaccctnccctttatggnatacagnccgatncntagangagatagggacttaagactgtttttggcctacgcttgcaattggcatctcgtcggcataggattatggacccacnctgtcgagctaagtcctaagaattacntaaacccttnncctcatactangcacatggnnggaccacggttccttantatgntgtcntatgctgtcgtactatatantgccgtgganccncgtgtggtgtanaangnagtananacnnaaacccnntagtnaggctancttggnttgggatantantacanttantaatctaaanggganagggcatacnn

SEQ ID NO: 45038 - DNA, 270 bp, Glycine max
  unsure (1)..(270): unsure at all n locations
  Clone ID: PAT_MRT3847_140669C.1
aggtnctacngatctggttaccccnggnaanttttttncttaggtttctccggnttcttatctccngagtgncagggggctnaagcacaancggttgactngtctcaaggnttaanctccgntncttcaggngtctnatngctaaagaggtccatggaaaatcctgagggcagggtgggaggctgctataaatcctcatttctccaantatacaggtgnancgnatttaaggcgcnntcttggagtccaaacnaacggctnaagaaggaa

SEQ ID NO: 45039 - DNA, 1213 bp, Glycine max
  Clone ID: PAT_MRT3847_14066C.1
cccacgcgtccggcgggaacccaaagcgcaagaacgcaacatcctcttcagctccagcaatgtccactgtgagagttcaagtttcggcgtgtgtgttttctgccaccgtcaacaacctttgcctccgccaaaacgccgtcgtttccttcagaaagaagaagcttctcagattggtctcaatgtcttccgttcctccttcccaacccttcgaaatcgccgttaaagcttccgtcaccacacccaacaggctcggcgactgccctttttgccaaagggtgttgctgacactggaggaaaaacatctaccttatgaccccaagttggtggatttgaccaacaagccagaatggttccttaaagtcaatcctgatggtaaagttcctgtcataaagtttgatgagaagtgggttcctgattcagatattattactcaaacattggaagagaagtatcccagccccccattgttgaccccacctgaaaaggccacggcggggtcaaagatcttttcaacatttattggttttctcaagagcaaggatcccaatgatggaacagaacaagcattacttagtgaactgagctctttcagtgattacatcaaggaaaatggtcctttcatcaacggtagtgagatatctgcagctgacctatcacttggaccaaagctataccatttagagattgctttggggcattataagaaatggacagtgcctgattcacttacctctttgaagtcttatatgaaggtcattttctcgagggaatcgttcgttaaaacaagtgcacaaccacaggatgtcattgaaggttggcgtcctaaagtggaaggctaatattcactgatcatttctatgagactataccccaacaagtagcaatccatcaagagttctagacctatatcgttttgtactattatataaccttatttatttactatgcactatggaacaattatttattaaaaatagttgttggcttcagattgcaacatgtttgataaggaggccagaagacttgcatttcatgtagatgaaaatagttgcattccctacaataaataagaattgcattccttattttgcttaagcaagtgatgggctaatgattattgtggtgttgttgactctggtcttaattaaaagatatatatctcaaaagcaacaatatatgttattacgagaaataaaagtagcatattcttttg

SEQ ID NO: 45040 - DNA, 513 bp, Glycine max
  Clone ID: PAT_MRT3847_140670C.1
gacgagttgaatgcgaagcggattaaggagtacaggcagaaggttgaattggagctttcaaacatctgtaatgatgttatgacagtgattgatgagcaccttatcccttcggctgcagctggtgaatccactgtgttttactataagatgaaaggagattattatcgttatcttgccgaatttaaggcaggcaatgagaagaaggaagctgctgatcagtctatgaaagcatatgagtctgctaccactgcagcagaggctgatttacctccaacacatcccatccgattgggtctagctttaaatttctcagttttctattacgagatcttgaactctccagaaagagcctgtcatcttgcaaaacaagcttttgatgaagctatttctgagcaggcagagtgagtccgattgttgatgggatcttccttaggattcgatgcatgcgtttgggaatgaaacatgagggccgttacttatccgtgtattagctagagatagggttccattgtt

SEQ ID NO: 45041 - DNA, 213 bp, Glycine max
  unsure (1)..(213): unsure at all n locations
  Clone ID: PAT_MRT3847_140673C.1
cgggggtctgagagaaaccctagctagccacaatgcagagattcgtgaaaaccctaacggggaagacgatgaccctagaggtagagtcagcggacacagtcgacaatggtgaaggggaanatcgaggacaacgacggcatcccgccggaccaggagcgcctgatcggcgccggtaagcagctggacgagggccgcacgctcggggacgacaac

SEQ ID NO: 45042 - DNA, 262 bp, Glycine max
  Clone ID: PAT_MRT3847_140674C.1
tttgacacgcaagaggcccaagagggacttgtttaacactaggaaaggttactctaagaaacactcaaaactaacgtcatagagagctgacaagataatatattttgcagctcatgccaaaattcagaggagagactatgacaccgggcaatagaaggacgcacagctggatcccaagaccaatagcgaggatgacatgctcgagggtatgaatgaatcggccctagcggcatgcgatgtctcgtgaacctattacggaaat

SEQ ID NO: 45043 - DNA, 737 bp, Glycine max
  unsure (1)..(737): unsure at all n locations
  Clone ID: PAT_MRT3847_140675C.1
nataattacccaaataagcaccacccacatgccccttttgtctgcactgcaccccatagacacatagtcccatagccttctcccaatatataagcccaaccctaaaccctcgagccgattcggcctcaaaacacatcacaccttcaaacccgaaccctaaccctagaagaaagaaaaaaacccacaacacacaatcagtactaccaactagggtttttgtcatggctagtttgcaaactagggttttcttgatggcccttctgtgcctgctggctcttggtgcaaccattattccaatggcacaaggggaagtgtcatgtggccaagttgtgagtaacctgaccccatgcatctcctatgtgctatatggtggagccacggttcctgcacagtgctgcaatgggatcaggaacctctatggcatggctcagaccaaaccagatcgccaagctgtttgcaactgcatcaagaacgctgttaggaacagtggcttcacctactctcacttcaatctcaaccttgctgctaaccttcccaagaactgtggggttaacattccctaccagatcagccccgacacagactgcaccagggtgcagtgaggttggtgcatgatgtttatgttagcagtgttagaataagaagccacgtgacacgaaaagggaatggctagaaattgcttttttaaggctcttgtactagtgctcttgtattatgtctgnggntatatatatata

SEQ ID NO: 45044 - DNA, 389 bp, Glycine max
  Clone ID: PAT_MRT3847_140676C.1
tgaggttcgagtcgagggacagtctttacgatgacttaaaacattcaaataagccgagtgaggggtttctaggctcggtccctatctgaaggtctcgatcctgagaggtggttggaagaacggagaaagaaagaggaagagaaagtggaggacaagttgtggcagttataggatgagaaacagaaactgcgaggggaagggttggtgctgtaaatgaaggtgcatgaacaaccgctgctataacttgcacgttagaaaatggcggtggtactctgaaaccaattagagaattatattgtgagagtgaaagcgaaagatcatcgttggaacagattttcaacttcagtgatcaaaccacacaaggtgtgaaggaaaagtacgagaaaact

SEQ ID NO: 45045 - DNA, 338 bp, Glycine max
  unsure (1)..(338): unsure at all n locations
  Clone ID: PAT_MRT3847_140677C.1
gtcgcangcacgcgtacgtaagctcggcgcccttntttntnccnntttttttnggancnagtattgnttaataaaaataantaggggntgaacaaaanttcaattnacttcttaaatacatgnctttncccnccnccatttggggannctgnanaaatattatngncanacagcngcngctttcggggaaanaaaatcngaaattttntgggnatanaagcccggctntatggagttnttagggccctaaagcatggccantgnggtnncncctnagancccaagaaganttttncancccccnttttgtccaaacaagatntcngggtctannctgn

SEQ ID NO: 45046 - DNA, 383 bp, Glycine max
  Clone ID: PAT_MRT3847_140678C.1
gactggaaactgatatcaatataagaaaaagcgatcctatgctgactagttcttatccaatacatgaacacaacgaaccgtttgataaactggcctaatggtaacggtcgtaaatacctatcgatacagacactaggcatagcattactatccttatgaaatgatgcagttaaatcattatccgatataaccttatctggttgatcatgcaggagaaatataattaggagcattgtgcataccttgggagctagaacagaagatagaacattttatatggaatatggcgcatgaaagaaaaagaacaatggagttgcctttatttagaacatatccactgtttgatgcctagctcctgatccaacgagagaactgtatagcaa

SEQ ID NO: 45047 - DNA, 366 bp, Glycine max
  Clone ID: PAT_MRT3847_140679C.1
cacgaatatagtgttgtttggagcgatccgagaaaaactcggctaacatgtgggtataccaggacctacttacaggtgatgagcttctctctgactcctttggttacaaggaaattgagaatggaatgcttgaggaaagcgatgggaagcgtgttgttaaatgagcaactgatgtagacatcggtgcaaacccttctgctgagggtggaagttaagacgagggacttgatgacgcagctttcaaagtcacagacatctatgacacattaatacttcatgatcaaccgctattcaatatgaaacagattagaacctccctgaagaggagtatcaaaaacttgactcccaaactggatgcagaacaac

SEQ ID NO: 45048 - DNA, 2093 bp, Glycine max
  Clone ID: PAT_MRT3847_14067C.1
tcggtatgccgcgcgttttaaatggttgttaaaaatttgttatataattatgcttttgataacagctgttcctaaagctgtctcccttcactttttcgctctctgcttcccattcttgcttctgcttgcttcatgcgtttcatagagctcagcagttgatggactgttaccccaagagcagtgacaagaaaacattaaagaggtggttttttattgataaaagagttgggtgaagtggaaatctgataaatattattttgattggtactctatactccttaaagttcttacattgttgctggactgtaaattgatttaaaatctggatcccatggacttgaagtcgaatcatactcctgttctcactgatgctgcacctgtaacaatctctttctgaggtgtgcattctagtttcatttctttcttccctgcgtttgagctcgttttataggagctcggcagttgatggactgttaccccaagagcagtgacaagaaaacattatagaggtggttttttattgctaaaagagttgggtgaagtggaaatccgataagtattagttcaattggtgctcaatactccttaaagttcttacattgttgctggactgtaaattgatttaaaatctggatcccatggacttgaagtcgaatcatactcctgttctcactgatgctgcacctgtaacaaagtctagactgggtgtgcattccagtttgttgccttactcccatactgggacaacctttacacatggaatgttattgactatcccgaggaagaagacaggaattcttgaagatgttcgttgtagtggttggttggatgccatgaaatcatcttcacctccagccaggaagataacaaaggatgttggtcttgggtttgcatcatctgattctgatactgctggtgcttattttagctggctgctaaaatacccatccgcacttgcatcttttgatcaaatcatgaactatgcaaaagggaaaagaattgcgctgtttatggattatgatggaactctttcaccaattgtggataatcctgactgtgctttcatgtccgacaatatgcgtgctgctgttaaaaaggtggcagaatattttccaacagcaataattagtggaagaagccgtgataaggtatatcaatttgtaggactaacagaactctattatgctggtagtcatggaatggacatcattgggcctgttagacaatctgtatctgataatcacccaaattgcattaggtctacagacaagcagggtaaggaagtaaatttattccaacctgctgctgaatttctgcccatgattaatgaggtacttaattctcttgaagagtgtacgaaagacattaaaggagctaaagttgagaacaataaattttgtgtatctgtgcactaccggaatgtagatgaaaagtattggaatttggtggggcaacatgttcatgatgttctgaagggctatccgcgtttgcgcttaactcatgggcggaaggttttagagatccgacctgtgattaactgggataagggcaaagctgtcacgtttctacttgagtcacttgggctaaacaattgtgatgatgtgcttcctatatatattggagatgatcggacagacgaagatgcatttaaggttttgagagagggaaataaaggttatgggatcttggtgtcttcagcaccaaaagaaagcaacgcaatttactctcttcgtgatccatcagaggtcatggaatttctcaagtcacttgtgttgtggaaatcaagcaccttaaaaagccttatatagtgtatagagggagagaatatactctgctatactatactatatcataaaaacagattttttcgattttggttttctcggaaacattccaagaggtttactggagcagatttacgcacagaagaacctcttttggtaacaacagcgttgtcgctacccagtttttttgctcgaagctcctgtggtagctgtaaattcgtcgactcataattataaatatctcatgtggtagctgtaaattcgtcgaagaattaaagatagcttttgatgagataaaaaaaaaaaaaa

SEQ ID NO: 45049 - DNA, 1159 bp, Glycine max
  Clone ID: PAT_MRT3847_140680C.1
ggctcgagcagaatccagcattgtctcatcaatgacagaacaaaacatcattggtagtggtggatatggtatagtataccgcattgatgttggttcaggctatgttgctgtgaaaaagatttggaataacagaaagttagaaaagaagctcgagaactctttccgggcagaagttagaatactgagcaatattcgtcataccaacattgtgagattgatgtgttgtatctctaatgaggattctatgctccttgtgtatgagtatctggaaaatcatagcctagataagtggctgcacaagaaggttaagtcaggttcagtaagtaaagtggtccttgattggccaaagaggttgaaaatagccattggaattgctcaaggtttgagctatatgcaccatgactgttcaccacctgtggttcatagagatataaaaacaagcaacatccttttggatactcaattcaatgcaaaagttgctgattttggactcgctaagatgctaatcaagccaggggaacttaacaccatgtcagcagtgattgggtcatttggctatattgctccaggtgagtgacttccaaatttttttgtttcctaaatttatttgcttttgcttaatctttttgtatcctaactaacaaatatattgcttttgcccattagtattctgtgtgtgccttatgagtaaactatttttttagtccctaaaattataagattgaaatatttagttgctgacttggtataatttgaggaatcttacactagttttaaaaactctcaacataaagtgtcatgataattgccaagtttttatcattatcattttgacgtacataagatatcttatggaaataattattagcacatgaatcatttagggataggtatgtttcacctcacctgagtatttgaggacatgtactcatttatttgtgactgtcctaaggagatgttcaatgctatcaaaaaacaattaacattgttgtaccctagctaggtaaattatatagtattactatctttgtattcaatttatcctgcattcatctttttaaccagaagttgtgttttgtcttcaattaatataagtaaaatgagtatacatattcattggtataggcattatgttcttacaatttgtccggacgcgtgg

SEQ ID NO: 45050 - DNA, 661 bp, Glycine max
  Clone ID: PAT_MRT3847_140681C.1
tacggctgcgagaagacgacagaagggggaggaggaaacacacaaaccttcttccaagtgttcttcccattattctacattgtcccctctttggttctctattatttattaattgtgcactccttttggttctctaatatttatttccaccgttttcttaaaacaaaagcctcttcaaattctccaacaactaataaccaaaatggccactgaaaagcttagaagttgtgcaaacttccttgagaactctaaaccctactttgccatgattgctatacaatttggctatgcaggcatgaacattatcactaagatttccctcaaccgtggcatgagccactatgtcctcgttgtttatcgtcatgcctttgccactgctgttgtcgctccatttgccttcatctttgaaaggaaagctcaaccaaggataacattcccaattttcatgcaaattttcatcctagctctacttgggccagtgattgatcaaaacttctactatgctgggttgaaattaacctccccaactttctcatgtgcaatgagcaacgtgcttcctgccatgacttttgttatggcagttttatgccggatggagaagatcaacatgaagaaggtgagatgccaagccaaggtggtgggaacattggtgacggtggct

SEQ ID NO: 45051 - DNA, 430 bp, Glycine max
  Clone ID: PAT_MRT3847_140682C.1
ggagctttgcaggatttggagtcgccgttttgaaaggatgagtaagcttaaaagggaggctttgcttaaagccatttaaggaataatggccgtttccaaggagaagaatcgcaaattgggggagcccatcaacctccaaatgggttggaagaactccaatccacaaaaggccaggcgtttaaggggttccgtaaggtggcccaacatccttggcccaaggatgaaaattggcttgctgggggatgctaaccttgttgaaaaggcaaagaaaataggactggcctggttggttgtaaaaccctggaaaaagttaaccaaaattaaaaggtgggggaagaacttagttaaaaaataccatcctttttaagcatttgaggcagtcattaagcaaattcctggtttttggggtccgggtttaaccaaagcagga

SEQ ID NO: 45052 - DNA, 374 bp, Glycine max
  Clone ID: PAT_MRT3847_140683C.1
cccacgcgttcgctttaattttctttgtattttattctatagtcttaattctattcctgttgggtgaatactgtcggatgcctgggttcttggtctccatttgaaaattgctacctaaaccagcctatcaaaatctgcatattttcctaaactgaatttctctgtccttttttggtaacctatcaattaggccgtatttctgctaaaaaataaaaccaattccccggggtttattatcatattgtgccaagttagattcgaagagggtgtgctcttgttcgagaatgcatattgagggcggtaacggataacaatgtcgaatctggtaccgggggtgcttctcaagcttctgcatcacatgaacacctatctta

SEQ ID NO: 45053 - DNA, 344 bp, Glycine max
  Clone ID: PAT_MRT3847_140684C.1
acttggaatagtttatacattatttaaaagctcgattaccggctctttggatctcgcttggaatagtttataccttatttaaaagcttgattaccggctttttggattttggcacaatattggatgccttacgcatttttctcttaaccaccctttgacccccccttaagggcgagggccctggaaattattccttaccatcaaatggggttaccgtcacccaattggtttcaaccaaccaattaaattcccattaaaaggaaatggctttaagtattcttagaaacctaaaaagaagaaggcaggttggttttccccaaaacattaaagaagagccacccaaa

SEQ ID NO: 45054 - DNA, 365 bp, Glycine max
  Clone ID: PAT_MRT3847_140685C.1
ctcgagccgatcgtctcgtggtctttttctagatcgcgagctagaactagtggtttacaaggagcaggtaaagccaacacataaatgctcaacagtggagataagcttgcgttggctaacacacaagaattctttgatggaaattttccagtggattcttggttaccaatttttgtgaattgtctctatcctgtaagtcaattaccttcagaagctgtcgttgtaaatgttacatgtggtagtggacgtggtggtttacccaccactgcttggattagatttgcagttaacattcgtttgtcaaacatcaacaaaaggatttgcacaatctccttgcatatggtataaaattggtattccttact

SEQ ID NO: 45055 - DNA, 250 bp, Glycine max
  Clone ID: PAT_MRT3847_140686C.1
gaaattaatttttagtctgtaattttgggccacacaacaaaaataattggggggaggatacagcactcatgaaggcatgctcaaagggggaaatttaaccaaatgacagctcaggaaaccagcattaccaaatactttaagatatggccttagctagagagcaatcgcattaatcttctttccacaaaagggtgaggatgaatttcttggaatcccctggagattccttggccactgcattctcaagggg

SEQ ID NO: 45056 - DNA, 479 bp, Glycine max
  Clone ID: PAT_MRT3847_140687C.1
cattagaaaaaaattgttttcggcggaataacaaaagaaaagaaaagaaaaacggattaggagaggaaaaaaaaaaagcttgtgcgagagaaatgttagaaccttgtttctgatttttttttcctcttcgattttgatttttttttctgttgtagtttttgttgttgttgctctctctattttcgaaacgagattggagctctgactttgtggtttttgaattttattttttggattgttttttccaaattgctgcatcgagcttgcaaatggaggtttggttcctgtcagtgaagctctgaaggatattggtatgtatggaaagttatacctagtgctgagacagaggctttgagggttctttgatgcaggaacaggtttgtgtttgcagaaattgatagttcaagtgcttgggatgtggagaatccatgattcacctggggaggatatcacgtctgtgtgttaattcctcacaatgt

SEQ ID NO: 45057 - DNA, 868 bp, Glycine max
  Clone ID: PAT_MRT3847_140688C.1
cggacgcgtgggctctgccagtcaagtgttttccagaaaaaaattgttttcggcggaataacaaaagaaaagaaaagaaaaacggattaggagaggaaaaaaaaaaaaagcttgtgcgagagaaatgttagaaccttgtttctgatttttttttcctcttcgattttgatttttttttctgttgtagtttttgttgttgttgctctctctattttcgaaacgagattggagctctgactttgtggtttttgaattttattttttggattgttttttccaaattgctgcatcgagcttgcaaatggaggtttggttcctgtcagtgaagctctgaaggatattggtatgtatggaaagttatacctagtgctgagacagaggctttgtttgataagtgcttgggatgtggagaatccatgattcacttgaggatatcatgttcgtgtgttaattcctcacaatgttttttcgtgtggttgatataggctgatccgatgaacaataatgttgggaaagggaaaaaaggtttggcagaacaaaatcatatgttttttgacaaaaagagtctcaaaatggataaatggaggggtagctctggatcatcaactgaagatgacacttttttaatgtctatctcggcaggtcttttcccatttgcggcggaagtcatcctggggggggtttcccgtctgtccatgcccctccagagcacatccgcacgagtggtaaggacgaaccagggcggagttagcagctcttggggttctctgacgcaggaacagtttcgtgatcttcttcctctcggggggctggcgtggggtggggtctgggcgctgggttgatcgtgcatatgcaactagagcatccc

SEQ ID NO: 45058 - DNA, 2129 bp, Glycine max
  Clone ID: PAT_MRT3847_140689C.1
cccgcgtccggaaaaaaattgttttcggcggagtaacaaaagaaaagaaaagaaaaacggattaggagaggaaaaaaaaaaaaaagcttgtgcgagagaaatgttagaaccttgtttctgatttttttttcctcttcgattttgatttttttttctgttgtagtttttgttgttgttgctctctctattttcgaaacgagattggagctctgactttgtggtttttgaattttattttttggattggtttttccaaattgctgcatcgagcttgcaaatggaggtttggttcctgtcagtgaagctctgaagtgcatctggtgttatataaggtggataaaaattactgaaaaaagaaagaaagacaaagaagatgatattttcaattatagtttcggagtttgtgttttatcttgccttatgatataagcctctaactgttcgaatttctgaggtctgatgatatcgtccggtaaagtaatcttgtgaagagtttctcatgtatgcatgtctaatcagatttcgtccgcagtttctgtaaggatggaacaggttgtcgttccatttctttaaatttgctatgaaatttttgtttttgagattttcatttctgtcggggggctggagtttggagtgtggttgatataggctggtccgatgaacaataatgttgggaaagggaaaaaaggtttggcagaacaaaatcatatgttttttaacaaaaagagtctcaataatggagtagttaatggaggggtaggctctggatcatcaactgaagatgacacaagatttaataaggtggttgaagatggaaacaatggattgaggggtctgattcaaatccatgggagcttgcagatttcacaacaaccacctcaagagccagccgtatgctgggagagatttctcccattaagatcgataaaagttttgctggtggaagatgatgattcgacacgccatgttgtgcgtgctctgttacagaattgtagttacaaagtcactgccgtttccaatggccttcaagcgtggaaagtcctggaagatccagaaaatggcattgatcttgtcctaacagaggtagctatgcctattttgtctggaataggtcttttgtgcaagatcatgagccacaaaactctgaagaatattcctgtgattatgatgtcatctcatgattctatgggtatagtctttaagtgtttgtcaaaaggtgcagttgattttttagtgaaacctattcggaggaatgaacttaaaaacctctggcagcacgtttggagaagatgccacagttctagtggtagtgggagtgaaagtgcgaccctcaccagaaaatttgcaaagtcaagaagtaatgatgcatatgaaaacaatagtgacagcagtgatgagaatgactatggaagcagaggcttgagcattcgtgatggaagtgacaatggaagtggcactcagagttcatggactaaatgtctagctcaagttggcagtcctcatccagtttcacctcataaacagttggttgatgcccctgatagcacatgtgcccaagtgatgcaaacaaagactgaaaaagttagtagtagatgggtgcatgcgacggaaaaagagtgccatgaacttattgatcttgatgatgttgcaagggttaaggacttggctatgggaatatctttgaatatgcaactagagcatccactcgaggaactgtctagcaatccaattgtgggtaaaggggcaaataagatgtctgatgtagatgatatgcagatcattaagagaaagagcaatgtctgtgaaaaaggacaattggaatacaatggtgataaaaccgggacacaggaaaatcaggctatgaatgttattgatgttactgatagcaacagtccacaggctgaaagcagagacttgaacactccaaatgggtttctggtttttcacaatcaaaagcaaactgttgccccaaagagcatccatcccttgaactaactctgaaaaggctgggagaagtaggagatggctaaaaatgtcactggtgaaaaatgcaatgtcttgagacatttaaatcagtcagcattctcaaaatataatactgtttctgcttaaccagctcaaactggaaa

SEQ ID NO: 45059 - DNA, 226 bp, Glycine max
  Clone ID: PAT_MRT3847_14068C.1
ctagcatcccagttacatccgttccgctccagatacgatacaaacaaaagtcgttctagcgtggatcacccgcgtttcactttccgctctctctaccctttcggtccatgcacgccgttctatcggcaccgttaaccggcgtctcatgaacttcctcgcatcgcaagtcccaacctaacgccaaacccgttaacggtgcatccaccctagtcgtcaccgtcgacgc

SEQ ID NO: 45060 - DNA, 352 bp, Glycine max
  Clone ID: PAT_MRT3847_140690C.1
ataatataaccgggcattataaaaattatgcccaaagaaccaacattagtaaaagatctctttcatacacatatcagaagggatttccaactttaaaaagggacgtatttcatacaaaatatacctattaaaaaataatcaaacctctatctatatccacaatatcgggaaaagaaaaaatatcattaacaaaataggagagattatttgatagtcgatcgatcaacagggttccatggtctgtactaagagaaacccctccactaagaactacctgcccaaaactttccgaaccatgaatggtttcttaaaacttaaccccgcttggtttttgaaaaaaaaaaaaagaacc

SEQ ID NO: 45061 - DNA, 716 bp, Glycine max
  Clone ID: PAT_MRT3847_140691C.1
ccacgcgtccgaagaaaagaaaagaaaaacggattaggagaggaaaaaaaaaaaaagcttgtgcgagagaaatgttagaaccttgtttctgatttttttttcctcttcgattttgatttttttttctgttgtagtttttgttgttgttgctctctctattttcgaaacgagattggagctctgactttgtggtttttgaattttattttttggattgttttttccaaattgctgcatcgagcttgcaaatggaggtttggttcctgtcagtgaagctctgaaggatattggtatgtatggaaagttatacctagtgctgagacagaggctttgagggttctttgatgcaggaacaggttgtcgttccatttctttaaatttgctatgaaatttttgattttgagcttttcatttctgtcggggggctggagtttggaggtttgtgtttgcagaaattgatagttctagtgcttgggatgtggagaatccatgattcacctggggaggatatcacgtttgtgtgttaattcctcacaatgttttttcagtgcggttgatataggctgatccgatgaacaataatgttgggaaaggggaaaaaggtttggcagaaccaaatcatatgttttttaacaaaaagagtctcaataatggagtagttaatgaaagggtagggctctggatcattaactgaggatgacaccagatttaataag

SEQ ID NO: 45062 - DNA, 227 bp, Glycine max
  Clone ID: PAT_MRT3847_140692C.1
gaatttggctcgaggggttccattggctgtgagaacatttgggagttttctattttctaagattgaggcgaatgaggggggatatgtgagagacagtgaaatttggaatttgcccacaataaaaattacattttacccgcacctaaaataaagtatgaattcctgccctcccattttaggcaaaggttttgattggtttcactttacccacaagattatgaatttca

SEQ ID NO: 45063 - DNA, 527 bp, Glycine max
  unsure (1)..(527): unsure at all n locations
  Clone ID: PAT_MRT3847_140693C.1
aaaaactaaaaggcgattgtaataggaagtcatttatatgaaagcggtgttgcagaggtagacaaggaaggattaacacacacacacacatatatatatatatatatatatatatatatattattggagcagtacatgacacattgtactaggataccattgatctgatttttgttgtttgttgttaaaatcaaaagcagtcacaagtgtcgaggacctgagcctgaccagaactaaggaccctagcgagccactcatcgtcgtcgaaatccccttcatcttgagcaacaatggagtcattttgcacctgcagcacatttgaggatgagggtggttctgacggcgttggtggggatgcgatgatctctttgtaaagctcttgcatgaacttttcaaccgcttcttcttcgaaagagaattggcccacatcgttctccgtctcggtcagaatctcgtccagctttcgggtgagagcttcggtggaggaagcattctcttccatcaaagccattctncggacgcgtggg

SEQ ID NO: 45064 - DNA, 198 bp, Glycine max
  Clone ID: PAT_MRT3847_140694C.1
cccacgcttccgcggtttcgtgggctcgcaagcaaaaagaaagaatcccaggcgaggagaaagatggaggggaaggagcaggatgcgtcgctgggagcgaacaagtgccccgagagacagccgactgggacggcggcgcacagccaagaccacggcaaggactaccacgagcctgtgcctgagccgctggcagtccta

SEQ ID NO: 45065 - DNA, 245 bp, Glycine max
  unsure (1)..(245): unsure at all n locations
  Clone ID: PAT_MRT3847_140695C.1
ccacgcgtacnactaaatttgtcatttccaactatatctttccatcaaagacacatacttttggttacatggtacacacaatggggcatatgcacccttcaaatactctaacttaacgtattactgtaaacattaatgtgtacacacacgtttttcctttactcaagtttctaactataaggaaacttgttaacaattaatccaacctccaccatttacttttagacaaggcaacatccaatgca

SEQ ID NO: 45066 - DNA, 194 bp, Glycine max
  Clone ID: PAT_MRT3847_140696C.1
gggttttcttagcaaacacttatggctttttcgatgctgaccactcgtagctcacaggaggagagtctgctaacaatgaccttgccctcaaagctgcacgtatgtcagcacatactattgctggtgctaagaatccccaccgaaatcgtcccgcaaccttgggtcttggtgagattaggaaatacctacataac

SEQ ID NO: 45067 - DNA, 175 bp, Glycine max
  Clone ID: PAT_MRT3847_140697C.1
ccgtgctaacctcacaatgaggctctataattaagcctcctacgatcaaattaggaatcgtttcaattctaaatcagggggcatctaaaagggaattcttaactacactgaagatgatatggtctccaccaactttatagtcgatagcatatcaagtatttttgattcaaacgct

SEQ ID NO: 45068 - DNA, 483 bp, Glycine max
  Clone ID: PAT_MRT3847_140698C.1
gcgcgaggccggtcggagttgaggaatgtggtgcctcgggggtactatgagtcaccacagactataatggagcttagagcaattgcttttgtggaggctcagtggggggagcctttgagggaagatggacctattcttggagtggagtttgatccgttgccgccggatgcatttggggcacccttagctgttacggaacagcagaagctgccaagtcttgcctatgacagtaaaatatatgaaagacaccatgctagggcaaataaggctatagcaaggacattccatgaatacccttttcttccaaaccagtctggcattacatccgatgtttatggacaactgaacctacctcatttacatgatccaatggatggtcctaccagaactcctttttctcttggaaatgaacagcaacccagagttcatgctccccaagtcatttttctcatgttcgccttttgtctcaacaccatgacaagc

SEQ ID NO: 45069 - DNA, 491 bp, Glycine max
  Clone ID: PAT_MRT3847_140699C.1
aaaatatcccaatccaataggcactttgtggtttggatcttatgtgactatatggaaaagcctaagatttctaattcaaatggttcactgttcattagaagtcgcattcaagaatatgaagcatataatggcaagttcgcataaagttgagtgttgtcacttctcatcagatggaaaacttcttgctacaggtggccatgataacaaggcttctttgtggtgcacagaattgtttaacctgaaatcaacacttgaagagcacagcgaatggataagtgatgttcgattttgtccaagcatgttgcgtgttgctacatcctcagcagataaaactgttagggtttgggatgttgataatccaagttattctcttcgaacattcacaggacatgcaacaactgtgatgtcactagattttcaccctagccaagatgaccttatttgctcttgtgacaatagtgagataagatactggagtattaaaaatggta

SEQ ID NO: 45070 - DNA, 800 bp, Glycine max
  unsure (1)..(800): unsure at all n locations
  Clone ID: PAT_MRT3847_14069C.1
tacggctgcgagaagacgacagaaggggaaaacaatgacaacacttcccgaaacccccaccgtttcccccatggaaaacgaaaacaccatcctccgaaacggcaccgccaagaaacccaagctcacgcacgccatttccgaggctgagatccgcgaagaattctcccaccaccagcgcggcgtcgcaagaatcaacaacggtagcttcggcagctgcccgcgctccgtcctcaacgcacagtccatctggcagctccgcttcctccagcatcccgacgacttctacttcaactcgctccgccccggcatcctcgcctcacgcgccgccatcaaagatatcatcaatgccgaacacgtggacgacgtctcgctcgtcgacaacgccaccaccgccgccgccgtcgtcctccagcagatcggccgccacttcgtccgcggccactttcaccgcaacgacgccgttgtgatgttccactgcgcctaccaggccgtcaagaaatccatcgaggcttacgtcactcccatcggcggcaccgtcgtcgaggtccagctccccttcccggtccgctccgaggaagaaatcgtaacggaattcaagaaaggcctcgagaatggtaaactcaacggcggaaaagttaggttagcggtaatcgatcatataacttccatgccttcggtcgttctccccgttcgcgaattaattagggtttgcagagagcatggagtggaacaggttttcgtcgacggcgctcacgccattggaagctngcacgttgacgttaaagaaattggagctgatt

SEQ ID NO: 45071 - DNA, 339 bp, Glycine max
  Clone ID: PAT_MRT3847_1406C.1
agctaggtcaaagtgttaccgcgatgtaaaatattgagaattcgatgaatatttggcggcacgaatgtccaatccaaaagcttgatggacaggcactacttcagccaaagggctgtgtcagatggcaaacaggtctcatgggttcaagaaaaagcactcatggcatgtgctttgagtagaagctggcgctccaaaggaaaatagacttatatccttgacggtgacaatatacaacatggcctaaaccgggatgttagttttagagcagaagatcgatgacacaacatacgaagcgattggtgaagtatcaaaactcttggcccatgctggcgttattta

SEQ ID NO: 45072 - DNA, 263 bp, Glycine max
  Clone ID: PAT_MRT3847_140700C.1
cggtgccagaggtcccaactaaacttttattcgttcagcaaccttcatttcacaattacttcttcccctacttgatgatgcgtgcttttacaatcattgcttcaatgggcttaaaaactaaagctaggtagtaaggaaaaggagcactaatattattataaatctaatctaattctgtaggtgaaaaacctgcaaacataaattccataatcctccaacattccgaaggaggctttatatatagataagattaggggggaaat

SEQ ID NO: 45073 - DNA, 286 bp, Glycine max
  Clone ID: PAT_MRT3847_140701C.1
ggacgaagaaagccgaactgtataaactgaaggcctgctggagggacaaaaaaggggagcaagagacttgaagaggatgaagatgttaaggcggatgacgacactgaataataaggtgaaaacagctccgaattcaaatacaacgactgagagcatgagtaacagcactgctcctacggcagagaaaacagaacactatgccactagcaaagaagagaatgctgacatggtggctgtggccaaacagatggacagagctgcagatgcagctggacaagctatctaa

SEQ ID NO: 45074 - DNA, 382 bp, Glycine max
  Clone ID: PAT_MRT3847_140702C.1
aatgggaaaaaaaaaaaaattaaaccatttttgggctttgggacgggacaatgggttatttaggtcaccatcaggcatttacttaaccaaaaaggaaagggtaaatgggcccagggcactttggggcatttggaaacttcaaatgggggaaacaaaacgaattccccaaaacataatggaaggaaatcgggcatgacccaccccccataatttagggggaattaaaaaaagaccaaacatgggtataaaattgaaggggggtggcctttggtgaaaaaaaaagccaagcgtttgaacaaacactgggccttatgacccgccaaatcatagggaggaaacccatgaccctccccaaaaggtttttaaaatttcaccaaaccca

SEQ ID NO: 45075 - DNA, 297 bp, Glycine max
  Clone ID: PAT_MRT3847_140703C.1
atgcctagtagttggatatctaagaacttgtttagaaaagtaggggatggaaaggaaacctctctctggaaggatatttggatggttccggagcctttatcaattaagtacccaaggtggtgtcgggagctctttgaatgggtaaaacaattggtacaagatctcgaacggtttctagggaagctatcacgaaaggagaacgtgcgggacagatgggaaggggatcctaagggaatgtacagtgggaagtttgtgtatcatgctctgatatctgacgatgccatgccacaccaatag

SEQ ID NO: 45076 - DNA, 244 bp, Glycine max
  Clone ID: PAT_MRT3847_140704C.1
gtcaaaaacctaacggggaagccgatacccctagaggtagagtcttcggacacgatcgacactgtcaacgcgaagatccatgacaatgagggcatcccgccggatcagcagcgcctgatcttcgccggaaagccgctggaggacgggcgcacccttgtcgactacaacatccagaaggagtccaccctccacctcgtcctccgcctccgcggcgtcggcaatatgcgcaagaagaagacctata

SEQ ID NO: 45077 - DNA, 855 bp, Glycine max
  unsure (1)..(855): unsure at all n locations
  Clone ID: PAT_MRT3847_140705C.1
gctgggagagccacgtagttcgttctctcactgtgggaatgtaattcacaaccattttcttttccttctctacccctgttcttgtccggtttcttatcctctcccttcttctctatcactgccgcagcacttccccctccgcgtcaacatcacggtttcaacttgaatcagtcacgcttcagaaggtcgtcgaacctcggcagcagcttcgccaaccttgccaagtacggatctgaaacgcttgttgaccgctgctcagatttcgttcttactcgggttttggattctacgcttacctaagaagcttcttcaacgaaaatggatggattttacagtctcattatacgttctttcgtttcttggattttgcaatttttgggactaattctgctatgcttttgcgtcgaaccattgtgtttttcttgctgattggaaggattttgggtttgactnnngatatttttggtgtggtgaagaattgttttctcttgatctgtgataaagaatactgtgatgcctattaaatattagtttgattgatttagtgagtcaatgcaatgctcacaaggtgtttggtttaagtactctgtgaagtgaagatggtttcatgatgtttatggttaaaggaagaggaggggactgatggttcgtcggaggaatcgttgcaacaggatcaggaaagagacgggcagagaagaaaaaaagaaaaagagtaaagagaaaaaagaaacctatttggctctcccaccctagtagcctgcgtctacaattgatatataagtattctctacacaatattcgtttcttacaagtctggatcttcaagctnntaaacacactaacactgtttaagat

SEQ ID NO: 45078 - DNA, 148 bp, Glycine max
  Clone ID: PAT_MRT3847_140706C.1
ggtgaggaaaactttggacagaaaatggagtgctagacaaggccagacaggagtgacaagaacctctcagcagagggagaagccaccatagaagcaaagaccagagagtactttgatggagtcgcaccacaacgccacacaaagcctc

SEQ ID NO: 45079 - DNA, 411 bp, Glycine max
  unsure (1)..(411): unsure at all n locations
  Clone ID: PAT_MRT3847_140707C.1
cggacgcgtncgctctaatctactcggcgccattaaaccattgcctcaagattatcaatgcgcgaccatgactcgggccacggggtgttctactctcccttcttctctggatactctatgcaaaccgcccccgaaggagggaattaatagagaagtcatccttaccaaaaaccaccacacatttaccgatgtcaaatgcaaatagtgcaatataagagtacaataaaacaaatatttgataaagaagacgatcttattggtttacaattccctactatatgacgggaacaaccacacgtggagcacagctgcatctttccacatgaacacaatagccaaagctagtggactacaactgctttccatataaagaaagagcattctctagcgttttcttgggaaacatacctg

SEQ ID NO: 45080 - DNA, 558 bp, Glycine max
  Clone ID: PAT_MRT3847_140708C.1
ttttctaaatcttttcactttagatgaactaaatctattacaactgacgaaaattatgatatgcatttgtctattatttaaaaggtcaactgaagaatcccaacgtaatctccacattttggcatagcagtcaagcccttataagttacaattcaaacttctctacctcttcaaccataataattaaacttaaccaagcctccaatgcaaaatgaaccaatatttcataccttcattcaaattcatctcctttttccttgcagtgattctccagtttcaggccttttctgtcactatttacaaacatttgatgaacatccatgtttaagttctctcttctattatttacaatctctggccaagtttttggtttaagggtggtattgttatttacgaaagcccttgtttttgctggaatcaaactatcaccccgctcatttccttcattccacttttaaactcagaatcgtttcaccagattatttatgcaatcaggaaaacccaaaatgcccctgggggaaatccttcccttttcaaaggaactttgatgcaaaagtt

SEQ ID NO: 45081 - DNA, 524 bp, Glycine max
  Clone ID: PAT_MRT3847_140709C.1
accgcattgctctctaaatagatcgatctcattaggacctatctctctttactattcataacttacccccgctcggccgtgagattgatgattattactattcttaatacccctttttatcggcttcagcctctcatctctgacccctctccgtgcgtgtgcttcaaccccctccccattctgtctctcatgctctgcactgatatccctctcttcttcaatcctgagcattttctttttaccaaggccccctctttatcccattactctacaccctgggaaacgccctccctcgctctcaattatttaaaccttattaatcttcttcctcttaactcccttcctctggcagtgccactgcagagccggtgcttgttcatccgcctagattttgcatgccttgcaggcgctcagaacattgcgctcctccatctttaccttctgcgtcgccgtcctctggtactgttcctggaactggaaacagtggtcgctcgcccactccgagggcggcctctgaggcccgt

SEQ ID NO: 45082 - DNA, 181 bp, Glycine max
  Clone ID: PAT_MRT3847_14070C.1
ctttttcacgttgacttcgtgcttagcacgggttttcgcgctaagcgtacctttgggcttcctcgtgagcatttttcacgctaagcctgaattgcgcactgagcgagagtgtgcactaagtctggacttgccggctaagcgagagtgcgcaccaagcctgaattgtgcgttgagcgagtag

SEQ ID NO: 45083 - DNA, 201 bp, Glycine max
  Clone ID: PAT_MRT3847_140710C.1
caagcgagccgaacgaatgtctatgatacctaagcgcgttacactcgatactacggtaagaggcggaaaatcaatgaagtcaaagctagcgtcgaagaaactgaatctacctggtaataatagtaagtacacttgctattatagtactagtcttgctttaaatgatgaacttcatcctacactagattcatatgtttatca

SEQ ID NO: 45084 - DNA, 256 bp, Glycine max
  Clone ID: PAT_MRT3847_140711C.1
atggacaattctattatgtctatgtataatagatgctactatgtttcatgtgatcgtatcggagagtataattgcttaagagactcggatacatagtattggtatcggatcgtgaagacaattcaaatattggtgcttcatagaacgaaccttaagtttgccttttcaacaaagaggcgtatggcagtatgatacattgtacaatatggtgcattatctgattatcagttcatgcggccacgtgcacgggacaaga

SEQ ID NO: 45085 - DNA, 331 bp, Glycine max
  Clone ID: PAT_MRT3847_140712C.1
cttgctcataggatggacggtcatctttagagttcacaagcttatttacaatgcctgctacaccctcgccggaagtgcacttactcacttggtcatcatatacgtctgcagtcattgcacctaagaaatcaatggattggccagcgattgtgacaacattcttgacactgtcctgatcacgaattgatgttgtgcgatatatctcgtgctgtctcctaatgcggcattcatctgtgtgggctattaatatcttagcattagtcttgacagtataggagtgcatgagatgtgagaaatttaatcccgtggacaagtatggcacacgggtatg

SEQ ID NO: 45086 - DNA, 307 bp, Glycine max
  Clone ID: PAT_MRT3847_140713C.1
attggaactgagccagctatgcttatgatagacgatgtggctcagaaccctggaatgctggtgcacctttgctctaactgtactggacaatttgaagttaactcaagccgaagacgcaccaatgaataaatttcacataggcacacacctagatgcatttgtcgaagatatcagataacaatgccatgagccgaatgacatgaaccagaatgctatagccgccatcagaggtgacaacgctgatgccatgaagcaggacagcatgcacacgttcacagtgacatgcgcatttatgatgaacacacta

SEQ ID NO: 45087 - DNA, 616 bp, Glycine max
  Clone ID: PAT_MRT3847_140714C.1
tttctcagagttttatgctgcacctcttgaattttggtgaggccgtggcaatgggaatgcacacaccagaaaaaatgtttcgtttacttgacatgtatgaggttttggagaaacttgatgtggacgtagatgttttgttctttgaagaagttggttcttttgtaagaggagagttgcacaagcttctaaggagctttggtgacactattaagtctacacttctggcattcagaaatgctattgcatccaatcattcaaagaccccttttcctcaagggggtgttcatcatgttaccaagtatgtcatgaattacatcatggctctagttgaatatggtgacacccttaatctccttcttgttgatgacacctcaattgatcctgcaggcaacaaagatgacacaccatgtctctcattgtgtccagtggcttgccaatttcggtcaatcaccgcaactctagaatcctacttgagcaactaagtccaagttttacagagacgaggctttgcaacatatgttcatcatgaacaacattcattacatggtgcaaaaggtcaagtgctctgatctaggccatttctctggggactgttggctacccagcacatcgccat

SEQ ID NO: 45088 - DNA, 659 bp, Glycine max
  Clone ID: PAT_MRT3847_140715C.1
aatttcagatatctcatgatcaatccagaaacactattaataatatagattcatgttattatgttatgtagatgtctttaataacaaggttttataattcaaaagttcttacaattcatcttattacaccagattttataatatttctgaaactttacttttttttttttaatttttaatgacaaatgtgtgattcatgtaatatcattctcctcccattttttctctgtctcttgttaagtttccaacaaattgtattgaactttacgtataattttaatatcaaatacatactaggaggtgacccatcatctagattgggtagaaggacaaaattacatgcagacctctcatctagattggttaggagggcgttaccattaatttcaataagattgtgtttattaactagaatctgattcttgtcgttaattaaattctcggctgaccaaagggcaatccaaagagctgaactgtctacatatttttattcatattaattagattggtttttaaactgacgatgttttaactttgtcacgtccaccacttggaagtactataacagtctatattcataagtcataattgtcgacactttcgtaggtgaaaaattgaactattttattgccatcaataatattattatattggaacct

SEQ ID NO: 45089 - DNA, 405 bp, Glycine max
  Clone ID: PAT_MRT3847_140716C.1
actacgcgtacggatgtttaagatataactttttccatgtgactatctaataatgaaggggtattcttaaagtacttcgtggatatgttccttgtgttctataaatgagtggatgtgaaaaaacttttttgttagtaaaaaaaaaaaaaaaaaaaaaaaaaaaaaaaaaaaaaaaaaaaaaaaaaaaaaaaaataaaaaaaaaaaaaaaaataaaaaaaaaaaaaaaaaaaaaatatgggcatccgttttaaaggatcaaaggttacttacgcatctatctaactaaaaatttcttatttctgggttccttaaattaaattaactttgccagtttttataactttcaaattggaaaaaccttactcttacctaactaaatacacttgcaataaatctacttttcg

SEQ ID NO: 45090 - DNA, 2734 bp, Glycine max
  Clone ID: PAT_MRT3847_140717C.1
atccttatgctccttagagaagaggcaaagtgaacaggaagaagcatcttgtttagaacttttggagagtgtttctaaatcaaagagacatttagatcgtgatcttgataatcctaaaccatgcaagtctagaaagtcaattagttctagttcattattgtcttgcaagtacagcaagatctcattttgtggcattgaagaccatctatcagatggcttttatgatgcaggacgagatcggctgtttatgcctcttgagtgttatgagcaaaatcattgtcttgcttctcgtgaagtcatccttttggacagaaaaatcgatgaagagttggatgctgttatgctagctgctcaggcattggtttataatttgaagaagttaaatggtttaagcagatatgggaaccaggatggggttgataacttgcagatggcatcactgcttgcactctttgtatctgatcattttggtggcagtgatagaagtggtattgtagaaaggacacggaaatctgtgtccggttcaaactataataagccttttgtctgtacatgctcagctggaagcagcaccagtataagttctcccactgaaccagttgcaaacaccatagaagatatcactctttcgaagatgtcggaaaaatctctcgactctataaaaaaaaggcgaaattcgatcataattccaattggctctgtgcagtatggtgtatgtagacatagagctctgctttttaagtatttatgtgatcacatggagccaccagttccttgtgagcttgtcaggggttacctagatttttcaccacatgcctggaatatcattctgattaagaggggtgctacatgggttcgaatgctgattgatgcgtccctcttgatataagagaagagaaagatcctgaatatttttgcaggtacatacctcttaatcgaaccacaattcctctatcaactataggatgtccaggtcctgattattcttttccatctctcactacatgtgatgaacttgagacaaaggcttcaactactttagttaaatgcaaatttggatcagttgaggctgcagcaaaggtgcgtactttggaagagcaggggagttcggcagacaaaattaaaaacttcgaatataattgtttgggagaaattagaattcttggtgctttaaaacacccttgcatagtggaaatgtacggacaccaaatttcatgtcaatggtctgtctcagctgatggtaatcctgaacaccgtgtattaagatctgcaatttttatggagtatgtggaagggggctccttaaaaaattatctggagaagctgtcagaagctggtgaaaagcatgttcctgtggagttgggctttgcaaatcgccaaagatgtctcatgtgctttgtcaaaatgggactcaaagcagataattcatcgtgccattaaaagtgaaaacatactgttttatttggataggaagagagatgatggaactcccactgtgaagctctgtgattttgatagtgcagtgccactaagatcaactttacatgtgtgttgtattgctcatgcgggaacacctcctccctgtatatgtgttggaacacctcggtggatggctccagaggttatgcggactatgtataaaaaaaactcctatggattggaagctgacatttggtcgtttggatgcttgcttttggagatgctgactctgcaaattccatattctggactttcagattcacacttccttgatagtctgcagatgggtaaacgaccacaattgactgatgagctgagagtattgagttcaatgaatggacccacaatgattccatctggtgaagagctggaaaaatcagatgctggggtagacatgctgaaattccttgttgatttgtttcataagtgcgtggaagaaaatccaagcaaacgtcctacagctgaagaaatccataaaatggtgcttgcacacacagatcgcttacaaatctaagattttaggaagatttagttaggttattgggtcgcccggtcctactgtcctagcgaaatatattcattctttttcttcatgaagtgtgttagggctaatccaagaataattgtttgtacttggtccaagtcttcagtgagttgtattattttcaaggggttagatccatgcggctctaatatataagtctgattgagatctttatagtgtagctagatctctttcgattgttaacgtttagacgaacatgagttcaaccattctgcaagtgtatctcattaatttattgatgccattgaattgaatcctcttattaatttataaagcaacgcactaagaaattaaatgctgcttgcacacacaggtcacttacaagtttaagattttaggacgatttagttaggttattggagtggcccggtcctagcgaaatatatcattataagaaagtatattcattcttttttctccataatgtgtgttagggctaatccaagaataattgtttgtactaggtccaagtcttcagtgagttgtatcgtttgtatattattttcaaagggttagatccatgcggctctaatataagtctgattgagatctttatagtgtagctagatctctttcggattgtaaacgttgagacgaacatgagttcaaccattctgcaagtgtatctgattaatttattgatgccattgaaatgaatcgaatcctctgattaaaggagaagaaaaagat

SEQ ID NO: 45091 - DNA, 535 bp, Glycine max
  Clone ID: PAT_MRT3847_140718C.1
gggtgatggtagcgtaatagaggaactgaaacaactagagaaattaaggaagctggggattataaagctaagagaagaatatggtgaagaattatgcaaggttattgagaaaatggatcatctatgttccttaagcattggggctatgggaaatgatgatggcaatcatggcatgcttcagttgaaatctataaggaatcctccatcgtcccttcaacgcctttacctatatgggcgtttagaaaggcttccaagttggatatcaaaagttccaaatcttatcagattatgcttgaggtggtctattctaaaggaagatccattgccttaccttaaagacttgtcagaattgtcgtaccttgagttctatgatgcttatggtggtgatgagttgcatttcaagaatggatggttgaagagactaaaggttttgtgccttgagtccttgccaaagttgaagaccataaagattgatgaaggagcaattcctcttcttgcagagttgaagatagggaaatgccatgaaaatggtgaa

SEQ ID NO: 45092 - DNA, 222 bp, Glycine max
  unsure (1)..(222): unsure at all n locations
  Clone ID: PAT_MRT3847_140719C.1
cggataagtagcctggtttcctcgtcctgaaagaaacaccagcaaaccactctcaacctaagagtgttgcaagtttactgaaagcaatggatttagtggcaccagccgaacaggtttgctcatttcaccacttccacacaacatacgattcctccncngnngattctgnnanacggcctttcgttctagatcctgatagtagtgttagtcatcacttctcaa

SEQ ID NO: 45093 - DNA, 726 bp, Glycine max
  Clone ID: PAT_MRT3847_14071C.1
gggatgaagggggaaaatagttcagtttgttattcaccaacgttaaacgttaacgctaacgcggtcttataaaatgttagcttaataataatttgaaacctcttactttgagagacagtggcagcggtggtactctgaaattgatcctctcagtctgaggaacacggtgcgttcgtaaaaagtgaaaaagaaatggcagaactgagtttgggaattctaattgatattgttgatgaggaatggatgagagacactcttcctgatgatgatcttccactgcccccaacactggttgttaggacagatgatactgaggactcaaatcaggagactcaacaagttaatgtggatgcttggcacgatcttgcctttggtcaagaatagaagtttcatcattaactagtgtctagtgttgtgctttgtaattagtgagtggatgatggtgctccctggtatttggactaggcatcttcctttctttttccctgatagattgtaacttattcatgtttatcaactactagtaaccgttaaggttatattaaggaattgtgctatcattgctgaatgttaatgtttgctgtcaggaaagcactgttgtatttttgctttaaggttgaagcaaatttagggcaaccagtccctactggtatgctctggagtctgaaacttgtattaatatgtttaatagtaatatatagtagtactactgttgtttggaattaa

SEQ ID NO: 45094 - DNA, 366 bp, Glycine max
  Clone ID: PAT_MRT3847_140720C.1
gtgtttttaacgacaagtacatttagcaaatatataaaaaggcaaaaactccatcctcctccacatgaggcctagcccaaaatagagctaaggctcctaacacggggaatccactggttccagacaccgatttattaagacctctcgttttttgcgcgagcaggacactatatcgcagctagacaagcacataatgtgtaaacaggcggctctgcggtacaccaccttagaaagacttcttgaggacgattccaccctggacagggacccttgagctgtatccccagctcgctgtgagaccaagaaacaagctttagagaggtcttattcaatgctatggcagcctacgcatcgaaaatactggat

SEQ ID NO: 45095 - DNA, 584 bp, Glycine max
  Clone ID: PAT_MRT3847_140721C.1
cacgcgtccgtgagaattcttcttaccttcttctaatcatcctttcttttttctctttcgatacctctttgtttctcttcaaaagccacgacaatggcagacattacccatctccctatggaacagcttcaggaccttgaatgctgcttagactctaatcctccttgggctgaagctatcctactagcatttcaaaattatatattgatgctgggaacaagtgtgatgattccatcatggattgttcatgccatgggaggaagtgacggtgacaaggcacgggtaatacagactctgctttttgtagctggcattaacacacttctccaaacgctttttggaaccagattgcctacagtcgttggaggaggttcatctgcgtatatatatccaattgcttatatcatcactgactcatcgttgcaacaaattagtgactctcatgaaagatttatacaaacaatgcgagcaatacaaggagctttgattgtagcatcaagtattcagataatctttgggttaccagccaagtctggggactcttttcgagattttttcagtccccttggcatggcaccctgtag

SEQ ID NO: 45096 - DNA, 876 bp, Glycine max
  Clone ID: PAT_MRT3847_140722C.1
gacccaggggtccgcccacgggtccgtacgggtgcgaaagacgccaaaaggggataccagcctcatccaaagcattgaattcaaaaacttaagttcatttcttgtgctttgctttattcctcaaaaccaaacatgtcgaacacatgcggcaactgtgactgcgctgacaagactaactgcacctacatcgagactgttgacatggatgttccagcagctgagcatgatgggaagtgcaagtgtggcactaactgcacttgcacggactgcacctgtggccattaaggaatatgtatgaaaatgtaattgccatgtgtttggcaatacaaatctccaaataatgtaatcttcgtatgaataaatgtgtgctgttatcctacttcagggtctgtgtagtcatgcagtctgaatcatgtccagttcctgtcatagttattaacagccatggttgtggcattctatatatggttttatagtaaaaaaaaaaaaaaaaaaaaaaaaaaaaaaaaaaaaaaaaaaaaaaaaaaaaaaaaaaaaaaaaaaaaaaaaaaaaaaaaaaaaaaaaaaaaaaaaaaaaaaaaaaaaaaaaaaaggggggggccgttttaaagaacccaagtttactaccccgggcttgcaaggtaaaattttttttttggggcccccaaatttaaatccatgggccgggttttaaaaacgtgggaatgggaaaaaccttggggttcccaaattaaatccctttgaaaaaaatccccttttccccagttggggaaaaagcaaaaaggccccccccaatcccctttccaaaaatttgcccaccttaaagggcaaagggaacccccctttaacgggcccttaaagcgcgggggggggggg

SEQ ID NO: 45097 - DNA, 312 bp, Glycine max
  Clone ID: PAT_MRT3847_140723C.1
ggctacaaaagaatggtctaattttattattcactatcttattgggcaattaaagtatggatttgggggttacaaattcaggctctaacctggggcacactgtattcatacatctgtagaaagggccaatacatgcttttacatacaaacacttttcaacaaacaaggaccagtgacttacttcaatgccatgttctacatggaaacgagcgaggagctgtctttgtctcaagcaggctagcggtatccacctttgccaaaacacaaccctttttttttacagaatagacttgccagccacgccacgatgca

SEQ ID NO: 45098 - DNA, 595 bp, Glycine max
  Clone ID: PAT_MRT3847_140724C.1
acggctgcgagaagacgacagaaggggatagcagcatcatacaaagcattgaattcaaaaactaagttcatttcttgtgctttgctttattcctcaaaaccaaacatgtcgaacacatgcggcaactgtgactgcgctgacaagactaactgcaccaagggaaacagctatggtgttatagtagagactgagaagagctacatcgagactgttgacatggatgttccagcagctgagcatgatgggaagtgcaagtgtggcactaactgcacttgcacggactgcacttgtggccattaaggaatatgtatgaaaatgtaattgccatgtgtttggcaatacaaatctccaaataatgtaatcttcgtatgaataaatgtgtgctgttatcctacttcagggtctgtgtagtcatgcagtctgaatcatgtccagttcctgtcatagttattaacagccatggttgtggcattctatatatgggtttattatagtagataataagtttactctcgactaaaataagtgtaaatccccgttcaataatcccttttccccagctatatggacatctaatcagcataatgcttccccc

SEQ ID NO: 45099 - DNA, 570 bp, Glycine max
  Clone ID: PAT_MRT3847_140725C.1
aatgatcctcaagattgcttctaagactttaacttttagtggcaaatttgtggttaacttcagttgctcttcctttactctttgatgtggtcaaaaaagtgatcctaagattgcaaatctatgacttcttataatcaaatttgtagatcactctcgtgatttgtggattgagccagtgaaaccagtttcccccaaggcagaagaagaccccggtggagatgcctcagatttcgtgatggcaaaggaggttgtggacctaacagctggaactcatgaggttgcaacaactaaggaggatgccgatgttaaagcacaggaagattctgtggcagttcatagtccagagcaacctgatgacagtgacgatgactttcaaaaatggtctcagtatgaaagtgcactttagtgataaagtggtaatttatatatttacacacagtgatagtttatgtttgaaacttttatttaatagttaatattttgtataatatgatattatatatcaataacgaccggatctggtgtatcataactattaattcctctggattgggtcaaaaacattttttt

SEQ ID NO: 45100 - DNA, 1155 bp, Glycine max
  Clone ID: PAT_MRT3847_140726C.1
tttttcgtaataattgattcaaataatctaggaatccaatcactaattagtcaaaacttccaaacgagaatctcgtggaagcaatgtaaagataaaaatccacccggcaaatgtggaaatttctttagcactagtcattagtcaaggagtcgagttcattttaagttagagctatcatatcatgtaaggaataaaaagggtgataaattaaaaagatatgctagacctagttaatggacatagattaaacctaaacctataagcaagtgagagcacacattcaaacggccggggacagaaggggttcctacggggcctcggaccatgcttccagcggatagcagcatcatacaaagcattgaattcaaaaacttaagttcattccttgtgttttgctttcttcctcaaaaccaaacatgtcgaacacatgcggcaactgcgactgcgctgacaagactagctgcaccaagggaaacagctatggtgttattgtagagactgagaagagttacatcgagactgttgtcatggatgttccagcagctgagcatgatgggaagtgcaagtgtggcactaactgcacttgcacggactgcacctgtggccattaaggaatatgtatgaaaatgtaattgccatgtgtttggcaatacaaatatccaaataatgtaatcttcgtatgaataaatgtgtgtgctgttatcctacttcaggtctgtgtagtcatgcagtctgaatcatttcaagttcctgtcttagttaatataacagccatggttgtggcattctatggtttattagactaaaataagtgtaaatctccgttcaatacaggtttttgtagacatgaagtctgaatcatttcaagttcctgtcttagttaatataacagccatggttgtggcattctatggtttattagactaaaataagtgtaaatctccgttcaataatcccttttccacagaaaaaaaacgcaaaaatagtataaaaaaaaaaaaaaaaaaaaaaaaaaaaaaaaaaaaaaaaaaaaaacgtttttccgcttcgggggaagtgagggttttggccacttgtcaacaaagaagactgttagaaggcatgtcttcaatccggagaacatcatccatcaacaactctttctctagctgaact

SEQ ID NO: 45101 - DNA, 359 bp, Glycine max
  Clone ID: PAT_MRT3847_140727C.1
gtaaaagttctcaaagctattctaagaactttttaagtggtttctggcttaaaaagtaattaggctaatagttcttggggtgctgttcgtaatgatcatcagtgcatgcaaatggcagctaactatctcaattgtagtcagctagctcttccttttgtttaccttggcgtacccataggggccaacccgaggcgagctcatgtttgggaacctattatccaaaaatatgagaggagattagctagggttccacaattggtgatcaacaatattatcaaaatccagcgaagctttctttggtgtggattgcatgataccaaaaagattgcatggatattatgggatacagtttgcttacc

SEQ ID NO: 45102 - DNA, 670 bp, Glycine max
  unsure (1)..(670): unsure at all n locations
  Clone ID: PAT_MRT3847_140728C.1
ttaagaaactanntgacgtcgcatggcaccgcccgtacgtaagnccttggnnatccctctagaagnncggcccgccctnnttttttnntttttatttttttttattttattttttatttttttttttatttttttttttttttttttttttttttttttttttttttttttttttttttttttttgggggaaaaggggaaaaaggcccttaagggggtaaccggggcgggcacccccaaacggaaattggggaccccaaaaaaacaaaccccccccccgggggggggggggaaaactttcaattttttggggggggggaaggccccccccgggttttggcaaaaaaaaaaaaaaaaaacccttttgggggcccaaaaaaaaaacccccttaaaaaaagggggcccgaaaccgggggggcccccaaaccccggaaaattccccccaggggccgcaacggggggaagcccccccgggggaacattgggggggaattggaccccgggggccaaaccaggacccccaaaaaaaatgggccccggcccaaaagggggggaaaaaaaaaacggggttttcccccccccgccaaaaagggggttccaaaaataaaccctttggaaaaaacccaaaaattcccgggggagggggggaaaaaaaaaatccccccccctt

SEQ ID NO: 45103 - DNA, 443 bp, Glycine max
  unsure (1)..(443): unsure at all n locations
  Clone ID: PAT_MRT3847_140729C.1
cccacgcgtccgaaagtctctatgaggaactaacttctacaccctctctgncttttccttttgatttccctggccttgtttgcgaaatcagatgcaggaagccttgtggtatattggggccaaaatgcaggtgaaggccaattgacaaaaacatgcaaaacaggactcttccacattgtcaacatagcattcctctcaacttttggcaatggtagtcaacctcaaatcaatcttgcaggccattgttcccctgcatcaaagggttgcaaaaggttaggcaaagatatcaagaactgccaaaggagaggcattaaggttatgctttccattgggggtggcaccaacacctactccttgtcatccccagatgatgctagacaagttgcagactacatttgggccaacttcttgggagggaaatcaaactctaggccttttgggaa

SEQ ID NO: 45104 - DNA, 767 bp, Glycine max
  unsure (1)..(767): unsure at all n locations
  Clone ID: PAT_MRT3847_14072C.1
gacgctgttccttcaggtgtttgttgccaaagtgttaatgcagtgaaagcatcaacacaaacacaaattcaacgagtggctgcatgtatgtgctattacaacgtagcaactaaacttcctttcttgctcgaagacagggccgtacggctggcgaaatcgtgcagaaggggatggggttttatcatgagcgcgaacaccgattgtgtcaatgttcctgtgagctcaaggcaagggagagaatagtacaataaaaaaaaagatgcatgtttggaagtttttctttcttcttgaagaagagaaaataaaatggcttgttcaatatatgggacaagcgtttcatgctgcaaataataatgaatgattttcaggggctaccaagggcttctttagttgatttatcataatgtaaggcaatgaattactatgaaatgcaaaatgaaaacttgttggttttaaaactgagtagaattggttttgacagaaataattttgaattactgaatgtaattgagatgtatgtctaaaaaaaaaaaaaaaaaaaaaaaaaaaaaaaaaaaaaaaaaaaaaaaaaaaaaaaaaaaaaaaaaaaaaaaaaaaaaaaaaaaaaaaaaaaaaaaaaaaaaaaaaaaaaaaaaaaaaaaaaaaaaaaaaaaaaaaaaaaaaaaaaaaaaaaaacaaaaaaaaaaangggggggggcccttttaaagggccacanttttacccctggggttggggaaatttttttttttttttagggggccccaaa

SEQ ID NO: 45105 - DNA, 489 bp, Glycine max
  Clone ID: PAT_MRT3847_140730C.1
ggatgataatgctccgtaagttcttgcaagagacaaattgttacaataggaccaaacattatttatgctggattcactaattttgcttgttttcctaaatggtcttcttatcctacctagttaatagcacgagaaggtcataagatcttcaaacaaaattttctagaaaatgatattttagaacattaactctgactaatcacaatcgacacccaactgcttatggtgacagacgatgttaaattccaagaaaaaaaaaaagcttaaaaaaagataagataaaacatttttccatttcaacataagaagaatagaagaggcagctaatgagacttgaaagagcggaataaatgaataaattaccccatggctccaacatctattaacagagatcatagatgagccatatttgctgcaactgaataggacttggaacatatactcaagataacgcaagcttggattcataagcaagcatacagttcagtc

SEQ ID NO: 45106 - DNA, 200 bp, Glycine max
  Clone ID: PAT_MRT3847_140731C.1
ggagactagggtaaggtcaccttgaaacctaccatgtcaagcgctgttactatgtatgtagtttttgatggcagaccaaaccctaaatccgcataacaaccatctttaccaagcgatgaggaaaagctaatcctttgcttaaacacaagtctgattagatggatcacgacgaggttgacatggataacattcataataaa

SEQ ID NO: 45107 - DNA, 176 bp, Glycine max
  Clone ID: PAT_MRT3847_140732C.1
caggcattagtccagctcgacaacatcaacatactgagaataatctttgatatgttcgcagatagggtttgctatacaataagtattgcagctgcaacgttttcaacgctgtcactggtaacaacaccgctcctttttatgatgcaggttttgctgcttatgatttctagggcatt

SEQ ID NO: 45108 - DNA, 230 bp, Glycine max
  Clone ID: PAT_MRT3847_140733C.1
ggctcgagcattaccacctccaagttcacgtcaatctcagcgagaatgccggtggtgcgagctgtgaactcactaggcaaaggggcacccatgccatcctaaggctcttaataaagataaacacaccaggacgtgctgtagcaagacgctaattgctacttgggccgtgaatcccacaacaactatcgaaagaacgcggacaagggtaccaaggggagcggcataagaac

SEQ ID NO: 45109 - DNA, 416 bp, Glycine max
  Clone ID: PAT_MRT3847_140734C.1
aaaaccaaaaatagcaaaggggttttttaaggggaatcaaacattaccccaccaaaaacggaaatccacaattcagcccctgtaattaagggtggtgattttttacaaaagggtggtactgaataaaacctaaagatccttaaccccaatgaaagatttttaaggtttgaaaacaataatacattggccaaatgattcccggtttaaaacacaatataagggccttacattttgttggcaattttaaaagggggacctttttcctgattttgggcatgctttaaaaacacaaaagatttaacatcttaaccttttttacacttaacagaaatttaactttcctttgcctgttaaaaaaacaaaaattccttaagaaatggaaagccttttttgtcgaaatgataaaccaaatgatt

SEQ ID NO: 45110 - DNA, 188 bp, Glycine max
  unsure (1)..(188): unsure at all n locations
  Clone ID: PAT_MRT3847_140735C.1
tttttgtgttatattaaannataanngccataaggaccaccccacggggttacgttttatcaaagcggaattcacgaagtgtaattcctaacaattttttgtaagaggtttaaaaacttgctagagttttaccatttggaatttataaactttgttgttttacataaggaccagaaccccattaaaaa

SEQ ID NO: 45111 - DNA, 197 bp, Glycine max
  Clone ID: PAT_MRT3847_140736C.1
tttttacaactaatacaaccactatttaagcttattaaaagaaaacttcttcaaaatggcattattacctctttcgtataaaaaatttttaactacttttttttatatacaaaggatactctttcatccctgcttattcataataagatatactaatgattccctttcttcatggcctttattatccaactacacca

SEQ ID NO: 45112 - DNA, 1514 bp, Glycine max
  Clone ID: PAT_MRT3847_140737C.1
tgtacatatttgctatctttatgcattgtttttggatgatgatgttaggctacatcctggatcaatcggagcactcactcgtgagatggaaaagacccctgagatatttattcaaactggataccctctcgatctgccatctggaagcctgggaagttactgcatctatgaataccatatgccttgttcaatgggctttgctactggtggaaaaacattctttctatggggagggtgcatgatgatgcatgctgatgactttaggcaagatcgttatggtgtagtctccggacttaaagatggtggatattcggatgatatgactcttgcagccatatctggtgctcacaaaaggctcattacttctcctcctgttgctgtctttcctcacccccttgccagtgatcttaattttggaagatattggaattacttgaggaaacaaacatttgttttggagtcatatttaacaaatgttaactgggtgatgaaccgtgcattgtttactacccactgctatttgtcatggggatttgtggcaccatattttatggcgatgatccatgttgctgcagcagtaagattttactataaaggattctcacctgaagaaatggcctatacttctggtggtgagaacaatacttttcctttctagggttatcattggtggccttcctagccatatgcactcttgttgagcttctttcaatgtggaacttgacacggatagaagtccaactgtgcaacatgttatctcccgaggcaccacaactctttctcgcttcttataattggtgtcttgtgttcatcgcaatgctggtggataactttctttatcctgtgtctgcattccgctctcatttttctcaatctatcaattggtctggtattcggtactatttgaaagatgggaaaattagtaagattgaaagaactccaagaagcaaggatatgggtccagttttcacagatttgggaggaaaacatttgtacggaaagaaagggttgcctacaagagggtcattcctcagttctttgtccagaagtttggcacaatggcatcaacccaagaaatttgataactaggaacaagctccatcaaattctgtctcttctctctatctctttgcctcactcgggaaacatgggtgttggtagatcaaattgatcttaattattgtttggtgcattcatgattgattgttttagagtgtggtaggaattctagttccattttttcattgcccattcaatccatatgattttttagcccaagccaaatttcccttagggtttactttgtaattgtaacagttcggtgatttaatttatgtaattcagtgatcaagaatcgcagaattatactggtagcgattcacattatttccatctcctcttttaacaataactacactcttactccataacgaagcacatcgaaatcagaacaatgtataagaaaaacttatagtttttaaggaaaatcagtttaattttaatactttgttaat

SEQ ID NO: 45113 - DNA, 475 bp, Glycine max
  Clone ID: PAT_MRT3847_140738C.1
ggaagacaatgagttggatgtcatttctatcagaaccatggcccaagaaacacttggggactggggtggaacaatagctactattgcctatgttttcttgggatatagttccatggttgcatatagttccaaatctggggagatccttttccaactcatcaatctcccagcaccagtttcaggctctctattcactgctctctttacaatgcttgtctcaatttggggaactcgcgccactgatcgagtcaaccagtatctaactgcttccatgattggtgcataaagttttgatttttaagctattcatgctttgtaacttattattgccattgtgcaaacttgagcatagttttacaaatattgaattattttgtgttttttcttattatggtttatctggctgtatttcaatctagaattttgtgatgagtaacattttgactgcataacaatgagtagcttcttgtaagca

SEQ ID NO: 45114 - DNA, 414 bp, Glycine max
  Clone ID: PAT_MRT3847_140739C.1
acccacgcgtccgcagatttttagttgtttaaaattctgttttaaaattctaaaattttaaattctttataaaaagtatccaaacaataaattctaaattacagaaattcaaattctctgataaattactttcctcggttaaaattttctatccaaacgtactctaaggttaatcagttttaagatagaatttcaacagtgaaataaacttgattaacaacttaaccttttgttgatcattttttttttctgaatcaagatatctcttaattgaaagtcaaagattaatcttttgagataccgagatttatttaagagattaacatctttcaaacatatgtatgttttttcatatgtgcaggccaaaaatcaaacttatgaccacatatttttgttgaacatattgggtttact

SEQ ID NO: 45115 - DNA, 683 bp, Glycine max
  Clone ID: PAT_MRT3847_14073C.1
agatacgttcattcccttgttctctctttgagcaagcatctattcataccctataattacctacctaggtgtgttctattgcaattcaatttcaagatgctaattcggatggcaattgaggcatgcaagagcgagattaacgagggtgaagacgaggatggtgacaacatacaagtcgtgatcaaccaatgacaaattgcaagtctttggatatgacttgtttgatcatttgggcaactgaagatcctttggcagtgacacccttttggaacgagatgacagagatggtccttgctcctctatatacattttattttccgaagaaaaaacgaggttgttgttgtgattttgaaaatgttaatttcatctacatatgcagctccgtacgtgaaacaatactaagttgtggacttatatatatggtttcttactatagattttaattaagctttttttttttatacatgtgtcctattctacagctttttgcaatgttatcctcatttttgctgatttgttctttctaaacttttcttgtttgagtttgttctgttctggcatttagaaagctacccagaataaatgtgattaatttgcgagatatggtatgttctatcttatgcccgtatcccttcctcggcacgcctcacccgacttcctcgaacatttctcctccccccccc

SEQ ID NO: 45116 - DNA, 493 bp, Glycine max
  Clone ID: PAT_MRT3847_140740C.1
ccacgcgtccgtggtcgcgtgggcttagagccatctttcatgatggccaagtgcgacccacgccatggcaagtacatggcctgctgcctcatgtaccgtggtgatgtggtccccaaggatgtgaatgctgctgtggccaccatcaagaccaaacgcaccatacagttcgtggattggcgcccgactggcttcaagtgcgtcatcaactaccagcctcctagcgttgtgcctggtggcgacctgtccaaggtgcagagtgccgtgtgcatgatctccaactccaccattgttgtggaggtgttctcccgcatcgacgcacaggttcgacctcatgtacgccaagcgtgccttcgtgcactggtacactggcgagggtatggatgaaggtgagtgctctgaagcccgtgaggacctggcggcactcgagaatgactacgatgaggtcggtgctgatatccatgactgctagtatggctacgagggttacgagtat

SEQ ID NO: 45117 - DNA, 489 bp, Glycine max
  Clone ID: PAT_MRT3847_140741C.1
gcttttacgaggtagattaacttgggttgagcagagggtggcagttagagcattgggacacttagctacatatgccagcacttttcctgccatagcaagtcatggtgaaattcttgagctctccatccaattggcaatgagttccctggaaatagtttattcacacttttaccaatatgttgatagaaggctcagttatcattgtgatcttcttacacgtggcatgggtggcgttgaaatggagtccaggaaggctgaggaatgggctagtcagttgcagtgttggtcccttcagctaattaattgctttgcttttaaacatgaatttcttcctaccatatgcaaacccgaatttctgataaaactacctggcatgtggggtggacttgttaatgaaaattcacctgctggtattggtttattaagaacaatttgtcatcaaaaacttggtagggggcctgttgccagttgccctggtattattgatgc

SEQ ID NO: 45118 - DNA, 400 bp, Glycine max
  Clone ID: PAT_MRT3847_140742C.1
tggatgggaactctatcaggctctcttacacaagtcattattcttgctattgtaacagcactaacagattggcacaaagaggcaactaaagcgagggagagagtagttgagaactcaattaaagttcactatgaagcttaagaaaactgaaaaataaatgatgttttggtttctgcatggactgtcatctgcggtggagtggaaagatagagtcatatagaggatagtgagtgtggcccagttgtatctgtttttttggtgaagagatttaattatgttaacatacacaacttgttggtgtgaatatgtgatgggatttttgtactggatttgtgcctctggcgtctgataaatcagatgccacaagtttaatgaatatgcttcagccttcagttaaaaa

SEQ ID NO: 45119 - DNA, 1388 bp, Glycine max
  Clone ID: PAT_MRT3847_140743C.1
ctggtgggcccgacaatgatttcggcatcaagtacaacgtcaacaacggtggtccagctccagagagtgtgaccgacaagatcttccaacgcaccaaggagatttccgcctacaaggtccttgatgctggcgagcttgacctatccaagattggtagctccacctatggtcccatggaggttgagatcgtcgactctgtcaaggactatgttaccctactcaaggacatcttcgactttcctctcatcaaatccttccttcagtcaaacccctcttatcgcgtactctttgacggcctgaatggtgtcactggcccgtacgccaaggcgatattcttggacacactcggtcttgccccttcgtcggtgcaacaatgcgtgccccttcccgactttggcggtagccaccccgaccctaatctgacttatgctcactcgttggttgaagtcgtggagcgggaaaatattgcttttggtgctgccagtgatggtgatggtgatcgaaacatgatttacggaaagggtgcatttgtcactcccagtgactctgtcgctatcatcgccgactgggccgatgtgattccctacttcaagaagactggtattcgcggtctggcccgcagcatgcctaccagcaatgccatcgactacgtcgccaaggcgaagggattcgagatcttcgaggtacctactggctggaagttcttcggtaacctcatggacgctgggcgtctatcgatttgcggtgaagagtctttcggtaccggatctgaccacatccgcgaaaaggatggtatctgggcagtcattgcttggcttaacattattgccgctgctaaccagaagacccctggaaccggtattaacgaactgctgcaagatcactacaccaagtatggtcgttcgtttttctctcgctatgactacgaagaggtttcttcggaaggctccaagcagttcacagacaacctcgatgctttgttcgcctcttcctccttcgttggctccaagcacggtgaattcatcgtaaaaaagaccaccaacttcagctacaccgacccgattgacggcagcgttagcaagaatcaaggtcacattgtcctcttcgaagatggttctcgcgttgtcttccggttgagcggaaccggatctcagggcgcgactgtacgtgtgtatatcgagaggtacagcaaagacccgtcgcaattcaagaaggatactgcggagggcctccagcccttgatcgatgcggctcttgagtttaccaagctcaaggaatacctcggacgtgacaagcccaccgtcattacttaaacacaaaattattttcgtttgtaatctcatgtaactaaaccgtgaacgtgatataattacacgatcttcgtcttt

SEQ ID NO: 45120 - DNA, 242 bp, Glycine max
  Clone ID: PAT_MRT3847_140744C.1
tttcctttgtcttggctgtgactccaaagttcacgcagccaacaagcttgcctctcgccatgctcgtgtttgggtttgtgaagtctgtgagcaagctccggctcatgtaacctgtaaggctgacgctgccgctctctgcctcacttgcgaccacgatattcactctgctaatccgctcgcacgtcgtcatgaacgtgttccagttacgcctttctacgacacattcaactctgacaactcac

SEQ ID NO: 45121 - DNA, 478 bp, Glycine max
  Clone ID: PAT_MRT3847_140745C.1
aaagaagaaaaaggaaaatatttttagtagtcatacggataatttgtgaagtacatgcccaaggaagaagagaaaaaaaattgttttttcttaattaagacagtgaagagtgagaggtttactctctaaattatacattttaatttatactatatataattaaatgttatagatttttgcaatgtgcaaaataataataaaaaaaacgatttcctcttatacaacgattaacaaacatactatagaacgtgcaacatgttccttgctgaaaagataagtttgggcagaaaatacaacctattcttcttcaccaaccgacatgttgcccatagtcgtgtcacctgaaccaaaaaaaccattgaaattcccatttgatgataggcaccgcacaatataaatgcaaagccagagtttgaacatcaatgcaagccttaaacttaaacaagatgatttgtggctacttgcattatcactaaca

SEQ ID NO: 45122 - DNA, 309 bp, Glycine max
  Clone ID: PAT_MRT3847_140746C.1
cgatattacgttgttggggtactttttttcgtttatcaaccttttgttgattgaagagaagcgacaaatcactcttactcttaatgttgaaacgatcggatcacctttcccacctccatatttttatgcgaacgttgctctattcctggtggagcctacaagcatccgcggggggttgccgcccaacacgttgattttggaacctccgatgggctcatgggtggacccattctataccttcagagagctgtgttcgatatcctttttctctaaatggccggggccgcgtttgacggggatgtacggaac

SEQ ID NO: 45123 - DNA, 1557 bp, Glycine max
  unsure (1)..(1557): unsure at all n locations
  Clone ID: PAT_MRT3847_140747C.1
ggaggctgtcaccatattggttgcagtattgaactttcatgataaattcacttggttgaaaggatgtggcctattaactattatggttggtgtcagtttgtttaattggtacaaataccttaagcttcagaagggacatgctggtggcagtgatgtggaagagcattcaagagattctgcagctaactctgagccgggctgttttttctttttttttcactttttttttttcatgcaagtttcacttcgttggtatcatttggtcgattcactattttcgttggcctctgtttgcttcgttgggaccagtactctacgtttccgccggcactttctccttgcagtgcagctctgccgcattcactacactctgtagctctgctggtgctttttttctccttctatttgcttttgctttcaggttggagacaccaagtgttaaactatccggcatcatattaatcacttcagagaccatattatacacagttgcataagagccagattttgatttctggggttttgttctcattgtgtgtacctgatttacattcttgccattcgtgttgaactgaaaaccaaattgaaagaaagaagcctacggtctgaaaaatccacttgtcctgatgagttatgtaagtccagtaatggcagcagcaactgcccttctttctcttgcattagatccatgggatgaattccgagaaaacaagtactttgataattcattgcatattactcgaagttgcttgctgatgcttcttggtggcacacttgccttttttatggtactaacagaatatgttctggtctcagtaactagtgctgtcacagttacaatagctggggttgttaaggaggctgtcaccatattggttgcggtattgtactttcatgatcaattcacttggttgaaaggatttggcctattaactattatggttggtgtcagcttgtttaattggtacaaataccttaagcttcagaagggccatgctgatggcagtgatgtggcagagcattcaagagattctgcagccaaatatgttattcttgaggagatggaggaacaagaagatggcatctgaaaccattatgccccaaataataattcaaagccaaatgaagccatgatctctaaagacctatgggcacaaaataatcttccagcaatatgccagttggcctgcaccatctcatcttttcgagagccctgttggaattgtggtgtcaaagttctttttaagtttctttgagtgaacaattttttaagatataatgccctcctgcgatcaacatcacttatattctgtaaaaatatgcactcaaacagttaatagattttgtcatttttttagagttgacaaggtatatgttgcagatcacaacaggttgtaatagataattttttctcatttttgcattctagtatggaattgtattttttttgtcatattttcagtatttttctagtatatactaaaagcagttcttaatttcttgcccttggccttcgccatctcatctntataaaaaaaaaaaaaaaaagggcgggcc

SEQ ID NO: 45124 - DNA, 232 bp, Glycine max
  unsure (1)..(232): unsure at all n locations
  Clone ID: PAT_MRT3847_140748C.1
tcgcangcacgcgtacgtncgctcggattccgagcttggatcctcnagagcggccgccgnctagtgnactcgttcgacccgggnattaattccggactcggnacctggcaggcgnaccagcnttccctatagtgagtcgtattagagcttggcgtantcatggtcatcgctgtttcctgtgtgnaattgttatccgctcacaattccagcacnncatnaaatnnnnccaaaa

SEQ ID NO: 45125 - DNA, 178 bp, Glycine max
  Clone ID: PAT_MRT3847_140749C.1
acattgtgttaagactaatggggtaaggtcaaaattccaatggggaaagtacgatgccaggaagactaacgtcctccttgaactacttacgaaatcaaaactcatgccaaagaagccttaaacggacaatcttcaagctaaaacaaaccatggggaatcggcagcaccgttcaaacca

SEQ ID NO: 45126 - DNA, 549 bp, Glycine max
  Clone ID: PAT_MRT3847_14074C.1
tctcgagccgattcggctcgaggacaaattattgttaaatctgctttccattcctgttgcagggaagggatcagatccagtgagaaaaaaactccaaaacacaagtcttttgtgatcccttattcattctcaagtatagaggaagagcatgctacgcaactgcttcttgtaagcactgtttcaccccagaaaagaaggacacttttttgttgaatactgagtatctcagtttgcttcgggttatattggaaagaagtaaaattttggatagtgaggaatttccagaatgttcaggttatctcccagaaggagtcaaagatccaaaggcttcaaggtgaagcatgctctacagttatgtgttctgcttggagtttgtatctggctggtttaccaactcaaacactctaaggagaagaaatcatcctatgtagaaagcacaaaaactaccagtgaggttgtcaagttcgggaggaaggacctccatcctcgcgtggaggaaacttccgtggtagatgcaaggcacaaggaagaggatgagaaagaagaatc

SEQ ID NO: 45127 - DNA, 445 bp, Glycine max
  Clone ID: PAT_MRT3847_140750C.1
aggctcgagaggacatgtcatgtagttaaaataggtttgcttttcctcatgtgggtcatttttaggcatgatccaattgattacaagagctgctttcactgagatccccggcatggctgttgcaatttatcattccaaaaacagtcgaatagacgatgagaatctgggtctggaaagaaccaacgatgtgaccacagatccgttctatggattgaggaccgcgactatgtccccaactaagtttgatggaactgctcttgctccaagagataaatgaggctttctagttcaacggaatattacgtgtgtaaaggtgtaggcaccatattcttatgatcgcataggtgggtttattcatctgccgagccgtccgagcatcattgcagatggggttcttggccaaaaattgagggatgtgtgtgctcccaaaaatgttgaggattgg

SEQ ID NO: 45128 - DNA, 496 bp, Glycine max
  unsure (1)..(496): unsure at all n locations
  Clone ID: PAT_MRT3847_140751C.1
ggaagaaccgaaccgaccgcacgcgttcgtacagctccaaaaaaacgacttttttgagttttctaaattcttaaacatcanatgtggccacaatctgcggattattaaaagagtcatttcgcgtcacattcatacattccaataacatcaaaacatatctaacatctcaccattctactaacaccattacttcactttttctaattcaaaatctcactatctatatgcttatctcaccaaaaaattataaatgcatagattaaacaatccctaccattttccctattaatacatcaaaaccattgcaactatctttttcatgattctcaacaacctatattacatatattctagacttcacattccatatcttttttttttgatatacaccaaacttcatgactcatgaaatttctatttggctttattgcatttcatggctaaacttaattctatccctcaaaaaaatttttattggacaacaattctaaatttt

SEQ ID NO: 45129 - DNA, 430 bp, Glycine max
  Clone ID: PAT_MRT3847_140752C.1
cccacgcgttttttcagtataaggccccagactcaacacaccagtgacgtcactggtacctgtgttggggagctccataatactaatgtggacaatccagaactacgtgcagaaagagtacgaggctgcagatcaggtgaggcatccattgcgatccatcgctatggaattctacaaatacaagcaacagaagattggggcggacacagtgaaggttgggatgtcgatcaaagctcaagtcatcccttgaaagaagttgtcatatcaaagggtggccggacatagataaccttggtgagcaagaaaatagtcacagaagctaagggtgtatcccagatcatacacctgtccgcttttcacaggtggctcgacgtgcttggaattatacaaatgtgaaggcaacttgagtcatagcaccgctgccaaatgg

SEQ ID NO: 45130 - DNA, 238 bp, Glycine max
  Clone ID: PAT_MRT3847_140753C.1
gtgcaatatatgctagatttgaacacttacagagatcaacttgtcaggtatatggagcagtcacagatggctgtgattactgaggatgcggttgggtcctcatctttcccgtattataactagtcaaaccatttccattctcgaacgcgtcatgatttctctgaggctgaaaagatctctttagggttgatggagttactgtgagtgcaggactatagtccactgcttgagttacctc

SEQ ID NO: 45131 - DNA, 205 bp, Glycine max
  Clone ID: PAT_MRT3847_140754C.1
ttctcgagccgaatcggctcgagcggctcgagagcactcttctgttatgtttggtttggggttggttccgcgctgggaacctaacttcacatacgctttttaactcgatttagtgtgtattttggttacagttcaatcagtaagtttgcttgaactcaactttgtaaacttaagttttttcaaagtagatttaatgtacagtttg

SEQ ID NO: 45132 - DNA, 240 bp, Glycine max
  Clone ID: PAT_MRT3847_140755C.1
tttatggcttgacttttggactccctgattgactacaggtgtgcttcctatgattgtccttcaggagatatatgctttaagtaatatcttatagaagctggtgttatgtgctgataaatggaaagatgtaatcttattaatgatgtctcttagaactcttgaaggctcttttaagccaacacattatcttttatttcaatatatatatattattttctaagaagaaatagaagtaaagga

SEQ ID NO: 45133 - DNA, 373 bp, Glycine max
  Clone ID: PAT_MRT3847_140756C.1
tttttctaactcaggggccttacacttgttgtcacagcccgatcataaacgaagattgggctacagaactgtctcatggaagctggactaaagagatttcactcggtctaaacagctttaaaatggtaaatttggtcactctctattccatctaagacatggtcacacccatctagctggcaacgattaaatgccatctaaaaacgtacatttgccccacttgctacatagggccatctacgatacagcggccgctggcgtggggcatgccttcaattgtactggctgccgattcattggcttcagatttttgccccacgagacattttcgtccttggcattgcctttttaatttgaacgagccacttttttg

SEQ ID NO: 45134 - DNA, 582 bp, Glycine max
  unsure (1)..(582): unsure at all n locations
  Clone ID: PAT_MRT3847_140757C.1
cggctgcgagaagacacagaagggtcgaccaaaaaacctctagacgacattggctaaaaaaaccttagttgatgtttgccaaaaaaattgtggttgacattggtaaaaacaagtgtccttaaattctttaattattaagttggattaattctaattcattaagcattcattgaagaataggttgagtttttaaaaaagtaataaatgaatggatcattaaccattcataaaatattatctattttatatttttttaaaaggacctattttatcttttatataaggcttaattatgttttttccttaacaaatatttgatttttgtgcttgattcctaataattttttgttttgtgattagtctctaataaaataacaatttagtttttggtctttgatactttttgtagtatctaataaattagtgaattttgtgtttgggtcctaaatatattttttcatttgntaataatcaaaaccaaaataaaattcgctaatttatcaaataaaaaacataaaattcattaatttatcgngaactaaaaaatgtcattatctttcataactttatcccattattggc

SEQ ID NO: 45135 - DNA, 389 bp, Glycine max
  Clone ID: PAT_MRT3847_140758C.1
gatttatgtctccactcggcatccaattcgacgtcaacacattggcatccgcccgcctttcgcaaatccagaaaatggaactatggactccgttcgcgtccagcggtgtggaaagtgtgcgctcggcccaagtcaatctgccgcttcaggccgaactgaacgccaactcggaccagggcatcagcctaaaggcgaacctgcccaagcagaagacgcagtgggccagtgtccattccctacccatcaccttcactggaaaagtggaccaaaacaccaaattggtgcgcgagccgcgccaaattgtcaccatccacgaccctaagctggagagacagcagtacgagctgtactcagggccaggacagaagaactatggcatgccattacac

SEQ ID NO: 45136 - DNA, 407 bp, Glycine max
  Clone ID: PAT_MRT3847_140759C.1
attggatgtacagccattgtggaaacacagaggggcctgattctcgctttggatctgctcgggctggatccataatgggctgtttcgatggccaagttgatggcgcctgatttctctgccacctaaaaaaaaacatggacggtttcagcgagctaaattgggtacctacatctggcacctgttgcgataatagacatttccgaagacttggacctgggacattattactcaaaggacataacctatcagtgtagagtgatgacgaagaagacacttcagttgctggccaggaacagttcaatgggagcgattttggtgagaactattctgatgcgaagctttacgccatcaaaatctataaggaggatgatattgataaaagcatatgatagagctcatgggcaagc

SEQ ID NO: 45137 - DNA, 357 bp, Glycine max
  Clone ID: PAT_MRT3847_14075C.1
ctcatctaacgttaaatttacaacacattctttttctctcattctatactaaattctccttcatcttgtgcactccaattggggggcggtaacacataaacattcattctcaaacccctttacatgtttcccttcattaaatttttttctcttgggaagttcaaaactaaccatctgcttctttataccttaacaattctataatatttctaatgtattcatctttcaatattctccaatttcccttaccaaaaccatgtaattcctaaaaatattcttcaaaaatataaaaatccccttcccttaaaattaaaatataatcattaaccttccattcttaccttttccctttaaaaa

SEQ ID NO: 45138 - DNA, 1035 bp, Glycine max
  unsure (1)..(1035): unsure at all n locations
  Clone ID: PAT_MRT3847_140760C.1
cattttagcaccacagaattgcccggtatctagatatgcatagataaagaggaattggatttcactggcgaacgttatgaatacttgcactattattatgaattccatgccagttccttctcctttgttgataaagtcctttaaaacatttccatcgttcaaatgctgcagcaagagctcagatgagaagggaagtgaagatgtgaaggacacattatctggggtggtggacgagcaagttgaagagttcttgagtagaaaagagaacaaggttttgctggatggcttagagaaggcgtcgcagagggttgagatggctaagagagaacttgctctgatccgaaaacaagaatttgctgtcaagcagttgaaggattacgtcagccagcttgaaagcaaagttttcgagattggagaatgtcaaagagacatatcagaggcaaaagccttggtggaggaagcagaacgctctctgttggtaaatgtgggaggtcctgaaaatggcagtacatccatggggatgaaaagtgaagacatcgatagagatgaagagagatgggagtcagtaaaagcagcatcaatttctgcccttgttggtactttttcagggctccccatatgcttcactcaggtcaccaacacaactcagctgcttctccctttagcaatcaacttcatttgctgtgcattgtttggagtgacttttcggtacactataaggagaaatttggatgatgttcaacttaagacaggggtagcagcagcttttggtgttgttaaaggtctcgcaaccttaggtggtggaccacttcctgaaccaaacattgaaagcttcttgtcacatgcccaggaagggacaatttatttgtctgagaatcttttgatttttgtttctgctgctgttgctctagattactgtttaaagacaaggcttttgagcccttttccaattgattgatcttagcttaaatacaaattaattttttcaattatcatggcttaaatggacantnatcaatttgnnnnnanntttca

SEQ ID NO: 45139 - DNA, 288 bp, Glycine max
  Clone ID: PAT_MRT3847_140761C.1
gggggacaaaactaacccagttttaccatggcgagaaccattgaatgtcaccccgctaaaatctaaaagacgcgcgggagagactaagctggactcgtcgcggtacgaccccaacaacgccatgtcaaacgaggattcaaaacgcgacgatacgaacatcgccacacatgggatttgggcgggcccacgcttcggggaacgtgaggatgtttgggcatctattgggagggaaaatgggctgagctgctgcatgcggtggtttgtgtgaaatgaggctgagaatgagac

SEQ ID NO: 45140 - DNA, 326 bp, Glycine max
  Clone ID: PAT_MRT3847_140762C.1
cccacgcgtccgatcgttgtgcacccatcgtaacagccatagggtgctacactgaccgggcttgcctgactagcgggactgccaagcactctccaaactcacaacaatatatatatgtgctacgagaagccataaatcgagctctttattctaagaatctatcacagtaccttccaaagtcaacactcactgttgtaaagacatataatacttcactcgcgaccagatgctaaattgatgacaaactgcaacaatgactcacaaaagcaacaacagataaggcgttgatcatgacgaacatgttcatggtagactcatgaagaaca

SEQ ID NO: 45141 - DNA, 378 bp, Glycine max
  unsure (1)..(378): unsure at all n locations
  Clone ID: PAT_MRT3847_140763C.1
gttcactcctcttctcttgccgctacggaattaccacatcttcatctagctttaacgagagataggctcagataaggttctcctcatccttgctgtcattccccatctcaactcctcagnctccactaccaccctatcacctgacacactagctctgcaagcatagacacacttcgaactgatacgtgtaaataggtagctgcttacacgcacccgaggcccttgaactctgcctgggtgctcgactgacctgcggcttagcgattacgaggaatcaccattgatattgctttgtggaagtttgaaacaacaaagtattattgcacagttattgatgcgcctggacatacggatttcatttataatatgaatactggg

SEQ ID NO: 45142 - DNA, 518 bp, Glycine max
  Clone ID: PAT_MRT3847_140764C.1
tgcgcgccagggcaagagtttcatcctcaaccagctcttaggaaagagtagcggatttcaagtagcctcaacacatcggccatgcaccaaagggctttggttgtggagtgcacctttgaagaagaccgctcttgatggaacagagtacagtctcctgctattagacagcgaaggaatagatgcttatgatcaaacgggaacatacagcacccagatattctcattggcagttcttttgtctagcatgttcatttataaccagatgggtggtatcgatgaggcttccctcgatcgcctttctcttgtcacccaaatgacaaagcacatccgtgttagagcatcaggaggaaagacttctgcgtctgagctaggacagttttccccaatttttgtctggctcttaagggacttttatttggacctaacagaagataacagaaaaataacaccccgtgattatctggaaattgccttgaggcctgtccaagggagtggaaaagatataaaggctaaaaatg

SEQ ID NO: 45143 - DNA, 211 bp, Glycine max
  Clone ID: PAT_MRT3847_140765C.1
aacacattgactcaagaacagatgcgtgcttatgatgtaatgtctgactagaaacgtgagattctttgcatttcaatcgctgcgtgcatatagtcactggccatcgaggctcatatcatgctgattcatgtactggctgtgcagcaagatttaatcgacctggaacaaagggttgcacgtatatgaatactgaatgctttcatgttcatga

SEQ ID NO: 45144 - DNA, 301 bp, Glycine max
  Clone ID: PAT_MRT3847_140766C.1
agaaaaaaaaaaaatcccaaatggaaaaccccggcccctccccctaaaaaccaaaaccccacggaaaagaaaaggcaatttcaaaaaaaaaaaccccagcccctagcccaaatcccaagttaaggaccccggccgggggagggaaaagttttttatcgggggacccaaaaccaaaataccggcccgggggttaccaccgggagaccgggaaaacccaggaccttcccaaattaaaacgcttggggcacgtaccccatttcccatgtgggcggaaaggcaaaagggcccagccccgtcccct

SEQ ID NO: 45145 - DNA, 279 bp, Glycine max
  Clone ID: PAT_MRT3847_140767C.1
gtcctcttctggtggtctactcgtggggtacacacccctttcattcttctgttctacaaaagtcttcaagtaccccacttgactttctcccttgtctcctcccaatttcgattccctcaatcctaccaggtggagggccctgaagaaacttcggtgtgaggttttctctttacatgaagtgaggtccattagggtttctctcgattaaagccatctttataggctaataggaatggagaaagatcacaactattcggcaccaccaccatccatgcctcg

SEQ ID NO: 45146 - DNA, 982 bp, Glycine max
  Clone ID: PAT_MRT3847_140768C.1
acggctgcgagaagacgaccgaccggcgcctgcacgcgccacacggctgggagacccacgcgtccgtacggctgcgagaagacgacagaaggggatgccgaaaagtagtaccaagatggcttcagttgtgtatctcctctttggcttccatctcattgttatcatgtcaagttccttacccgcaactagtgaagtgtttgcaaaacagtatccatccacagaacccgtggaagaaaaactcacccaactccacttctatttccataacaacataacgggggaacacccaactgctatgaaaactgttttgcctcctaaggggtccattcatggttttggggctacttacatgatggatgaccctctaactgaaggaccaagtccaacttcaaagcttgtgggaagatctcagggaatatacgctttggcttcacaacatgagcctgggttgctcatggtgacaaattttctcttcactttgggcatttacaatggcagcaccctcagcattcttggcagaaaccctacatttataaaagttagagaaatgccaattgttgggggtactgggatcttcaaatatgcaaggggttctgctgtgcttacgacatatgtgtatgacatcaccggtggtgttgcaattgttgaatacaacgtgactgtcatgcatgtttgagaaataggttgaagctttatgtaggtttattttcggtgtttttaaggtccttaagaggatatccctcttgaaaagtgagtaggttttaaatttaagcagcagcagtcgtcgtgcatgttgtattaagtagaggctagaaggcagggagacgtacacagaactctcactgtgggaaaatattttatatccgttgggttaaacaaaaaataaataaaaatggatcaattaatttagtcccctaaaaaaaaaaaaaaaaaaaaaaaaaaaaaacggccgctttaaaggaacccagcctacggacggggg

SEQ ID NO: 45147 - DNA, 2380 bp, Glycine max
  Clone ID: PAT_MRT3847_140769C.1
aattcggctcgagtccgcaacgatatcagtcttccattcatcaacaaccactctctctcccctctctgcagcaaaaccaattctccggcgacatctccggtcaggttccggcagcctctccggcgactcggcatggcaactcaatgaatgcggaatcaccgccggggctcctcatgtcggtttcctgcctctccgactacgacctcctctgcggcgaggactcctccggaatcctctccggagagtcgccggagtgctccttctccgacatcgactcctcacctcctccgccgtcgccgacgacagaggattgttattcgatcgcgagcttcatcgagcacgagcgcaacttcgttccgggattcgagtacctgtcgcggttccaatctcgctccctggacgccaacgccagagaagaatcagttggatggattctcaaggtacacgcgtactatggctttcagcctttgacggcgtacctcgccgtcaactatatggatcggtttttggattctcgccggttgccggaaacaaatgggtggcctctgcaacttgtatctgttgcatgcttgtctttggcagcaaagatggaagaacctcttgttccatctctcttggaccttcagatagaaggtgccaagtacatatttgagccgagaacaattcgtaggatggagctacttgttctgggtgtcttagattggaggctaagatcagtaacaccactttgcttcctcgctttctttgcgtgcaaagtagattcaactggaacttttatccggttccttatttcccgggcaacagaaatcatcgtatctaatatccaagaggctagctttcttgcttactggccatcatgcattgctgctgcagccatactcactgcagctaatgaaattcctaattggtctgtggttaagcccgagcaagctgagtcatggtgtcagggaataagaaaagaaaaagtaatagggtgctaccagttgatgcaagaacttgtgattaacaataaccaaaggaaactccctactaaagtgttgccgcagctgcgagtaacaactcggacccgaatgaggtcaagtactgtctcatcattctcatcaatcatcaatcctcttcaacctccttctccttgtcttgtaagaggaggaaattaaataaccgtttgtgggtagatgacaaaggaaactccgagtgaagagaaaaagaacaacaataataaaagaagggaagaaaaagagagggaataaggtgggccaagttgtctagaaacctcaacattttttagagggtttttgcaattaaaaaatgacttgagtgagggtgtagattataatagtatatatatgatatatctctatcgtatatactaagagagtttgatgggtttggagtaatttttatttttatgttggtgacttattaatattgagtttgcagaattcacctagggaagagggattttgcgacatgttaccgtgggagaggaaatgagagaagaaagaagtgaaacactgaaacaggggtagaagaatttaatgtgatttgttcttgtaacctgtgagtgtggaagaaagaagtgagttgcgggctggaattcaaagtttgcattaattattggtgaaggagatgaaagatggtgggggcaacgctgtagagattgagaagaagaaaaagtagagagaaggtatgaaaaactctggtgattattgaaagttgaaacttagaagtttgaagtgttcaatgttcatatcatggtattcataagtcaagcaaagcttcatttcttggccagcatcactgcttcttcatcatccacgttactactactttgatgggaccctcaacagtaaagaacaattgaagggcaataagttgaagtttggctacaaatcgtggactttttttgttgggtattggcacgtgtgcagtcggttctggtgcgtgccaatgaagtgtgtacgtgtgatttttctttttcttggtttttctttgcgggagctgtttatatattttttcctatttttggccatgagttttggcctaactatacaggactccaatggctggtgtccgcgcgtgtgatggaaacacgtgtatatataggttttaatttaaaaaccttgaatttttttatttgttttcaagagaggagaaccctctttcacataggggtaaaaggtctttggggcctttttcctgtgtgctgtgtattggattgattaatatataatgacaactattaatttcttaaaaaaaaaaaaaaaaaaggacgacctccaatggctggtgtccgcgcgtgtgatggaaacacgtgtatatataggtttaatttaaaccttgaatttttttatttgttttcaagagagaggagaaccct

SEQ ID NO: 45148 - DNA, 330 bp, Glycine max
  Clone ID: PAT_MRT3847_14076C.1
gttttctttttttttttgaggaagtactctcataaaattggtgatgccatgcaccaaaattttggggttgactgtgatgagcagtagatcattaggcctcattgaggttgatgacaatgatggccgtgcttacccttgcaaaggaaacgaacatgagaaagacataagcccagagtctttttttttaaccctaatagactcatttacagaatgactagaagaggactgctaagttgctaatcgttgagcagatgcattattctttttgccccgagggaacaggagcagttgcctttaaccacttatgcatccaaagcctgcgctgctgat

SEQ ID NO: 45149 - DNA, 582 bp, Glycine max
  Clone ID: PAT_MRT3847_140770C.1
ggctcgagcaacaacttctcccactcattcatcaacaaccacacacactctctctcccctctctgcaccaaaaccacttctccggcgacatctccggtcaggttccggcaacctcatcggcgaatcggcatgccaacacaatgaatgcggaacctccgctgccgccggcgctcctcatgtcggtttcctgcctctccgactacgacctcctctgtggcgaggacacctccggagtcctctccggagagtcgccggagtgctcctcatccgacatcggctcctcaccacttccgccgtcacctccgccgtcgccgacgatgacggaggattgttattccatcgcgagcttcatcgagcacgagcgcaacttcgtccccggattcgagtacctgtcgaggttccaatctcgctccctcgacgccaacgccagagaagaatccgttgcatggattctcaaggtacacgcgtattatggctttcagcctttgacggcgtacctcgccgtcaactatatggatcggtttttggattctagccagttgccggaaacaaatgggtggcctctgcaacttctatctgcct

SEQ ID NO: 45150 - DNA, 201 bp, Glycine max
  Clone ID: PAT_MRT3847_140771C.1
tcccactctttctgccacacgtacgcccactcttcctttataaatactataaataaaaaataagtgaaggttcaatctacctgaggtcaagaaaactatctcatactttcattttacaatactacagtataacttctcctaataaaatttcattaccacctattattacttgttatatccctatactaaacttataatacc

SEQ ID NO: 45151 - DNA, 512 bp, Glycine max
  Clone ID: PAT_MRT3847_140772C.1
gagccaagtgttggacttagccgacgctgtcgtcttcaccgtataagaactatcgcctggttctgaacagtgtgtgattcggattccgacgaggatgtcgtcgttgggttccccgaagaagcggctgagatcccaaacagcagaagagaataaggaagaggtcgtttgttgcgggatttgctacgctgagcgtggggtttcgattacaggggaaatcgattgctgcagccaccacttctgcttcgtttgcatcatggaataggcccaattttccgccaaaggtttatcatcctcatggaaatatggcaactggtccggctgattcttatactgaaaccaaatgtggtgtttgtcatgctggaacagatgagcatcttctactactttgtgatctatgtgatactgcttcgcacacatactgtgttggcctgggctatactgtttctgatggtgataggttttgtcacgattgtgctatttcccgggagaccaatatcaatgaagaatcagac

SEQ ID NO: 45152 - DNA, 2291 bp, Glycine max
  Clone ID: PAT_MRT3847_140773C.1
gtcgatccagcgtccgcgctgtcgtcttcaccgtataagaactatcgcctggttctgaacagtgtgtgattcggattccgacgaggatgtcgtcgttgggttccccgaagaagcggctgagatcccaaacagcagaagagaataaggaagaggtcgtttgttgcgggatttgctacgctgagcgtggggtttcgattacaggggaaatcgattgctgcagccaccacttctgcttcgtttgcatcatggaataggcccaattttccgccaaaggttctcctacgttcgctggctccctatgcatggcgtcttttcttcctccagggacgttaaggtttatcatcctcatggaaatatggcaactggtccggctgattcttatactgaaaccaaatgtggtgtttgtcatgctggaacagatgagcatcttctactactttgtgatctatgtgatactgcttcgcacacatactgtgttggcctgggctatactgtttctgatggtgattggttttgtcacgattgtgctatttcccgggagaccaatatcaatgaagaatcagaccaacaaaaattttgcgcaacatgctgagccaagtgtaaccatcaatatctttgatattgtgagggaaacaggcagccgtgtggttaatagacctagggcatctcctttacaacagaacctatcatctcctgttattcctttacctgattggttaagttacttaagtagattaaattgaaaaggttttgtcttaagtgtcaataatatgcagcggaagtgaggcttttttagttaaaactcgaattctttaaaaaggggttcatcttagttccgttgagataaatctaaatagggaagcatagttagtgaaaaacaatgttctggttccttatcatatttcaaattggatggttggcattctatggctaccacaagcccataacaatatactggccaaggtctgccttctaacaaaatgttgaatgagagagtctttaaagatgctgactaggcatggaatatgatggacaggtcaaagaggatacaacgcctcatcatagaacaggcagcattataggggtgtgaatcttgttaatgaacaaaagagattggataaaagctctgaggatagaaaaacaattctccgaactgaatgatcaacatttcaaagcattagtcttgaggaacactaaaatggagaagcagtgtgactattctagtctcaaccagaatttggaaaatcgctctactctaaatttggaagagaaaaagcaaagtagggttacatgtgagggaccatactactcactcaaaaggatattgtgaacgtccattgttatcaaatttctttttttccttcatatctacatgatcattgtaggctgaaatatttataggtgttttgtgtaccctttttacaatccaaacctgatctttaattaggttgagtgtgtgtctagttcagcttattttggagaaataataggttatttttgtcaatgtctggagaaaacttttgaaaaataacaattgttttcttaaaaccatttccaaacatgcatcaaatgcattaggtttgcattcaacatttagcatatcaaccttatatcatatttctgttcattcgatgcgaggtggagagacagagtgcacctctatgccaggcacaaattctatccctcattacaaaaagtgttcatgataaatttctaatgttgtttttcctgtatgtatgttgtaagctgttaaacaggttgcatgtaaattccaaatggtaactgttacttgaatgaaagtaatttcacttcaagctattatcttgatgcaggtgttgataccttcaaggtagttgcaaggcaggccactcataccatcttggctacttgcagttctgatcagcaaaagtctagtacatcctcctctagctcagtatgcagccatgccgacaatactcctcagtttcagaaatctactttaatgcctaattgttgcaggcaatgcttttatgactttgtaaacaatgttgtcaactctaccatattggagaaagtgggttgcgcttgatctacattattttttttttctttggagagtgcatcatgtatttctcttgctgtgattattgttctcatgcacctactctgtaaaaaatgttacttcgtggcccaggtaactgcattgtaaaatttatgtcgtaggtaggggatagcagtgtaatgtaatctatttatttttcacctgaagggaatagttgaggatataaatggaaaattagagtattttgttt

SEQ ID NO: 45153 - DNA, 150 bp, Glycine max
  Clone ID: PAT_MRT3847_140774C.1
caacattaacaagtcctcaattttgttaacacactatgaaccccagatcctaaggttcatttcaaggtggcaatcggtgtcaagttttgctccttgtgaccattctgactttagtcgtgtgaggcgtgggaaccactgtgtctggggttg

SEQ ID NO: 45154 - DNA, 643 bp, Glycine max
  unsure (1)..(643): unsure at all n locations
  Clone ID: PAT_MRT3847_140775C.1
gcaaatgctttattttaccatggagatactcaataatggatcttcatggttacataggacatgaattggcccccgcatagagggtcgagcatatatagggttgtgtgtatgcaatgcgccaaaagaagagaaacttcgtacgatgtcgattaatgataagttgttggttagttccatttgggaattaataattggataagcatatggccgggtgctgctgttgcagggagcaaaacagtgggtgttttttatttgcataaaaggatgattattattgcttgagtacctgaccctttagtcacggttgattagaaggatgaccagaaagtgattagccataaagatatatgtatatatatatatatatatgtgctcaaaaaaacttataacaaaggctatatagcataancttttgcatccaatccagctcctcatagggactgatgtaaccatagcgagcatgcctctcactttcatgactataccatgcttaaagatcatgctttatgggcttgcattccaccatttcttgcccagaactgaaacttntatgtgtaattgcacagtatacacgcatgtgtatcacaattgcaatgagtgcttgatgataaaggtgtttgtaatatcttaaagctttgtttat

SEQ ID NO: 45155 - DNA, 1066 bp, Glycine max
  Clone ID: PAT_MRT3847_140776C.1
gtcagtactagctgaggggtgtaaataagtgacttttggaccatgcaattgcaattttccttatgtgaaaagtgattatctataattaatttgtgttctatatttgactaagatcctgcaaccataggaagcacttatcgcttgtaattttcaatgatcaaaattttacatttgttcttttttgttggcttcttcatctgtggcaattaagtttctatcacggaatacaaaagatggctcctatttcaagaatctacccaagtcaagtgccattaagctcattgatttcgggagtacatcatttgaacatcaggatcacagttatgttgtttcaacaagacactatcgtgcaccagaagttatcttaggtcttgggtggaactatcctcgtgatctttggaccgtgggctgcatactggttgagctttgctctggagaggcacttttccaaacacatgagaacttggaacatcttgccatgatggaaagagttctagggccactacctccccatatggtggtcagggccgatcgtcgagctgaaaagtattttaaaagaggtacacgattaagttggcctgatagttcaacttcaagagaaagcatgagagcagtttggaaattgccacggttgccgaacctcataatgcagcatgttgatcattctgctggcgatttgattgacctcctgcaagggctcctaaggtacgacccttcagaacggcttaaagctaaggaagcattgagacatcccttcttcttcacaagagatactaaaagatatggctaccctttataagtaccccaagcataatggctgggaggagagaaaacacagttgagaatgaattgcatagaatctcatacttgaaatcgtttgattgtttgttccactgtatagtgagaatttcgttttgtaatgtgcattgtttgttatttccttctttcttttgttttcttaccctctgccggctcccccttttccctgttggtgtttgagcaagtaagtaattgttgcttctttgctggctgttgaaaaactcaatttttttaactggaagaacct

SEQ ID NO: 45156 - DNA, 566 bp, Glycine max
  Clone ID: PAT_MRT3847_140777C.1
aaaaaaattccctcacttctctaatctcctgcacactcaacattatcatcaacaccacaccacaacccccaaaagaccctaacaaaaagaagctcacacttttgccagaatttggggcaagccaaaaaacatgccaagttgaaatgcacaaccatttttgtgatccctattccccccttcctctctctcaaaaccccacaaaatgagcctcaaaaacatcaacttcctctaggcacattttttttagttcaagttgtattttattgttctcattctaacaaaagccctaatctcaaacccacaaaatgtgtctcaaaaacatgaactttctctagacactcaattttctttttcttttttggttcaagttgtgttttctattctcatagaaacaaaagccctaatctcaaatgtccacaccatttgttcaacagccaccacccatagaagtgacccaacaagcctacacgacccattcgggtcacgggtcggtgggacccgtcatagcggtcctcgccgtcatcaccgttctcggcgtcatcggcggcatgatcggtaggctctgt

SEQ ID NO: 45157 - DNA, 862 bp, Glycine max
  Clone ID: PAT_MRT3847_140778C.1
ttggagttttttttttttttgtttacaacaaaaatagagcaatgtatagaaatggaattcaactatttccttcatcccctgtacaaaattaatttataaagttaaaagaatctggcgttagtcgtttatatagatatatacataactagagctatgtatagaaatgaatgttgaatattatccttaagaaagactgggctagtaagaattctagcagaaaaacagagctgagaggtgacaagtgagaaccacaattgagtgtagatgaagatttcagtaacccaacccatccataatatccaaaacgttatagttttggtggttaaagacttgtcttgtaccgaagaattccttggcaggtgaactcccagcacttttggtcacttgcaaatgtttgacgtgtcttttcttggccaaaccaagatcctcacttttgctaagtcctggactctttctccttgcaataacctcctccaatagtctcctatcctcatgagaaatttgagttcccaacggcttgttgctactatccacagatagaattaaaaactgtcgcatcttagactgaagttcgagtccttttggaggagaccgtgttgtaggcattggtctcaaggtattctgtctagattttacagagctaatcaaatggtgaagccatgccaacaattcaatgatgtaaacatctatcttctccttatcagcgtaataaagtgtctcgaggcgaatcaggtgactttctatgcaggtgttatcaccaaagtcattacttgcgtttgcccattagcgtaaccaaccgaactgcaggcgaatcacggacgcttggttggacgtgtgatcccaagacggaatacttgtgcgt

SEQ ID NO: 45158 - DNA, 610 bp, Glycine max
  Clone ID: PAT_MRT3847_140779C.1
ccaattgatccttttcctgtcaattgtcattgtcttgtattcatgacaaactatatatcaacagctgcttcccattgattttggttgtaattccacacaatgtgctgttcattggaagtgtaatagtcctagcctttcttcatatatataagtccatgcttccttaatgctcaatggagctaaaaatccaaagctcattagtggcatagctccactagttttaactctaagcaacaagtgcttcttcaagaagggtacgtgtgctgacttgtggtaataagttcaggatcagaaaaaaacttgaccctcacattcagcatgtccttctctaggtctgcttctcagcctcggttcttccaacacaagaaagaggcattttggttctataggtttctatctattgtgtatgattatgtcacaaacttcgggccataaactaaggatatgagagatgaggcattggagcctgctgatctctgtgaccgtaacatgagagtggtggatgttggaggaggaactagctttgccactcttggtatagtgaagcatgttgatgccaaaaatgtaaaattctcgacccgttgcctcaccagcttgccaaggctaagca

SEQ ID NO: 45159 - DNA, 161 bp, Glycine max
  unsure (1)..(161): unsure at all n locations
  Clone ID: PAT_MRT3847_14077C.1
atgggacagcttcttctgggctctgtctcctgtcgngtcccgtagcgcgcgcaccctaatggtcttcatcgccggcctcgtcgtctacatcctccgtgtcgcccaatggcacgtcggccgccgccaaacgctgacgccatttgagacggtcaagatatact

SEQ ID NO: 45160 - DNA, 755 bp, Glycine max
  unsure (1)..(755): unsure at all n locations
  Clone ID: PAT_MRT3847_140780C.1
cgaccacgcgtccgctngaggttctcctgaaaaaaactcatgaattgcattgttgacttcaatagaactacaacctggttcctttatgattcctcccttctccatcttttctctaacttctgcagcatagctccatcttcccaaagaagcatagaaatttgacagcatgatgaaggaaccagaatctatcctataatgttcactcaaaagttttgcaaccttttctcccatccctatgttcttatggattttacaagcacttaataatgagcaaagcattttatcatcagcttccactcccatcctcccaatgaagtcaaaggcctcttcaagcctacctaccctaccaagaatgtcaaccatgcagccatagtgttctacctctggttcaatcccatgaatcatttccattgattcaaatatttcaccacccagatccaccaaccctccatggctgcaagcattcaaaaccccaacaaatgttataccatttggcctaaccctctccttaagcatttcactaaacaactcaactgcttcaatgctcttcccatgcaaagccaatcccccaatcatggaattataagtagacacatctttcactctcaccccatcaaacaatgcttgtgcctcatcaatgtcaccacaccttgaatacatattgatcaacgcaccggcaacaaaccggntaacctcaacaccacacttgcgcatgtatgcatgaatccatcgaccgagctccaaagctcccaact

SEQ ID NO: 45161 - DNA, 357 bp, Glycine max
  Clone ID: PAT_MRT3847_140781C.1
cccatacaacggctttctttgttttaaggggaaaattaaaatcctgtttttttaacactggcaaatgcaattttaaggactaatccccaataaagagattttaggggggtttcatttcatttcataccccccacccaaaaaaattttcctcccccccgaaaaaacaaaataggggcaccccacctcatgatgagctctggcctaggggctgggattttgcccttaattcactggacattcgggaacattcaaaaaaaaaatcagcctttcccctaaagagctttggcatgcgatttttgagacttcccaaagtttttttgcctcacttggaggcattgccttgcataggctttttcc

SEQ ID NO: 45162 - DNA, 305 bp, Glycine max
  Clone ID: PAT_MRT3847_140782C.1
acgcccacgcgtccggaggcctccaagtgctttctttcttttcatgggggaattcaggggggtgttcaacaaaaaacatcctgaaaaccaaacagtgtcttctttgggcaaaacttcttgaaccaaatggaaaaccattttcttattcttaaaaagcaccttatgtggcaaagtctgagaaaaggaaagtggagtacgaaaagaacaatgagagcctataacaagaaacaagccgaaggtcctacttgtggggatgaaaaagaatctgagaagtctttatcttaagtgaatgattaaaattatta

SEQ ID NO: 45163 - DNA, 307 bp, Glycine max
  unsure (1)..(307): unsure at all n locations
  Clone ID: PAT_MRT3847_140783C.1
agacttgttgagtgaagagatagctgaagaggaacttagaatgacacgtgctataattggaccaatgacgtagtatatgcctaagaatttcgtatcctggacaggtacatatccttgtaccactattggaagaactctagatcatggtgactgtgattattattgcgcatccttagcttntgaagcatggaaggatcgatgaagaactatattagatatctatatcgatatctatgttaatgacctaattagtatgcatgagattgctgtgatgatctcgctagaatggatgatatcggttatatgc

SEQ ID NO: 45164 - DNA, 448 bp, Glycine max
  Clone ID: PAT_MRT3847_140784C.1
tatgactacacgaacaaccagtccacgtacctcgccgacattgtcgacgtaaaggacgcccccggcaacgccccttgggactcctccgaggatgagctgtttggcgatatcgacaaagctttagctctaaagcgcaacgaatgggggtaccatgggcttgtgcaacccaatccccccaagcaggaccaactgcccgtcgtcggcgtcgacgagctccaacacggacgagcgtcggcgactaggaggaaatcgagcgcctgcagggactcaccggtgacggaaacggaagctcaaccgattctacgattgaatacgatattgacagttatggtaaaagtaaggtgaggatgcgagaatggacatctaagatgactctgggtgagctctttgactagagtaaggacgtgccactgtcggattactgtgatgtgtagattgtaatgaccgg

SEQ ID NO: 45165 - DNA, 213 bp, Glycine max
  Clone ID: PAT_MRT3847_140785C.1
ccacgcgtccggtgagtgaaaagttacatcaacatacccgtgaaagcaaagtcacctattagaccctttggctaaccgtctcactctcatggaatcctatctaaacgactctcttttttccgaagaagatctcgactacgacgactactactactatataacttcagaggacgaagaggtctactattacgaaaccgaacctctctttcttcg

SEQ ID NO: 45166 - DNA, 376 bp, Glycine max
  Clone ID: PAT_MRT3847_140786C.1
cccaggcatcctcagggctcacatgaacttctatgcgactagggacctgtcgtttcctgtcgccgatgtgtaagttacgttcattgatgatactgccgcgttaccgataccttctaatcaaatccaagattcatctccatgcgcacatgacgcttttccagtttgcctcatcccaagaagactgcatatagcgcctattgaaacacgtcatcacctcggattctgataatgacacgcacatgatcaccacattaatcaacacagttattgatccaacgcgcagggaggatgtatcgctctgtatgccaatattgccgcttcataacgctgcttctcaatccgggtataacacgatcattctcttgtcatgcatatc

SEQ ID NO: 45167 - DNA, 239 bp, Glycine max
  Clone ID: PAT_MRT3847_140787C.1
cgagggtatcaactgtgtatgaggagagagagaaagtgaggagcactagcactacacaagctccgaaataaggaggggcgagaaattttggatgcgttggatttcgtagatctgacacataaattgtggtggcagcacaatggatcctggcagtggaagaaacaagctttggcaccactcttaatttgctttaaaacaacgtttaccggggacaccttgattacattaacccctttgtg

SEQ ID NO: 45168 - DNA, 335 bp, Glycine max
  Clone ID: PAT_MRT3847_140788C.1
tcccggctcgacccacgcgtccggctctgtggttaatgttgtggctcttctcacggtgttcgatgagatggtctggggttttggtggttggtatctttgcagaaacaacaggggcttgtgcaacacttgttgggcttgctgttgcgttcgcgacaacttcctcctaggctattcccttgtggtggctcgtggacctctattccgctcttgggtggtactacacttctcttgccattttcaatacgctcaatagggtcttcccacatctagccactgttgttgtctgtgctatcctgctcttactagctgttgtgctgtctctcacgccctgaccc

SEQ ID NO: 45169 - DNA, 319 bp, Glycine max
  Clone ID: PAT_MRT3847_140789C.1
tcggccacgcgttcggttgaaatggctcttgtcttaatcaccaccgcaaatttctcgaaggggattgtcttacgcactgtttgttggtctcacgctttcttctttttttttcaacggcaatttcaaccactcttctttttcttcggcggggttcggcggctttcccgggggcacgccggcttccccgggtccccacttccacctttcgaaaacgaattcagcaggcaccttaaaggtttggggcttttagaactctggtgcacaacaacaacaacaacgccttattccactaggtgggcttttaagacctttgtgcacc

SEQ ID NO: 45170 - DNA, 1156 bp, Glycine max
  unsure (1)..(1156): unsure at all n locations
  Clone ID: PAT_MRT3847_14078C.1
cnnntttctgggtaaatattctgtaattaattaaaggcctattataggtggaaaggaattaataaaaatgtagaacggtacatgttgagctatacattaaagtttcacatgcagcccatcaatattggctgattgctttgagcttacttttcatacagtaacaataataaaaataaatacacttgaatcgtcgcaaacgcgcgcgcattgccatcagacagctcaacattgtgtacttcttatcgttcttccatgttaaatctgttccaagcttcctttagaagatcaaaaaccttctcgcagatgtacttttgttgaatgcttgccccccgctgctgcagcttgtcaggatgcacaaatagagtagctttacgatatgctttctttacagcagtggtggttactatatctgtcaaaggaatcggttgccaaccactatcggggccaaggatatattgtaatgttgaaagcaatgccctcaagtttcctgtcttcccacttgaccaccttttaacatcagcatcaagagattctgctaccctatttctctcctcttgctccttctgcacaaggcagtcacgcatattcttttctgcaagagcctttgccacacgttcccctattctctgatgcctctcaaacctagctttacatctctgagcagaatcaccattagctccatcagatacatcagtagaatcacgaacaccatagctgaaagattttgaatggaagttatgctttattccattatcacgggaagccccaaatcctgcaacagatttgtcagatttatttcttgcatcagaggcagctctctcagagagtgccctttctagggcacgtgcccgtgcctctgcggttgctctctccaccgcggcacgttcggctttaagttttgcttccatagcagccttctcagctggtgtcttctcatttgcctgactagtggtttttcctagcctttctcgcccatcagaaatgtttttctgacgtgcttctgctgcagctctctctagagtcgccctttctctggcatcagcaaatgccctttcacgtgcttcacgaattgctctttctactgctaatttttccttttctctttctcttttcgtctcgtttgcttcagcgagttttttgaggtctcccgcttcct

SEQ ID NO: 45171 - DNA, 385 bp, Glycine max
  Clone ID: PAT_MRT3847_140790C.1
tttctttttataggcaccgggattcatttcacgctaattaaattcagaaggaaaattatcactatagagtcttgaatggccagttcacaactctattcggattcatttcttttttatcactcataacctccaaactatttttctctttcaaaaatataccagccatcattttaggtcgtcacgtgagaaataataaggtgcggtcggtaaactcttttcaaataaagttcgttaacatttctttttcaaataacaagataaaacataattgttttcatcatctaaaactttccaaaatatgggagtttgcaaaatagcacagtgacatccaaagcaaaggtaacagctgtggtggcttcagtcacaacatatacaatcatcaaaa

SEQ ID NO: 45172 - DNA, 1217 bp, Glycine max
  Clone ID: PAT_MRT3847_140791C.1
ggctcgagaaaaaaatttggagtaacaaacaatttaaatatacgtgtgtgtcttattacaaatgcacaatgtcaaataaaagaatctgatgaaggaacaaaggaagagcaagttaccaccattgccaaacaaatgactgcccatggtataaaaatggaaagtataattatgagaggaaagcttagtcaagatgcaaacaagggaataatggatgagaatgatcgcttgttaaatattttttcaaaggaaacatcaacaagattgttgtatgtggagaatccaatttctttgtttggggctcttcgaacaagaaatatagctctggttacagttttcagagggcatcttgaaatcagtccaaaactgagcattaaggtaatggtatacaagaaaacaactgaagagaaatttccttctatgaagaaatattctgataaggctcctccaaatgataaatttgctaaacatgaagtcaaaatagattatgaacacaagagttctaaagatcctgacaaagttgtcccccctgaccaaagaattaaaggctatccttatgggcctcaaatagttcccatatcctctgctgagtgggaggctgttaaattcaaaccggaaaaaggtgtgaagctcatgggatttactgattcttctaatgtatttagacaccattacatgaaagatgtatatgttttcctaccggaacctggaaatacaagagccatgattgcagtttctgcagtagcaagggctatgaaggaaatgaataaggtggcaatagtacgttgtgtttggagacagggacaagcgaatgttgtcattggggtcttgacacccaatttatctgataaagaaaatattcctgattcattttacttaaatgtacttccttttgctgaggatgtgcgagagtttcaattcccttccttcactaatttcccagcatcgtggcaaccaaatggacaacagctagaggctgcagctaacttaataaaaacgcttgatcttgcaccacatgggcaacatggtgttttgctacctgactttacaccaaatccagtgttagagcgctttgattcttatctcgagctgaatcactctatccggtttgagcagttaactttgacgatggcacactcttaactcatacaagatatgatactgacctgcttttgcataggatccagatttcttctcttttgtaggtcttttgagctaaa

SEQ ID NO: 45173 - DNA, 430 bp, Glycine max
  Clone ID: PAT_MRT3847_140792C.1
aaaaagcaaaccagggctggattttttacattaaaaaaataccaaccggttttcctttggggtgttttccaaaagtaaaaccccttcggaaacaacgaacattgaccacgggtttgccggaaatttttacagggggggcacccttgctagggggaacccttccaaaaccttaaagggggcaaggctttacagggtaaactttttttttaagggggcccacttgttttgctctgaacaaaattttggttgggaaaaaaaaaatttttttagccgggtaaaaaaaccccgccttgggcataaaaggaaaaatttgggtcactcaaaggggaaaaaaaatttttttctttccttccccctaaagggggaaaaaaattttcccctgatgagggaaaaagaccttggggggggcaaaaaaaattccaaccccctt

SEQ ID NO: 45174 - DNA, 515 bp, Glycine max
  Clone ID: PAT_MRT3847_140793C.1
ggttccgacaagaaaagggtatcacaatgtttaaattaaacctgacccgggagtcattttaggcttggtatgatttctcaaatgaacatttggtttgggttacaacttaatacaagatcagggccaaaaggggcgtggtggactgcatttgtatgggaaatggacatcccgaaaactagggtgttatcacctttaaacttcggagtcacagatcacatttccccgcagaactgaaggaaatgcctttcctatcacaggaagatcaagcaaaggttgacaagatgttcttcttgagagtgagattatacggttttgcggggctgattgaaattcaaagcatgctctcaagacgtttaattttattcatggcgtggacagaaccttttcctatacccttcttagcacgttttaaggggaggacttcatgttgggcacaagaacctttaaggtttttaactttctcctacgcctggaatatgcggcctatttttcagtacgtgaagcactcacaaact

SEQ ID NO: 45175 - DNA, 2603 bp, Glycine max
  Clone ID: PAT_MRT3847_140794C.1
tgaatgagtaggtgagactgagggctcacgggaacaaatcacccaacaagtccatgtccgaggcgaagaagacaacctggattttgtcatccccaccgtgccgttgatccctacagtttcggaagtttgtggggttaaacaaatggatcacataaaatcactttttatttttatattttaaattttctggcaccactcaaagattcagatagcggaaaatctttcggatttgaggaccatgtagggataagtcgatggggttgtaacagagccacgaaaggagaggagtttttggtttccaaaacctcgtttcttctcaatacacaaaaaaaatgatgcagaaactgcgtttgattgcttcccatggatgccctccggggctatctttgcagcaagagctggccatggttggctgcaccattaccaagggttgtcaaccattagtgtctcttttgtattgaatatgcctctttatttcacatgttaatgtagtggtcaaatgttaaatccaatgaccaaaaagactatggtaatgcctaatccctgaggttggttttgtttctcagatatgatgcattactagtttctagcatgatgtaattaattgttgtgcagatggtagatttgtttattgacactttaagttcttctctgatgaatgtttaatgactcagtgctataaaatttgtgtaatctgctgtgtcttactaagtaatttcatttatattttgttacagaatcaaatccaagcccagtagattttggctttggcatcgttgaacaatgcagtgagcacgataaaattttgcagtgtatcatgtctgagagtgctgaagctgggataggtggagtacatatatctttgttgtctgacttgatgggtttacaattgtcaggcattgatgaacctcaaaaaccattgacacctcttatcccaaaaagcaaattctttatcccgaagcttttgctcgatatttttcaagattcagcctttagttcaaagattacagttcatccagatggtcaagtcacttttatgggcactgcaattgagatgaaagatcttctttctgtagttgctgactcatacttattacgtaagggtgaaaaacaatctatgcttgttccgcacttcagcaggatgagtatcaacgaagtagaagtcagaagtctttcctccacattggatattcattctacattgactgttcctttaaagagtcctgagaaagtgaaagtcaagccatcacaaaagaagaacaagaaagtagccagagagagggatctcttcaagaagaactacttacatgcatgtgagagccttctgtccctaatggttgacaagaggcgacaccggaaaacagcaattctctccctgaagaaatctggtcccgagcttcctgagctcctcacacaattttctgccagcattgccggtactggccttgctgtcctgctatctgtgatctgtaagctagcttgtggaaggggggttcccttttgtgcttataagctcctcaacactgggtttggatttgggctggtttggctttcttgggcagttaataagctaagggatacaattgtctgcatgaacaagaatgcaggaaagcttggactgaaagatgaggaaatgattcaaaaggtcgacaagagcctaagagaagtttacttcagagccgccgcattgctagcagtggcagtgctaaggcttgcttgagtactacctctgaagacatgatcgcttgagtttgaagagcggtaagcgttgcaaggccacacattggaacatccattgtacctgatcagttggatgtccgttgccatgggtactgaggatgtgatagcaaagcaatcttggtttcaaaccaaatgaacctttgcttgatcttggaagcacaagattgtggatgattggcttgatcagcacttgggtggtgtacttacggtatggttagtacctcatttcaataatcaaagcaaagaacatactcgtttgcttggtactagggcggtaagacaaattgtaaaaagtaatgtaaaattttgcaatgaaatactgttttggtgaaattgttgtttggtgtcatcgctaccaaatgatgcaatatctttgcatggattatctctgcaaaaagattaacgcgtgctgtaatgctagtgtcactaatgttcatcacatatagcagtaatcgtagatgtaagatatgaaactataacatgaaattttttattctttttaatagctaaaatctagaatttacgagagtgacagaagtcagtgaaggtgaactttggtaatactggttctgaaagaattgatgttaaagagaaattaattcctgtctgcaaattacggagtattctatgaatttcattttgactggatagcaaagtagcatcatgttttaagagaaaatgttgtatgttttgtggatttcttttaattgtagttcagttaattaattatatttcagttgattgagcagaatatatcaattgttataaatccttttgtagtgtttttgattccttggatatttttttaaggtgtttttgttaaaaaaaaaaaaaaaaaaaaagggcggctggagacgagttag

SEQ ID NO: 45176 - DNA, 345 bp, Glycine max
  Clone ID: PAT_MRT3847_140795C.1
ctcgccgcgaaagtttataggtttgcggacgtgggcaaaacaggcagcgggggcgggggaataggatggacaggaaagcgagacaaccgcaacggcaaggaacaaagcgggcgcgggacacaaacggaacgatagacagcaccaacgcggaagccaggcgcaccggaagggaatcaaagaaccccaaagtgggccacaacggacaaagggaggaaggaatgaacagtaaccccaaaagggcgctgggagccagcgaaaacaagggccgaggggaaggacaccaacggccaaaagcgagaacatcaagccgaggggggacgccgaaaaaaagaaaagggggcggga

SEQ ID NO: 45177 - DNA, 471 bp, Glycine max
  Clone ID: PAT_MRT3847_140796C.1
cggctgcaagaagacgacagaagggaccctttcttctcattgtagatcctaaatttaattattattattataacttaagttttcatgctgatatcaaaatgagaaaaaaaataattttggatatttaattaaaaaaaggtaaaattaaaattaaagatcacagaaaaaaattaaaaaaaaattaatttattaacgaatatcctaatagcgactaatatttatcttttaaaaaatatgtgcatgttttggagaagaagagtttgacaccctgaaaaactgttgggcaaaacagcagctcgccccgaaaactaatggtacgttgaatgataccagctgccgcatacacatcaatttacgatgcatgcgattacattttaaagacaaatacaccgattcacaagtttaaaaaatggtactattcattaagtacttgttaatttttgtgacatactacttttaaatatgaaaaat

SEQ ID NO: 45178 - DNA, 311 bp, Glycine max
  Clone ID: PAT_MRT3847_140797C.1
attgaattccttagaaaacgaaatatacaaattacgaccacgggcatgcgaacccctaaagtgactaaacggccaacaaaaatcatgcaacggggcgctgatgaaaaaacgagcgaaggggaaaaccaaggggcacccgaacgggaccacccgagccgcagccaccgtcttgggagcggacgcgaacccaaagaggcccggcccaaccgcccttaaaagaagcacgccccgcccgaggggcacagggggcccccccagctgggggagattaaacccgaccattgggggcgagtcccctggggggaacccga

SEQ ID NO: 45179 - DNA, 229 bp, Glycine max
  Clone ID: PAT_MRT3847_140798C.1
ggctcgagcgcccttttttttttttttttttttttttttttttttttttttttttttcaaagaaaggttttggcaattgggatttgggaaaaccaaatccattccattgttgtaaatgacccgccttaacagcagagaaacaaagattttcaaatgattttagagttcagggtgcatgatccatatccaagaatgctataaacacaaccaacccataatttttatgacc

SEQ ID NO: 45180 - DNA, 261 bp, Glycine max
  unsure (1)..(261): unsure at all n locations
  Clone ID: PAT_MRT3847_140799C.1
aggagagtcgatcgtgaganaatgaacaagaataagtanngntgnagantnanagaatcgttancttcaacagtgannatncntganttatggtagnncggtgtnggnnanangagctcagttcgtcntgagaaggattgnannggaatagnttatcgaggttnaaaaatgaggggntaagtnttctaangttatanatnatgaagtagtgagttagtggatnggggtataatagatngtcatgnttngtatcttcgnagt

SEQ ID NO: 45181 - DNA, 233 bp, Glycine max
  Clone ID: PAT_MRT3847_14079C.1
aattcctcatttcacacttgccatatcaaagaaaaagacatgttcatttgatcagagatacaggcattaatcacttcaatcattggtttcaaagcacaatctcgccatcattagtacactctaatcctctataattttatcaacacttttagcttattcattcaataatatcttcaattaagccaaaacttactcttatccatactattaatccatcctcaatctttaacttt

SEQ ID NO: 45182 - DNA, 267 bp, Glycine max
  Clone ID: PAT_MRT3847_1407C.1
tatggcttacaatctttgctcctccccttcttctctcttccatgaccttccttccatttcttcttcttcttcttcttgtcgtaagttcaaacttcgaaactcgtcctctttctttcaaccctctccttctcccaccccccattccaaaacccttctccatgtctccttgcacgaacccattcccgaacacctaccaccccacgcaaattcctcgtcttcgtcgaaaagtaattacatctgggtcaacccccgaagccccagggccaa

SEQ ID NO: 45183 - DNA, 375 bp, Glycine max
  Clone ID: PAT_MRT3847_140800C.1
aactagaaaagggggtccccttttttttggcaccaaactaagggtcactgcttctaaaccaacttccaagtttcttttttggcctagtttaattggctttttggggagggccaaaacttaaacccagttcttaaggggtttttttggggctgtttttaaataaaagtcttattttcaaaacaccatttctggtggaaaaacaccttaaaattccttaaaaaaaactgtttctaagtttggttctactatgaccatgacagggcctaattacctttggactttttttaaaggaaaaagttgctatggttttttgattcaagcactaaagcaaaaccttacacttggaggaactgggggtttctttgacccatagga

SEQ ID NO: 45184 - DNA, 1246 bp, Glycine max
  Clone ID: PAT_MRT3847_140801C.1
cggacgcgtgggcggacgcgtgggcggacgcgtgggcggacgcgtgggctcgagccgatcttgagatcactacaacacacccaaacagagccttattcttgagaaacaagtttcttcttcaaaacaacatgtctggaaccgtgattgtttttgactttgacaagaccattgtcgatgtcgacagtgacaactgggtcatcgacgaattgggtttcaccgatttgttcaaccagcttcttcccaccatgccttggaactctctcatggacaggatgatgatggagcttcattcaaaaggtaagaccatagaggacattgaagaggttctgcataggattcctttgcacccaagagtaatacccgctattcaagcagctcatgctttcgggtgtgatttgaggattgtgagtgatgcaaacatgtttttcattgagaccattctgaagcacttgggaataagggaatacttctcggagattaacactaacccaggttatgttaacgaagaaggaaggttaaggattttgccttaccatgacttcaacaaagcttcccatggctgcactttgtgtcctccaaatatgtgcaagggtttaatcattgatagaatccaagattcaatttcacaagagggtaacaagaggatgatctatcttggtgatggtagtggtgactattgcccaagcttgaggctaaaagagagagactatatgatgccaaggaagaactttccagcgtgggatttgatatgcaaagaccctttgcttgttaaggctgaaattcatggctggagtgatggagaagagttggagcaagttctgttgcacttaatcgccaaaatttcaatggaggaaaattctcagttcatttcatctgattgcaagctacagactctctctgtctctgctttggagggtttgcctaaagtcctcccagttagaccataatttcttagtatctaaaaaaaatgtatcataactcaaaaaggggtttttcttttttcgttgattaaccttcatcactaaaattgttaatgttggaagtggtccaaaatgggcagctataatttctagcagatacaaatagtggtttgctctagatccttgcggattggttatttttatgtgtttattattattttacagtggaaattatttgactaaatctgtaagctgaaataagcatgaatgaatgtgaaaataatgaaaagagatggatgcttgtagacaaaaaaaaaaaaaaaaaa

SEQ ID NO: 45185 - DNA, 388 bp, Glycine max
  Clone ID: PAT_MRT3847_140802C.1
aggattcaaatgatagggtacaccaggataaatctttctaaattagcctcatctttaaacagtgaaaccttgggtcataaaaacatattattgaggaacaaaaataagctaagacagcaaaaactcaaactatccatttcttttgatttgtctacagttcggagttttctttttcttcgcctaaacttttgtcgttcactcccacaagctcagtgtcaaatatgagtgttgcaccacctggaatagtgggtgggggaacctgatcttcataacccaagtttggttgtattttcaagtttcggtttttaacaaaaaacatttccaattattcctggtcccaacctttgatcacttgaccaggaccaaactcaaattcaattggattatt

SEQ ID NO: 45186 - DNA, 236 bp, Glycine max
  Clone ID: PAT_MRT3847_140803C.1
aaagactttactcgaagcgatttcgatcgcggaagtacgattcacgggcgtcttgcattgattcaacaatggcacgggcttcagcttcatcaagcccgacaacggcaattagaatctcttccatcaccagtactccatcagatccgacggataccgcacacttctcgagggctaccgcttcgagttcgccatcgtcaccgacaacaacgacaagaacaatgccgtctacttcaccg

SEQ ID NO: 45187 - DNA, 1420 bp, Glycine max
  Clone ID: PAT_MRT3847_140804C.1
agcgaaagacgcaccgagaggactggacgggcgagaagtcggtcaaggccaggtttccgatcaaggaggagctcgtcaatgactacctcagcggcaagatcacaatggacgcgacgttcaatgagctccgaaagaagggcaagaagagcgacaaagagatagatagcatgatcaggcttgcaaaggaggtccaggcgagcattctcaaccagaagctggagccggttgtgcgcactttctacaatcggacggctttccagcttccaggcgatgctcgtgtccgaatttcattcgacaccaacctgacgctggttagggaggacaattgggataacggcaagcggtccggcagcaactggcggcggatggacattgggattgactggccgttcgagcagttgccgaaggaggatctcgagcttttcccgtacggtgtgctcgaggttaagctgcagacgcagatggggcaggagccgcccgagtgggtgcgtgagctcgtctcgtcgcacctcgtcgaggcggtgcccaagttttcgaaatttatccacggctgcgcgacgcttctgcccaaccgcgtcgacctcgtccccttctggctgccccagatggaaacggacatccgcaagcccgtctcgaccaagaaggctgcgctcattgaacggcctacagcgagcaactcgcacaccccaacgacgacgagcgacacagatccgcatgctgccggatacacagagccgctctcggaggatgaggacgaaggcgccgaggcggcggatgatgacgacagcgatgacgatcgacgcggcaagggtgacccgttcagtaaggtcaccaatgacgaagcgggcgtggcgggtctgccagcagaggtgcaggcacaggtggaagacgcgcgtgcattcagggagaagaaccgcctctcgcagcagcatctgagcccaaacagcagcactgcacgcaacggcaaggccgccattctacccctgaacgaggacagtgctgcatcaaacaacgcctccacgtccgaggctcgcacgagcggcgcacgcgcaacagccgaccttgcaaagctcacgccgcgcaacctcaagaaaatgctcgcggcaaagtacgaggccgaaggccagccaaatggggagtcggcctcgacgaccgacggtgctgtctctgctggagccaatggccagacaggccccggacagagcggaatcagctcatccggcgagcccaacagcacagagtacgtcaactcgttcacgtacaatggcaagcgcattgcagtccctatccgcgtcgagcccaaagtcaactttgccctcgagcgcaccttgctggcctgggtcgagttctcggttctcatctctgccatcggagtcggtctcctgaacttcaccagcaagcacgatcacgtcggctttgc

SEQ ID NO: 45188 - DNA, 191 bp, Glycine max
  Clone ID: PAT_MRT3847_140805C.1
ctcgagccgcacacagaaactgtcaaatgacagttattaaaactaagtcctaacattgcagtattttaaactgctataattattaaaactaagtcctatatttccttgaataggctttccaaataattggtctctttgggttaacagaatgtatcttatttggtagattgaattggatggcatatgacgcc

SEQ ID NO: 45189 - DNA, 141 bp, Glycine max
  Clone ID: PAT_MRT3847_140806C.1
atttcccatctgagctatgattagtgtggcctagtcgatgcactctcgatgagaaaggcttctgtcacaaagcaatgcgcactactgcgcttgtgggttcccttgatgcagcttgctaacttcagctagctccgtctgttt

SEQ ID NO: 45190 - DNA, 338 bp, Glycine max
  Clone ID: PAT_MRT3847_140807C.1
gcactcactcatatgtgtgagaccagcttttgcttctttgtgaacatggagatgaggaactcatgtggcttcttcttcttgctcctcctccttgtctttgcttcccaggtggtggtgcatacggagggaacagtgtgtgagtcacaaaaccactggtactagggtttgtctaatataaaccacaagtgtgctttggtctgcaagaaccaatgtttctccggtggtaagtgtaaaggcttccgctgccgttgcttttgcaccaagatttgttgagatctcatcaaatacgactcttgccatgccaattcataaatcatagctaggccaaatgaaatgca

SEQ ID NO: 45191 - DNA, 197 bp, Glycine max
  Clone ID: PAT_MRT3847_140808C.1
gagattaaaaagcaatatgtcgtgtttgagtgctaaggtcgtgagtaatatgccattgggtccattgagcgccaagttatgcttagttgttaatctttgtaatagctaaaacaatcacctacagttgtttgctcatcgaagtggctagggacagtgtgttttagtgaatgtctatctttgctatgtctgggttggtt

SEQ ID NO: 45192 - DNA, 373 bp, Glycine max
  Clone ID: PAT_MRT3847_140809C.1
acttaccgttgtctgttgtatcacaaattgtgggagggactggtcatcttaatgctactgcccttgatggcggatattaccgatgtgccatgacacccgggtcacgctgttctctctacaggttgcagatttggagttgctggacaccacagaagggctgctactgcaggcttagctgctcacgctcttgtttactgaattgagtccgtgttctagcctagaatgctgctttcaaaattaaataactatgatgttagtaatgaaaccataacaacaccttttgctggtactctccctatggatatattgtctcatactgaataggacggtggatatctacatatttaatcttatgaaaagccctttgcatata

SEQ ID NO: 45193 - DNA, 232 bp, Glycine max
  Clone ID: PAT_MRT3847_14080C.1
gggtcgcgatctttcacggcgcacgagcccaagcgcgcaatcgtgccggggaagcccgccgtccggcagcagaagaacagacgaaggagctcaacctactagtcaaaacagaagctaagaaagcgcgcaaaataaacggaaccactcttgctggagaacgctacactgacgaaacaaaatcaaaagaacgcttggaaaagatgcaaggcgggacaacggagccagaagaagc

SEQ ID NO: 45194 - DNA, 530 bp, Glycine max
  Clone ID: PAT_MRT3847_140810C.1
ctctagacggccgctttttttttttttttttttttttttttttgaaactacgctggtggttattccacaggaggaaacttaatctaggcaagcatatatctataatatattaccccgggataaactaacaggcccgcaaaaatgaattacccccccccaattaaacgattgacaaatccgcgggggggaatgagaaacaacaatatttgccaggacatccccgaatcttaatagcccaaacccacgatccttaataaatgatgcatactataaacggcatcgcgagacaaagaccgctggggtgtaaagaaaaaatacatccatcatccgtttgtcactgatgtcaaatccaaaaagcctttttggttcttcaatcgcgaatttggccatagcctcacattctcaggatactgttgcgccccatgacccaacctttctgacaacttaaaaccggtgttttttgaagccggacgaccccagtctgtggatcggccaggtgttccatgcacaccaaactgaggaatccttaa

SEQ ID NO: 45195 - DNA, 273 bp, Glycine max
  unsure (1)..(273): unsure at all n locations
  Clone ID: PAT_MRT3847_140811C.1
aattcggctccagacgatttctcatcaacaatggangatctattcctgacacatctatcgacactctactctcgccgtgtatttttattttacccatttaaacaaccaacgtttcacatacaattattcttccatcactataattcttcttactacactcatatctacacattgttacatgacattttatgttcagtaaactattctcaataaagcaaattaataccttattcttattccaaattcctctataaaaaaccatattcttcctat

SEQ ID NO: 45196 - DNA, 340 bp, Glycine max
  unsure (1)..(340): unsure at all n locations
  Clone ID: PAT_MRT3847_140812C.1
cctcttttttttttttaccttttccacctatacaataaccaactatttgaccaaccccccacattcccccctattcaaaaccaaaacatatagaccaaagtggctggctgtaaccaancggacataaacgggaatcaaataaattttatatggggggtttataccccactagcagcttatgtaaatcactgatggtataaatcaaggccagtagttataatcacgccattggtaattaccatcagagcattgcccaacattgatccagctactattcaacatactgatcctagccttcatcctcgaattgatcatcctcctctgcctttagcatcccgga

SEQ ID NO: 45197 - DNA, 519 bp, Glycine max
  unsure (1)..(519): unsure at all n locations
  Clone ID: PAT_MRT3847_140813C.1
aggtttcctgtcatcactgtatgacgtcctccttctttgggggggggggggggggggggggggggggcatataaagaatagttgcggtagctcgggctagtagcagaaaaatagtatagccggcggcaatatagggaggggggggagtaaaggaacatattgtttggtttgagttttgtagaatacaaatagaagtggatttacaaaataccaacgcaaaactaaatttataaaacggggtagagacgtaagttagggtaagagataggagttaaatataaagtagtttagcgtagatggtgcccgttaatggtcggtagccattgtagatgccatttccgtacggggcgatagcggacgtcagggttccaataacgccagtagtaccagggccagtacgtantaagcgactacagacaaacgtccgattggaaacagccgcgacggtcccatgttatgcgtgttggtactagagtaacataaacgtgattagggtgaggcagcggttccgcaaatatt

SEQ ID NO: 45198 - DNA, 761 bp, Glycine max
  unsure (1)..(761): unsure at all n locations
  Clone ID: PAT_MRT3847_140814C.1
ctattcaaagtatatgtcagctacaaagcacacatttagctgcggcaatgtcttggtaactccaagcgccttaaggagcattgctaaaagacaggttgattacatattaggtgcaaacccattaagaatgtcttacatggtaggctatggtccatactttcccaagagagttcaccacagaggatcttccttgccttcaatagaagctcatccacaaaccataggctgtgatggaggtttcaacccgtttttccattcaatgaatcctaatcctaacatattggttggagccatagtcggaggtccaaaccaaaatgacggatttccagatgaccgcagtgattacagtcattctgagcctgcaacttacatcaatggtgcttttgttggacctttggcatactttgccggtatccactaatgtttgattcacctaaattacaaggttaagtctagatgtcattttatctgcacccaactaagttagtggtgcatcatttataattctagccctttcactcaaaaatgtaacttattgtaattagtatccaatatatttactgtgctttacgctaaaaaaaaaaaaaaaaaaaaaaaaaaaaaaaaaaaaaaaaaaatataaaaaaaaaaaaaaaataaaagaangtctaaaaaaaaataaaagaaactaaaaaaaccggaaattaattaagaaccggagggggggcgcctaccatgtttgcttatagcccgggaatttaatccctagcgggaccctgggg

SEQ ID NO: 45199 - DNA, 1187 bp, Glycine max
  Clone ID: PAT_MRT3847_140815C.1
ctcctttcatgttcccaacctttgaagctcaaaaccttcacaactaccgtttcctcagtgccgggtccgccctggtccctctccaccaattcctcgccgagcaaaacgttgacccttcatccattcaagccatactctgcagccctcgccagaagatctccgcagacgccatccggctcctcccatcactcagcctcattgtgaccactagtaatggaacccgccacatagacttggctgagtgcagctaccgtggcattcaggttgcctctattccaggagatcaattagccgtggatgttgctgacatgactgtggggttgttgattgatgtcatgtggaacatttctgcagctgatcgacaggtccttctaagccctgcaatctttcttctggttccaagctttgagtttcagctagaaggcaagcgagtaggcattgttggattgggaaaaattggcagagaagttgctaaaaggctggaggccttcggctgcagaattatgtacaattcaagaaaccagaagccatttgtctcgtaccctttttactctaatgttgttgagcttgctggtaatagtgatgtccttgtgctttcttgctcattaaatgagcaaacaaggcacatagtcaaaagggaagtgatgttggcattggggaaagaaggagttattgtgaatattggacgtggagatctaattgatgaaaaggaattggtgagatgtttgatggaaggggagataaagggtgctggcttggatgtgtttgagaatgagcctaatgttcccaaagagctctttcctttggataatgttgtcctttcacctcatgctgcttcattgacttcacatcgtatatatgatgtttgtgaacgtgtagcagagtgtcttgaagcattcttttcaagtaaactaccggagtaccctggtcttggatgactaaattcatctttaagggcatttgtatgagactgagttatgatcttcttctctctctctcctttatctatatttatttcacaagtagttaaccatgttaagaagtaattaaaatgtctaataaaagttaattacttgtgaatcaaaattaatcatatttatatatttggacatgggatgtacatttgaaaaatgtacaactatcaatattctattatctattacacttatcactttttctttgtacca

SEQ ID NO: 45200 - DNA, 1047 bp, Glycine max
  Clone ID: PAT_MRT3847_140816C.1
taggctgagcagtaaaagagcatgctgttaaatgtgcctggtgtaaactatcttgatgagggatcattgattacggtattttgtacaaaagtattctaaagtaatcagggagaaacttcttaactaaggccaagaaatgtatttcagttactataaaataatttgttaatctgcagagcttgcaattaaaattcaaccttctatacaaatattatcacaaccttcaaaagaggatcaaacaagtctaaataaagaagttgaatttaacaagcattgtgtaaagcacctaccacaaatcagccagtacaaaatcaaatatgaagccagatgctcttttgtatgataagctccaatctttaagtctcttgtgaagatcaccattgttctcttggacgaccatcagggagtacaggaagaaggaccatttcatcattctgtctcgagtcttgtttaatagtctttccttgccccatctccaaaagttcagcatcctcatcaaaatctggcggcaaatcatcatcttcttcatcactccagtcatcaccatcatcaatgtcatcaaacccatcatcattcattaaattatcaacatcttctaaccattcttcttcctcttcaccactttcatcttctctgctatcacttcctctcatgctatcttcaactatcctgcgagcaggtcccttgggaaaccgtggaacattaaccagagtacgaagcttttcctttataagcaacaaccggtccttctccaccaactgagaatcttggtagccttccctcagaaacacagaatccctacgtcctttaagagagacataaaacatatcaggatgccttatcagcatccccctcagctgctgagagaaacagagacacaaaacaaaatgcgtaaggttatcaacctgcccctcagctgctgagagaatctgaactcctctcgaaaatgctcaaagagcatgcttctccttctccctagacccaggcctaagtcctgagaaatccgagtaaggcgaaatataaggcaagtctcccgactgcccgatc

SEQ ID NO: 45201 - DNA, 273 bp, Glycine max
  unsure (1)..(273): unsure at all n locations
  Clone ID: PAT_MRT3847_140817C.1
gattctagtcttgtaaatccaaatgcagcaagaacaaatcttatanaagaaatgaagggattaatgaatagtaagantancatanatccttgttcataacttgggaacaaggacaagtatatagctagctcaagcaccaccaatagttccaaaaagatgacggtttgactttggaaggaagacattantgtatctcagcattctcacaaaacatcatacgcnaagagtgccaattccnaccgatncatcttcttcgtntgcaatttttcnctg

SEQ ID NO: 45202 - DNA, 1973 bp, Glycine max
  unsure (1)..(1973): unsure at all n locations
  Clone ID: PAT_MRT3847_140818C.1
cgcgttcaagattgcaggattatgctcgtgctcgagccgaatcggctcgagttggaagtgatctaagttggttgaaagtgagcaatgtcgttcgcagtggcattgtgtacaacgtcgtcgttcttcccttcccgtttcgaaattcgcaatccaaagcagcttcagcttccacctctcctttcaatgtcactgtcgtcgaagctaccgttgcatttctccggcaatgccatattcaaccgcaaccacccaaccatgttcaaaattcgagcctcaaactcaactcttcatcttcatccaaactcgtcttattgagctccactatcgtcgtcacaacagcggtagcgaatcgcgtgctctacaaattggcccttgttcccatgaaagagtaccccttttttctcgctcagttcataacttttgggtatgttgttatatatttctcgatcttgtatttccggtaccgggcgagaattgtgaccgatgagatgctggcaattccgaaattgcgctttgtggccattggctttctagaagctttaggattggtttccggaatgtctgctgcagctgtacttcctggaccagtcatacccatattgaatcagacttttttggtttggcagctaatgttttctactcttctcttgagaagaaggtactcaatcaatcaattggttgggtgcttacttgtagctgttggtgttgtggtggctattacaagtggttcaaatacaggtcagatgctctctgaagttcagttcttttggccagcattgatgataatctcatgttcctttcaagcttgggcttctgtaatgaaggagtctattttcattgattctgctactcaattaaagcacaagtcactggacatatttgtggttaattctttcggatctgggtttcaggctcttttcgtacttttgtctctaccaatactttctaacttgagaggcataccatttgcacaacttccttcgtattttaaaagtggtgccggttgctttctaaaccttggagccgataatccaaattgtgatggtgcccccttgcttccactactttacgtaattatcaacttggcattcaacatatccctgcttaatgcagtaaaaacttcgtctgcagttgtggcttcccttctggtaatgttgtcagtgccaatttctgtttatattctttcccttccattaccatatcttccagagggaacaagcctgagcccattttttttgcttggctgtgcaattcttctatgtggtctttttctgtacaacacaacgagacctgtgaggagcagttctgaagatgactgaaacagttccagttcatgaaaaccaatgctgaggagaaactatcaactagggaccctgccaaaaaagaatgtcagccttgaggcactcttgattcactaccattgtgattattcttttgagcggaaaatttgttcagttttcacgtttaagggtcgctttgctgctttatgatgactgacttcctcattctgccactggatcattgtacattaatagaagcagacaaatgtaattggcagaaatgtaagtgcagaacgtttttaagttcagtcatcttattggttggcatttttactaaatagattacaagagtttggcgatgagatatattgaagttgattagttttacgagaagcggacattgcctcactattgtatttaaaagtgatggaaaaattacctttcattttaatacttataaaaaatattacaataaaaatttgatataatataaaatatgtttcgtcctantgaaatagtgttgcaacgcaaaggtggtacaagtattcgaaatttctttctacatggggccccacttcttcctggcnttggcagcccattcataagaatcaatggcgaacattttaccctttccattgataataaaagaatcagaaaatataataagaggcggccnnnntnnnnnnnnnnnnnnnn

SEQ ID NO: 45203 - DNA, 644 bp, Glycine max
  Clone ID: PAT_MRT3847_140819C.1
ttggagccgataatccaagtctcagattgttatggcgctcccttgcttccactactttacgtaattatcaacttggcattcaacatatccctgcttaatgcagtaaaaacttcgtctgcagttgtggcttctcttctggtaatgttgtcagtgccaatttctgtttatattctttcccttccattaccatatcttcccgagggaacaagcctgagcccattttttttgtttggcggtgcaattcttctctgtggtctttttctgtacaacacaacgcggcctgtaaggaacagttctgaagatgactgaaacagttgcagttcatgaaaccaatgctgaggagaaactatcggctaggaacctgccaaaaaagaatgtcaaccttgaggcattcttgaccgcggtgaaatatattttctccgatcacctccaaattatacacattcactatcatcgtgattatttttttgagcagaaaatttgttcagttttcacgtttaagggtcgcttagctgctttatgatggttgacttcgtcattctgccactggatcattgtaactcaagattgtgcatatatctctgatgacttgttcaagtatattttcatgtacattaataaaagcagacaaatgtaattggcag

SEQ ID NO: 45204 - DNA, 372 bp, Glycine max
  Clone ID: PAT_MRT3847_14081C.1
aaaaacgtgcattaatagtatatacatgagctttcacaaggtcaatgcgcgggtggcattgcttggcaccacgatcgaactctactataccaaaactatctcattaactctaattaactctttgtacaccatccaactgcctatctttcaaacatttatcattcaaccctactaacatcaaaatctgcttcatttcttatccatactttaatataaaacatgttgaactcccaaagcactatatatcaacacgatactcatgactatattcaatagatgggtacgcgtttgcaaaaagaacgccatcgatcttggcgacgacaatttcactctgtcctactacaccaatataccttaccagcctgttctttc

SEQ ID NO: 45205 - DNA, 670 bp, Glycine max
  Clone ID: PAT_MRT3847_140820C.1
accaagttcaggtgggattcaaatatagagctggtttgggggtgaaccaaacctcaccaaaggtatattgcctttcttgttgggcggtcccaaaaaagaaaccaggaaagaattccagaaatattgccatccgagcgagagaatgagaacgttgctgcatctctttccctgtctctatcttttccatcttcaaacaaggaacacgtcaaacctgttccaaaagctgagcctttgccgggtgggcataatgtgaattcgccgtatcttctttttaggagattcacggacaaataaatatgctgagttgctagttctaaacatgtacattatcttgttccatcatgtatgtaatcgtccagtgagtccttatacaaaggagacgtccaactgttcatgtgcccagcaaaatagtataagttttttctttttacttctttgttaaatacatgcttttgtactgtctttttggtttcagaacgcatagctacggctatttgtatatagagagaatttcagccgatataatttcattaatgttaggacattgcggatgactattttttatgacagggtttcctttgttccttgcttcatcatcgctctttccagttgtaattaatgagcactaagtgaatttgtttactaaatttttctgttacgttgcccgcgt

SEQ ID NO: 45206 - DNA, 733 bp, Glycine max
  unsure (1)..(733): unsure at all n locations
  Clone ID: PAT_MRT3847_140821C.1
ccacgcgtccgtaaaatggcaaagcttgttgaagaagctcaaaacagcaaaaccaacatccagagattgattgacaagtttgcccagttttataccccaggcgttgtaatcatatcagctcttgtagcggtgattccacttgcgctaaaacaacataaccataaactttggcttcagttttcgctggttgttttagtaagtgcatgtccatgtgcactcatcctttcaacgccagttgcaactttttgtgcttacaccaaagcagccacatcaggtcttctcatcaaagggggtgatcatcttgaaacacttgccaaaattaaggtcatggcctttgacaaaacgggtaccataacgaagggtgaatttgtggtcacacattttcaatctctttcagatgacattgatttcaacacattggcttactgggtgtcaagcatagagagcaagtcaagccatccatcggcagcagcaattgttgattatggaaggtctctctccgttgaaccagagccagaaaaggtgacagaatttgaaattttccctggcgaaggaatatgtgggaaaattgaaggcagagttatttacattggaaataaaagaattgccgcaagagctgggtttgaaacagttcctatcttacaaggtgaagttngaagaagaaagaccacgggatacatatactnntggagcatcccattggatntttctctctntcagatgcttgcagatt

SEQ ID NO: 45207 - DNA, 367 bp, Glycine max
  Clone ID: PAT_MRT3847_140822C.1
ctcacaaatccctcccccaaacattaatatgcagtgagtttgtactttcagttcaatatccttaatttctctcaggtcatccttagttataatatcgcctactcatactcaacaaaagaaaccagcatacatacatacaccaaccgctgcacagctcctcttctctaattatttggtctcgagtctcgtggttgtgtaagtgtgtccaaacaaaccataactagcaagccacagccacagtcacattcacatccttaattactttgcaaatattcaacagctccccgcgtgtttgacattccaggtctagagaagagagaaagaaaaaaaaagaccatgatgaacatgctttcggtgtcagcagcgc

SEQ ID NO: 45208 - DNA, 298 bp, Glycine max
  unsure (1)..(298): unsure at all n locations
  Clone ID: PAT_MRT3847_140823C.1
ntngnttttnngtnncnnnngtctcnnttnnnnngnncngncnntngnngngctgngcgtnnnnnnntnnntnnntnntnnttngtttggtngnntntttttcncgggggntcttggnncattcnnggnttntntcgtgnnnnttnnccnctnccnggagggatgcatncttagncttnnngtngactnngggtctgctgttggcttgntgcggcctggtnnctcgtcggttcgcacggctttgtggcggcgngctcttcanatttnggcctntcggctttcgttgngggnagtngct

SEQ ID NO: 45209 - DNA, 601 bp, Glycine max
  Clone ID: PAT_MRT3847_140824C.1
aattcggctcgaggtgacggagttgcaaattggcgtgaaggtgtagcctttaacctattactttgattaagatccattgcatcttttatagtttaggttaaaggtttcgattaattaacatttgccgatctaaaaaaaaaggtttcgaataatttgtacggaaagaggagtttgcataaagtgtttttaattaaaaattaaaattaaaattcgttgtcttggtatattttttaagttgatgctggatcccgatagaatgtaatgggtatattgcttgatgagtgcaaccacattgagcagtctggaaatttgttttgaaatgtaactgtataagtgtggttttcttctcttggttcagctgcaaagtcaatgggtattttaaaaaaaaatatgtaaaataattgcatggaaatcttatggcatcacaggtgcttggatatttatgtatagcttcatgtaagttgaattgtgtcaaagtgcagtgaaaagccttgcactgcggaggaagactatgctactgtgttatgcatttgaaacagctaaaataattgttgatcttttaggctatattactatattaggtactatcttcattctcaag

SEQ ID NO: 45210 - DNA, 536 bp, Glycine max
  Clone ID: PAT_MRT3847_140825C.1
ataccggaagggtatcacaaattcactatcaaactcttaaatgattgtttctgcccatgacaaatgaaaaataatggaacgtatgtcatagttacaggcaatgcatcctattcctgcttttttttttttttttacaaaaacctattcgcttttcctgctcatcgggagcatatttgccttttttttattatttaaattaatcaaaggggatacaaattaatttaacataaaaaaataaaatacaagaatcgacaaatatttccccatggttgggtaactgcaatggctccacccccaaaaacaggggaaaacctagttcataaatccgctacagttaggggctttacagggacagacaacctttttttcatcccgctcatcatcgaacgagtaattatacgttagttcttcaccagctgaaacattggtcttggcaataaaaacaatcctgttctcctgatcactcaaaggcacaatccttgcaaagcagtttggcatgcaaaaatggtttattaaacgtgcaatattgcccttat

SEQ ID NO: 45211 - DNA, 255 bp, Glycine max
  Clone ID: PAT_MRT3847_140826C.1
ggttgactctagaagcttcattaagacggctccctcataagctttgtggtggcttctttgagaagcgttgttttgttgaatttttgagcagttagaaccttatctatccacacccctctattaactaaattaacctccttaaaaataattacggataaaaataacacaacaaataatcaaacatcaaacataattaccaataatatatatatatatatatatatatatatatatatatatatatatatatatata

SEQ ID NO: 45212 - DNA, 1222 bp, Glycine max
  Clone ID: PAT_MRT3847_140827C.1
gcacgtatcaacacttcatttcttactctcactgaaaaaaaatagcttgttcacaccatcctattttttcaactcatatatacaaatatatataacatggcttctaccttctctcgaagcctagcacttgtcagctaacatatatggcttcttccttctctccaagcctatcatcacttgtgcctctgcttgtgagccttttcattgtggtttgtgctgccggtaacttcaaccaagactttcagattacgtggggagatggtcgtgcaaaaatactcaacaacgccaatcttctcactctctcccttgacaaggcctctggctctggcttccaatccaagaacgaatacttatttggcaagattgacatgcagctcaagctcgttcctggaaactctgctggcactgtcaccgcttattatctatcttcaaagggatcaacatgggatgagattgacttcgagttcttggggaatctcagtggtgacccttacattctgcatactaatgtgttcagccagggcaagggcaacagagagcagcaattctatctctggtttgacccaactgcagatttccacacttattcaattctttggaatccccaacgcattgttttttctgtggatggcacccctataagagaattcaagaatttagaatcaattggagttccttttccgaagaggcaaccgatgaggatatactcaagcctatggaacgctgatgattgggccacaaggggtggacgcatcaaaaccgattggtccaaagctcctttcactgcatcctacagaaacttcaacgctaacgcttgtgtttggaacagaggaaaatccacatgcaaatcaaattcaccatcctctaatgcatggctatcacaagagctggattccactgctcagcaaaggctgagctgggtgcagaagaattacatgatttacaattattgctccgacaaaaacagatttgctcaaggccttccactcgaatgcacacattcgtagaggacttcatcttccactagcacaagtgttacattataatttcatttaccattcttttattttatttttttttaattcctgttcacagtttgtgctcttttacgatgtaaaatatatcgcatgtaaaataacggttctgttatttggatgtcaaattttttcatgatttttgtacttgtaaatgggcctaaactaaaatttcttaaccgttttac

SEQ ID NO: 45213 - DNA, 625 bp, Glycine max
  Clone ID: PAT_MRT3847_140828C.1
cggaattcccgggtcgaccacgcgtccgggtaaatagcctaattaataagctcttgctaagtgagaattattcataagttttacacacataaaaagtttagaacctgtgatcgatctctgctttcacatgtgttcataccaccccaagttcatcagatgacacaaataatctaacattcactccctgttttaaatataagctaaatgatacattaagtatcaaattaatcttctataaattgcattaatcaaaaggaaaccataattcacataatagagcacaacaatactactaatatatgagctgcccatgaaatgcggttttaatttcaagaccgtgtataaagtaagagccaatacatgtaaattcatgtgcaaaggcaaatcagtgcattaaggaagtgagggtcatgtcactaaaaacctacatgtagtggacacttgaatcttttcagagtggaagacccaacagcttcttttgcacattcagaatggtagcacgcgtcacttcctcgaacagaacacaagagctcatcatctccaaggtaacgaaaatggcaacaaaacaacattcaccctcaacccagacacataacaaaaaattaaatgaaatccattatcagtt

SEQ ID NO: 45214 - DNA, 1797 bp, Glycine max
  Clone ID: PAT_MRT3847_140829C.1
caccaatggaaaactctactccatctccatgcatcaccatgaatttcacatttgctgtgtcaatcaaccctaaggctttatcatcagataatatttcttaagaactcagtgtagcctaggattcatctctatagatgcatgcacaactccacgataaatcgtcgaattaaacaacattcaacgacaactctgattgaggccttgttcgtggagaaattaagatggagataatttaccagtctcacatcgacagggagattgaatcgctcatagaaagaatccatccacccagggtctgtatagacaacgattccagcagagactgcacagtggtgaagattgatagcgcgaacaggcatgggatattattggagatggtccaggtgttgacagatcttgatcccgtcatttccaaatcatacatttcttccgacggtggatggttaatggatgtgttccacgtgacggaccatgatggaaacaagcttaccgacagaggactcgtccattacattcaacagacactgtgcgaggctagaagcaacagcaaagaaatttcaagtgacatagagctaacaagctgcaatgaaccaccacgactggtgaacttagcaatagagttgaccacagcgaaccagcatggcctgttctcggagatgtcagcggttctattgggcctgggcttcaacgtcacctccgccacggcctggacccacaacgacagggtggcctgcataatccacctggaggacgcaaagaaacttgggcccattaacgcagaacgtctggcccaggtccagcccgagctgcggaacgtagtgaaggcccgtgataggaacggggaagaagagagagtgaggttgaggctgaggagcttcggcgccgggcgcaatcacaccgagcggcggctccaccagatgatgtatgccgacggggactacgagaggtgccgtgcgtgccatgtcggagacagaaacggtgagaagaagaaggggtgtgaggagacccaggttactgtgggcagatacgaagagaaagggtactgggttgtgaacgtcaggagcagggatcgtcctaagcttttgtttgatactgtgtgtgtgctcaccgacatgcagtacgaggtgtttcatgcggctgttagctccaatggctccatggctgaccaggagtacttcgtaagacccaaaggtagttcaaatttggacaatgaaagcgagaagcaaaagctcagcctatgtttaatcgcagccatagagcgcagagtctcacatggattgaaggtagacattcgcgctgaaaacacaacggggctactatcaaaagtcactcgtgtgattcgtgagaatggactatccataacaaaggttcagataggagtagagagtgatgagatggcagtaggatcattctgtgttgcaaattcttcaggtcaagaagtgaacccaaacatagcagagttggtgagaagagaaactggtgggtctgtagttgcaaattacaattcgccttacagggtccctaaatccttgtcatcgagtaaaaccatgcatgaaaccaagagtagcacagaggttggacaaaggttttccattggaagcatgctatggtctcagcttgagtgcctttccaataatttccgtcccattagatctcataagctttaattaacaagccatagttatttattcctcaagaaataagcactctacatatgattctcgatatcgccttaaaattgcataccacttgatgtgagatgatatttgcagatcaattgtaaatatttatgataag

SEQ ID NO: 45215 - DNA, 199 bp, Glycine max
  Clone ID: PAT_MRT3847_14082C.1
gcatatattcgtgaagactctgacacggaagaccgcaaccttggaggtggaaagctctgatgccatcgatagtgtgaaagcggagatgcgcgacagggagggtattccaccacatcagcagaggcttattcttgcgtggaagcaagtagaagatgggcggacgcgggcggataccagaagtgagaaagaaacaccgttg

SEQ ID NO: 45216 - DNA, 305 bp, Glycine max
  Clone ID: PAT_MRT3847_140830C.1
attaaggttcaggcgcatggtttaaacaatcagctgtatagagtgtcgaccataaatctttcggaattatatgacaaaacagttatatcacatcccaatgagacagctgggaagagaatatgaacgcaaagcatattaactctggatcgaagtacaagcgctgctatgcgagcaaaatccgggcgtatgatgccgtgtattctaactaaatcagtaacccggaaatgactccatggcctacaaaagggagctggcatcgaagcaataaaatggtccgcaggtcggtgcatgatatatctgcaaaa

SEQ ID NO: 45217 - DNA, 421 bp, Glycine max
  Clone ID: PAT_MRT3847_140831C.1
ggctcgagccgatattttcaccaaacccgtttgcgctgttgtttgccaataaatggcgactaagaggagcgccgtaacgttgaaggagggtgacttgatagcgaagaggggattagcgaggttcgatctgaacgttcctctggatgacaaccttatcatcaccggggacactagagtgcgggctgctgttcccaccataaagtacttgactgcttttcaggctaaaatgatccttcctagccatttgagactttcaatattgttgacacctaaatacaatctaaagcctcttgagccaaggctgtcttaacttgtgaaaatttacgttacaatgaccaataactctattggggacgtagttataaagttcgctacacatctttcagaatgttgggcattgcttctacatgatgtgaagttc

SEQ ID NO: 45218 - DNA, 398 bp, Glycine max
  Clone ID: PAT_MRT3847_140832C.1
gtatgcacaaaacccagtgaaggatcgcgaacctggtttatgggttgaagtttggttcagcattcgtgggggaagataagagaactcacaccatatccgttctcgctcctctacgaattttcatatccattcatatttttctcatcatggacttggccgcgaagcttcaccgtttagacctcaccggcgtggtcattttggacgcacgaaagccctccgtactccgccaccttccgccacgcatcctcaccaaaacaaacaccaatttaatctacacgaaccggttctcgggcccatcgaggcccaattccgcttcctcttccacgataaccgttgaggacgacatcgagtctctcttctccgagacgaattcggaggaggagaggcgctcgaggaag

SEQ ID NO: 45219 - DNA, 382 bp, Glycine max
  Clone ID: PAT_MRT3847_140833C.1
aaaaaaaaaaaaaaaaaaaaaaaaaaaaaaatataaaaaaaaaaaaaaaaaaaaaaaaaaagggaaaaattaaaaaaaaaaaaaaaaaaatataaaaaaaaaaaaaatataaaaaaaaaaaaaaaaaaaaaaaaagggccgccctttttaaagtttcaaagtttccttccccttccttccaactttaaattttttttttggggcccctaaatttaatttaattgcccgttttttaaaaccctcttacttggaaaacccttgcctttcccaaatttaatccctttgataaaaatcccctttttcccacttgtctaattaccaaaaggccccatcccgattccctttccaaaaatttgcccaccctaattgtcaattgaaaccc

SEQ ID NO: 45220 - DNA, 328 bp, Glycine max
  Clone ID: PAT_MRT3847_140834C.1
ggcaagcaatatggactagcgacaaacctcaagaccgagatcgaggagaagcaacggcagaaggcggcggagcgcaaggcggcggagaaagaatggaaaccacgattcttcactggagcagtcacacctgtcggcagaccagacctcaccaaggacggcgaggaagctctgaagggtttgcacgcggagaactaccaactgccaccaaacgaggaatacgccgccttttgatcgcatcctctttttctcgaatgttaggaagaaattgcagaataggacgaaccagtacagcaggaccttcactacgatatccactatattttgactc

SEQ ID NO: 45221 - DNA, 961 bp, Glycine max
  Clone ID: PAT_MRT3847_140835C.1
gtgatgcatcctaccattccaaggaggcaatcagcatgcatcatgactttggcacctttctgcggaatgaattatgtcttctccactcctcaacttttgttgatgatgattttgtggatgtccaagcacaagctgtatattctgctagttacatactgtggttaaaagtgcaagttcctaagtctctggagaataagctccttcagaagataaaagatgttgatctgaagatcttgctggataaatcatgcccagagagatcctcactgtttaattactttatgaactagatggaagcatatgagctatgtgggatggagagatcctctgatgtgcactcttctctttagagggttaagtgccaaattgttataactccacacattgtatttgaaagaaaaaaaacatccatagaaagttgttttcataggaagtgttttttgtgtttcttatgaaactatttccagtaacaaggttagttcaaggtcatatttcattcattatgtgtgattaaactcgcctacaacaactcaactgcacctcagatactcaagtccagcttgaataaaaaaaaaaagatactcaaggcaaagactcctatatgtgtaagggtaaaagagggattatgcaggctataagtaactcacatacctggcaacaagtgtgggaagcatggtggtaaagttagaggctgcatgggatataaaggaaaaggtcggggatagagagacaatcatttgggtagttttgggtggttgttaccacagggcagagaagttttccttctctgaattctttctttcattatcagaaaatcaagttcctatcacaaacagttaaggtttcgtagaagagttaaaatgtattaactactactgataaattttgggttagctgtaaatctctgaaattgagctgatctcatgtcatgaaacagaaaatttgaccattttacggctga

SEQ ID NO: 45222 - DNA, 193 bp, Glycine max
  Clone ID: PAT_MRT3847_140836C.1
gttgcacggttcggaaacggtcaatgtggagcttaaacacatggagaatgaagcgagagataatgacagagaatatccacaagcaatagcggagatcaaaccctggaggctctccggacaactcagagagaatgccgtggaagagctcactgaagaaatgtaccaggtccgagggacggtgacactaactgaa

SEQ ID NO: 45223 - DNA, 577 bp, Glycine max
  Clone ID: PAT_MRT3847_140837C.1
ttccggtccggaattccggtcgacccacgcgtccgtttatttggtaacctgactttcagaactagttttttacagtgatgaatttatatatgtattcctgcgtagactgttgttgacaggtacgctttggtttacttgtttggcagaatttgtgtgcaatatgtttagatcctctgagtcacaaaagcaaaggcagcaaagctatattcactgctcagtgctctcatgcattccactttgcttgtatctcctccaatgttcgccatggtaatgtcacttgcccgatttgccgtgcccaatggacccagctccctcgcaacctgaacagtggttcaactatttctactaaccgaagtgatcccatcctgcaaattcttgatgattctatagctaccttccgagtacatcgccgcactcttttgcgctccacccgctatgatgatgatgaccctgttgagcctgatgatgcacctgagatacacaagctgcgtttctctcttgcacctattccaccaaaggcacctactagccatctatcccctcatcccttatcctgcgggtcctcatcactgttaca

SEQ ID NO: 45224 - DNA, 1836 bp, Glycine max
  Clone ID: PAT_MRT3847_140838C.1
cgaaattcggctcgagatgaatgcacgcctttcatcggtgaccaaagtgtgatccatccacaagtggaaaaccgatccctttcctcacagtaatgctactctaattaacactgtctatctagagtgtttgtccgatccatgacccatggcgccagcaactccaagatttgttgtgccaatagacttgaagaagaatccatgggaacaaaacgctcctctccataaccgatggcaccctcacataccgcacgtggcggctgttaataccggtgaagtcttcagggtagagatggtagattggacaggaggtgctattaaagacaacgattcagcactagacataaaatttctagacctctcaactgtccattatcttagtgggccaatcagaattctggataatgatggggtcccagcccagcctggagatctgcttgctgttgaaatatgcaacttaggtcctctaccaggagatgaatggggttttacagcaacatttgacagagaaaatggtggtggcttcttgacagaccattttccttgtgccacaaaagctatatggtactttgagggaatatatgctcattcgcctcagataccaggagtacgatttccaggtttaacacaccccgggataattggaactgcaccatcgatggaactcctgaacatatggaatgaaagggagagagatgtggaagaaaatggcattaagtctttcaaactttgtgaggtcttgcattcacgacccttggcaagcttacccttaacaaaaagttgtctccttggaaagattcgaaaaggcactagtgaatgggataagattgcaaaggaagccgcaagaacaataccaggacgagaaaacggtggaaattgtgacataaaaaaccttagcagaggtgccaaggtataccttccagtttttgtagaaggagcaaatctcagcactggagacatgcatttttcacagggtgatggcgaggtctcattttgtggtgcaatagagatgagtggtttcctagaactcaagtgtgaaattataaggggtggaatgaaagagtaccttacaccaatggggccaactccccttcatgtcaacccaatatttgagataggtcctgttgaaccaagattctcagagtggttggtttttgagggcatcagtgttgatgaaagtgggaggcaacactacctagatgcaagtgttgcatacaaacgagcagtgctcaatgccattgactacatatccaagtttggatactccaaagaacaggtgtacctccttctgtcttgcatcccttgtgaaggaagaatatctggaatagtcgatgcccccaatgctgtagcaactctggccattccaacaactatatttgaccaggatattcgtcctaaaaataacaaggtgccagttggaccccgccttgtaaggaaaccagatgtcttcaaatgcacttatgacgggaacttgcccattacaaggaatccaagtgccacgtcatgattcatatgaattgcacaacataaaattaagtaattgaatacacgtggttaatgtaatggaattaaaattgaatcgttcgagtattaccgagtttaatctttagcaaaaataatttttaatcagattttacttaaaaaaaagaacaaactccagataattttatcgtatgctactgctcgctggacaaatgaaaaaacaatgttagtattatgaccaaatctagagtttagatagagtctcctaattcaaataaagggtgaatttagatagactatgttaattcaaataaaagctaacctcatgtttggatgaggaatttgaaacgtctaaaa

SEQ ID NO: 45225 - DNA, 413 bp, Glycine max
  Clone ID: PAT_MRT3847_140839C.1
gtaactcggtcttgtttttttgttggtctgtgtccgcgaaagttaattctcggacgctggaaacgcattgatgcataccgtaccgtcggtggagaaactgctgcatgtgcggcaacggctgcggaggctgcaagagggacccagagtggagctacgctgtgaagagcagagtctgaactttgaatcatagataatgggcttgtgagatgaagaactgcgagtcgtgcaatgcttgcggctcggactgtctgagagttggaccaggctagcttactgtgggagtgcgacgtgcacgtgcatgggacgagctggctcagcgaacgacacacgcacacgctcctttgtcacgcgtgccgatcgactacgccggggtaggtctacactgatgtcctatgaaacacctggttgctgtg

SEQ ID NO: 45226 - DNA, 197 bp, Glycine max
  Clone ID: PAT_MRT3847_14083C.1
aaaaatctcaaaataaaacaaccaaaccacacacttcacacccttttcaacatccttatcgggtacaataacaagaagaaacaatgtcttgctccaatctcacaatgtttgtatcctcaaaacctttccttccttgttagtcaatctgaattgctcatccttagcagcatcaacatacacaccattcacatcacaaa

SEQ ID NO: 45227 - DNA, 436 bp, Glycine max
  unsure (1)..(436): unsure at all n locations
  Clone ID: PAT_MRT3847_140840C.1
agncaggnanngtgntggngctncannncnggngntgctntgancccngnacngntcannanaanannncgnaacgcgctgangtnantctnganagtagtcncggttgcatctgnnnagcacagngcnggggntagtnngagtgntcggcgnanaangcagcnnannnnnacnngtcttggtnancncncgantnatntnngaccgcagtctntngntncgngtgnnagngnangagccgtggnncnncgnnngtanannncgcccnannacgntacncgcnatggtngagcatcgcatgnaangagtntgnagtgatncgnnngtgntcaggntaggtacanacntgngngagaagnnntggagnnacgnagcannngnggtgcacngagcantggatnnggcgnggccggnggnangtatngtnggagtcnnn

SEQ ID NO: 45228 - DNA, 1198 bp, Glycine max
  Clone ID: PAT_MRT3847_140841C.1
tgtatgtatgctaggatcctctagatcggccgctttttttttttttttttttttttttttttgggaaaaaaatggaattgaatacatgcatatatcaacaagagttgcaacactgaagcagagtagaaaggtgcaacaacatgatcatgaagaaaaagtaaggtctcaatatcctggactaaaggtgcaatgcctgcaacagaagcatgaagcactattttttcgtagaaccttatcaactgaaaatgattaggtttatgctatacaagagacaaggaaatttgctagtggtttcagcctcacacaaagtatacattgttccggctagatgacacgtggtcaaacatgctctccaaaattgctaattctctatgccttgttcacacggattgtttggccttctaacaaagaattgttgaaagatgagattgcagcttctacatcctcttctgacgaaaaagtaacaaacccatatccactggattttgaggtaccagggacccgtgaaaccttggcactaagaacttttcccttctcagaaaaaaagtttttaagagtatcagttgttactgttttggccagatttcccacatacaccttgtggggactgtcaataaattcagattcctcggcttggagtaaaggcaaatctagtgttgataaaggtttttcagttacatttactttgatctcacgccctccaagttcagtgccgttaagtttctcaatcacagcagttgcgtcctcaacagttttcatggtaacgaatgcaaagcgacggctccttccagagtatttgtcatacattacctcagctttctcaacagcgccatgctcctgaacaatcttggcaagctcgtcattggtgacagtgcggggaatgttgccaacgtagagcctcctcgcggccgcctcggtcgcggtggcggcctgttccgccaccgcggcaaagggtcgtctcccggaacggcgtcgtgtggtgagaagaaggggtcgcaggtgggtcgcggagggtctcgcggtaaagagaatttgagtggaagagcttgatggggttgtgagggaaaggagattatatggtagaaggaaagaagagtgaacagaagccattgttgttgtgtgtgatgtgtgagagtgacgaggatattacaaaggaacaatgaagtgaggttttcgttttgcaggaacagagtcggag

SEQ ID NO: 45229 - DNA, 906 bp, Glycine max
  Clone ID: PAT_MRT3847_140842C.1
ggctgacgtagaagcctcgtagtacactccgtttgagtcacagatcgaaccttttttcacaattacacgtaatattaatactcatccacgtttcaacattttcttttcgagatttatttcactcacacaaataccaatatggccgaaagatccaaccttttcggctgaaagacttccacttcatctcttccacatttcaatattgtcttttcttcttttatatcatcaaaacttcaaaaagcacagtcaaaagctaacacttatagactcatagttgttccaacacacaaagtgtgtgtgagagagagagagagagagagagtagtgatgggtggttgtgaagtagagtttgaggcagatcagtgcaagataccaaagctacccttgttgaaccctcctacaatgcattctccagagagatcagggatgaaaactccaccacttttcacctcagcttcagttccatttggttgggaagaggagccagggaagctaaggccttgcactgatattgtgagcttctccaaccctactccaaagtgcttggaacttcctccaaggttgctacttgattcccaaagcaacaacaacaaaagcatgaaactttcatcacccaccactgttttggagggaccatacccctatgtggctaccaccaacaacacttgcaactccccatcttttagaatgagtgaagacttgtatggctcttttggttctgaaagagggcaacttgggaccatggttctaaaccaaagtgtggggatcaaggaggaggagcaggagaaagggtggtttggttcttggagggaaaaggcttgaaaagagaggctagtggtgtggggtagtcatgtctttccatcttctgttgattatgttggcactcataagaaggtgaggagtatg

SEQ ID NO: 45230 - DNA, 552 bp, Glycine max
  Clone ID: PAT_MRT3847_140843C.1
tacggctgcgagaagacgacagaagggtacggctgcgagaagacgacagaagggtacggctgcgaagacgacagaagggggtttagaacaaacataagtacattatctaaaaaacatttaaccaacagacacactaacgtactaaagtgatttatgattatgaagaaatgccttttttattatgtaaatgccaattcgttatggacaatttggcatggagtttaccctttcttgtaaatgttactttttgtaggaaatgggaattctcaaaattaatgaagctgcgttggattttgatctgcaacagttcttttcgtgttatttgacacatgcaaaggaatagagatcgcggtagtaaaaagtattaaggaggttggtattaataatgtaatgtagggatggtcatgtgaaattgaccaacgcagaactgcattcttttctatgttaatggatctattaataaagaataaattcctctgctcttgtaccgtgtgttctaacatcaaatgcttcaaatttggtcaatttaagttttggatttaggtaaaaaaa

SEQ ID NO: 45231 - DNA, 190 bp, Glycine max
  Clone ID: PAT_MRT3847_140844C.1
gggggtgtgttcaagtcagggtttttgggaaaaacacttacaggagattttggtctttactacctctggggaagaattggtgttccattttaacttgcgcgtattcctcatcggggggcttttgatttttgaaaaaaaatgttttttttgagggagatcttaaacatcaaatgtgttaatccgttttccc

SEQ ID NO: 45232 - DNA, 1763 bp, Glycine max
  Clone ID: PAT_MRT3847_140845C.1
accaaggagacgggcccagaagagcggggaaaatgcccactaaatccgtgctgctgctgtctcattaacttatgattatctaggttcctgtctggagatgtatcaatgagtgggattggtttcgtatctgaagcctctaggtgtgcgaccgggaaagggattgggatcgattccgattggctgggtgtttcccgagaaagagaaagaaaaagcggccccaattttttgaaactcaaatcccaatcaatcaatctcttctgtgaactgtgatgcatgcgagttgaaattgaatcgaaggcaaagcgaagaagatcaaagagagagaatggtttcgtatgtgaacatcttgctgtacggcgtgggagggttggtggtggcggggatggcattgctggtggcgtttcaggagaagctggtctacgttccggtgttgcctggcatcaccaagtcctacgccattaacccctctcgcctcagactcatctacgaggacgtctggctccaatcctacgatggcgttcgccttcacgcttggttcatcaagctcttccctaattgccgaggtccgaccattttgttttttcaagaaaatgctggaaatattgctcatcgtcttgaaatggttcgaataatgttgcagcagttacattgcaatgttttcatgctttcttaccgaggttatggagcaagtgacggctatccttctcaacatggaataactaaggatgctcaggctgcattggatcatctttcccaaaggtctgatattgacacatctagaatagttgtgtttggacgatcacttgggggtgcagttggagctgtactaacaaaaaataaccctgacaaggttgctgcactgatacttgaaaatacattcacgtctatattggatatggctggagttttgttaccttttttgaagtggtttattggaggaagctcttcaaatggtcctaaagtactcaattttcttgtacgttctccgtggagtactattgatgttgttggccagatcaaacaacctatcctttttctctctggattgcaagatgagatggtccccccatcacatatgcaaatgctatatgctaaggcagctgctcgaaataatcagtgtctctttgtggattttcctactggcatgcatatggatacttggctggctggtggtgatcagtactggagaacaattcagcagtttcttgagcagcatgccccagagcaaaaggaagacagatcatcccaaaatgcaaatgatattggggcgaggtgattggctggcattaaattatttcaatgatactaattggctaactaaggattcaaacagtttctgccctttgaagttgcagtccgtaaaagcaccctgtgagaagatgcttcctactggaacatgctgcaccacgtcaaggtatattattgaacaattttggttgggttgtggtttccagaacttggaaaatacgcagacaatttgtgcttacccttttcctatattgttcggcacctacattttgggtgtctgatcgaatttgacaaaatgatatgtagaataataattattcacgtaagctatatattatatatatgtagtgtatgtagtatgttcttagtgaatgggttcatgtctttcatactaatgcacgctgctgagacatatttcatctcagttgattgctattttctttaattctcagttgattgctattttcattaatgtcatcttttattgattctttatatagaaagtttgaatgtct

SEQ ID NO: 45233 - DNA, 258 bp, Glycine max
  unsure (1)..(258): unsure at all n locations
  Clone ID: PAT_MRT3847_140846C.1
agacaccnccaccancacctcgctctctnnttccntncttcgcantttgnattgtnatgatnctantctgttanngttnagaaggcatcatcngggaaatggatcgggtgaanggtgacancgannccagaagangncgaggctttgcgggatgcattggtcaggnccacggggnctcgaaactggtcggtgattcncnagtcccgttncggggacgatccgggaaatngtgcccgcttactttggngcnacagctcc

SEQ ID NO: 45234 - DNA, 229 bp, Glycine max
  Clone ID: PAT_MRT3847_140847C.1
ctcatgcacagacaggcactctagtactctaatctctcctcacttaccttgttctctccaaggcacatggaacccgatatgtctcttctgtaccgaaaccctcctcaacagtgggctatactggttactacagcgtactgacactcgcctatcatgatgacgaacacacgctcattctatacgacgaattcatcggcgccgagatagcacatgacgactactaacacaa

SEQ ID NO: 45235 - DNA, 407 bp, Glycine max
  Clone ID: PAT_MRT3847_140848C.1
caccgctttaggttttgaaacctcttaactgtcatcttctgtgtgtcgatcgacttaggagcgatgctgaattgcatagagagacaggagcacactttgaggaggaccttgatgcaatgcttacaaagtgagatgtaattgttattaacacccctctaactgcggagacaaggggatcgctggacacaaatggaatagcaaagggcccgaaaggtgtgttgattgctaacaatgctttaggggcaattgcagacactcatgcaattgcagatgcaagatccaggggacacgttgtaaggtataggggtgatgaccggttcccacagcctgttccaaaggaatatccatcgcgtttcatgccaaaccatgtcatgacttcttatatttctggcggcaccataggtgca

SEQ ID NO: 45236 - DNA, 427 bp, Glycine max
  Clone ID: PAT_MRT3847_140849C.1
tgttggggtttatgatggccatggtggtcctgaagcttcacggttcgtcagacatcacctcttccagcacctaatgaggattgctcaggattatggaaatatctctgaagaaattctcagaagggctggttctgctacagaggatgggtttatgaaacttgttcataggagttatatgataaagcctttgattgcatcaattgcttcctgttgtatggttggtgttatctggaaagggactctatatatcggcaatcttggagactcccgtgccgtagctggttctatatgtagatctaacaagatcattgtcgtccacctgtctccagagcacagtgcttgctgggaggatattctacattactctgcgtgtgtgcatctacgaaatacgcacattgtggaaatgaaccgcggaccatgcagggtc

SEQ ID NO: 45237 - DNA, 263 bp, Glycine max
  Clone ID: PAT_MRT3847_14084C.1
ctggaaccccatatgtctttgctccattcattgcggactgcaaagaaccaagagggggacttatctactaaagctacaactagaaccctaacattggcaaaactatgactgaaaagatacacccttagcaaggagatatccgtggaagttccataaatggggaaccttttgtggttggaaaaaccaaggactccgatggggccaacccctattaagagaagggtggcccaaacacgggattaaatgagaccaccactttgatc

SEQ ID NO: 45238 - DNA, 675 bp, Glycine max
  unsure (1)..(675): unsure at all n locations
  Clone ID: PAT_MRT3847_140850C.1
cggccgctcgagccggcgggcgggccgattcgattttcttttctgtcatcattgagtcctcanttcgaacattttccgcaaacaataatcaacttcctcaaacgctactcacgttcgaatcttccgccgccatggcggccgccggagcatgcctcttctccgccgcgctcttccgccggccggctggaaaaccgagctccagccggatctcgagtacgactcctcgcctcgccgtgtcggtggatcgggttccggcgtcgacggcggcggcggcggcggcggagagcggagaaggaaatggtgcggtggtgagagagaagcgtagggaagagaagaatgagaaggagaaggagaatcgacgcatgaacggttggaaggagtatttggagcattcgaaggagctgattgaaccggacggtggaccgccgcggtggttttcgccgttggagtgcgcttcgcgattggataattctcctcttctgctctttttgccggggattgatggcgtgggacttggacttattttacatcatcagaaactgggaaggatttttgatatatggtgcttgcatattccagtcgcggatcgaacatcatttacagaccttgtgaaaatagctgagagaacaataatgtcagaacatcaacgctcaccaaatagacccatatatcttg

SEQ ID NO: 45239 - DNA, 191 bp, Glycine max
  unsure (1)..(191): unsure at all n locations
  Clone ID: PAT_MRT3847_140851C.1
gtnnganncatangaataagcanagatgggtgcatattcntttgactatatgtgaggctttgagggagtntagttgttnttntccntgtaggtcttcttgcangtcaactgaaangnagncgaaaggtggtggagtggaaggaggaggacatgggatgataatgagaganggttcatgtgggattaataat

SEQ ID NO: 45240 - DNA, 257 bp, Glycine max
  Clone ID: PAT_MRT3847_140852C.1
gttgcccactatggccaccccctacaatttatttgagtatttaaggttatttaaagagcagtaacatgcactgttcaatttctttgccttttcatatatttttagtttgtttttactttgtccttccatttaacaacactctcttctctcattgccccactgccaagagcatccacctctaagcttcggtgaccttctccaaccaccaccaactgcaatggctggagccctagagatcaccactaacagttttttcc

SEQ ID NO: 45241 - DNA, 319 bp, Glycine max
  Clone ID: PAT_MRT3847_140853C.1
ttcaatgatcttcttcccagctggtaccaccgtcaaccgtgccggggcccggatgggtggttcattcaccggccttaaattcatgggtggcttccccaccaagaagaacaaccatgaccttaccttcattggttgcaaccgtggaagaataccatgcatgccagtgtgggcaccaattggcaagaaaaaattcgagactcttttctacttgccagacctcgatgatgccccattgggaaaagaagtcgaataccttttaaggaaaggatggatttcttgcgtggaattcgagttggagcaccggttcgtgtaccgtgag

SEQ ID NO: 45242 - DNA, 2094 bp, Glycine max
  unsure (1)..(2094): unsure at all n locations
  Clone ID: PAT_MRT3847_140854C.1
gcaaaagggaatggattttattgcacaggaataatcattcttgcaccattttgaggaattttttcagataagaccagtacaatagtttctttaagcacatagagtgattaggctggtagcaagcgcgacatggcactgcagtgcaggttaagctcacaccattgatatcactagccatattctcctttcgctaattcccgcaagctactactcttcttcaacgctctctctgcaaaagatgcgctccaaggacagaatcgcttacttctacgacggtgatgtcggtagtgtttactttggggcgaagcatccgatgaagccccaccggctttgcatgactcatcatcttgttctctcatacgatcttcataagaagatggagatttatcgtccacacaaggcttatcctgttgagcttgcccagtttcattcagctgattatgttgagtttttgaacaggattacacctgacactcagcacttgttcttgaatgaactgacaaaatataatcttggagaagactgccctgtatttgacaacttatttgaattttgtcagatttatgctggtggaactatagatgctgcacgtcgattaaacaatcaactgtgtgatattgctatcaactgggccggtggactacatcatgccaagaaatgcgaggcatctggattttgttacatcaatgacttggttttaggaatcttggagcttcttaaatatcatgctcgtgttttgtatattgatatagatgtgcaccatggtgatggtgtagaagaagccttctacttcactgacagggtgatgactgtcagttttcacaagtatggagattcgttcttcccgggtactggcgatgctaaggaaataggagaaagagaaggaaagttttatgccataaatgtcccattgaaggatggaatagatgacagtagcttcactcgacttttcaagactattatttccaaagtagttgaaacatatcaacctggtgcaatagttctgcagtgtggagcagattcgcttgctggcgatcgcttgggttgcttcaatctctctattgatggtcacgctgaatgtgttagcttcgtaaagagattcaatttgccattgctggtcactggaggtggggggtacacaaaagaaaatgttgctcgatgttggactgttgaaacaggagttcttctagatacagagcttccaaatgagattccggaaaatgattatattaaatattttgcaccagaattttctttgaagattccaaatgggcagatagaaaatttgaatagtaaatcatatcttagcaccattaaaatgcaagtcttggaaaatcttcgttgcatccaacatgctccaagcgtacagatgcaggaggtgagttcatacttgaaatagaatcaccccatctagtaggcaggctcaattattttatcataaaattgtttcttgtaaaaactgttttgactttagaggcactatgttactagctcttcaactttcttgtattcatgaactcttacaaatgtggttaatcatcaattatttgcattggaggtaaatctttaaacaattgaagtggaaaatgttccttcttatagaacttctaaattaaggtgagagtcgctagttagattggggagagaaaagggttcaaaacttgggtggtatttcaggaactaaatatcaacttgtgaatggctttgaatgggttctgcggatgtatgcatatcaggtggaggacattttgatatatggttgtatttctggctttatagtctagagctgtagttgtagttctgcattgtagatttttctgttttgacacctgatatctttttgtactgatacagctttgtttggatcacaccttgtggttcaaccatgctctttctttaatataatattcatttggcctcttaaaaaaagactgattcattaaaactgcttaagctgaaggaccacggccatggaaattgggcatttgggctctctttctcacatgagactganatctattatttagggtatgtatgttagtaaacttggaatgtcacaacttggcattaatactttcatgtctggagttgctc

SEQ ID NO: 45243 - DNA, 351 bp, Glycine max
  Clone ID: PAT_MRT3847_140855C.1
tgagttcggctttaggctgtgggatacggcgttttctggggcagctacaacttgagagtgcactcactggcatggtctcggtaatgatacctgctggggttccatgtgcacactgcgatgacatgtgatgatggactcattatgcccgcttgaattgtgaggaccctgcgctaatgattcgccatgatcttcctccttcgcattccgttcactttattagtcatgaaatgacttgctctgctgctcttgctcacaaggttaccccgactgccagacatgatatgcaaagggactcgagcgtgctactagcgaactgctgaaagggcaaatgctgaagagggaaatgtactt

SEQ ID NO: 45244 - DNA, 827 bp, Glycine max
  Clone ID: PAT_MRT3847_140856C.1
actcaaagttgatcgaaacctcttttacaccatcggtttggccaagaattcttgccccacatgcgtcaatggaactcggctacttgcttccttaaacaatgtctcttttgtgatgcctcaaaccgcgcttctccaagctcactacttcaatatcaagggggtttacagaactgattttcctgataagcctctaactgcttttaactatacaggtgcaccattaacggctaatcttggtacttcagttggcacaagaattagcaaggttccctttaattctacagtggagctagttttgcaagacaccaacctcctcactgttgagtcgcatcctttccatcttcatggctataacttctttgttgttggaactggaattggtaattttgatcctgcaaaagaccctgctaagtacaacttggtagatcctattgagaggaacactgttggggttcccaccggtggttggaccgccattcgtttcagggctgataatccaggtgtttggttcatgcattgtcatttggagctacacacaggttggggattgaaaacggcgtttcttgtggaagatggtccaggacaagatcaatctgttgtgcctccaccgaaggaccttccagcatgctagacatgaatgaatttgttaacaaccttggattgtgttatatggaattaacggtgttttattcaacatttattgtctgttaatacttcctgctaaagatgcagagagtttcaattaagagttaacaaatgtaagcaaagtttggaccatgtacaaaatttattgacctgatacacaaaactttcattgatcatacagt

SEQ ID NO: 45245 - DNA, 734 bp, Glycine max
  Clone ID: PAT_MRT3847_140857C.1
tttttttttttttttttttttttttttttttttttttttttttttttttttgtttttttttttttaaaaaaaaaccccaaaggggcctacaaaggtaaggttccctaaaaacaaggggattaaattttaaatttggcccacactttaattcctgttgttggaagcgccccagggttaaaaaaataagggtaaaatgggcccctgatggccgccggctcttttttaaatttttaggggggggaaggagaaacagcttgggcaaggacccccccataaattttccttgttaacaaaacaataacaaatttgggggcccacaattttaccaaacctttagggaagaccttgctaaaagttgttatcaacaaggggggtttttaaaccaaataacacactgccccaaaaaaaattggcacaccggggccaataatcccgccttgcatgagtttaaattttataaaataaaacctttttaagggattaaactatggaatttttaaaaaaaaaaaaggtggggggtttttattatttttttttaagaacacctttaattggggtttactaccaaaaacccccaaaaaaaaacattttagtggttagcccaaatttaatattggaaaaaaaattatttttgtgttttttaaacaattttggaaattaaaaaaaaataatttttttttgaaaaaaatttcaaaaacacccgggggggcccaaaaaaattaaagctcctcctc

SEQ ID NO: 45246 - DNA, 274 bp, Glycine max
  Clone ID: PAT_MRT3847_140858C.1
agaaaacctaagcttagaattagaaacacagattagaagaaaggacaggcttgatcgttgacaatgcagggaggaaagacagcgggagagtccattaaggatacagctacaaacattggtgcttctgccaaggctggcatggagaagaccaaggccactgtccaagagaaggccgaaagaatgacagcacgtgatccggtgcaaaaggcgttggcaacccaaaagagcagatgcaaagatgaacccgggcggagctgcgacaagcaggcggcgc

SEQ ID NO: 45247 - DNA, 218 bp, Glycine max
  Clone ID: PAT_MRT3847_140859C.1
gctagatcactgggtggcgctccttaaagccggatacagaagcgagcgttacttgacgaccagaatttgtcaatggtttcctacttctttgggtacgatttgtgatgggagagaaaattactctctgtgctgggcacacactgcgggaagcattacctctagcaatattaggtgatttgctgaacactatcctattagatataggacttcgtgtgaga

SEQ ID NO: 45248 - DNA, 447 bp, Glycine max
  Clone ID: PAT_MRT3847_14085C.1
gagaaacaaaacatagagacaatcactgaatcactctcactcactctgcatgctgtgtgcgtgactctgtcattgtgttttgtgttttaagcactttgcagtttagtttctgaggagcgttttttttttttctttcctaagaagggggggccggtcctaagtggcggtaatggtggtcaaggttccggttcctactactactacaactggccctgcccctttaatttcctggtaaccttgggaacttttggttgggttccaaaggaaaagaatggcacctggttcctgggccaagttggctttgggtggggttggtaagcacccgttgccacctcgaattagggggttttttttggaaggtggtttttttttcctcctttggaaggtcaaattcttggtctgaatccggggaagggggaaaatttattggtgcctaaaagaagaaaa

SEQ ID NO: 45249 - DNA, 904 bp, Glycine max
  Clone ID: PAT_MRT3847_140860C.1
atatgctctacttgaccagaaagcttatataattgggatttatgtaacacactttgaacatataacataatatacccaacaattctgtcctctacttgctccttatgagcctttttctcaagcacatgaatcaaagctagtaagcatgattttgagcaaggtgaaactttccaatgccggcaagtgttttaagaacaagaatatacaaaactgactatatcattatcaagtataacaatatctagaaagctctaaacaaggtcaagatatattaagtaaaagaaccaaaaatggttgaatagagagtaacttcttatgctatttcatgcttctttccaggcttgtcaaacgtaaaggcacctcttgattgttggctgttgggtgttcattttcttttgcttcttcctcatcatggtccactcttactatcaagtttgctgttggtgaaatgggagacaactcagtgtcagaatggtaatcatcttggtcatcatagtttggtgtgaagtgagttgagtgaccggtagttttgtatcggtgtagtgtgggaccagaagagtgtattgttgaagcagtggagcttccatccagggctcgcaccctggaatttccaagtttcactccttgcttctttttcacagccatgtgccatttcttcaacgccttcgacgtttgttcgtcaaatattgattttttcattctcgagcccatctgagtaacaagagcatataatggaagggtgatgtagctgcagaggcatagcaccccaagccctaaagctactttcactattgcaagcttgtagtcagcatggaaacaatttctcagccccaaaagattaccatatccacaagaaatatgttatttggaacgcattctggaacaaagcaaaatggataagatg

SEQ ID NO: 45250 - DNA, 162 bp, Glycine max
  Clone ID: PAT_MRT3847_140861C.1
ggctcgagcgctaatccacaatccttttcatttttttagagccaccactgtcggcggggattgggcaaaggatctacttcaagataggcggaacctccatggtgcatcctctggtcacagtgggtacggttcattcctttagataggaggatgacgtgaagc

SEQ ID NO: 45251 - DNA, 489 bp, Glycine max
  Clone ID: PAT_MRT3847_140862C.1
ctacatctcaattgtccaattcaacctcacctccgaagtcaattctaaaccaccgatattcccacgtcataacctcaacacattgacatcatgacttgctgcggacgtaacaacggcgaatgcgtctgcgcaaaggaagcgacttgctcgtgcggaaagcaacctgcgctgcaatgcacttgcgacaaggctgttaccgagaacaagttgccaactagcacttgtgcgtgcggaaagcgggctgaagattcatgcacgtgtggacgtagtgacaatgggtcgtcggcgctcgagacggattttacgagcaagaaatagggggatgaaggaggagtaggagtggttgggagatgatggggatgatatcagaatgagcattgggatgggtgttttggtgtttttgagggtttagttctgggtggaaaagagtttccttgtggacaatgtcttcaaaatgggtcacgaatgaatttgaatcatcgagaaaaa

SEQ ID NO: 45252 - DNA, 463 bp, Glycine max
  unsure (1)..(463): unsure at all n locations
  Clone ID: PAT_MRT3847_140863C.1
tcctctagagcggccgctnntggtttnnttttttttttttttttttggacataaggaaagttagatggcctaatcgtaagggccaaatttcactcacagaatttaagctatttgtatatacagaatcaattttagtattgaggcaacaagaaataacaggaatctctcgtgctcttaagtaatacaatcctttattcaatttagcatgcccaatcatcttcaataaaggcatgtcatgtatatcacaataagattgataaaaagtgagcttgcaattcaaagtacaaacaagttggagtttaaagactatgttgaaagtaaagtcaggaatatataaaacattatacagccacaggttttcagaaagttatacacaactagaatattttgtagtgaagtaattccatttggaagattgacacgtatagcaaactttgaaagaaatttacctgaaaggcgattt

SEQ ID NO: 45253 - DNA, 355 bp, Glycine max
  Clone ID: PAT_MRT3847_140864C.1
atcagaatgcgttgtattcatccctatcgatgtcatactttgttttcagggggggagggagcactccctctacttcgatgcccatgtgcttgatgctcaaagactacggcattatctacgaggctgccattgtatatttctggcacgttatgctcatactcagtcaccgtaaattccgccgattccgaatatttgaactctgcaccaaaaccctttatcgattacagcatctacatgctttgaatgatgcagctcctatggatcagcataaaactgagatggatccagtatcccatgttaatgcaccaagggctactactactgaaccagcaacaaatgttaacgccgctagggc

SEQ ID NO: 45254 - DNA, 386 bp, Glycine max
  Clone ID: PAT_MRT3847_140865C.1
catgtctaaattgcagaaaatcatctttacaagacattaataacatttgttccatccagtagaaaacgactttcagcacatgaagcaatatttcaaccacaaattaaggttctggaggtatatctacaattagcatcttaaatatgataatatccttaacctgaattatcaccgacccgaagatcaagctgcaattgttccataagtactttttcaactgcatcgacgaagcttgatatattctgccgaatatgggtatctaaagaattggccaatttctcaactttgcaatgaaaacttaaagaagttctcttcaaatcatctgatccctttatacatatcagcttcaatggagaaccaaatataggccaaccatgtgacaactt

SEQ ID NO: 45255 - DNA, 377 bp, Glycine max
  Clone ID: PAT_MRT3847_140866C.1
ggctcgaggtttcagcagaaaaatcaattcactcatagagctacaataatgcaacaatgcctcgctatgatgattaatacggccatacccccctgtatgtgggacactactctttctggactctttcccgtgatctggctcgtgcctttagcaaacatgcaagagttctaggcgtgcttatcaagaatgatctcaacaacggtgtttctagggatcctcgaaatgctgataatgcaaaacataacctgtatggtcactatgtcgatggaagtcggattattgtggtattatcagaaagtgctccatgtgggtgcctagaatattaggggcgacgtcctgctgctggctatggacactgcttcaattgtgtacttgat

SEQ ID NO: 45256 - DNA, 244 bp, Glycine max
  unsure (1)..(244): unsure at all n locations
  Clone ID: PAT_MRT3847_140867C.1
cccgggctcgaagagnctcactagtacttcggaccgccctctttttttcttttgttttattacctgatgaatgcctaatctcaactataaagggcagatggaagcatactgtggtaagtttgtacactagcggcactgctgtttatatcaaattagggcacctaaaaaaggcctatatttgtgttctggtatactaggagctacgttaagtccaggaggttaattaggaaaaaccacttcacaa

SEQ ID NO: 45257 - DNA, 200 bp, Glycine max
  Clone ID: PAT_MRT3847_140868C.1
gggggggggtaatataattaaccaacaaatacttgcggcaccacaaaaagagggggatcgctcacattaaaaaaatctggagaccactaatttaaacgagatataaatgactgagtaaaaaggccttatgacccacagaaaagaaaatcaaactcactggaaaccctaaccatacccacgagtggaagaagaaaaaccct

SEQ ID NO: 45258 - DNA, 562 bp, Glycine max
  unsure (1)..(562): unsure at all n locations
  Clone ID: PAT_MRT3847_140869C.1
tacgggatctcactctacacccccctcaggggaacacggggcaatagacccaaataaagcgagttttttgtgcccaagtcccaaaaaaagagaagactagggaaaattctgcagctatgtggggagtgaaatagggttccccgacacacacgatattccctcttttcttttgggaaaagaaaaatcccccacagggaaaaagatgcaaaaacgctcgctaagctgggcacagcagagaacacacagccccagctgggtatattcattctcccacagtcaacccaaccccaaatgtggagcccttttccgtggggacaagctgtgcaaaaagaataaatttcacacccatatttacccgcccctccaaaaaagcagagacacacccagggaaatcactcttccccctaggggggctctgtctaggggtgtannnatacccaaagctaggtgagacatctcnngacaannaggtgcacatacnctcagacgctagagnnnccttctcanncnccttgagaacatagcnnaaaaaacccatcccagcgctagcnncnngccgtnt

SEQ ID NO: 45259 - DNA, 321 bp, Glycine max
  Clone ID: PAT_MRT3847_14086C.1
cggaattgcttgttctcccacgcgctcgctcggcagcaggcagacgacagagggggggcgaagtattgttgatccacggggtgtgtttctggctggaaactatgtatggatggaatcgaaacccaaacacaagcatgggcaggaaattcttcccctgcgggaaccggaaattgcaagggaccactcaagagagaaagaacattggttctactttgaatgagggttaaggccctggagaaaaaggcgataaaactggtgggagccctccttgagagttccttactgatgaaaaaagattggttgtccctgggtttccaaggt

SEQ ID NO: 45260 - DNA, 461 bp, Glycine max
  Clone ID: PAT_MRT3847_140870C.1
tttttttttttttttttttttttttttttttttttttttttttttttttgggaacaaaaaaggctccttatttccttaaagcaacaggttcacaatcaacggaaaccaataacgggctgtacaaacaaaaaaactccccgggcaaagccaccaaacttccttttaacttgggaaatcaattcccaaacccggtcccccctttaagggttaaaaactaaaatctacccccctattgaaccaaaaccagagttagtgcccgaaccagacctcaaaaagggaagatgggcagggggctgcccattacaaggggcataaaacatggcagggaaaaaaccgggttggaatggttgaataaaaaaagggggcaatctttgccccaccccaaacattgaagggcggggggcaaaggacaaatgggggggaacgggtgggtgggggccaaacccggaaaccggggcggg

SEQ ID NO: 45261 - DNA, 1219 bp, Glycine max
  Clone ID: PAT_MRT3847_140871C.1
cccggctcgaggtgagactgaagagacccttgctgacgtggcaattcgcttaagtcacagttcgcagagtgcaagcccagaaagcaatatgcgggcttgaatctggaatgactggaatcctcttgaaagaagactatacagatgactggagagatataattgaattatctgataggctacatgaaggtgacatgctcacttgtaaaattaagtcaatccaaaagaataggtatcaagtcttccttgtatgtaaggatagtgaaatgagaagtaatcggttaccgaataccccagctagtgagccctattaccatgaagaccgaagctgttttcagagtgatccaaacaaagctagggaataaaaggagcttgcaaaaaagcagttcaagccaaggtcgattattcatccacgctttcagaacataactgccgatgaagcaatggagttcttctatgacaaacgtcctggagaacgtattttccgtggtagttcaggataacctccatatcttactttaactctcaaaattaatgatggagtatatgatcagacggatattattgatgatgggtaggaatgggagaccattacaagcttacttcgggttgaggatgtagtaaaaattggagaggacacttttgaggactttgatgaggttatggaccgctatgttgatcccttggtggctcacttaaagtcaatgttaaactatcgcaaattccgaaagggtacaaaagcagaagttgatgaacttttgaggatggagaaagctgagtatcctatgcgcatagtctatagttttggcatctcccatgaacatcctggcacatttatattaacttatataagaagtacaaatccacaccatgagtacattgggctttacccaaaaggattcaggtttaggaaaaagatgttaaaggattttgatcggcttgaagaatattttcagagacatagttagcttcccttttatgagacaatcacttgaaggaaacgtagacaatcgcacagacagtgatgagcttatgaatacagtagccaattctcgtgatcacctggcagagttgctgttctggtccctgttattgggtcagctcttaagagggttggaaaatagattgcatctgagcggtgttgttggactgttgtaaagacggtactaggcgagtatattaacaatgggaatcaggacgaacatcctagtggagtgcctcg

SEQ ID NO: 45262 - DNA, 417 bp, Glycine max
  Clone ID: PAT_MRT3847_140872C.1
ggctgtagcttgttcgttaatgcagtctcattaaattgtgggatgtatattctatatatgcagagacaacgaggaggaggactgcagtatagggaagcacaaaactagtgaaagaatacaagtctcgttctatttttaatttttttcgtttctgatcagttaaaatgaaacgaggaaaaataattgtgcagctattccttgggggtttttggacctaaacatacacaatggtatgctccaattggttggttaatcatcaccccactttccttcaacttttttttcatatgtatatgtttttcgtatgtggaaatgtctctccgaggtctattcttgtagacaaattttagccacaggtacataccacagcatatacggatttgtcttactttgcattgaatcaaataaaatgttctt

SEQ ID NO: 45263 - DNA, 244 bp, Glycine max
  unsure (1)..(244): unsure at all n locations
  Clone ID: PAT_MRT3847_140873C.1
caccccccctcccaactaaaccacgtccatactatacttggcttaactctaaaagggtacttncctttncttcttcctcttcaaccccttttttcaatctcaatcaaaatgcaaacttgcgctatattctcccttctcctcntcatctctccccattttcaaagaatggttctntctnctgataaatttcacggggggcataatngagtggcactctccaccagtcancttccattgactccac

SEQ ID NO: 45264 - DNA, 456 bp, Glycine max
  Clone ID: PAT_MRT3847_140874C.1
gtcgtatcaactctcgcaaagtgcaagggctatcgtataaccaaataccaacttctttccctcaaatttcttaagctgaccaacagcattctacttaatagcttaaaccatgtaaagaacctcggaccccttctttttaagcttttcatgggacgggggattttgaacggccttattgctttcaccacaaaggcagtacatgttatccgagcccttccttcatccagataacatgagtccttgaggcggggaacatcatcaccactctcggtggagggatccaccgagcactaccacttgatgagcatagttctgagaaccctctggacttccagggggcatagtcttatagaaggcttaataaacctcgttatgctcatccttgccttcacctattgggaagaacattatactgcacttatagaccgagttgtcaccgacgactgctaggatctt

SEQ ID NO: 45265 - DNA, 225 bp, Glycine max
  Clone ID: PAT_MRT3847_140875C.1
aattcggctcgagagataattttatcccaacccaaccacacatacactatatgcgctttttctctccccccaatggccggcatacacggggggatggcaaacctactttaggtcctttggcgttgcttccactaacgcaaaaggactcaccagtcatcaccacaccacccctgtgctttgcttgcggttttggatgtgagacaaagaaaagagtcagaagtgggg

SEQ ID NO: 45266 - DNA, 522 bp, Glycine max
  unsure (1)..(522): unsure at all n locations
  Clone ID: PAT_MRT3847_140876C.1
canttccttataccattgcgcagattgaaccacacatgaattcaaggtttcagcttttgagtaccactaccaatggtgattttgttcaaggaaaagatctcgcaatgggtaaagctaacgtaacatgtgctgctggtggcttgacatcaagttacactccaactacattgttggaatctggtttgcaaaaagacagagggttaattgcggtgtactttggaaggatgtattacttcgctcataacgataatcagccccaagagaaagattccgtggagggaaatttttcctttgatattaaatttcgctctaaattggaaaaagtgtgctatacaaaagcacaatttgttagtggaaaaaccttcagtatgatataaatggagctttgtcacattcttcagaagattttcctgacaaggaagatcaagaaaaaacccacaaagattgatgccagagtgagacaaagaattgatcctcaatatgatgaggttcaggctcatatggaaacaaatttgataaaat

SEQ ID NO: 45267 - DNA, 207 bp, Glycine max
  Clone ID: PAT_MRT3847_140877C.1
cggtcccgggatctcccgggtgcgcacccacgccgctccgcgcctcgctgtggggtatacttacagagcactaccctgaacatagagagaagcccgcgactaggatctgctagtgaagcaatggcacaaaccatgatgcgccgctccagggattctagtccctactccgtgggcttacaagaacgaccttcacctccagttgcagag

SEQ ID NO: 45268 - DNA, 299 bp, Glycine max
  Clone ID: PAT_MRT3847_140878C.1
atttttggtgctggcccacattcttgagaagatttccctgaaacagaagaccaagacaaacccaactagattgatgccagattgcgacaaagaattgatcctcaatacactgaggctcaggctcagatggaaacatatctgtgcaaatcgcctcttgatgatgtcgaaactcctaacggttccatgttggatcttaaacactctcaatctaaaattgcacttcccaaaaacacagttggtggaaccattctgcgctgagatctattggcaaattcttggacagagggcaattatagagc

SEQ ID NO: 45269 - DNA, 1904 bp, Glycine max
  Clone ID: PAT_MRT3847_140879C.1
attaaagagaccaaaccctatctctgcatatggctcgagtttcattccaaaatcttcatattcatcaaactcatcaaaatgaatctgtaccactcctccaccaccaccaccaccaccaccatcttcaccgtcatattcctcctccttgcaatattattcactctcacaccccacaaggccaacggtgccacgtgtcaccctgaggaagaagcgggcctgttgggcttcaaatccggtatccgatccgacccgtccggcctgctcagtaactggatatcgggtacggactgctgcacatggaccggagtagaatgccactataacagcacccgggtccaaagattattcttaacgggtcaaaaacccgaaaccatcttatcgggtaccatctcacccaccctctcaaaactcaaactcctcgatggactctacctcataaacctcatcaacatttcgggtcccttcccaaattttcttttccaacttccaaatctccaatttatctatctagaaaacaacaatctctcgggtcgaatacccgataacatcggtaaccttacccgattagatgtactcagtttaactggtaaccggttcatcggacccgtaccgagttcaataaccaagttgactcagctcactcagctcaaactcggtaacaattttctcaccggaacagttccccaaggaattgccaagctcgttaatttaacctatttgagtctcgaaggaaaccaacttgaaggtaccataccggattttttctcttccttcacggatcttcggattcttaatttttcttacaacaaattttccgggaatatccccaactcgatttcttccctggcgccgaaactgacgtacttggagcttgggcacaactcactttccgggaaaatccctgattttctgggaaaattcaaggcgcttgacacgcttgacctgtcatggaacaagttttccggaacggtccctgcgagtttcaagaacctgacgaaaatcttcaacctgaacctctccaacaacctcctggtggacccgttccccgagatgaacgtgaaagggatagaatcgttggacttgtcgaacaacagttttcacctggggagcattcccaagtgggtggcttcgtcgccgataatattctctctgaagcttgtgaattgcggaataaagatgaggctagaggattttaagccttcggagacttatttctatgattttattgatctttcggggaatgaaatttcagggagtgcaattgggttggtgaatagtactgagtatttggtggggttttgggcttcggggaacaagttgaagtttgatttggggaagttaaggtttggggagaggttgaagtttttggatttgtctcgtaattgggtgtttgggaaggttccaaacagtgttgttgggcttgagaagttgaatgttagctataaccatctttgtggtcagcttcccaagaataagtttccggcaagtgcttttgttggaaatgattgtctctgtggttctcctttgccaccctgcaacaaagcataagtgtagtaagctttgttgttgatgatttcaagtgtttaatttccttttgctgctaagttttccaataattatgtaatttaataagtaaattgtaattttaactttcaatatatactatatatatttactttaaaacagtaagttgaatgggtataataattaatataatttgctctttttggaaggttggtgcaagatgcggtatgcatgttttctgtgtaatgctagtcctcgtgagcttatgcatgttttctgtgtctcccacccgggaccgccacacttttcagttctcttaaggcgcccccaataaactttctcggccctccttttcaccccccgtgcccgggaatcccccg

SEQ ID NO: 45270 - DNA, 1248 bp, Glycine max
  Clone ID: PAT_MRT3847_14087C.1
ctcggcgggaggaggtcgaatacccacgcgtccgtacggctgcgagaatttggtaggtttggagacacgagtggcttttgttactgcgctgcgtgcagaaacagagaaggagagaagaatggacgaggagaatggttacagtgggagtagcagctcaaacttggagactacaaaagcagagagatctgtgtggctgatgaagtgccctttggtggtggctaagtcatggcaggctcatcctccttctcaacctctcgccaaggttgtgctctcccttgatcctctccaccctgaagaagacgatccctctgcagtccagtttacaatggagatggctggctccgaagctgtgaatatgccaaaaacttattcattgaatatgtttaaagactttgttcctatgtgtgtcttctccgagactagccaaggtggcaaggttgcaatggaagggaaagtagaacataagtttgatatgaagccccatggtgaaaacattgaagagtatggtaaattgtgtcgtgagaggacaaacaaatctatgattaaaaatcgacaaatacaggttattgataatgatcggggagttctaatgaggccaatgcctggaatgattggtctagtttcatccaattccaaggacaagaagaagacacagccggttaagcaatctgatacaaagagaacgagaagagatcggggagagctggaggatataatgttcaagctatttgaaagacagcctaattgggccttgaaacagcttgttcaagagacagatcaacctgcacaattcttgaaagagattctgaacgaactttgtgtttacaataaaagaggtgccaatcaaggaacctacgagctgaagcctgagtacaagaaatctgttgaagatacgagtgctgaataagtgcgctatgttcttttacattatactcttaactccaccgaggcacagaccctccaaaaatataggctgatggaagaaagaatcttgggacaacaaacaagaagcaaactttgtatctgaaccgtgaagaataccttgtttatgactttttttaccgataaattatcaaacatgcagttgtatacgttcaaaaggaattttagcaaccgaaaaattaatgttatgttgcctggttacgcgtagaatatctctgcccctgtacatggagttgttctgttgtaaagacctacctagtaatatgatgctcttctcctagtttggggggaaaaaaaaatgggttg

SEQ ID NO: 45271 - DNA, 1932 bp, Glycine max
  Clone ID: PAT_MRT3847_140880C.1
tacgaacaccttgtcaatctacgtaagttgggcggatggttgcggaaataccaactgaagctaaacccaaccaagtgtacctttggggtaaagtcggggaagttgctgggatttatagtaagtcagaaagggatagagatagatcccgagaaagtgaaggccatccttgaaatgccagaaccacgcacggagaagcaggttcgggggttcttgggcaggttgaattatatcgcgagatttatctcgcaaatcacccctacatgtgagcccattttcaagctattacgtaagaaccaggcggtcctgtggaacagcgactgcccagaggccttcgagaagatcaaacagagcttcgcaaaccccccggtgctcatgccacctgtaacaggaagacctattttcctgtacatgactgtgttagacgagtctatggggtacgtgttgggtcagcacgatgactcttggaaaaaggaacaagccatttactatctaagcaagaagtttaccgcatgtgagatgaattactcaatgctggaaaggacgtgctgcgccctggtatgggcgtcacatcggcttaggcagtacatgctcagtcataccacgtggcttatttccaaaatggatcccgtgaaatacatctttgagaaaccggccttcacaggacgaatcgctaggtggcaggtactactatctgaattcgatattgtgtacgtcaccaaaaaggcggtaaagggaagtgccttggcagattatttggcccagcaacccctccaggattatcggccgatgcaccctgagttcctggatgaagacatcatggccctgttcgaagagaagcggacgcacgaggacatagacaaatggattgtttgcttcgatggggcatctaatgctttgggccatggagtaggggcagtccttgtatccccggatgatcagtgtattccttttacggccaggctgggtttcgattgtaccaacaatatggccgaatatgaagcgtgcgcccttaggattcaagcggccattcattttgatttgagaggagaatgggatactagggatccgaagttgatactctatcaaactcacatcttgaagttagccgaattctttgacgacatttcattccaccacatacctcaggaagagaaccaaatggccgatgcattggccaccctggcatccatgtttcaacttaccccacacggggatctgccgtacatcgaattccgatctcggggcaagccagcacattgttgtgcgatagaggaagagcaagatgggaaaccgtggtacttcgacatcaaacaatatgttgagaacaaagaatatccaccagggatttccgacaatgacaaaagaacgttaaggagattggctactgaggcaaactacatgattgaggaaatccacgggggttcatttgggacacatgccaatgggcatgctatggccaggaagatccttagagccgatgtcattggggccatcgaacccaaagcttcgaacgatcatcgcttcattcttgtggcgatagattacttcaccaaatgggtcgaagctgtctcttataccaatgtcacgagaagtgtggtggtcagattcataaagagggaactgatttgtcgatacgaactccataggaagatcattactgacaatggcaccaatctgaacaacaaaatgatgcaggaaatgtgtggggatttcaagatccaacatcataactctaccccttgtcggccaaagatgaatggggctgtagaggctgcaaataaaaatattaagaagattattcagaagatgacggtgtcatacaaagattggcatgagatgtttcctttcgccctgcacggatattgaagccacttactatttaagcaagaagtttaccgtctgtgagatgaataactcaatgctggaaaggac

SEQ ID NO: 45272 - DNA, 531 bp, Glycine max
  Clone ID: PAT_MRT3847_140881C.1
ctatctcgatcgaactgtccaaggtcctgtcactggtgatagcaggttaaggatagggagagtgctaggaatgatgggccagaagggccgcaaagagtgtttaggtagaaacttaaggcggaagagaaacctaggcaaaatacagcggcccacgtggatatgtttgtaatggcgtatgccaagaggtggtggccctgggcgggctttaacggctggtgcgggggcgtgaaagggcaacgtaggttaatgcaaaggtacgtacggacccgtggtagtgccaaaagagggggaggggattgcgtgcaagcggggtaggccacggatgaggccgccaattggcggtaacgtaggtaacacaaggacccagtatttcatcggccagcaaagggtagttgcgtgactgcaaacttgtttacgtaacgtgatggggggtggcattgagcgcctttggaaagggggtaggcctgagccttggcaatgcggttcaagacggttttggaggagagattagggcaacacaaaagagtggga

SEQ ID NO: 45273 - DNA, 170 bp, Glycine max
  Clone ID: PAT_MRT3847_140882C.1
aacaagaaaacacacttatactgaattaacaggaaatagtgaagcaatacaaacaacagggcttgaaagtacgtaaaaagccataaacacatttaagacaaacaccggatactaggaagacacaagatctcaacatgagtcgaaaaaacatacacgctttaaataggccc

SEQ ID NO: 45274 - DNA, 320 bp, Glycine max
  Clone ID: PAT_MRT3847_140883C.1
actacgcgtccgctctccctgtctgttagcacgctgactcttccctggaaccgcgtcactgacccatggcgaaccgccactcgcgcaccgggcaaatcgtccgccgtagatccatcgacggagcaagactgacgacttattcgtcctcatggagccagagcaacgcgcccgctccgaaggatcctatactctgagtcactgaagctgcactagccgctcagagtccaaacagagccaacgtgagagagggtgcggagagggaagaccacagcacacctgtgggtctggaatgagagggagcagcaccgaggagggccgcc

SEQ ID NO: 45275 - DNA, 584 bp, Glycine max
  Clone ID: PAT_MRT3847_140884C.1
agcaccaccaaaatttgcattgatttggatataagcatatatagcttacaataaaggcatttttcgctcattattgagagagggggaaattagacagacagcccctatttcaaccttttttttcaacattttggtggcttcattgaaattccagagtagtttgcataaattattaagaaagccaccagcaagaacagccctgctcaatggatctgatctactaaaacttgctctagtttaggtagcaagtttcttcttacaattgctctgcactaggctaagtagaaaatctgtaaatacgtgctcatagtctggcatttttgcatatccgggaaagtagttgatgtcaatgacgtaaaacacatccttggttccatattctcgaatcatatctatgttgaacaagcacagtcccaatcgatggcggagctccctcgcaagcctctccaataaaggtcttggcggatgttcagcgatattaggatctaaatcagcatcatctgcagaagcggctgcacatgaaactcttgggaaacggaatacaccagcaacttttgatacctcatgcttactgatgttaggaa

SEQ ID NO: 45276 - DNA, 295 bp, Glycine max
  Clone ID: PAT_MRT3847_140885C.1
caaaagaaccttgcatttagggcacctgtccaccatggagcgtacaaccacagggaactctgttgtaaaatctttgacaaaagctccaagatatgcttctctaattgctactatcttgagacatggccatgccaacgaccttattactcctaaaaaaacaacggataatccatctatgcatccttgtaataccctccgtcctcaaaaaaagaaacgccccacatcattcattctttttggatcaactctaattctgcggctggacattgagggcattcaaacattctttcgtact

SEQ ID NO: 45277 - DNA, 117 bp, Glycine max
  Clone ID: PAT_MRT3847_140886C.1
agtacatctgctagaagactacaaaagggaccctcatttcttgtttatgtaagaagcaggatcctctttataaatgttctacttaagcagaagtgagggtcaatttcttctgcttct

SEQ ID NO: 45278 - DNA, 306 bp, Glycine max
  Clone ID: PAT_MRT3847_140887C.1
ggtggtgcaatgcttttggctgatacttatcataccaatgctggaaatgcacttcgcaatatttttgctgcgcctttcagaggcagagggcccattcaggcggttacatttgcgaataccattgggcatattgaaccagacatgaattcacggtttcagcttttgagtaccactaccaatggtgatcatgttcaagggaaagatctctcaatggttaaagagaatgtaacatgtgctgcagttggcttgacatcaagctacactccaactccattgttgggatcatggttgctgaaagacaaaagg

SEQ ID NO: 45279 - DNA, 242 bp, Glycine max
  Clone ID: PAT_MRT3847_140888C.1
tggtcaaagagtctctcatggggaaagtgcaaggttttagccttctatcttttggtggctgctttgatggttgtcgtgaccatactcaaggctctggttacggaacaaggatatggaacctcagtgatcgaccagtggagctgcaaataagggtgggatcaatactgaagaagattcacacgttgaagccggggtcttctaaaagattgaaatctaaaagcatatataaggcttatatgcct

SEQ ID NO: 45280 - DNA, 468 bp, Glycine max
  Clone ID: PAT_MRT3847_140889C.1
ggctcgagggcggtttatcaggaaatcatgcctcatgcttttgctttgatgactgatggctctggttatcagggggctcataagtatttggagcctggacgggcatactaaagaagagaattagccaacaaactgctcggccgtgttgtgacacttagcctttcaatgtaagggtagcagcggcatccagagagccacctgaggtgtcgatctgtatcagaagatatagatgggtcaacagcttgatggttacgtcttgcgctgagtacgcgatcagaatgcatatcacgttatgcagctgtgttgcgaatgtgtacctgatgatgcaggcgactgtatcgtctcgacatttcttgatcaggttgggacactatgactccatccatatggttgccggatgatacagatagtgctggaacactgtgaagaccctactacacacactaatgccatggatgaaatactacg

SEQ ID NO: 45281 - DNA, 507 bp, Glycine max
  Clone ID: PAT_MRT3847_14088C.1
aatgaaaacgtcagttgcaattttgcggttgagttgaagtaaacactggaaaagctcacaacgacttcgttactaacgcccaacaatttggatttgttacatcacaagtagcttgttgtgggcaaggaccttacaatggtattgggctatgcacagcactctccaacctttgctccaacagagaccaatatgcattttgggatgcattccatccatctgaaaaggccaataggcttattgtggaggaaattatgtcaggttctaaagcctacatgaacccaatgaaccttagcaccatcctagctttggactcaaacacatgaagataacacaaatctaatatatcctagcacttgtattggccttccatgctagttcaagacatctctctttctacatttttagtattgtaattgtggttattgtattcctctatataagtgagaaagaaaaaactttcatttaccaaaaataacaatggaggatactgtaacattcattccaaaa

SEQ ID NO: 45282 - DNA, 218 bp, Glycine max
  Clone ID: PAT_MRT3847_140890C.1
gaagtacatagctgcaaaaagttccacgttttatggagttgtaaaaaaataagaataagaatgtcttgttgtaatactatatatagtaataataatgtgtagctgcatgatgtttattataataaagttgttttatttatggaaatctatcatgcagatgcagtacatgttccacgctttgtggagttgtaaataaataagaatgtctttttgtgatt

SEQ ID NO: 45283 - DNA, 264 bp, Glycine max
  unsure (1)..(264): unsure at all n locations
  Clone ID: PAT_MRT3847_140891C.1
atnnaaaattttgtaaccntttttttttggggagaaatggcgttcataaattccaaaagaacacccttgtttttttcaggacttattcgcctaaactgacctaacaatagggcgggggaccctttaaacaacctttggagggggggaaaaaaatgggtttacaccccggtccggcctctaggttacaacccttggggggggggcccacggcccaaaaatttttggaaaattccatcctttcccttcccaaaaaaaaattccaaa

SEQ ID NO: 45284 - DNA, 345 bp, Glycine max
  Clone ID: PAT_MRT3847_140892C.1
tcggtgatttctgacaattcggtgagttaatgtaccatcagcaacaactctgcggggtggcgggtggctatccttgagtagtatgggacatgacaactgactgtatactgtgccaggggagtcagtgattcgtgtggagagtgacaacaaacgacagaatgagctgatagggcgctctaccttgctgtgtgaagaactcgacctttgggcaccatctgacagggactaaaacagaacagtcgctgcaattagaagagctcagagaggacattgttgacacatggtcttagcaagccactggtcggtcaattacatattgaccactgggaaggaggaattgtaacc

SEQ ID NO: 45285 - DNA, 268 bp, Glycine max
  Clone ID: PAT_MRT3847_140893C.1
atcccccatagctgagttcataaaaacactcctttgtctgaacatcaccatgttgaccattattggctacaagagacagagtgacaccataatccccggtaacaccgaatgtgacggcgttggcattctgggcatccctagagccttcggcggcatgatcttcatccttgtttactgcactgacggaatctctgggggacacatcagccctgcggtgacattcggggtgattcttggacgctaagcgtctttgctgagagcgtcgttt

SEQ ID NO: 45286 - DNA, 448 bp, Glycine max
  Clone ID: PAT_MRT3847_140894C.1
gttttaaacaacagataatttggttggacgaggtgggtactcggaagtatacaaaggtgatctttcagatggacgaaccattgctgtgaagaggttggccaaggacaacaaggatcctaacaaggaaaaagagttccttatggaattgggtgttattggacacgtctgccatcctaatactgcaactttagtgggctgctgcattgaaaatgggctttatctgattttcaattactctcaaaatggaaatttggcaactgcactgcatggtaaagctggagatccactagactggccaatcagatacaaaattgccattggtgttgcaaggggccttcattatcttcataaatgttgcaaacaccgaaataattcaccgtgacatcaaagcttttaatgttcttctgggtcctgattatgaaccacaagataacgattttgggcttgc

SEQ ID NO: 45287 - DNA, 520 bp, Glycine max
  Clone ID: PAT_MRT3847_140895C.1
gggaggtggtgagtatcatacctgtgctttgacagattctggcgaagtatatacttgggggaatgatgtttgttgtgcagatttattgattgaagggagaactagaagtcagtggataccacaaaaacttggtggatccttagatggtattagtatctcaagtgttgcctgtggggaatggcatactgcaattgtctctagttgtgggaggttatttacttatggagatggtacatttggggttcttggccatggcgatcttcggagctattcaagtccaaaagaagttgaatctcttagtggtctacgggtgaggtctgctgcttgtggatcatggcatacggctgctattgttgaagtcatgtttgaccgtttcaggtacaatagtgctagtggtaagttgtttacatggggtgatggagatgaacggaggcttggtcatgttgataatggaagcaagcttgtaccaacacgtgttacacaacttgttgactatgattttgttcaagtgtcatgtgga

SEQ ID NO: 45288 - DNA, 268 bp, Glycine max
  Clone ID: PAT_MRT3847_140896C.1
cgcgaagaggcttggcctgatactggtgatcacacccaataaaagcgctgagcactggatgcttgcatactttctgcaggacaggataaatgaactggggaagccttggattaccacacttattttgacaggcaatcgggatattcggtgcaaacgatagaaaaggtcacattgtacttgttggtcgaaaaaaacatcaacgggacccggaatcggaatagctaccatgggaagggcggaaatatcaagccgaatggggagatcaaga

SEQ ID NO: 45289 - DNA, 376 bp, Glycine max
  Clone ID: PAT_MRT3847_140897C.1
taaattaataaataaagatgaatatatagatacaaaaagatacataaacagagacagaaagagagacaaaaagtgaaagagactaagacagaaagcaaaaggggtgtaaataaatgtatatatatatgtaaataaatatagagatatacatacacatagacacataaaatagaaagaaaaagagaaacatacagacacagatatatatgcatgtgtcgacacacatggaggaatagaaaaaagcacaaagaatgacgtggaagctcttggacatgagcacatgcacatactaaaataaaggctggcacgggcgggactaaggagtggcactcagaaagaaaaaaatgataaaatcagtgaaaaaaaaaagggaact

SEQ ID NO: 45290 - DNA, 461 bp, Glycine max
  Clone ID: PAT_MRT3847_140898C.1
gttttcaccctgaagctttaggcagtggtgatgcttctaaaccatctggtacatataaaaatgccattccctcagaagatggttcatttgttcagcaaatgcaactcaatgttgcagctgttggaattccagaacattctggttatgcatctcagcatgtaaatgcatcctttgtgaccggttcatcacctgatagaagatcaattgtttctgctagtgttaatgaagctcctggtagtaaaccgttaccattgttgtcatcgactcagcaacaatcagccactagttctgttgggcaatgtgtcacatcagagcagccttcattgcactgtcaggcttctaaagagttacctccacagagtggttcttcaggggaatttccacttcatacttaccagttgcctgcttctgctgtttcacatttccagggtgaaaatcctgtgcatatgcctcaaattttt

SEQ ID NO: 45291 - DNA, 1869 bp, Glycine max
  Clone ID: PAT_MRT3847_140899C.1
agttagttctgaagaacgtgaagcgtgaaagaaagataatgggggctcaatagaggaggtgccaaaattgtgcattgtagctgaatgagcaagtagtggaaaagctaaaaagcacattctgagaaagaaagatatgggtgcatactgcaacggcaacgtttcgttgtcaccatcctacgacgtcgcttcagccgaagatcccaggttctgcaagcacgttcacgacaacgtccatggcaatatttatctcgattcccttagtttgaagttcattgacactgagcagtttcagaggcttcgcgagttgaaacaactaggttttacaaacatggtttatccaggtgctgtgcattccagatttgagcattctcttggcgtgtattggcttgccagtcaatgtgtggaaaagcttaaaacttatcaaggcttggagcttggtattgatagatttgatattcaaacagtgaaacttgcaggacttctgcatgatgtgggacatggcccgttcagtcacttgtttgaacgcgagtttcttccccaagttattagtggttctgattggtcacatgaacaaatgtcagtcgatatggttgattatattgttgatgaacaccatattgatgtttaccctcaaatgataagaagagtcaaggagatgatactggcaagctctgaatatgctccttcaatgagctcaagtgagaaaagtttcttgtatgatattgttgcaaatggccgaaatggaattgatgttgacaagtttgattatcttcttcgtgactgtcgagcttgtggtctaggatgcaactttgaatttcaaaggttattggagacaatgcgggttttggatgacgagatttgttatcgtgctaaggactaccttaccatccacaaaatgtttgccactcgtgctgatctttatagaacagtttatacacatccaaaagtgaaggcaatagagcttatggtggttgatgcacttgttcacgctaatagttatttggggatttcgtctaatatacatgatccttctgagtactggaagctggatgacacaataattaaaactattgagacaactccaaatcaagaactaaaggaggccagggagttgatcctgcgcattcgaaggaggaatctgtatcagttttgtaatgagtatcccgtaccaaaggatatgctggacaattataagaaggtcactgctcaagatattgtttgttctcagaagagtggtggagttacactgaaggaggaggatgtagctgtttgtaatgtcaaaattgatttgactcgtggaaagcataatcctctggaaagcatccactttttcaaggattacgaaagtgatgagaaatttacaatacctgatgaccgtgtaagccacttgctacctacatcttaccaagatatgatagttaaggtgtacgccaaaaagccagaactggtggaggcaatttcagaggcttttgaaaattttcagttgaaaacatatgggatcaaagcacaggcacattcaacgccacagaagaagcgtcgttacaatccatttatataaggggaaaagttatcattactatgatactatttttttggccttctgtctcaccctattttggtatacttacattttccatagttgaaatgtagtataagtcaacagaaaccaatgctactcgctaaaggttgtatttgagttacgatatcaaagaatcaattacatgtatagcaatgttaagtgtaacagcttcatttagctgtaattagcagtgagagcaatcattttttgtcactgctagttggcagtttcaacttgcaaatgtttaccaaatatcttgttcaaattgtaccagtttcatggatgaaaaa

SEQ ID NO: 45292 - DNA, 244 bp, Glycine max
  Clone ID: PAT_MRT3847_14089C.1
tgagagggagggacacgtcggacggatgagctagcaagtctgaatgatgattctggattgctctacagaggagattctcctgcgacttcggttgaggtgcacgcgccgcacatcgagtcggaggagagcttgtatgagcaggccttaggggagcgagctggcgtggcgcgagatactcatggagcttgggagagggttcagggacattctgagacagaaccttgtcagcgaggattcgtgtgtg

SEQ ID NO: 45293 - DNA, 313 bp, Glycine max
  Clone ID: PAT_MRT3847_1408C.1
cgcttttcttcaaaatccaatgatttttgtttctaaacctccttctcagacaaacaagcaccctctagtctctgtctcaaaccttttccctttccctccaattaaccaaaccaaacactccctaacaccaaccatttatgcatttcgcaaaccacaccacactcttcgctgtgtccactgattcgtgttagttataattcaattccccccaaatctcgcgacatggggcaagagaaccaccaccacaagcgcagcaccggcgtgggcttgccgacctccaacgcgcgaagccgcggcggcaacgcgcttcccc

SEQ ID NO: 45294 - DNA, 1125 bp, Glycine max
  Clone ID: PAT_MRT3847_140900C.1
agaggaggtgccaaatttgtgcattgtacctgaatgagcaagtagtggaaaagctaaaaagcacattctgagttgagagttgagaagaacctgaagcgtgtatgtgtattgttgatagcagagaaagaaagatatgggtgcatactgcaacggcaacgtttcgttgtcaccatcctacgacgtcgcttcagcccaagatcccaggttctgcaagcacgttcacgacaacgtccatggcaatatttatctcgattcccttagtttgaagttcattgacactgagcagtttcagaggcttcgcgagttgaaacaactaggttttacaaacatggtttatccaggtgctgtgcattccagatttgagcattctcttggcgtgtattggcttgccagtcaatgtgtggaaaagcttaaaacttatcaaggcttggagcttggtattgatagatttgatattcaaacagtgaaacttgcaggacttctgcatgatgtgggacatggcccgttcagtcacttgtttgaacgcgagtttcttccccaagttattagtgcttcggagctagctcatgtacatatgtcagtcgaatcatgtattcatgatctctttcaaggatatgaaagtgatgagaaatttacaatacctgatgaccgtgtaagccacttactacctacatcttaccaagatatgatagttaaggtgtatgccaaaaagccagaactggtggaggcaatttcagaggcttttgaaaattttcagttgaaaacttatgggatcaaaacacaggcacattcaacaccacagaagaagcgtcgatacaattcatttatataaggctcattcaacacccttcttttccttctttgtcccacccttttttggtatacttacattttccacagttgaaatgtagtataagtcaacagaaaccaatgctactcgctaaaggttgtatttgagttacgatatcaaagaatcaattacatgtatagcaatgttaagtgtaacagcttcatttagctgtaattagcagtgagagcaatcattttttgtcactgctagttggcagtttcaacttgcaaatgtttaccaaatatcttgttcaaattgtaccagtttcatggatg

SEQ ID NO: 45295 - DNA, 125 bp, Glycine max
  Clone ID: PAT_MRT3847_140901C.1
ggcacaagcgtcttcataaacgtcgcccttgacttctcatagcctatgatgcattccatatcgtttctagggatgggcttactttgcgcgagaaaatgagagggtgacatttcgagccacattgg

SEQ ID NO: 45296 - DNA, 183 bp, Glycine max
  Clone ID: PAT_MRT3847_140902C.1
cttacaatggatcctactctcatcactgactccacattctctcccgcttactctctcgccgagagtgggcccgtaatgccccatttacctcctaacttacacaaacacatcttcatcaatcacttcaccctcacacacctgacactcacacgtcgcaagagaaaaaactgcttctacaccacc

SEQ ID NO: 45297 - DNA, 434 bp, Glycine max
  Clone ID: PAT_MRT3847_140903C.1
tcgcgggctagaactagtctcgccccttgttccgcccgggggttcccggcccgtcccctccggccatcccgctttcccttatggggggtcgttttcaggctggcgggagcctgggcctaggtgctgcctgggggaaaatggtaccccctcaccattcccgcgggagggggcccgaagccttaaggggaaagcccggggggccccatggggtaactaacttacattaattggcgtgggctcactggccggttttccggtggcaaacctggcgggccatctggcttaatgaatccacccacgccccgggaaaggccgtttgccgattgcgccccctggtgctttttttctttccccgggggacgggccacaactgactggcctttaccggcttgcccttagtggtttgcagtgatccgcccacgcttgtttccccc

SEQ ID NO: 45298 - DNA, 735 bp, Glycine max
  unsure (1)..(735): unsure at all n locations
  Clone ID: PAT_MRT3847_140904C.1
ctcagttctcccaacccacacatccaaataatttcagctcaaggcctctcgcactctctaaacataatggccaattcgaagcttgggttcaacttcatggtcagtgctatttttctttccttaatgacttttcatggaaccttttcagttcagggaaggccactgaaaatggagatcaaggagcaagtcacaacccacgaaaacattatcgatgaaatagctaaagcggcagaatatactgccacgtggcaccgtcacaccttagaattcgaagacaccaagaatccacaatatgacggcgttacaaacgatttccaaccaacggatccagggcacagtcccggtgccggccattcctccccacacgccaacatagtttcaatttcaaagccataaacgtatattgttctcatgtgtgcatagtcaataattagtaatatatatgcattttttacttaaaaaatgttactcatataactaaaatcctaatacctctctctcttttaagggggaaaagagtagtgggtaaaggatctttgagaattaatttccagctgtgataagcgtataatagaaaggtggaatacttaaatttangtgtatatagaataataaggttgttaatttatgttctagttaagggattaattgtgtgtaaactgtaaagctatcgcatacatatagaaacgtactcatagttacctttctagcctatagccttaaatatgtgtatct

SEQ ID NO: 45299 - DNA, 671 bp, Glycine max
  unsure (1)..(671): unsure at all n locations
  Clone ID: PAT_MRT3847_140905C.1
ccacgcgtccgatttttatgtgttaagcctattattttggttctaattaatgatactaacaaatagagttgtgcattgtttggtaaacctaaacattgaacaattttatggtttggtttttgatttatttgacaaaagagtttggtttttgatgaactggttttaaatcaattctaaatcagtttagtttagaactgaatttaaacctgttttgagagcaaaactagtttttctgtattgttgaaccatttttaggctagtttataagttgatttataacaaattaaagtataatagttaaattcaaaataatagtgctaaaaattagacaaattattaaattaaattcaatataaggaagttatcatcgtgtcattcttgaaattaaaataagtttttgataattagtaatcttgttccgtgtgacttatctcttaattttaatatattatgtatttggtttaaattaacacttattagatagtaaaataagtatattagtagcattttcttataacaaaactagataaacaatattttaaaaaaacaatttttcttaaaaagtatttttatttatttttaaatntttccattctcaccaaaaagagaagcaagaaaaacatgaagacactcacacgggnagtgatcagacaacaatgttcacatctttt

SEQ ID NO: 45300 - DNA, 727 bp, Glycine max
  unsure (1)..(727): unsure at all n locations
  Clone ID: PAT_MRT3847_140906C.1
acgaagnncggacggcgctcttggaataagtgtgtactgcagacaccgttgcctcagtcatacttaactttttgggttacttgcaatcttgttggagtatctagagaaaatggtacctaggatagtggatcttcggtcagatacagtaaccaagccaagtgaagcaatgcgagctgctatggcgagtgctgaggttgatgatgatgttcttggccgtgacccctcttgttttcggttagagacagagatggcaaagatattgggaaaggaaggtgcactttttgttccatcaggcactatggccaaccttatatcagtgcttgtgcattgtgacataaggggaagtgaagttattctgggagacaattcccacatacacatttatgagaatggcggcattgcaacccttggaggggtgcatccaacaacagttagaaacaatgaagatggaaccatggacattcatttgattgaggctgccatcagagatccaaagggggagctagtatatccaaccacaaggcttatttgcttggaaaatactcatggaaactctggtggtagatgtctttcagttgaatatacagacagagtaggagaggttgctaaaaaacatggattgaagcttcacattgatggagcccgaatatttaatgcatcagttgcactaggtgtccctgtggataggcttgttcaagcagctgattcagtatcgggtatgtctatc

SEQ ID NO: 45301 - DNA, 570 bp, Glycine max
  unsure (1)..(570): unsure at all n locations
  Clone ID: PAT_MRT3847_140907C.1
gctctctgaaaataaattttttcgaaccaaatggttgacatagctaaaaagtctcaagacaacaacggctacatgtccacaaggtaaaaaaatttacaacacaggggaattgatnctacacggagctggaagcccttttaacccttgcctagatgaagaatatcaaaggcaccgtggttaacaaccctgggatgcgcctgactaccgcaaaacaccgggccaacaaccttgacaggggcgcccttgggaagcctgcagtcctgaataccactggcaagggcagcgacaccaccaactttaccacaactcacaggcgttcaaatgcggaccgcctgaacacacagcggctccctacccgtgaccaacagcagccatatgcctactccggacagaggaggtaaaacaataaaacagcccagaagaaaacacactgccctgtgaatatcaacaacctgtctcgccagatgggctttacaagctccaccatcttcatcatgtgcatccaatgactctacgatggctagaacaatgccttgaaccatccaccactgtgctgcaacttgctaagag

SEQ ID NO: 45302 - DNA, 238 bp, Glycine max
  unsure (1)..(238): unsure at all n locations
  Clone ID: PAT_MRT3847_140908C.1
tcttcgcttctgtcttcatactctctgcttaccaacaaattaatgaatattgaatttatgggggaccttctacaaaaacactcaaacctaagtttgatgcctttacacatncggtgcattctcaaatgggctttccaattccaaaaattaatctgaaatttttaattgcttgggctatttctcttaaaggtcttggaagggttcttttcatattttgcaactctttttgaacttttct

SEQ ID NO: 45303 - DNA, 484 bp, Glycine max
  Clone ID: PAT_MRT3847_140909C.1
gaatatgatgcctcaggcataaaaatggtttagcgctctctatcatctaatctaatatctacattccgcaagtgccactctatccaagcaagtcacccagagcatccgcatagtatgcaggcttcacaccggttccgtcgccttggcctaggaagtcttccttcttgctaacgccagtgagcacagcaagcgtgccgcccagcttgccctcaatgccgaactgaatgtcggtgttcaggcggtcacccaccatgcatgtcctgctacggtcaaagtgaaacttgccctccaccgcatccatcatagcctggctaggcttccccaaagacaacggctgcttgccgatagcagtgaccaatggtgcaccaaccgagccagcgccagggaacagagtctttgcgttaggcagcgtcgagtcgatgtttgttgcgagaaataatgcgcccttcctcaaatacgcgaatgcgagcgagtacttgtagta

SEQ ID NO: 45304 - DNA, 676 bp, Glycine max
  Clone ID: PAT_MRT3847_14090C.1
aattggatttttggggagcacgcagagttcttgtgacaggcacagaacccttgggttgtgttccatcagaattggcccaacgtggtagaaatggacaatgtgttcctgaattacaacaaggtgcgacattgtttaacccacaactcgaaaaaatgttattacgactcaacaggaaaattggaaaggacatttttattgctgcaaacacaggaaaaacgcacaacgacttcgtttctaacccccaacaatttgggttttttacatcacaagtagcttgttgtgggcaaggaccttacaatggacttgggctatgcacagcactctccaacctttgcaccaacagagagcagtatgcattttgggatgcattccatccatctgaaaaggccaataggcttattgtggaggaaattatgtcaggttttaaagcctacatgaacccaatgaaccttagcaccatcctagccttggacgcaaacacatgaagataacacaatgaccctaaaacttgtattggcctaattccatgctagttaatgcaagaaatctctccttttttacatttttagattctaattgtggttattgtattaatatgagtgaggaacaaaattgagaaaaaaaaaaaccttccatttaccaaaagtaacaacggaggatataatgcaacatttct

SEQ ID NO: 45305 - DNA, 294 bp, Glycine max
  Clone ID: PAT_MRT3847_140910C.1
cggacgcgtgggctttatcctctcttgactctgctttttttttttctattatcctatttcataaccgagaggagctccacttcagaagaagagcctacaacaccaaccaggctgggatgtggggatggtaatttatcggggtggggcaaacaacgaattatcttaaaaatactcccaattgcaatcatgaggggggggggagtgcaactttgttccctctcaaaattttagattctatttaacacttttttttttgtcctttcgggggaggtttagcctaaaatataatttggt

SEQ ID NO: 45306 - DNA, 202 bp, Glycine max
  Clone ID: PAT_MRT3847_140911C.1
gaaggggaacgtcatatcatcttttcgctgcttattatccgatcacctcacttcggtgcttgcgtaccggtgcctggttaaggaagacgagatatatgcttcgagttgtctgtgttgatcaggcgagccaggccaaagctctatcatcggacagttcagtgtggctggatctctgcactgtctggaacttgatgtcagtgaa

SEQ ID NO: 45307 - DNA, 635 bp, Glycine max
  unsure (1)..(635): unsure at all n locations
  Clone ID: PAT_MRT3847_140912C.1
cggccgttcccgggtcgacccacgcgtccgaaagaacacagagggtaccattgaaaatgatttgtgccctttttgtcagagcaaagctgaatctgcctcccacttattcttcctgtgtcataaagttatgcctctatggtgggaattcagctcatgggtaaaggaacctagagtgctccattggaggcctatggataatttcatccagcactattccatgtcaggattgaaagacactaacagaaggtggaaaatcgggtggatagcagctacaacatcaatatggaagcttagaaacgacattatcttcaacaatcagccttttgtcatctccaagctggtggataatacaattttcctctcttggtcctggatgagggggtgggaaaaggattttactgttccttttcaccaatggtcctcagccatgactgtagcttttaagtaatgtttgtcatgttgggatgggttgtattgtttttgttgggatgttagatactgtttattgctgtttgactcaagagacactacctcctgtganttngtgtagtacctctggtactatgtatcttttattttcaaataatantattataatttgggccgttcaaaaaaaaaaagttataaattgatga

SEQ ID NO: 45308 - DNA, 275 bp, Glycine max
  Clone ID: PAT_MRT3847_140913C.1
tttccggggcgagcccgcgcccgcggacgccgggccggcacgccgggcgacagccggaagagaccccgctcatagcccattgagcagggtattctgtgctcaggcttcaaccatgcgcttctcgtatctcgttgcactagctattcactgcagtggcaaagtcgaccaggaccatacgctgtcactgcaccaagcgcgaacaaataagcatgaagcagagtacttaggcgttgttgaagactttctgagggaagagataggcctcaactctcttc

SEQ ID NO: 45309 - DNA, 432 bp, Glycine max
  Clone ID: PAT_MRT3847_140914C.1
tatgacaataatatatataacatcacgctcgagcagcatcgaagggacctatacaaagtgttacggaggtctacctgctagatgaaacaaggtatgaaggccaccagcgactctgattttttcattaatacaggagaaagataaaatggagtaaagaaggtacttagtatggcagcgaataaatagcatccaagggcatcgatgatgacctagccatgatcatgaaggagcgacaagcctaaggccaacacccatattttttcattttctaaccgctgcatggaacctcctgcttgaacccctaagacatactggtacatacactactagacttggcatggagtgggatagaaagctccatgacggatgctatattaatactcctgatcttgttaggagtgccatcatagtatacagacgatggacagacat

SEQ ID NO: 45310 - DNA, 145 bp, Glycine max
  Clone ID: PAT_MRT3847_140915C.1
agtacctggaccattctcactagacccctctctgcctctttggccaccacatacttgtggtgtcagatctggtacatgaatggccattctacccagatacattttggtttatttaagacatcagattccctagaatccttcgttc

SEQ ID NO: 45311 - DNA, 309 bp, Glycine max
  Clone ID: PAT_MRT3847_140916C.1
acggctgcgagaagacgacagaaggggttccaattaatcacccgtctcctagccttagccggaaagcacttactcctaccttgaaaccattcttgtgcacaataattaatttcacacttagcatgttctgcaattcctctgaaaggacaaacaaaaatcaaccacctccaaatgacaatctattgggctagatttaacagtttgctaaaattcttagttgctagccaggaaatgaaaaacgaattgattaattaattaatcgaaaacaagtttcataccctgtgatgggctacaaaaaaccataataat

SEQ ID NO: 45312 - DNA, 156 bp, Glycine max
  unsure (1)..(156): unsure at all n locations
  Clone ID: PAT_MRT3847_140917C.1
ttttggaactcaaagggggggggggggggataccaccnaaaaanctggggccgggcggtttcttctttcnggagactnaaancatcnaacaatggganctgtcaaattgaatcttcggtggtcttcgcaacgaggcgatggttttttctctnaacc

SEQ ID NO: 45313 - DNA, 432 bp, Glycine max
  Clone ID: PAT_MRT3847_140918C.1
gacttgaaacatttattttttttttttattggtaacgttcaaaaaactaccaataaaaaacggtggaatgaatggccttaggccttcccccataaaaagggtttgatcacttgccatgagaacttcaaaaacctctctggcaaaaagcccataaaaagaagtctttaggacctttttattaaggggggttttgacatcaaggttgaagaacatgttcccccccccccaatgaaagccatgcttcacaatgttaaaaaccttcttttcatccatttttttggtgccagggggggaaaaatatacagacgggggtttgggcgcccctttggtttaaaaaaataaaacaatgtactttgggcctccccggggtgcaaaaatgttcaaaaaaacctttttgggtatgccaccaccactggtattaaccttgggggg

SEQ ID NO: 45314 - DNA, 1023 bp, Glycine max
  Clone ID: PAT_MRT3847_140919C.1
ctcgagccgttctctctgtattcatatttccttcctctttacttctatgctgatattattgtcccccacttccttttttttcatccagaaatcttgttgcccaagtgagggaaaaagggttgccttggacacttctcaccttgttctctgagttatgttaatttgaaagaagctacgtggcatcaagaatgggttcaggtgattggtttaagacaataattagctcaagaaaatcaaaagaaggaagatcaaagaaattaaagactaagatttatacaagaaaaaagtccaatggtttagcaaatggaatgaaaagcgaaaatctagagtcagatggggtatcagttgaaactattgctgcaacaaggatccaaacagcattccgagcttataaggctagaaaatatttacaccgcttgagaggattcacaaaactgaagatccagactcaaggttcctctgctaaaaaacaagccgttaccactataacttatcttcattcatggagcaagatacaggctgagattagagctcgtcgtatatgtatggttacagaagacagaatcaggcggaagataatacattctcaactaaaacttgaggccaagattcatgacctggaggtaacttgtaaagctaacaggttttcagtgatggtattctggactttttcttttcaaactgatgccagtttgctaatcactctttctactacaatgattatgtgtggtttcattggtttctctgttttaaatatgcatttgtgtcattatttcaaatttctatgtctttctaggtgattagtaaatgcatataactattgaaacggtgtcatgggatgggtctcccatatgagtcagcttcacttctgaggtctaatatcctatagtttggcgtttagacattggaggcatgcgcaaaaaagcaaataatctctcctttgtataaaatctttagacatcaaacatgcccttaccaggtatgtcacctttccctcatttcctcttgctgaatcttcatatc

SEQ ID NO: 45315 - DNA, 580 bp, Glycine max
  Clone ID: PAT_MRT3847_14091C.1
ggtggcgttgcttcagatgtttctgccaagagttctcctggttatgttggtggttacactgttaataagaggcagccaaataggggaattgctacataggaagatcattttgatgacacgaacttgtaggtgaagataatccagtgaagcagtttctcgcacatcggaaaaaaaaaaccttgcattggggaattcgatgggatgggtgaacataaagagaaaggaattttgcaggaagaaaatgattatggtgaagcttcgtagactcttgcacgttgaacccaagggattacttttgtgaactatttagtattttattacacttgcttttatagatattatacgactttagttgagtttaccccattgccatttttaacacaactgagctaaatcgtttaagatagatttgtagaacttgtaagcatcattaataaagcaatgcactggataaagaaatcaaaaggttaaatatagatgaattcttttagcaatgagaccagattttttttttttcagtgggtatttgatgtagacatgactgaagtttattatatactactgtcaaagctttggtgtt

SEQ ID NO: 45316 - DNA, 321 bp, Glycine max
  Clone ID: PAT_MRT3847_140920C.1
ctccacaaaaacaaacagaaccacagattcaggttttgatgctcttctgcggtgtgtccagagagagagagagagggttgtagaggatgttctgagaggaccgctctatctgaaaaaagatcttgagtcgcagaaagttatcgttcacacagagagagagagtgagagaaacaggtgttctagaactagagtgttggagcacggatgtttgccactttacattgaattccatcattcttttctttaactagcttgctgtactcgctacaatctatattactgtaagcgaattcatgttttaccgtggcaaaatggacctaa

SEQ ID NO: 45317 - DNA, 351 bp, Glycine max
  Clone ID: PAT_MRT3847_140921C.1
gatgatctacagattcatcttttgtttggtgtcaatatagagccctcatcacccctaatgcacaacgggatcgtaagtcataggggaggcatcagcagcagtgacgcagccagcataccttttcactacatctagttacctgaacaccacagtgcctgattcggcattgaatcccggaatgacacagactattggtgactcaggcttcctgcatactccagtaaagggggggcattgaatcccaactatcataacgtttgcgatggtttacatgtcacggtcgtttggaagatccatggacatcactaaattcatcagctaggctgagctacgcagtgagcttgctcgtat

SEQ ID NO: 45318 - DNA, 247 bp, Glycine max
  unsure (1)..(247): unsure at all n locations
  Clone ID: PAT_MRT3847_140922C.1
aaaaaccgatgactgaaccctaaggggaaaattgccgntgcggcagtgtaataccatttcccaattctagcactgttggctggggcaaattttttacccaaaacgacacatgtttgggggggccattttgatttttttttttttgngacagaaaatattaggcccccataggggggggggggggtngnnncccccccctggnctnnntnntngtnggggttncttnttcnttncggnggngggtaaa

SEQ ID NO: 45319 - DNA, 628 bp, Glycine max
  Clone ID: PAT_MRT3847_140923C.1
ataaatagcaactcttattagcatatcattagattatgcatgagaatttttctcaacaaaagaaaaaaagagcctaaaaccggcactagtgagagatgccagctacgttatttcacttcaaattatagtaattggttacttatgttatggcttagacatgatcaataggaataagctagctgacgtaaattcactggagttacaaactctttgtctccttcaaataatggcttagctgccaacaaagaagctatctcagtgggatgaaaccaatcccaaaacaagaactcattgcgatttgtgcaaagattggcgttttgggcttttatgcatccaccttgcccattcagatatccaattccgcagcatgctgactgtgtatacttcaacccgaaggacgatggactctttaacaaggtcgaggtcatttcaaaagagttgccaagtgagtacttgaaccctttcaattctgaactcaacttttgcagaagagcttgtgtagctaaataaaatgcaactgcaaaatcattcagtggttccacgcacttccctccattgagagagcttacagcaggacagcaacctacggttgcaacgcttatgatgccaaatttccttgcccccactc

SEQ ID NO: 45320 - DNA, 3505 bp, Glycine max
  Clone ID: PAT_MRT3847_140924C.1
ctccgacagcatcctttgttgaacgaaaacacctttctattctccagtttgacaaaaaacagtggcacccaaaccaaacggaacctcgtcggatacaaaattcccaacatatttgtttttcttcattttccaccttaataataatattaatacctcctgttgttgttattattaatattatttttcttttttgggtcggtttagattttagaatccttaccatgataaaaactcctacaaaatctcaccagttccggcccgggtcgacccacgcgtccgtttcgtatttatcttgagcaccactatcttattttctttttgctaacaattcttgagcaaagccgcaagttctttagatcaattcgagttcacacctgtatattcttgcttttgttgtttcagtagtacatatcatcgaaaaggtcttgttggttgttgagatagtgaagaagaattgggctatcaaagatcatataagaacagacattcatgtgattaactgcatgagtctgagataaatccaggtcatgcttgaatttgttggatctggtatcaggggatacactaaatttccctcggactcccagatcccttccgcgagttatgactgatccagtaatcatgtctaatggagatggtaaacaaagtaatgatgatgatttgagctttttctcatcagaacaccatcggaagataattatagtatcaaattctctccctctcaatgcaaaaagggataaaatatctggcgtatggtgcttcagttacgacgaggattcaattttttggcagttaaaggatggtctctcacctgaggctgatgttgtttatgtgggatctctcaaggctgatgttgatgcaaatgagcaagagaaagtttcccttcagttgctggaggaattcaattgcgtgcctacttttattccttcagacctctacaaacaattccatgatggtttctgcaagcaacaattgtggcccctattccattacatgttgcccatgtatccaggcaatcgccgctttgataggtcacagtggcaggcttatgtttctgctaacaagatatttgcagataaagtcatggaggtccttaatccagaagatgattatgtatgggttcatgattatcatcttatggtccttccaacatttctgcgaaagcggtgtagtcgagtcaggcttggttttttcctccacagtccatttccttcatcggaagtttataaaactctgcctgtcagaggtgaaattttgaaagcattgcttaatgcagatttagttggtttccacacctttgattacgctcgccattttctcttctgctgcaggcgaatgcttggcttggaacatgaatctaagaggggttacatagggcttgaatactttggccgtacaatattcattaaaatattgcctccagggattcacatgggtcgactgcaatctaccttagatcacccttcctcttccaacaaagtcagagaaatccaccaacaatataaggggaaaaagcttatagttggtgttgatgatatggacttattcaaaggtatcggtttaaaattcttggccatggagcaactcctgcagcaatatccagaacagcaaggtgaattaatattgatccaaattttaaatcccccaagtagttctgacaaagatgttgaggatgcaaaggaggaggcctacatttcagccaaaaggataaatgaaaggtttggtttggaaggttatgaacctatcatcatcattgatcgccatgttcctttctacgagaaggcagcctattatgctttggcagaatgttgcattgtgaatgcagtgcgtgatggtttgaatttggttccttacaagtacactgtgtgtaggcagggaagttctaaactggacgaagctttagaaatcgcttctgactccccacgtgtaagcgcacttgtcgtttctgagtttataggttgctcaccatctcttagtggggcaataagggtaaacccatgggatattgatgcagtagctgaagcactaaatttggcaatcacaatgcctgatggagagaagcagcttcgacatgaaaagcactatcgatatgttagttctcatgatgtggcatactgggctcgaagcttcgagcaagatctagtgttctcgtgcaaggatcattataataaccgatgctggggctttggctttggcctgaacttcagaattttgtccctatctcctagtttcaggaggctatctatagaccacattgtccctgcatatgaaaggagcagttgcagggcaatctttttggattatgatggtacggttgtgcctcaggcttccattgttaaaccgcccagtcctgaagtcatatccgtgctaaataatatatgcagtgatgttagaaacactgtgtttattgttagtggcaggggaaaaacctcactgagtgaatggtttgatcagtgtgagaatcttggtatagcagctgagcatggttatttcataaggtggggtaaacatactagttggcaaatgagtcatgcagatacagattttgcatggaaaaagattgctgaacctgtgatgagatcttatatggaggctacagacggctcctctgtagagaccaaagagagtgccttggtatggcattaccgtgatgccgatcctgatttcggatcttggcaagccatggagctgctggatcaccttgaaaatgtacttgcaaatgagcctgtagttgtaaaaaagggacaacacattattgaagtcaagcctcagggcattactaaagggtcagttgcacaggaagttctttcttccctaaccaagaagggtaaatcgccagattttgtactgtgcattggtgatgatagatctgatgaggacatgtttgagagcatattagccaaaccttatagtactacctcatcctcagcaccacaaatctttgcatgcactgttggacaaaaaccgagcaaagctaggtactacctagatgacactgtcgatgtgatggcattacttgagggtcttggtgctacttcagggcctaaatcaagatattctacagaaaccccttttgagaaaagagaagtatgttttgagaatgatgtttaaaaagtacactttaggcaccaggataggataaaggcacaattttgatggttgtttttgaaaagatgtacaaaagcaggatttaaggaaaatagctttaaatctgacttttgattgtaaagaatgttggtagcagcagctttaggtctcagaaactgagcacaggggattagagtgattggtttttattggttggtgggggcaattggatgcatctgttggctttagctgtagcttttaaaggatactcaatatattaacagatacaaaatctaggcattcttcccgggtgagaatttattggttggttgtatatttgaactcgttgggtttatattatacatggatgtcattcagaatctcatatcatcatttgtaaactatttttcggtttgtg

SEQ ID NO: 45321 - DNA, 1177 bp, Glycine max
  Clone ID: PAT_MRT3847_140925C.1
tgcacctctttctttctaatccgttgtctccgacagcatcctttgttgaacgaaaacacctttctattctccagtttgacaaaaaacagtggcacccaaaccaaacggaacctcgtcggatacaaaattcccaacatatttgtttttcttcattttccaccttaataataataataatacctcctgttgttgttattattaatattatttttcttttttgggtcggtttagattttagaatccttaccatgataaaaactcctacaaaatctcaccagtttcgaacctaacacacttatgacttatcccatatttcgtatttatctcgaaacaatctttcttattttctttttgctaacaatttttttcattcattgcaagttcttttcaacaattcgagttcacagctgtatattctcgcttttgttgtttcagtagtgcatacatatcgaagaaaagctcttgttggttgttgagatagcgaagaagaattggacgatcaaagatcgtatatgaacaggcattcttgagattaattgcttgagtctgagataagtccaggtactgcatttctttgggttaattatacaagatatttttagttctgggtacctgttcctacaaaagactatacttataaatatcttcaaaaactgggaattgaagtaaagatggtggccaggtcatgcttgaatttgttggatttggtatcaggggatatgctaaatttccctcagacccccagatctcttccgcgagttatgactgatccagtaatcatgtctagtggagatggtaaacaaagtaacgatgatgattcaggtgttttctcatcagaataccgtcgcaagataattatagtatcaaattctcttcctctcaatgcaaaaagggataaagtatctggcaaatggtgcttcagttacgacgaggattcaattttttggcagttaaaggatggtctctcacctgaggctgatgttgtttatgtgggatctctcaaggctgatgttgatgcaaatgagcaagagaaagtttcccttcagttgctggaggaattcaattgcgtgcctacttttatttcttcagacctctacaacaattcatgatgggttctgcaagcacaattgtggcccctattccttacatggtggccatgtatccaggcaatcgccgc

SEQ ID NO: 45322 - DNA, 364 bp, Glycine max
  Clone ID: PAT_MRT3847_140926C.1
aaaaaaaaaactgaagattccctaaacttacttttagttaccgggctttgaaacagcataaagttaaattccctaatcaataactaaccacccaaggggaaaatactaaagactgggtagctaaaatctcagttgcctgccccccaggcctgatgggccttgcaaattttttttttttgataccaaccccccgaccatcccggggtattgggcttatttccagggcgggttgggaataaaggcggctcccacaaatgatccagggccatgggtttcattcacaggctggtttggtttcaaagctgctcaagcatttggcaaaggcttggaaggcaaaaaggggataacggtaatccattgtaaa

SEQ ID NO: 45323 - DNA, 238 bp, Glycine max
  Clone ID: PAT_MRT3847_140927C.1
tcgagcttcaacccatagaagagttttcaacttcacttttcaacccaactcatttctattgtgcccaattcaaggaatcggggggttcttgttcattgatttcattgattaaaagaaatcctggggggcaatcccatgactcaaattgtcacaaatattatgatgaaatttatcctttcaacatacctgccgactacaaatgggtggatgcccattagaagaaacccctaattaaagc

SEQ ID NO: 45324 - DNA, 271 bp, Glycine max
  Clone ID: PAT_MRT3847_140928C.1
tatggatttagtatccgatcgcatcggctacattgacaaatacgaagctctctctggcagtcacaagtatgcagactatcgcgaatgctatgaacagcttaaggaccagagaacaggtaaatataccgatatgggtaacacatactacgagcttgttacctcctttcatgagttgggctggggggaatctgggcgttccgcacccagatggaaacgataatctcttctagagagcatctacagacgggagcacttccttgcttccaacttg

SEQ ID NO: 45325 - DNA, 688 bp, Glycine max
  Clone ID: PAT_MRT3847_140929C.1
aaacaatcagataccttaataaatacattgtccaatgaaacagagaagctcaagcttcaatttccaaacaatttttttcctgggagagattcattcccgggtatgtctaattttggactagtctatctataatctactatccaatgtatatatccaaatgtataaaccactatgtaccttgcccggcaaacagcaaattaaacaaaaaataataatagcactcatttgccaatctcttggacaacagcactatttcttttttccaacttctaaaggcttgatcttcaaacaaagatcaaggctttaatttaaagcttattctcagattcaatgtgcttgatcttcaaacaaagcttcaatctcttctaagcttttgcctttggtctctggtaaaaagaaataaaagaaaagtgtggcacacaccatcaccccacaaagcacaaagaacatgcctccaaatgttattgcctctgaaacactaaggaatgtcatggacacaatcccactcatcaaacgggtcacagaaatggccaagctggaaccttgggcccttaccctcaaagggaaaatctctgaagagtagacctcagttgtaggcccacgcccaatagctaagaatgatactgtaacccatacagcaaccacacacaaagccacgacccattcatccttgttatcaccacataac

SEQ ID NO: 45326 - DNA, 1408 bp, Glycine max
  Clone ID: PAT_MRT3847_14092C.1
cgggaggacgactacagaaggggatccacgtcttaaaattaactactagctagtctcagtccagtcacgcgtccgacatgaacatgtcctcaatttttttaacacactaccaagcccacatccaaaggttcatttcaatatggcaatcttgtcaagttttgctcctttgaccattcttagtttagtcttgttagtggttggaatcattgtgtctggggttgaagctaggccaagagcattctttgtgtttggagattcacttgttgacaatggaaataacaattacttggccaccacggcacgtgccgatgctcctccttatgggattgattaccctccaagtcatagaccaactggtcgtttctccaatggctacaacattcctgatcttatcagtcagagacttggtgcagagtcaacattgccatacttgagtccagaattaagaggagataagctactagttggtgccaatttcgcttcagctggaattggaatccttaatgacactggagttcagtttgtaaacgtgatcagaatgtatagacagctagaatattttaaggagtatcaaaaccgagtgagtgctataattggagcttcagaggctaagaatttggtgaaacaagcactagtgctcatcactgtaggaggcaatgattttgtaaacaactacttcttagtgcccaattcagcaaggtcccaacagtacccactacctgcatatgtcaagtatctcatcttctgagtaccaaaagcttttgcagaggctatatgatttgggagcacgcagagttcttgtgacaggcacaggacccctgggttgtgttccatcagaattggcccaacgtggtagaaatgcacaatgtgttcctgaactacaacaagctgcagcactcttcaacccacaactcgaacaaatgttacttcaactcaaccgcaaaattggaagtgacgttttcattgctgcaaacacaggaaaagctcacaacgacttcgttactaacccccaacaatttggatttgttacatcacaagtagcttgctgtgggcaaggaccttacaatggacttgggctatgcacagcactctccaacctttgctccaacagagagcagtatgcattttgggatgcattccatccatctgaaaaggccaataggctcattgtggaggaaattatgtcaggttctaaagcctacatgaacccaatgaaccttagcaccatcttagcgttggacgcaaacacatgaagataaacaaacccaaatttcctagaacaaaattaattgtattcaccttccttgctagttcatgacatttctctgtctacatgttttagtttattaattgtaaggaaagttatatgttaaagtcataaattcgaatactattaaatgctttgttt

SEQ ID NO: 45327 - DNA, 200 bp, Glycine max
  unsure (1)..(200): unsure at all n locations
  Clone ID: PAT_MRT3847_140930C.1
caacctaaagctaccccccttttggttcactgctattttgcattttccacaaaacaaatttgcgtttgcaaatgattcttcttttatggaattctttatgttcttcggggagggtttcattatatcatgacaaacancgcgcttnctttgaaagccagaatgttgatcggttgtatgtctttctgattgtgcccattgct

SEQ ID NO: 45328 - DNA, 281 bp, Glycine max
  Clone ID: PAT_MRT3847_140931C.1
gatttagttaatatcatatatatcctaacatacttactactttcttctggaaacataagagtgtatacataattatagataattatgtgtttcttacctgtctttggttaatgatacaagaaaaccatgcactctctactaccctagtctctataaatacaacaccattgttgattatttaattatatatatagtagcatagatagagttccttaagtgtgttataagtaactgctgagggagagacagctatagacagagaaatgaagagagattgtcat

SEQ ID NO: 45329 - DNA, 284 bp, Glycine max
  unsure (1)..(284): unsure at all n locations
  Clone ID: PAT_MRT3847_140932C.1
accagaagcatggacacatattcaaagaaatgcagaaaccagataccccactatacaacatcaangcatacctccctgtcatcaagtcctttaatttctcaaccacattaaaggctacaacatcaagcgcaaccttcccacaatgtgtgtttgatcactagaacataatatcttctaacccattgaaagctaaatcacaagctacacagcttatcactaacattcacaaaaagaaagacttaaaagaacanataactcctctctccgagtttaaagacaagctg

SEQ ID NO: 45330 - DNA, 236 bp, Glycine max
  Clone ID: PAT_MRT3847_140933C.1
atcctatcttgtgggataaagatcattgtatgacaaaggatggagaaagacatagaaggagacaagaaaccgccgcagctacaacaaacggtccaaaccaggcaaaggaaaggaccccccaaggtgtgtcccttacgaaagaaaaaagacgtaccgagaccccaagcatggaaaaagccagaggcaatgacacggactgtgcccaaatgaaccataaagactgctgacccagaggg

SEQ ID NO: 45331 - DNA, 112 bp, Glycine max
  Clone ID: PAT_MRT3847_140934C.1
tttagcatctgatctcactggttttcctattccattctgtgtcttttaagtgttttgagtccatgcactttagaaatagctagatcaaaagggcctggtccgaaatggtttt

SEQ ID NO: 45332 - DNA, 302 bp, Glycine max
  Clone ID: PAT_MRT3847_140935C.1
agggtaggatgtaaaaggaattcaagagcatctattcaccctttgttcctttcaaaaactcaatgtttgttaccctgaaaattggttggaactggaggaaatcaaaggtttcttgcccttaataatcttacgaacaaagggaaagttagctttgttccactccttaccctgcctgtccaatttatccctacttgtcccattccattctattatccaaacactgttagaggtggggcttgttctttgaggggagaaggccattaatgagtattcagtgtttataagtattgctccatttattg

SEQ ID NO: 45333 - DNA, 2292 bp, Glycine max
  Clone ID: PAT_MRT3847_140936C.1
ctcgagccggagacatctccccaattttagttgagagtggtgggcagttgttatccttgcgctccctaatcaataaaaatttgagcatcccaacactccccgaggctccttgggagctcagagtctagtttcttaatcaatagaagaaaatttgtaatccgagtccctccagcagcatgccaggtctcgtatcggacgcccaacccctcggaatctccgtcccggacacacccaggcaatcccagagaaccccttctccactccccaaaaaaccacccagcccatctccttgtccagcccacaacaatgccgggtctggtctccgtagcggacaccccccaaagatccccttccccagttcccaagaaagcagcctccccatccccttctggctcctccaaaaagaaagccccacttctctccgatgcctctctggacaaccctgatctcggcccattccttctcaagctggcccgcgacaccattgcctctggcgatggccccgccaaggccctcgacttcgccatccgggcctccacttcctttgagcgctgcgccatccagggcgagcccagcctcgacctcgccatgagcctccacgtcctcgccgccatctactgcagcctcggacgcttcgaagaagccgtccccgtcctcgaacgcgccatcctggtccccgacgtcgaccgcggccccgatcacgccctcgcctcgttctccggctacatgcagctcggcgacaccttctccatgctcggtcaggttgaccgatccatctcctgctacgaccaaggcctccagatccagatccaagccctcggtgacaccgatccccgcgtcggtgaaacttgccgatacttggcggaggcaaatgtgcaagcaatgcagtttgataaagcagaggagctgtgtaagaagacactggagattcatcgggcacatagtgaaccggcttcgcttgaggaagctgcagataggaggctcatggcgctgatttgcgaggcgaagggagattacgaatcagcgttggagcatcttgtgcttgctagcatggctatgattgcaaatggtcaagataatgaggttgcgtcaattgatgttagcattgggaacatttacatgtcactttgtcgatttgatgaggcgattttctcttaccagaaggcactaactgtgtttaagtctgccaagggtgagaaccacccttctgttgcatctgtttttgtgcggctggctgatttgtaccacaggactgggaagcgtccgtgagtcaaagtcttactgcgagaatgctcttaggatttactcaaagcctgttccggggaccactgcggaggagattgccggtggattgacagagatttcagcagtttttgaatctgtggatgagccggaggaggcactgaagctgttgaacagggcgatgaagttgttggaggataagccagggcagcagagcacgattgcagggattgaggcacgaatgggagtgatgtattacatgattgggaggtatgaggactcaaggaactcgtttgagagtgctgtggcgaaactcagggctagtggggagaggaagagtgccttctttggagttgttttgaaccagatgggattggcatgtgttcaactgttcaagattgatgaggctgctgagttgtttgaagaagctaggggaattcttgaacaggagtgtggcccttgtcatcaggatactcttggggtgtacagcaatcttgcagctacatatgatgctatgggaagagtgggagatgcgattgaaatcttagaatatgtgctcaagttgagggaggaaaagcttggaatagcaaatcctgattttgaagatgagaagcgtcgtctggccgagcttctgaaagaagcaggcaagacacgggacagaaaagcaaaatctctggaaaaccttattgatcctggctcaaagaggacaaagaaggagggggcaaagaggtggcctggtttggggtttagaatttaaccatatttttgttcattaatatatatattgaatgcacattctgtaacataggatatcttgtatagggttgaatttgggagggagcttccctgtttcttgatatttgttcatgcatttgtttctcttggttaattgctttatcaattgtgttgtgatctttttagctgtaccacaaaattctatacctgtgtcctccgtttccggaaaatgttgaaagcaaatttttattctgagtgaataagttttgatgagattgtgttttattttccgcatcaaaaaaaaaaaaaaaaaaa

SEQ ID NO: 45334 - DNA, 146 bp, Glycine max
  Clone ID: PAT_MRT3847_140937C.1
cgattaagcgaagttcttcatataacaaccacatttataacatcacagaaaggtggccaggataaacccaccatccgggctacaagatgactgatgccatacctccacggaaaagcaattgcttggacccagagacttctcatagt

SEQ ID NO: 45335 - DNA, 249 bp, Glycine max
  Clone ID: PAT_MRT3847_140938C.1
ccagctttctttactctgcggagcctaaagaaactactgagacagaatcagcagcagcagcaccatagcaaccacagaggaagagaacaaaccagctgagcagtggaaaccccagggaggttcctgtcgagaagactgaagctaagacctatggacagtgtgagtgagaaaaacaagtttaaaaatggtcctaggtgaggggatcaggtctaccattgggcatgccatgttgaaaagcctctgtccttg

SEQ ID NO: 45336 - DNA, 639 bp, Glycine max
  Clone ID: PAT_MRT3847_140939C.1
ccacgcgtccgcacggttgatgatgatgggagattgcaacatattttttggtgtgatgaataaagccaattaaactatgaagtttttggtgatgttgtagcttttgatgcaacataccgaaagaataagtatatgtttccctttgtcatttttttgggtgtgaaccatcataatcaaacaatagtttttgcaacttccctggtttctaatgagactgagcaaacatatgtgtggttgttggagcaattcaaggatgttatgaaagggaaggaaccattttctttgataactgatggtgatctagttataagaaattcaataaggagagtatttcctcgagcacatcatagattgtgtgcttggcatttactttggaatgcaaactcccatgtttgtaatccagcaatgatgaactacttgaagaattgcttgctgattatgatgtacccaaatttgaagaattatggatgcatatgctgaatcagtttgagttgcaagaaaacaagtggatgaaagagttgtatgagaagaaaaagatgtgggccacctctcacataggggggaggttttttttgctggaataatgacaacctcgagatgtgaagcttttcatagtcatcttgccaagtttgtgaactt

SEQ ID NO: 45337 - DNA, 2838 bp, Glycine max
  unsure (1)..(2838): unsure at all n locations
  Clone ID: PAT_MRT3847_14093C.1
cccacgcgtccgcggctttctccttataaacctgcttccgatgtgtttctctctttctctctccgtactcttgctttcttcataaaattttgcaatcggtttgacaactgaatttaaatttggtaatcaaattaataattgaaaaaaaaagaagaagaaaaaaagggtggggaggcatagccagatattgaacctgccctctgttcttaatctcattgtgcctcccctcagatctcgtcttcaatcggagtgctttgccttcattgattcactgtttgatgattgttgatgaaggatccgttgtttcctaactgaatccgacaatatctatttttgcatcgttaatactgtctctcagtttgtcttaatttaagataaaatgcaatcagataatggcaagttatttatcggtggaatatcatgggacacaaatgaagagcgactcagggagtatttcagtacttatggggaagttgtggaagcagtgataatgaaggatcggacaacaggtagagccaggggatttggtttcgttgttttttctgacccagctattgcagaaatagtcataaaagagaagcacaacattgacggaaggatggttgaggcgaagaaagctgttcctagggatgatcagaacatactgagtagaaacagtggcagcatccatgggtcttctggtccaggtcgcactagaaagatatttgttggaggtttagcatcaacagtgacagagagtgatttcaagaagtactttgatcagtttgggactataacagatgttgtagttatgtatgatcacaacactcagaggccaagaggttttggatttatcacttatgattctgaggaggcagttgacaaggtcttacttaagacatttcatgaattgaatggaaaaatggttgaggtcaagcgagcagttcctaaggagttatcgccaggaccaagccgcaccccactcggtggatataactatggtcttactagggtcaatagtttcttaaatggcttcactcaggggtatactccaagtactgttggaggctatggacttcgagcggatgatagattcagtcctgttgctggtggtcgaagtggatttgctccatttggatcaggttatggaatgagcatgaattttgaacctggtttgaatgctggatttggagggaatgcaaatttcaatagcaatcttagctatgatcggggaataaatccttattttattggcagctccaataggtttggcagtcctgttggatatgagagtggaaatggaggaaacaattctttcttcagttccgtgactcgaaatttgtggggtaatggtggccttagttatggaacaagttctgcaaactccaatgcatacattggatccgggagtgggagtgctggagggaacacatttggcaacactggagtcaactggagttcttcagcaatttctgggcagcagggaggagggaacaatatgtcacaaagtagtggcaacctgggatatggaggtggtgacaacaattatggtttggggactggagggtatggaagaagctctggtgccatttttgcaccaacatcttcatactctgcatcaaatggcggtgttgatggggcttttgcagacttttacaataatagttcagtttatggggaccccacttggcgatcttcaaattctgagagagatggatctggtccctttggttatggacttggtggcgcagcttcagatgtttctgccaagagttctcctggttatgttggtggttacactgttaataagaggcagccaaataggggaatcgctacataggaagatcgttttgatgacacgaacttgtaggtgaagataatccagtgaagcaggtgaattgtgaattttgcacaccactattgttactgaatttcggttttaagacgcaagatgtttggttttctagagctaactggagtgcctgttttgagggttcagatatagagatagattacaagggaatgttaaggcttgagtttttgagttactgtttaggtttatgggatttgagtgagatgtaaaatctgattgcgggatatagcggaagtgtatcatgcatcacttgtgaggcagcagtataaaaaagatggacagacatcatttcttttttcctttttctttttgggtagatttttttccttttatgtcttgcaaagttgtgggttcttctcaggaattgtttgtttcttcatccgtcattttggtttgcttttagcagattgtatctgaggtttttgtttattactagtgtgaaacattgaagggatacccatctagggtcccgtgaataagttaccatatgttctgattctttttctaaaggggaatattttatgctacaaatttatactagtgtgataaatggatttatttttccccatttcggaaaaaaaaaaccttgcattgaagaattcgatgggaatgggaacaaaaagagaaaggaattttgcaggaagaaaatgattatggtgaagcttcgtagactcttgcacgttgaacccaagggattacttttgtgaactatttagtattttattacacttgcttttatagatattatacgactttagttgagtttaccccattgccatttttaacacaactgagctaaatcgtttaagatagatttgtaaanctagtaagcatcattaataaagcaatgcactggataaagaaatcaaaaggttaaatatagatgaattcttttagcaatgagaccagattttttttttttcagtgggtatttgatgtagacatgactgaagtttattatatactactgtcaaagctttggtgtt

SEQ ID NO: 45338 - DNA, 160 bp, Glycine max
  Clone ID: PAT_MRT3847_140940C.1
cgtatcttcattttctctcttcctctcaccgagtcaccgactcgcctcccgtcgtacagactcagatcccccccgagtcacagtcagacagcatcatcgcccgatctgacgatgtctcgcgcctctatcgccgaatccggcggatcatgctgatcggggt

SEQ ID NO: 45339 - DNA, 288 bp, Glycine max
  Clone ID: PAT_MRT3847_140941C.1
gacgcttacggtggtggagacgaagggtcttttgaagatgataacgatgacccttttaaaagaccttgtggagttgaaggagccatgtgccgtgtataacaaaaacaagcctataagctgatcaactatcttgaagagcagtcattcctgctggaatactgagagaggctggtgactataattataccccttcagaagcatactacgggtgattaataatgtgtgatatatggcacaacggattgtacaccagcagcattttgggaggtgatacacctgagctacata

SEQ ID NO: 45340 - DNA, 474 bp, Glycine max
  unsure (1)..(474): unsure at all n locations
  Clone ID: PAT_MRT3847_140942C.1
gcctccctctccctctctctctctgtcctcccctagtatcaagttcaactttcaatatattatccacacctcctgtctgcacaaatccacagtttcatcttcttaagtgccaaataaggtatgctttgtagggttccttctttaatattacatacaagcctctgtctttctgtccccccgttttctttctatttttaaaaacacaagagaggggagaaaaaatttggttcctttatttgactgtccagtggcaattttggtggtgaagggaagaacaacttaattgtaactccggtttccttggacctctttcaacttggctgctgttgttagtcattattacgtattttcaacactctctctggtgaagaaaggtgagcaaagaaagacaaagaggggctgnaaaagtgtaagtgtttttgttatggactggaatttgaaaagcacttttttgggttntgagtgaagtggatc

SEQ ID NO: 45341 - DNA, 223 bp, Glycine max
  Clone ID: PAT_MRT3847_140943C.1
gtgcccaaaatggagtgaagccaaaactcaccataaaatttggcgttggcggcctcaactggccccggctttccaagtccggaaaaccctttccgtgccaagcttccataaattaattccggcccaccgcgccggggaagagagccggttttgccgtaattggggccggcttctttccgctttcctacgcttaactgaactcgcttccgctccgggtccgttt

SEQ ID NO: 45342 - DNA, 372 bp, Glycine max
  Clone ID: PAT_MRT3847_140944C.1
cggacgcgtgggcggactcacgggatgggtaggttcagaacatgagggatctgatcctttggttggtggaagtcaaaaatatgccactcccatgatgcccctagaagaagaaactcttcctaaggatgcacacaatatggttgaggaatggaccgattgcgttgatgaggaggattccttcgaggaaggttttttaagtgcaccactcaagggcgccaagggttaggacaatatacaaagaactgctctggccacatttgaagcagtgacaactgtgctgaaacgcaaaaatggcaaacaaggctaaaggagatttgttattgaggatggtgaagagaggacattgattgacgaaactactgatggagaggc

SEQ ID NO: 45343 - DNA, 517 bp, Glycine max
  Clone ID: PAT_MRT3847_140945C.1
cgcaaatacacattacattactaagtctttgctcattagagtagtagcgatggctagacctcaaggttgcatgtgtggttgctgtgatgtgcctggctgaggtggccatcaatgctacacccatggcacacgccgcaatcacgtgcgggcaggtcgcacggcgacatgtcctcctgagcgtttagtgtattcttaagaagctgcgagaaaaccgtcgcaggcctgctgcaacggagtgaattccctcagcagcgcggcgaaaaccaccgatgaccgccagagggcatacagttcgcctgaaaaaccttgcctataatattggacagagtctgaatgccgacaacgcatactctctccctggcaaatgtgacgtctacatcccttacaagatcaggaacttcaccaactgcaccaccatcaacttctgaagggcaatttttcagccgcagaatactatatatgatatagcagtgctgtagaatataactatttgtgtaaaataaacggagggcaaaga

SEQ ID NO: 45344 - DNA, 247 bp, Glycine max
  Clone ID: PAT_MRT3847_140946C.1
tttttgtaggactccatgagtgaatcccagtcgatgtcaggaatgtccggatatgaaagccactcaagctcatcgtcagtagggagaatgtaaactgcacttaataatgctttgatgcacaaaatatgttacaagtggacaatgaggcagcaggtttaacagcagcatgatgacttcgcaacaagcacttccaagcctagttttagtttagtttgtcttgaagaaactggagaacgtatccaactag

SEQ ID NO: 45345 - DNA, 636 bp, Glycine max
  Clone ID: PAT_MRT3847_140947C.1
acaacatgctcattagtgcatagacttcaaaaagaaaggtaaagtttcacacattgggagggaaatacaagaaaacacctaaacattagggtttggaattggagttaccttcacttcaagtgaaaaagttgggactttccggaaaacatccctcaaacttcgacgaacaaatatatcaagtccctgaccctcacgtatcattggttttccaagacgaccatcaattccaacagacatgttaatacccagaatctgtaattcatttgtagtcaggaagacgtcaagaattttaattgcaagaacccttgtgacaagaaatgtgtacctgagcatgaagaagatcaatatgcacagctgaaggatcttcttcttgagatccataccaactgaattcatttttaatctgtagctttcccagatcaagttgtataaaactggaagtcaataaatttttcagcttgtaagatacaaaaactatttgttatctgtccccaatagcttaagcttttaggagagagagctttgccaatgttatagcaaaattcttaataaacccctcttattaacaaataaaaagtaacttccaccaacggatattgatcttcagttctcctaaaattttgatcggacgcgtgg

SEQ ID NO: 45346 - DNA, 202 bp, Glycine max
  Clone ID: PAT_MRT3847_140948C.1
agcgacgtgataactctgctattgagcctacgaatttcaactcactcttccttaggtctacaacagaagtgacagggaaaaccccaacacaacacaactaaatcgcgtggcataacaggtgtcccacaccaagtgacggaatagcgaacacaaccccacccagcggcggttctaacaggcccaaaaactgaatggatactgg

SEQ ID NO: 45347 - DNA, 700 bp, Glycine max
  Clone ID: PAT_MRT3847_140949C.1
ggggggcatgcaaaaggaaagtctattgataagttacaccatataaagaagtggtttgaaacaaagggaccaagtccaacaacccctaccaaagtctgacacgcaacaactttattcttatccttaaatatatatacattttgatgtatcctttaccaagaacctagaatcacttgcaagatcctcaagttaatttcattatcaagtcaagaatctttccaacaagttcccaaagaaaaagcttgttctagcccaacctcgggtttcaactggtgctttggcataggcagctggtatcctcttcacattgaccatcactgtctgtccaatttccttgtgtagtgcttcgatgatcttcatgtccactgggttcccagatgcatctctcacatagaacacattgaggcctttctcccctacagttgacacacctgccctactaactgttaagccattctctcttagaatccttgtcacttcagatagcaaccccactatgtcctttgcacaaagctcaagactcacaccctcgctaactcttctttgtatggcagcttcaatgcatttgatggccctttctttctctccttcagtatcaagtgtgcatccgtccatgtgccggataaagtactcctgggatgcatattgcccttcggatgagattgtagcatggaaaacaacatattccttgggcacgagg

SEQ ID NO: 45348 - DNA, 449 bp, Glycine max
  Clone ID: PAT_MRT3847_14094C.1
cagacgcgtgggcggacgcttgggttgagtttttgattgctcttaatatcgtcctaactcaaacagatatttggcttttgcttgtctgttgcaaggataggtgagaggtgagattctacttgacttggatcagccttgagctgagtatgcttatccactccacatagcgtcatacaaccattcataattctgatcgctacaatgttgcatctaacattgcagattttacagagatcatttcaatgtactgtctgagctgtgatgttcccggctgatgaaccacttctattatttaattatttagaaggacgacatctatgtcttctctttatcttgctctcctaaatggagcagctgacaaagtcagagccaaaatcggatctctctagatatgcatactattattatagtgaggcctgtctaaattccatatggcaggacctttaaaa

SEQ ID NO: 45349 - DNA, 181 bp, Glycine max
  Clone ID: PAT_MRT3847_140950C.1
tttttatcaaaggacatctaaaataccatatccagtattaacattcgcacctgaggcggacaaaccataggggatggtacataatcttataacatactatcacatcccaaataaaatgcaaaattagtggcacactaacttatttgcaatctccaaacaaacataattaaatgtcaaatca

SEQ ID NO: 45350 - DNA, 591 bp, Glycine max
  unsure (1)..(591): unsure at all n locations
  Clone ID: PAT_MRT3847_140951C.1
tacggcgaagaagacgacagaagggggacgggacatggagagttacgggtcgggtcatggttcgggtcaccgtccgcacggaggtggccgtaagatggaggttgtgagcggcaaaagccacggttggagttctactaaatcaccggattcaactcaggcgagtgaaatgccgtggagattcggcgatcctgaagcgaagaggaagaaaaggatagcgaagtacaaggtttacggcgtagaaggaagggttaaggctacgctcaagaaaggtcttcgatggatcaagaaaaagtgttctcagatccatggctactagtagaaatactcagaagccagccacgtcaaatgctgacgtgtcagtatctaaatgttgggatgctactcctcatatcatatcacatgcaaagggtcaattctttgtttatttatcctttcactcaaaccactttatgcatctattgtgcattgatagaggatttctaatttctatcttgtttgtatgatcacaagggtcttccatgaaatatgagccattaatagagttctatttctaatcggaattttgatgcccaaaaaaaaagaaaantaana

SEQ ID NO: 45351 - DNA, 574 bp, Glycine max
  Clone ID: PAT_MRT3847_140952C.1
ttcccatgcactagtgaagaaagaagcatattctcaactcaactacccaacaaaagggataagagactgtccgttgagacttgagaaggttctttctattgcatttttcctaccctgaatttttttatgattaccactttacctttgcctctttgaagagccaaagcctggagaggacaaatgtcatttaacttaacccatgccttccatgataggtcacaaaattcctagaggccattatacaatgagactttaggcacaatagaaaaatcaattaaccaatatcacacacacattgacgttcttctcttaaggggataacaaaaactatgacattaactctatcgcaggcaacagtggaagagtatacaatgcatgcaggtaacacatcaaaatgattaaaaatgcatgttaatgagtaatgctacatatttttgtaccatgcggcctcttctaatgacatcggagcaattattggctaaatgtacacacaatgcaaatacaagtttgttaaatagttataacccctttaaatttattttacatactactactaggtatgtctccatttgag

SEQ ID NO: 45352 - DNA, 381 bp, Glycine max
  Clone ID: PAT_MRT3847_140953C.1
gtggaggaggaggaaacctggggaacaggtacacgttatgtactcattggaagagttgatgccatcagttggtacctctgtcccttctccttcaatactctcggtccttttatgccaatcagattccatacttcagaacattggcaagaattattctgatgtaccaagttctccttaccttcgtgaggattttgagaatccttttgatttttgttatgagtctaatattgtttccaagatacatttgatctccatttctgatgatggaaaaatgtggtcatgggagacagaatagggaacataagatggtgggatgtgacaacaggacattcttcctcattcaacactcacagagaaggaatccggcgaatcaaattctca

SEQ ID NO: 45353 - DNA, 575 bp, Glycine max
  Clone ID: PAT_MRT3847_140954C.1
cctcgtgccgatatctttgaaaaattgcactgaattgaaaacatggtgcgacaattttttgatgctttcacacttgcattctgcttctatagtgcctccaggagatgaaaaggcagtagaagctgaatcaaaaaacaagactttttgagagaagtgaaagcttctgaaagtttgaaagttagttataagtaaatcttgagtgtgagaaaaataaaccaacttgagtatcatttctatgacttctttcatggttctgcagaagtgtagtatttgaatagatgtgggtctcgtactatatttttgtttttcttatgtgaaagagttcagagaggatgctgttattaaccatcaatatagtgaaatatttttcagagtttgtctcgtggtttttccttggtatcaggtggttttcatgttaaatgttagtgttcttttgcggctcaagatctattttattaaatatgagttattgtttgtcagactcttctgaaatgttgatttacacttgcaaattcgcttgttgagctcaagaattgtacaccctccccttagtttgaggctatgtttagtttcaa

SEQ ID NO: 45354 - DNA, 368 bp, Glycine max
  Clone ID: PAT_MRT3847_140955C.1
gttggttcattacttttcaaattaattgaaaaacaaaggaaaaaaaggaatgacaaaaactcaaccccaaaaccaaacccaaaacccaatctcggggttcattgcgcgggacaatcaaccctgtcaaaaaagctccctacaggaggtcctacaaaactttcctaaaaaccaaacccaaaaaagaattgctcggccatcaagtttttccccaagcaacactgcagggaaattttggagaaatgcctgcattaatcacacgggtgcccagcaggggttacacaaaagagataaacaatggtctcaaggaaacacaaaagcgtggggaaaaatggaaagatccccttttattaacgcactggacggagccc

SEQ ID NO: 45355 - DNA, 1067 bp, Glycine max
  Clone ID: PAT_MRT3847_140956C.1
gctataagaagacgacagttgaggataggaactccaataagcaaaagccaattgatacgtgcatatcacaaaactactcttaaacacacacgcaccccaaaaaaatcctctatcaccaaactcacctatttcctcaactcaaggccctatagtcccagcaagtgagtgagcgtcacacaacatggaatatacttattcagcaggtgtagaggcagaaactcacacaagtagcagcaccaccccatcaagatcaaagaagagaaacaacaacacaagaaggttcagtgatgaacaaatcaaatcattggagaccatgtttgaatcagagtcaaggcttgagcctagaaagaagttgcagctggccagagagcttggattgcagccaaggcaagttgctatatggtttcagaacaagagggctaggtggaagtcaaagcaacttgagagagactatggcatactccaatccaattacaacagtttggcttcccgttttgaagctcttaagaaggaaaatcaaacattactaattcagctgcagaagctgaatcatctaatgcagaagccaatggagccaggtcagagatgcacacaagttgaagcagcaaacagcatggacagtgaatcagaaaatggaggcaccatgaaatgtgaagctgagggaaagccaagcccatcaatggaaatatcagaacatttacttggtgttctgtctgatgatgacacaagcataaaggtggaagactttggcctagaagatgaacatggccttctgaattttgctaagcatgttgatggttccttgacttcaccagaagattggaatgcttttgaatccaatgatctattaggccaatcaaccactgatgattaccaatggtgggacttctggtcctgaatgaaacagagcaaccaaaattttgtggaggaaatatttatgcatatgaatgcttcatgtttggttccgcctcggcaactgagttgcgattactgggatccaccttgtttttgctaatatgaaaaaaaaaaaaaaaaaaaaaaaaaaaaaaaaaaaaaaaaaaaaaaaa

SEQ ID NO: 45356 - DNA, 476 bp, Glycine max
  Clone ID: PAT_MRT3847_140957C.1
gcaataagcaaaagccaattgatacgtgcatatcacaaaaactactcttacacaccaaaaaaatcctctatcaccaaactcacctataccctcaaactcaaggccctatagtccaagcaagtgagtgagtgttacaacttacacagcatggaatatagtcaatatactacttattcagcagaaggtgttgaggcagaaacttacacaagtagctgcaccaccccatcaagatcaaagaagagaaacaacaacaacacaagaaggttcagtgatgaacaaatcaaatcattggagaccatgtttgagtcagagacaaggcttgagcctagaaagaagttgcagcttgcaagagagcttggattgcagccaaggcaagttgctatatggtttcagaacaagagggctagatggaagtcaaagcaacttgagagagactatgccatactccaatccaattataacacttttgcttcacg

SEQ ID NO: 45357 - DNA, 456 bp, Glycine max
  Clone ID: PAT_MRT3847_140958C.1
gaacttcagggtcgggccacgcgtacgcgtgcggctgagcgcagatctagcggattctgttgctgtgaataccactggcacagagccaggatgcggagctgctgacacaacggcgagtctaaggaccagacccctgaacttgctcagctacagccgcacgggctggattggcaggctcctatggtacctgtgccgggccaagtgcatgtccttccatcacgggtcgaaccgccttaagaaccgggcctacctcgaaaccgtcataccactgctcaagccgttacacgactgtaacgctgccggatttacgggccgccccaacgttgactggtgcgagtcccacacagtcgagaccatgcgtaccaacgtcattggaacccgaactctagccgacatatgccgtgaccacagactcattctcatgagctacgccaccggttgcattttgagtacgac

SEQ ID NO: 45358 - DNA, 348 bp, Glycine max
  Clone ID: PAT_MRT3847_140959C.1
ctcgtcattctcctcgagagaaatttaatttatgagctacatatttatcattaaatctgctatgtgttcactgtggcgttattcacttatttttctcgctgaagtcccccccatggctaaaactgtcacatccaccccaacatattttacaccttctttttcaacaataacttccattgcctaaaccttccaatgctttttacacaaaccttaaccatcaaaaaccatccttatatacctacctcaaaaaccctactttgaaacaatatcttaacatctctaatgccctaaaaaccgttacttcttgagggattcccttaccaacttattaattaattaaaccttctt

SEQ ID NO: 45359 - DNA, 1735 bp, Glycine max
  Clone ID: PAT_MRT3847_14095C.1
cccacgggtggcacggctgcgagaagacgacagaaggggatccacaacaaaaaactacttctcaattcagttaacacaccaaccccacatccaaagcttcagttcaatatggcaaccttgtcaagttttgctcctttggccattctaagtttagttctagtaattagtgccattgtctttgaggctgaagctaggccaaggacattctttgtatttggagattcacttgttgataatggaaacaacaattacttggctaccacggcacgtgccgatgctcccccttatgggattgattaccctccaagtcatagaccaactggtcgtttctccaatggctacaacattcctgatcttatcagtcaacgacttggtgctgaggctacattgccatacttgagtccagaattaagaggaaataagctccttgttggtgcaaattttgcttcagctggaattggaatacttaatgacactggaattcagtttataaacgtaatcagaatgtataggcagctacaatattttaaagagtaccaaaaccgagtgagagctataattggagcttcacagactaagagcttagtgaatcaagcactagtactcatcactgtaggtggcaatgattttgtaaacaactacttcttggtgcccaattcagcaaggtctcgccaatacccattacctcaatatgtcaagtatctcatttctgagtaccaaaaacttttgcagaaactgtatgatttgggagcacgcagagttcttgtgacaggcacaggaccattgggttgtgttccatcagaattggcccaacgcggtagaaatggacaatgtgctgctgaacttcaacaagctgcagaattgtttaatccacaactcgaacaaatgttgctacaactcaacaggaaaattggaaaggacacttttattgctgcaaacacaggaaaaatgcacaacaacttcgttactaaccctcaacaatttgggtttatcacgtcacaaatagcttgttgtgggcaaggaccctacaatggtcttgggctatgcacaccactctccaacctttgccccaatagagaccaatatgcattttgggatgcattccatccatctgaaaaggccaataggcttattgtggaagaaattatgtcaggttctaaaatctacatgaacccaatgaacctcagcaccatcctggctttggatgctattaccacatgaagacaccaataagtctatgcacctcgcatgctagtttcattatgtcccttttttattattgtaattgtgatttaatttcgtattcctcaatatctaattggggaattagaaagttaaagggaggaagaaacttccctttttgcataaaattacaacgaagaatatatatatatatataaatggtgggaagtactaagtgattcctgagtctcaatattaaaaaaatgttacttaattttctaccaaaaatccaatggaggtatgtaaaaaaaaaaaaaagaaaaaaaaagagtacccctatattaattgtaattgtgatgattatcgtatactcttctgtataagtgaggaactaaattttaggaagaaaataacttccgttttccaaaagtagaaatggagaaaatatatgccccattcattccaaaagggacgatatgttaccctgtcccttttcgccctttttgaagcgcaaccttggcagttataagaaacaaaaagtgttattttttcc

SEQ ID NO: 45360 - DNA, 252 bp, Glycine max
  Clone ID: PAT_MRT3847_140960C.1
cgatgagatgcatcgagcatgtatctagtatgtgggaagaatgtgctgattgacatgcgcgtacttatggcatatgttcaggccattcgtgctgcgcgacattaccttgatcttgagtatcggtatctcattgggtcttcatatagtcggagtcatcgtctcgaccttggtgcgaataatagcatgcctatcgaaatttcgctgaagactgctgcatagacaacggcctatgagccatttgcagtgtccatt

SEQ ID NO: 45361 - DNA, 153 bp, Glycine max
  Clone ID: PAT_MRT3847_140961C.1
tcgttaagcccatgagtatgctgggactatatggatatatgggctcccagaatatgcaatcgcatggttattctgacaaacatagctgatgtctctagccctggagctgttgcctcgcaaattgtcttcggaaagagcaatgccatccaccgc

SEQ ID NO: 45362 - DNA, 333 bp, Glycine max
  Clone ID: PAT_MRT3847_140962C.1
tccggaattcccgggtcgatcacgcgtccggatagccgaagttaggctagattgtcccaacatgtggactgcaggaacaacgagtgtgtagatcaacaactaccgtttccctttatcggctatcaggccaaacactgcttcttctgtgcttcttgttcttcactctacaaccactaaactaagggggtggttattggtctaaagccattttttggaagctctaaaacttaaggcttaagccatgggatgctgattctgtctgcatgtatgtaaggccctactggcacgtgctgaggaccttcatggcgtgtatgagttataaccggtggtgac

SEQ ID NO: 45363 - DNA, 447 bp, Glycine max
  Clone ID: PAT_MRT3847_140963C.1
ggtatggaagtgaatcgttttctttctcttctcaacataaaaagcataaaattaattacaaatcaaaaggctttcgggaaaaaaaaaagagaagaaaagaaaagccaattgcacaaacaatgatgataagatatcgcgtcgtgaaataaagccaaataatatccaactgttaaatagggtcatatatctctcaagccctaaaaaaaaaacctctcttctctcttcttccatcatccaccacccaccccttcccaacatattaaccacaccaaattaagaaataaaaaaaaatttctcttttcatcaaaataaacaaaactcagttccgtagggaaaataataatcaaaccttacgtcatgacgttgtgttaaaacaccaaactactacaccatgtggaatcaatcatcgaagaacacgttgattgaataattcgttgataattcatt

SEQ ID NO: 45364 - DNA, 454 bp, Glycine max
  Clone ID: PAT_MRT3847_140964C.1
cttctccaaggttatgatggcggaaatggaatctgctcattgggatctcgaagcagcggttaagttcatccattctaacgcggttttcaccaaaccaactcaccaaaccttcgcgtttgaatcgtttgtttgcataacaatgtttgaaggcttcaactacccaaacttcaacgtcgcagaagacaaaatcctacacaaacaaggagcacaaagcctctactttgacaaattcaaaaaagtcaaatctttgaatccaaaacagtacttaacccacaacccaaactcttccttctccaagttcctaaaatccaagtaccttcaagtggtgcacgccaaaatggagtgttccttcttcggcaacttgaaccagaggaaggtggtgaactctggagggtacccagaatcttctttcttcgtcgcgtttgcagagatggcaaagcgcgtttggaccctg

SEQ ID NO: 45365 - DNA, 236 bp, Glycine max
  Clone ID: PAT_MRT3847_140965C.1
cgctctgtttctgtctctgtgtttgcggctgaggattccgaacgagcgaccttcttcgtttcccgcaaagtttaagtccaccaggggtaaggaaagactcccctccacaatggccgcaattgacatggccacccctgggagttcactaacaatgggcacttgaaccacaaacctggagggattgaccaacctgtgaattaaaagttccaaaaggaagctgctgagatgaacaagag

SEQ ID NO: 45366 - DNA, 867 bp, Glycine max
  Clone ID: PAT_MRT3847_140966C.1
ggtaaaggtccaggggtcgagggacgcgtccggtcgataaactcatctgtcacaatccattctcgcgccctctaacagaagaacaaaagaataaataaataaataaattctccactcttcctcttctttcagtttcagatctctcagaggtgtgatatgtgatgtgattcaggtttgtaaaaatatggagtgtttgaattcggtggaggaggtggtggaggagataatgaggattcacagatcccttccagcccggccagggatagacgaagtcgaagtggctagaggtttgatcgggaatgttgaaaaagaagaccaggcgaggctccaagccatagcgcggcagagcaagggcgttcatgtgccccaagagctcttcatggtgctccaggagatgcagaggaacttcctttatcaccagagcaaggaccagataagagaggccgtcaaactcctcgatctcgataacgtccattccctgttcgatgaattgattcagagagcttccaagtgtgttgcttctccctcttccaaaacaagttactctaacgctaacggctctgcttcctcggtttctaccagcttgtccaagaattcggtttctgtgggcggttttgataagccgccacttgcccctgctgctactacttctagaaagttccacgcagagaaagaacgttctgagttggtcactcgagatgacagttatgtgaagaagtccaagtcctcgttttactctaatggatatggaattgaacccactatcccatcaaaatcaagtattttggattcgtcattaaaacctacaaccactgcaggtcaagatggggataagttgagtttgatcaagcttgctagcttatttga

SEQ ID NO: 45367 - DNA, 233 bp, Glycine max
  Clone ID: PAT_MRT3847_140967C.1
gcgtccgctttttacttcccctatggctcgtcactccttagctcttagccctcctcctcttcgccgccgtagtcaccgccgagatggtgagtgtcgcgaacagatgcccactacattctgaattcgtatgtgagacccgaagtcgtccactttatacatgatgaccaccctgtgtttgttccacaacccttatttgagcacagggatcactctctctctaagtatgcagagat

SEQ ID NO: 45368 - DNA, 446 bp, Glycine max
  Clone ID: PAT_MRT3847_140968C.1
cgcctcaccggccgtggcttgatcaaccatttgatccccaacgtggagcacctaagaggtgtaggggtgccgcagggccccattgcccacctggtgtgcaaccacctcggtgtggtgtgtgtggagcacacgaaattcgtggaggctgtggagaaggtggtgaaattcgggtttgatccgatgaaaaccatgtttgtggaggcggtgaaggtggtggttgggactagcaaggaggcttgggagaagagggtggaggtttatgagaggtggggttggtctaatgagatgtgtctttgtgccttcaggaggtaccctcagtgtatgttgatgtccgaggataaggtcatgaggaccatgaggtttttggttaaggatatggggtggcctgcagaggatatttttcggactccgggggttctcagccccaacttggagaagacaattat

SEQ ID NO: 45369 - DNA, 274 bp, Glycine max
  Clone ID: PAT_MRT3847_140969C.1
cgctggcggggggggtggaggaccaaggccgaatttggcatgagacgacaacaacaacgggtcccgttccagcattgacagccccaagcctgattatacggagattgatgcggtgcgtgcatgagcgaaacagttagggatgctgctgcacaatacaggggggggggggggtagtattaaatgaaaatgggaaacagcaagcagctgtggtggctagtagactatccagggaacctaatgcctctgttatatgactcggctgacttggaaacgg

SEQ ID NO: 45370 - DNA, 2145 bp, Glycine max
  Clone ID: PAT_MRT3847_14096C.1
cattgaatgaacgaaatctcgcgaactgatgatgtggggatctggcatgtacatcaaaaagcaacaatttacctatcaccacgcgcacaaatactgttagtgttaagctatggaatcctgtgcaactcttccactttctcagcttccttatgtctacccttcaacacttagcagcaacaaagcttatcctttttggccttgcaagcgaaggagctcatcacaaccaacacgcttacactgcagcaagatgtttgtacctggatttggagaagcatcaccagaagcaaaggctgctcaaaacctccacaatttcttcaccttcgttgcagtgaagattgttgctgctcaacttgagagctacaatcatgaagcatatgaggagctgatggaattcttgagtagacactcgttgaatgatggtgacaagttctgtgccagcatgttcagagaatcatcaagacataagaatttggccctacgcataatggaggttcgatcagcatactgcaaaaatgattttgaatgggacaacatgaagcgtctagcttttaagatggtcactgaatctaacacgaggctcatgacggaatatgtcttagaaaccagtcatgttgaaaccgagaagtgaatagtccttcattccctctgatcgaacaggagctagggcaatgtacttacttatatgtacaggaaagaacttgtctacatggttttcgaccaattttatactccagtattaacatggttatgattaaaaaaaaaacagttagatcataaaatggttgggacaagttcttgttacaaattgatgatgaacagaatatattgttatgccctccatgatatttttgggatacttggagcaccagaattatagtggtgctgtttcaaggctttgaagacagctttgaccaatttgtgcgtaatcaattttcctttacacctgaaagtgaaaacattgtccaacgatgaaacaagcaacaagcattaccttcaatcctcaatgttcaaggaacaatttcctatttgataatttacagtttcggaagcagtagcaccttcttcactaagaataagatagtgtttgttgtcagtcttgtacgtacaaatattacattacattgtacagcttaaggtttaccaagcatggactattgattataaccttcctcctatgcacctcctatttatagggcattcttggatagtgacacaatcagttgctttctgttctaaggacagaaatcatcaacaattaaagatatatgcttcctctgttttagacttggatgcatttgtcctgtactcctattgttattactaaaccttccattacgatccaaccaagcagacttcacaatcacttgtcactctatggctgcaagtgatagcaaagaggtcgagacaaagaaaggcagggcttagtagtaacaaggttgtccgctgccaaggagctttgtttccaaaccacatgcacatatgatatttttgaaaacacgttgaggtttatcttctatcagatttgaattgacactaagcagtatctgttgcatcaacccagcgatggagatcacttgaggtatgaatttcaccattgttgaagtatgaatgggcgtattcttctatgtgatccaacctatacacgtagttcaccatgatccctccactttgagaaagacctttatctgaacgatctgccatccagtttattctttcaaccatcgctccattttgcaagtgaaaatttgctacagagtccaaagcctttcctcttttcttctcttgcagaaggtacctggcacataaacgcatcaaaggggattttaatgctgacagaagttctggtgaatggatccacttataggatgtagaagtaagcaagttgaacatcacatccattccattttctccagcagcaatatccttgggtaaactcataagtgcttcttcttccttgggcttaagtatattctcatagaaagtggaactggatctggtgttgatattagtcacctgatagtatcctcatagacaagctagggaagcaaatagaaattactattcacattatttgtcaccacattattctttatcatgacaaccaaggatcataaaaaggataacgtttggtgactatctcgagcc

SEQ ID NO: 45371 - DNA, 298 bp, Glycine max
  unsure (1)..(298): unsure at all n locations
  Clone ID: PAT_MRT3847_140970C.1
ctngcnnactncanagacagtgttaaccagcagnntgaaggangcagaaaagagttagagcattagggtgttttctaggttcanattgtctgtcaagagncagtgcaacgatgaatnagatcggtnagcatgatgggggggantaaatcaanaccctttaacggnnggaaatttgatgtacgtccttaacattancggtttggagagaatcccntgtgattagttgctaaaggatncacggtgatanatccatatgganaccntgtgnatcgngtggncanttacntcgtgcaccccg

SEQ ID NO: 45372 - DNA, 516 bp, Glycine max
  Clone ID: PAT_MRT3847_140971C.1
aaactatcaaactgaacccaaggcagcacaccatccttggtcttacaacctgtgcggatcatgctagacacccactgctaccttgaactgttcggcccgacgcttccttcctatgctgaccctgtgactataaggctcatgccacccacaagcctgtatagtaccccccgcacatggtgctctgcgacgagagcgaacaaccacccgcgcctgtgacctataaagtctacaccggcaacctctgacttggctgagatctagatatccactcggacaaccccctacacagccggcacgagctcattcccttaacgccgctgttggagctcggacattcaccctaggccttctccccgatcaactttcaccaccggttattctacgacacccacactgaagctgacctactgaacaaggaagccgcagccacactaatggctgctacctaagccaaatacagatctaaggatatctcaatactcgagatactaatccaagccggatccttacataaag

SEQ ID NO: 45373 - DNA, 367 bp, Glycine max
  Clone ID: PAT_MRT3847_140972C.1
tgggatgcgtttgaggatctctatggggtctatttggagcaactgtggttcttgtagctctttctgccgtccttggaagaataactcctgtacaacaagttatcgtagctatttatattcttcctttctggggcttgaactacttcattaatcatcaccttttggatgtcagatatgaccttggaggttccatgcttatctttaccttcgctgccttttttggagttaccttctccttatgctacaccagacctgaagatagaaagaaggacgtacatagagtacgaatcctagatatgattctgatctcttcagcagccctggaacgataatgctgtgattcccttccaccatcacacactggaga

SEQ ID NO: 45374 - DNA, 363 bp, Glycine max
  Clone ID: PAT_MRT3847_140973C.1
ccaagttcatcgttactcatggcttgtaacgtaacattcgtgtttcaagattaatcaggactataataatagttggcccactattaaattcttgaatgaaaacaaggcgattgtaacgtctatataaagcaaattacaagtacaagtgagaagtgtcctttagtctgtgaaagagacaactacaacaatggccacttcactaaccctattcaaaacaatctttgttttcttaattatcttcactctcctcacaccccaagccacggctgattgtgaagccgaatccagaaacagttgcaacaacaaaaagaaagccctacctctaaaaatcatagccatattcaccatcttagcctcaagcat

SEQ ID NO: 45375 - DNA, 545 bp, Glycine max
  Clone ID: PAT_MRT3847_140974C.1
ctgcttgggggggggggggggggggggtagtaatgacaacaaggagggtaggaagtcacgctggaggtaggcttaaggttgataagggcagatagccttaggccaaagaaatgacgctcattgagatcgaggaaagtagtgagcaactgagtgagtacgtttttgaaaaagaagttgacggtaaagagtagcataacacacaagagtaacctcctcaaaaagagaacaaaattatataaagcgttatcaaaatcagggctgggtgtaaccaaagggtacttgttagtaggccgcgtttaaaatgttcgcagacaacacgagtaaagagttggtaattaagtggcaatggaatacattaaagactaaccaacctataatttacaaacagcaagaagtacaaaagggattacatagtgtgaacagaatcgttagttagtgccacggggggaatgagacttgtgcttgggcaacacgttataggggttgctgctgccataagccgagcaacacgttcagcaatagtgtcccttagctttggactagta

SEQ ID NO: 45376 - DNA, 127 bp, Glycine max
  Clone ID: PAT_MRT3847_140975C.1
cttaggcatgaccatacgcatactttagatatagatcccaaagggcaagccgacccacgggtgttagaggacctatatgacattcgtctacactaccctgagaactgaccgtattcagcaccacaaa

SEQ ID NO: 45377 - DNA, 264 bp, Glycine max
  Clone ID: PAT_MRT3847_140976C.1
agcctgatgctgggtctagatgaatatgacaccaggatgcccctcagtcagagctcctcgccctgatgataacaatgcctctaacagatctggcgagagactctatgcagcatcatgatgcataagagagtaatgggaggaaagaggttcctgattcagctagtacctcaccaaagggcccttatagatatgatctccataccatcaagatatgccctcttagctgaacagtggcaccaagcacctaagattggacaccagcaa

SEQ ID NO: 45378 - DNA, 445 bp, Glycine max
  Clone ID: PAT_MRT3847_140977C.1
aaatgaatgattccatcaactaacactccattggcatagtaatgaaacaacaataacagatgacatatatcaattcaagtagaagacatagttgacttctaataaatagaagataggttgactcactataagtagtacttaagggaggtgaaatccaatacaacagcatggttactcattgtgaaacataattcagaaagctcgatagagcaaatttttttaggtcatttaaatgataaattgtgttgcatattgcaatgttggtcctggcacactaacataatttacaataatgtgtacacaccatggaacgcaccaaccccaaggcactgctataaacatagcaactttatcaggattgaaggcgccagtgaaggaattgtactcaaaacgatagaagaaatcgccgcttccgatagcattgagcttcgagaagcttttgaag

SEQ ID NO: 45379 - DNA, 718 bp, Glycine max
  Clone ID: PAT_MRT3847_140978C.1
cccacgcgtccgcccacgcgtccgtacggctgcgagaagacgacagaccggtcggtggcccacgcctcctcacaaatacacacagaaagttgagaggtggtagtagctgctgcggaagcgttcagcagccaatagctttcgcagcagcatcaacaacaaaccaacgattcaaattcaacctcctcattcagatggcacaatctttctcaccagccaaacgcgcccttgccttttcccttcaccggcgagggtacgcagtggcgtctgatgcttctccttcggtgagagggggattggatagcattggaagcaggagtgcaatcgagaagggtgtgacaaaaaacaattcgggcccatcgggggcctcatcagcttgggccccggacccagtgacgggttactacaggcccatcaatcacaccaatgagattgacccggtggagcttcgaaggatgctgttgaaacacaaagtcagatcatcatcctcctcctagagtggcaaggggcaccaacacccacaccttattccatcaaatcaagtttattttgcttttcttgtgtggttttatctatctatttttattttatttttctgaatctatctatcttttcatatctatctactatccttgtcaattgtcatacatgagcagtgaacaaagaaacaaaatagatttggtttttgtttaaaaaagtcacacatgagcactcgacactt

SEQ ID NO: 45380 - DNA, 513 bp, Glycine max
  Clone ID: PAT_MRT3847_140979C.1
gcacgaggcacacagaaggaggagacaccagagatggttgctgaagaggcaattatccctgatgataaagacacagaaaatttggccaaagagaaaactgaagtatctgcagaaccaccacctgcattgcaagaccgagggttaaacggtgactcgaagttattagaagagaatgagaagttaagggagatgatgaagaagttgcttgaagccgggaatgaacagttaagcgtgatatcagatttgactgtcagagtgaaggacttggagaagaaattagccaggagaaggagtaagagagtgaagacaaaacagtatagacccgcagcttccaaaatgtctacccatgaaatgaaatcctcctaatattccactccatgtgagagcctttgatgttgcaatgtaataatgtctcctttttatttcacggagtgtatgtatatgttgtaattgtgagatgtggtatgagtcatgttctactgaaaacactataataactatacttctttgctt

SEQ ID NO: 45381 - DNA, 112 bp, Glycine max
  Clone ID: PAT_MRT3847_14097C.1
ttcacgcgtactgttagacgaagaaaagaaaagtgtgacaaaggagcaacgggaacagggctcataaataggggagaggacaagacaagcctctgccgcagaaaagcgactg

SEQ ID NO: 45382 - DNA, 739 bp, Glycine max
  Clone ID: PAT_MRT3847_140980C.1
cccacgcgtccgcccacgcgtccgtacggctgcgagaagacgacagaagggggtggtgcgcctccccacaaatacacacagaaagttgagaggtggtggtagctgctgcgaagcgttctgcagccaataatagctttcgcagcaaaaccaacgattcaaattcaacctcctcagatggcacattctttctcgccagccaaacgcgcccttgcctttgcccttcaacgacgagggtacgcagcggcgtctgatgcttctccttcgatgagagggggattggatagcattagtgtaatggagaagggtgtgacaaaaaacagttcgggcccatcggggacctcatcagcttgggccccggacccaatcacgggttactacaggcccatcaatcacaccaatgagattgacccggtggagcttcgaaagatgctgttgaaacacaaagtcagatcatccccatcctcctagatggacaaaggggcaccaacacccaccccttattccatcaaatcatgtttattttgtttttggttttgtttttttttgtgtgtgtgtgtggttttatctatctatccatctttattttcatttttttttttctgaattatctatcaatatatctcttcgtatctatccttgtcatacatgagcagtgaacaaagaaacaaaatagatttggtttttgaaaaaaaaaaaaaaaaaaaaaaaaaaaaaagcgcccgccctccaggatccaagc

SEQ ID NO: 45383 - DNA, 387 bp, Glycine max
  Clone ID: PAT_MRT3847_140981C.1
gctggagactgatactgtggtattccaggcgcacctataggataaaaaattgcaactggaaactaacgtagggtgcaaccgtgaatatacatacatagataccagatgcgtaaataccatatcagcatggaatgataaaaatattactgaccatttaatcacggcatgggatgacttcccaatcaactatacaattcattgtagtaaaactgcagatggagagtatccgcaacatagacctggaacgcggatgatctaatatacatgcaatactgctaggtatatattacagaattgaaatggtcttggaccggcacccgtatgcaacgaggccaatctgcggaaagatatggaaaccagtataagaacaagagcgattgcggatac

SEQ ID NO: 45384 - DNA, 317 bp, Glycine max
  Clone ID: PAT_MRT3847_140982C.1
cgttcttttttttttttttttttttttttgaatatttcactcttttttatttttgtgcttgggtgcattttttttcgtgttttacatcttcttctaaacactataacaaattttattatcggaaatcttatcttctatccaaggggagcactgcttacgactcttagggagtgtataatgcaggtgacataatggcataatgtgcatgggtggtctgacaatgaggcagtccggatcaaaacaaccctccacgagaccgtaatgtggacatccctgagcgtggttcaccatacaaaggtcctaccaagaaggaattt

SEQ ID NO: 45385 - DNA, 385 bp, Glycine max
  unsure (1)..(385): unsure at all n locations
  Clone ID: PAT_MRT3847_140983C.1
gctgcgagaagacgacagaaggggctatactcaaattctaccatctaaaactcaattccaaactaattttgctatgccacatcaaaaaacaatcttcaacttccaaaccacacaccttacatacaatgtcatttgctgcaactatagttttcttagccaaattctgcagtgtgggagaattcaattttggaacaattttcacacaaagagcaattgaaaatagtctaatcagaactatttatctaacaaaataaataatgaacccaccatcggacctaaaacaattgaacttgtttgtcctactaaagcctaagagcataatttgagagataccggcaaggaaaaagaggcagaaagaaaaaggggaagaaacgggtccccanna

SEQ ID NO: 45386 - DNA, 1450 bp, Glycine max
  Clone ID: PAT_MRT3847_140984C.1
ccacgcgtccgcaaacgctgccttaatttgggcatgtctgcagcggcgcgtttgggtagaagagtaggcacaacagcaaaggaagaactgagaagaaacaaaggagcatggcgcgatcctcttccggccgccgcttctcgcgcaatcgcggagagaatcccgttggcggatctcgttgtccaagtcagagacgcaaggattcctttgtcctctgaatgtgagatactcagaaactaccctccttccctgaaacaaatcgtagcgctcaacaaaatggacctcgtgggcacatcgaatgtgaaggcatggatgggatattttagggaaaggaactgcatatcttgtggggtcaatgctcataacaaggagaacatcaaacagcttcttagccttatacaacgccgggtgagtgaattgaagggagctgatcaatgtgacaataattataccgctacagtcatgttagttgggattccaaatgttggaaagtcggcacttgtcaatgctttgcatcaagtggggagaatcagtgcagcagaaaaaggaaagttaaagcatgcaactgtgagtccagagccaggggagactaaagacatacgaagttttaagattggtagccatcccaatatctatgtgttagacactccagctattttatctcccaaggttcctaatgttgatattttatctaaattaattttaacaggagcaattggggattgtttagtcaggagaaaagaagttgctcaacattttctagctattcacaactctagtgagcaatacaagaaatgggcaaaattgtctatgaaggataatgatagattattccttaacgggacaacagaacagttgactagctctgggttgcatatgaagcataaaaaccaaatccctacagatcacacacaggactgcgtagtgcaggatgttcgacgcacactgtttgaaacaatttcatcattcgaaggtgatgtgagatgtgaagacgaaatggaagcacttattgcaaggcagtttactgccttgcaggaagctttccatgtttcaattgaatctgaagaagatgatgctcatgacaaggttgctgggaagttgcttaatcttttccgtactggtcgtcttggacattatattttagataatcttcccggatatattcaatgatcattgttgtccaattgatactagtacttccatggaggtggtttttgtgacaagtcattgcttgcctttttattgtatctgtctgctagttttttgtaacctttttaggttgacccagttaggaataatgaagtgtatattaatatcagaatcgcatatatatatatatatatatatatatatgtgtgtgtgtgtgtgtgtgtggaagagaatagatattttatctcaaagttttagatcttacgaggtccaactgaatattgagtacattctagttgactat

SEQ ID NO: 45387 - DNA, 248 bp, Glycine max
  unsure (1)..(248): unsure at all n locations
  Clone ID: PAT_MRT3847_140985C.1
gttgattcggatctagagtcttttttcactcttcanttctcgttgttgttcttcgctttcctgaaactagggttttcaatttcgattcattcgttaataattaaagatgtttggnagggcaccgaagaagagcgataatacgaggtactacnanatcctcggcgtctcgaagaacgcttcgcaggatgatctgangaaggcttacnaganagccgccatcaagnatcaccctgacnagggcggtgatc

SEQ ID NO: 45388 - DNA, 754 bp, Glycine max
  Clone ID: PAT_MRT3847_140986C.1
tagaaaagtaaagggctaagagtaaggaagaggaagatgggttggtcttccgcaacagcatgtgcgtcgctctcctcttcgactccgctgcctcgacttccaccgtctcgcactggcactcccattcctggttcgctttcattttcatggctttcttcatttcccactttaactttaagtgcttctcgttctcgctcctccggaataaaccctcccaatccctcacgttccgatgattctttcattcgagctgcctggacccgaagatctcgaggtgaagctgcaaagaaacctaacaggaaatcgtggaagcagaggacagacatgtacatgagaccgttcttattaaatgttttcttctccaaaagatttattcatgcaaaagtggtacaccgaggaacaagcaaagtgatatgtgttgctaccacaaacgccaaggatcttcgaaactcccttccatccttgatagatcataacgcttgtagagttgttggaaaccttattgctcaacgatcaatggaagctgatgtatatgcagtagcctatgaacctagaaaggatgaaaggattgaaggcagactagggatcgttcttgatactattaaggaaaacgggattatttttgcttgagctcatttcctatcaaattagcctgttttaatgtagagtctgtttcgaatctatttgattgtttatggttcatttgtgcattagtttgcttggtgattgatttaattggtctaggttttaaaaa

SEQ ID NO: 45389 - DNA, 446 bp, Glycine max
  Clone ID: PAT_MRT3847_140987C.1
cacatgcatataataaagaatgttttatctggttgcttgcttaccaacccaaaaagtgactatgacataaagatctccttatttgttttaaagatcatgatattttgatacagttttctttgttgataactgatgtgtatagatactgtatgtaactcggtagaggcttttctattaaatgatttaggattttgtaatgttccacaacaacaacaacaacaacaattcaaagcttttgccactaagtggggttggctccatgcatcaaacatgccattgtgttcttaccttaaccaattcattggagaggctatttaattctagatcttttttcaatggtttcacataagagtctttcttggtctgccactgtacctctacctttttcaatgggcttctatagtctttctctctcatgtcctaaccatatttaccattttttcctc

SEQ ID NO: 45390 - DNA, 248 bp, Glycine max
  Clone ID: PAT_MRT3847_140988C.1
agaacatctcttgctcttcccactttctctctctaaataatataatactcaaaatttatccattttgattgtatttttcttaaataacaaagcgcgtatagtctcacgcgcccgacgatgggttttccgtaggctacccggtgctgctggttccgaaaatgttcctcctcgcgctctccttcctcgcgtggctgcgctccctcgtcttcgccctcttccgcctcctccgcatctccgacctcctcgac

SEQ ID NO: 45391 - DNA, 226 bp, Glycine max
  unsure (1)..(226): unsure at all n locations
  Clone ID: PAT_MRT3847_140989C.1
aattcnnttataattttttacgaaaaacccgggcaccaaaaaattgtggccatgtctatcaatcgaaacgaaaccaatcccctcaaacccatgagaaaatatcgggcggtacgacataacacactgcaccgcaagaggaaatgaccaagaccgtccccgggacagacgctacgactaatcccacacccccgcatgcgcgaccgtgcatagaaccgaagaaggcagg

SEQ ID NO: 45392 - DNA, 213 bp, Glycine max
  Clone ID: PAT_MRT3847_14098C.1
gggcttattggccaaagaccggtcttgaggtttgttcagtaaattgtggttcatgtaattgttggaaggaaaattccgggaacttcaacaattcagtttagacttccgtccagtgacctcggctccttaatctaatgatccaagaccgatcaccagctataagaagctgctctgggatattccacatgcttctggacactgatcgctatgagt

SEQ ID NO: 45393 - DNA, 395 bp, Glycine max
  Clone ID: PAT_MRT3847_140990C.1
tcgagcacgcgctcgtaagcgcggggcccctctagcgcgcgcgctttttttttttattttttttttttttatgaaaaaaaagaaagatacgctgttattaaagcggggaaaagactatatatgttttccataagaaagggagggttgttgaaattacactcacggcgtcggtgaaaaactgggttggaagggtttggttgaaccagctgataatacccactaccgcccaagcttggcagagggttccgccagggagaaacgccagagtccttggaggctccattaccagtctacctcccaatcgtctcgctgcatgggctcttccggactccaccctttttgcaactggggttaaaagccatgtttatcgttgtacatatgccacagttgctatg

SEQ ID NO: 45394 - DNA, 313 bp, Glycine max
  Clone ID: PAT_MRT3847_140991C.1
cttcattcacctatcatagacaaagcgctctctctccactactactactactctcgcggaattacaaagatgctttcaaatactatgaaccgaaacgctaatcataaatccctagatgacacttcattagactcccttaatcgaatcgattgtccccttccgaataccctaattgcttgctggctatcaaatacggacatggatcagaatccttcggagctgatagaccacttggtcaagcgtgccttcgatgcctccgacgacgctgcactatactccgttgtcgactaagccacttatcaccctaagatct

SEQ ID NO: 45395 - DNA, 253 bp, Glycine max
  Clone ID: PAT_MRT3847_140992C.1
ttcgaagcgtattgaagagaagaaaaatgagcttgattcacttgaacttcaaatatctgatgaaaacttctctcaattagatgaaagagaaagaaatttggaaaatgaggttaagaggaaggcaagccaactcgacgaaagacaatttgaaccaacataaatgtgaagtggaaaaggagatatatagtgtagatcaaaagattaaggctgtcagtcgagagaaggatatcatggtttctgattcacaggacag

SEQ ID NO: 45396 - DNA, 320 bp, Glycine max
  Clone ID: PAT_MRT3847_140993C.1
gctacgcctgcgatatcctatacgagttcaacacatgtacaacttcactcgggctagggaaactctcaagggccattctgcctcttaaccactccaccttctgacttctaagaggcaacttaacttcactgctaaggccatgcaatcagaaaagccaacctatcaagtgattcaaccaaataacggtgataccttcattggaagcctctgaaccccagatacatacaggcccttgattgcatggcacttatcgaacctcaccgcatacatgaccgccctgaactcactactacaaagcatcgacgagggccttgcccatg

SEQ ID NO: 45397 - DNA, 238 bp, Glycine max
  Clone ID: PAT_MRT3847_140994C.1
gcgtacgcaagtcggaatcggccgatcgcgaaaaacgacaaagggggaagaacacgcggtaaagggactggaggatatggcgaccacaggcgctttatgtggcactatgttgtagacctccatcctgaagaagtaagcatcactgaatatgacaagcttccaagctcaacggtcgctgtcttatgtgcaaccatgttgacttggttgtcgtgtccaggctcaggtaacttacaaggtg

SEQ ID NO: 45398 - DNA, 323 bp, Glycine max
  Clone ID: PAT_MRT3847_140995C.1
accagagtcctgtcaccaaacacggtatgcgtggcagtaccccacttgagattgacaatagctgttgaaatgcttgtctgagctcaagcatcgagcaatgcatgcattactagatagttcgttagtatctgctaagttagcgctgatgtatatcctgctagatactcacttaacaacacaaactgtttgtgccacatatgggatgcgaatgcttaaaggtaatgcagcctagctgagttctaatgctaaaaaggccgtttggcaatcttgttgaggctaagcctaaatagctgtgtgaacctgcaccaccgcgataaatcata

SEQ ID NO: 45399 - DNA, 209 bp, Glycine max
  unsure (1)..(209): unsure at all n locations
  Clone ID: PAT_MRT3847_140996C.1
ttacactttnaatacctcaattnccntaactttacttatcaccatctattattttatntatcaaacttaaaattaaacttttttttttattctatcaattactattanacttttcattaactncctantttctattcactcaactccactttttntattcaaaataaactccttaaatttaatttttaaatcactcttttaattttaat

SEQ ID NO: 45400 - DNA, 376 bp, Glycine max
  Clone ID: PAT_MRT3847_140997C.1
gtctgtccgagagctgagtggacagatatgccagatttgtggggatgagatagagattactgtggatggggagccatttgttgcctgccatgagtgtgctttcccggtttgccggccttgctatgagtatgaaaggcgtgaagggatccaggcttgtcctcagtgcaataccagatacaaacgtatcaaaggtagtcccagggttgaaggcgatgaagaggaagatgacactgatgacttggacaatgagtttgattatggggatgttgatgctctgggcccacaaccaatgtcggaatcctatgtattctggacgccccaatactgcgcgaggtgctgataacggatctggcgtggcgacacacttggaacatgg

SEQ ID NO: 45401 - DNA, 379 bp, Glycine max
  Clone ID: PAT_MRT3847_140998C.1
gcttgggggggggggggagtacataaggaagatgtatcttagaggtaggggattggcccaccccgatacaacagatagatgattgtcggacgttgctgtttagagaaatttattaaagcgcaaccgtcccacaactgcgatttatgaatttaagagattggggtgaggtatgataaaatgctgcctgctgggggactgtgtgcaagtatatcatggatataaggaggcgggcgagcaaacaataggagctcatataacaggacttgcggtaagtaaggcattgcaaggccctgcggtaattgagaatccactgggtggtacatttatacacattgcgccaattgtcttgggccctgccatagcaggtaataagctgtgc

SEQ ID NO: 45402 - DNA, 226 bp, Glycine max
  Clone ID: PAT_MRT3847_140999C.1
tacggttggagaagacgacagaaggggaataaccttatgccatgacacaagtgcccacaaggcgcacattatcatcgtacccttctttggagcttcttaactttccactcccctattaacccttaccggaatatctgattagaccgtggctttcccaaaaaacaccagacataaacccagcctgaattaggctacctgtctcattaataaccctaccataacctac

SEQ ID NO: 45403 - DNA, 389 bp, Glycine max
  Clone ID: PAT_MRT3847_14099C.1
cccacgcgtccgaagacgcgtgggcgagaatacaacacagggggtgctatcactattcagggctgagacacaaccacacaggtggaagaatattaatggtctaaaatttcttctcttcaacctgactcatctactgttctctctctctctctggaactcaccaatttttgggaaaagaactaatctgaaccgtccatctctctcatttctgatatcacacggcagatgttcgaccagacctttacatctttttatgatgctttttcacacgagccaaggcatcataatgatagtattcatttttatcgtcctgctgccgcatgtagagtacaatgttggtccatcgtatgaatcattgctactgaacaaattcaaatgccacactcaca

SEQ ID NO: 45404 - DNA, 346 bp, Glycine max
  Clone ID: PAT_MRT3847_1409C.1
ttggaacctttgggctgatttatgtgcttgtttatgtgcttgctggtcgtgagaagaatgatagagggtctcgaggacgactagaaaaacgttcccttgaaccgcccacgaggaaaacatacggagattcgaatcgaagaggtaacggtcacgcagcggtcctccacatgcaggtacctcggtcctaaaacaccaatacgcatgctcaacgcccgcacggaacagccctaaaacgcgcagcctcccacgcttccgcctccccgcttccgcgcaaccatgtcggaccacccaccaccgcagaacacagacccggcttacttaaaccagacgaccaccggagatcact

SEQ ID NO: 45405 - DNA, 353 bp, Glycine max
  Clone ID: PAT_MRT3847_140C.1
cccccagaaattaaacctttaggattaaattcagaagaaaaacttttttggaataccccgcaaacaaacggggtggacaaaaccccgttattcaaacaaagaaggcggggtcaaacccctcaacaaaaaaccacaaagggcttaaaaccccgggccgcattttgaaaaaaggaggaaaggaaggagacccttggggggctcctttttaaataataaaaaacgtcctaccgaacaaaatttaggcgaagtttttttatgccgaagtttggaggggaatttttaatcaaaactggggttttttcactaataatgctttggaaaaaactctatttttaatttaaaaccccccgccc

SEQ ID NO: 45406 - DNA, 504 bp, Glycine max
  Clone ID: PAT_MRT3847_141000C.1
aattcggctcgagacacgatgaggagccacacattccttaggataacttcacttttggtgtttattgggtggctcacggtttggatcttgttgcctacaaaggtttacaagaacacctggacccccaaactcaaaaccaagttaaactctacatactttagagagcaaggaacaaatctcttgcttttcacattccccgttatgctcataggggccctgagctgcatctatctccatcttcacgaaaaaggaacggaaaagctaccttccaaaagcggaggagttgtaaacagatggttatgtttcttgagacgtccatttcttgtgatgtctccaataggaattgtcacatctatggagattatttttgcactcatgtttgtcgcactcttgatatggtccctttccaattacttacataccagctttggacacctccatatgcacaaggagggcgagaaagtgtggcaagcaaagttcaggagtgtatccctgagacttggg

SEQ ID NO: 45407 - DNA, 158 bp, Glycine max
  Clone ID: PAT_MRT3847_141001C.1
ggctcgaggaagaaataatgtctgaagagctcatcacctcctataacgactctagcgtcggagggggcattgatcctaggttccctgttcttcatatgcagtggttgcgataggtatcccacctaacatcagattggtctctggtgcaggttggaatc

SEQ ID NO: 45408 - DNA, 225 bp, Glycine max
  Clone ID: PAT_MRT3847_141002C.1
gttgatacttttggcagttggtcctttgactaagggtagtaggaaggttttaacaaatcaaccgggaaaggaaccctttccccggcggtttagatcctttaaaatttaataattggaatttccaggggttttttaataaactttaaatggaatttaacccgttgggtttaaaaaaaaaaaaagattgaaaaaaagggaataaaaataagggggggccgttttaag

SEQ ID NO: 45409 - DNA, 459 bp, Glycine max
  Clone ID: PAT_MRT3847_141003C.1
ggtgtccatattgctgttctagggtgcacgataagtcacactctaccttaccaggtgatatttggattgcagaaagacagacggccatttgcggagtatgtgggaaggatgtctatacctggcatataacattaatgagtctcaagagacagatctgatggatggaaaatcatacttggatattaaatatcgctctagatgggaaaaccgtttgctctacgaaagtacaatgcggtgctggagaagaccttctaattggacataatgtgggactgattcacattggtccagaatagttgactgaaaagcactgatccagaaaaacccaaaaagattgatgccagattgagacagataatagatcctcaatacaatggggttcaagctcagatggaaacaaagctgcttaaatagtgtgtggatgatgctgaaactcctaaaggttccatgcaggatctt

SEQ ID NO: 45410 - DNA, 289 bp, Glycine max
  Clone ID: PAT_MRT3847_141004C.1
ttacaaacatacaaaatgctttattagggacggggtttctacatgggcttggtttaaatcatccatatccctcatggaatgctttatttccttgtcccaaactgagccacaccttcattcaacgagggcttaacttgacttattctatgcactatacaaatggttattttccaacacagttgtaattatgactaccaatggatagggggtccttatacaccacagcccaaatcacaaacttaatcacctttccctcactatcatcaacctttctttttatcctgccatt

SEQ ID NO: 45411 - DNA, 277 bp, Glycine max
  Clone ID: PAT_MRT3847_141005C.1
ggacccaaataacatcctgttaatgcgtttgcattatgataaaaacatcccggggggtggtgaacacagttttttttttttatcaaattaaaacacctcccttccctagccccttataacaaaaacatatttttccccagaaaacagggagtgaaaagcaaccccacaaaagttttcatagaggcaacccatttcaatatacattttccaaacccaaatcaccccatggcatacttttgggtccagctgggggcaggggcctcatacttggcccggt

SEQ ID NO: 45412 - DNA, 3558 bp, Glycine max
  Clone ID: PAT_MRT3847_141006C.1
aaagaataatatggctatagctttgacagatttgggaacaaaggttaaattggagggtgacattgaccatggtgtggctttttataagaaagctttgtattataattggcattatgctgatgctatgtataatcttggggttgcttatggtgagatgcttaagtttgatatggctattgtgttctatcaacttgccttccacttcaatccgcattgtgcggaagcttgtaagaatctaggtgttatatataaagatcgtgacaaccttgacaaagcagtggaatgttaccagcttgctttgggaatcaaacctaacttttcacagtcattaaacaaccttggcgttgtatacactgtccagggtaaaatggatgctgcggcgagtatgattgagaaagctataatcgcaaatccaacatatgcagaagcatacaataacctaggagttctttacagggatgctggtgatatcgctctagcaattaatgcttatgagcaatgtcttaagattgatcctgattctcgaaatgctggccagaaccgtttacttgcgatgaattacatagatgaaggaaatgatgacaaactttttgaggctcacagggactggggtaggcgatttatgagactatattcacagttcacatcatgggacaactcaaaagatcctgaacggcctcttgtgataggatatgtctctcctgattattttacacattctgtgtcatatttcatagaagctccccttctctatcatgactataccaattataaagtggttgtttattcagcagttgtcaaggcagatgcaaaaaccattgcggtttagagagaaagtcttaaagaagggtgggatctggaaagatatttatggaacttgatgaaaagagggttgccaacatggttagagaagatcaagttgatattttaatagagcttactggacatactgcaaacaataaactgggaatgatggcatgtcgcctgcacccattcaggtgacttggattggttatcccaatacaacaggattgcctctacaattgattatagaataactgattctctggcaggaaacaagtgtaagcaaagcatgttgaaattcgattggtgcctcctcaactgctgttgatacacccagaggtgatgctgctttccaatggcatccttcaatttctgtaacccatttttccccccttaattatattagccagttgagagtgtcaatggtgtagtttttatttattgttttttggggctagcgacttcttttcccgcatggtattgaaggatggagtgtacctgtgtgaatgtaataggctttcatttggaaagaaggggtgaacaaattagcatttctaggttgatgtagaagtccatatgaaaggttgacgctgaagttctaaaaagtttaaaatcagcatacagaaaaatgtggctccggtactgtagaggtgatgttccatcttttaaacgcgtggtattgttggacacatttccatctgctgacccgaccacgacttatgcatcgccaaacatgagtgttccctctggtgcagtcgctcctgcagcgctcgcggacaatggaggtaatactatccctggctcagtgcgtctcggccacttgagcgccgaaaacgaaggggcatctgttcactgggctgtgcagggggcctcgggttgatcgtcgattccatatttgagaacgagtcttcgggagctcatgtctaggtcttctctctacaagggggcaaaataggttcttgggcttgagtcaacattgctgaagaaagggcccagaaagcgaccaggagatgttccggctttgaaacgcatggagctgttgcaacaacctgtttcttcaagtgacccatccaatgttataactccccctacggggccgaggatattccaagaccaagaggtgaagctaccttgagctgcagtctgttacacattcttttggtagccgtggcctgttgcatatttcccccctcgattataatgattgtgtatagcttgtgcaatttgtttgttcttactccttttcaacattgcatttttatcggctcaacgtgctatgtctgcacaattaggttgatatgatgtatattgtggttgctactggaagaggcttgcagctccacggcatcacaagaggctaaattttcatagaatgacaattttttctgggaaagaagtgtaagcaacagttaccaaatcgatttgtgtcctcaactgctgttgatactcccagaggtgatgctgctttgaaatggcatccttcaatatctgtaacacattttcgcccccttaattataatagccagttgagagtgtaaattgtgtaatatttatttaattttttttttggggtatggacttcttttctagcatgttgttgaaggatggagtgtacctgtgtgaatgtaataggctttcatgtgaaaaacaggggtggacaaattaagatttctgtgttgattaagataggaatatgaaagtttggctctgaagtactaaagagttcaaaacatgtctacagaggaaacaatatcagaagcaacttaattagctcttaagctagtagtagtacctaatttgataactgttattatgacattggtcaatgctattatgtgtcagagatggcataattttacccttcctcaggattgatcactaattcctgagatatgtgaaaatgattgactttaagttttttttttattcgtgagaatcaaagacagtatagaagatttattataacttgtgtattctgatcaatcaatagactcccttgacccttcaccttatagttggcaacaagtaacatgtgattaggggtaatgtgttctcattacataagtggaacatagtttttcataatttcatgtaatggactcaacaaactcctcaatagcctaggttcctggtaataaggatcttaaaatactagttaagtattaatctgtatagaattttgatattaatataatgttttaattttaaagaatgaatgaagctgttaacgtaaaaaaaaaaaaaaaagcgctcgcgaaagataagttgaagttggattccatccaagaatccttttgtagtgattcatgttgaatttcattacaatagttgtactactaggttgcatggttgctactggaagaagctggaaagcaaccacagcacagcacaaagttaacttgaatagagtaacattgggggcgggggctataggcagcaggttagttataaagcccccttcggtgcagagtattccaagaccaagaggtgaagctaccttgaggtgcattctgttacacattcttttggtagccgtggtctgttgcatatttcccccctcgattataatagttgtttatagcttatcaatttgtttcatggcattttttttatctgctcaatgtgcaatgcctccatatgaagaacaggaatggatatatttaagattgccgggttaaaatgtatttgaaggagatttaaatattttatgaattaaaatttaagaattaaaaaaaaaaaaaaaaagggcggccg

SEQ ID NO: 45413 - DNA, 367 bp, Glycine max
  Clone ID: PAT_MRT3847_141007C.1
attccgacagtctcatgacctatgatgaataaggattctagttggaggatcaatatgaagcatgccggctgcattataattaaatgaatgcaccttgttggattattcgaggtagaaccgcatttatgcaggattctagttagaagattcatgatgggataccttatagtgaaatgggtagcgaattccaaggtgctgctaactatctgattctatgcgacagacttcgggaaataagttgaaatgtcatctgttatacagaacaacacagtttcgatccactcaggcctcgtcctaggtgctccatttgatgaactagccatgggagagcacataagaggtactgattgcacttgacaagccgcat

SEQ ID NO: 45414 - DNA, 254 bp, Glycine max
  Clone ID: PAT_MRT3847_141008C.1
tccggttcaaccacgcgtccgccacccttccgaaaaaaaaaaaaaaaaaaaattaaataatataaaataaaaaataaaaaaaaagggccggcccttttaaaggacccagcttaacttcccctttcttccaacttcaatgcccttcaatagggtcccttaattcaaattaattggccggcatttacaaaattattacttggtaaaaccctggggttcccaacttaaactccctgtaattaaatccccttttttca

SEQ ID NO: 45415 - DNA, 260 bp, Glycine max
  Clone ID: PAT_MRT3847_141009C.1
agttttcctttaacatacacactaatatcgtgtcagaatagcttcctaaccatatcaccattgccacatatagttcacactcatgaatagtgccactaaaattctattcaattcatcaattcctatctccacttattctatacattatcatcactgtcaaaccctgatatccgcatcatcagcaaatctactgcgaaccaatctcgctctcctactccacacataatagagactaatagcctatgacttcactctatctc

SEQ ID NO: 45416 - DNA, 399 bp, Glycine max
  unsure (1)..(399): unsure at all n locations
  Clone ID: PAT_MRT3847_14100C.1
cagctgcgagaacaccaccgaaaggagcatgcaacggaaacatggggggncactgcaagttgcgacagcaaaacaagggagcttgactttaatgaggatggcttcttggaaattaatgatctcattgatactgaacctacattgtcaaatgttgaaaattctgcctagtaccaccattttgaaaatgggttaagtgaacttgatttgttccaaaatgcacagatgtttcttcgtgacttggggccaattattcatgaaacacattcacatgcatatacaaatgcccttgtaatcagcaatattgaatgtcacaattaccaaaaacttccaaaaacataagatgccaatcaaactgctggcgaattctgtattcatagtgaaagcaatcaactatcattc

SEQ ID NO: 45417 - DNA, 436 bp, Glycine max
  Clone ID: PAT_MRT3847_141010C.1
tccaggaaggtttcccgtcatcactgtatgacgtcctccttctttgggggggggggggggctagaaaaggagtacccagaagaagcataagtgtaaaggatgggataagtggaggagtaagagaccttaatagacctagataggagagagatctaaagagagagagcaacgaatattagacctagaaggaaatatgtggtacgtgtctatcaggaccttgaccaacagagcagacacagatatacatagccgcagatgggccagtggcaagaggaaggagagagcaagagggagtagcggtagttaaatccaccgccgcatggtgggttagcagtggttgtagtggtgggtggaatggttgggggtgtaccaccggtacgtaacataaaattattcgtattaatacgcgtgcgtgcttctaagtgttgtggtgatt

SEQ ID NO: 45418 - DNA, 426 bp, Glycine max
  unsure (1)..(426): unsure at all n locations
  Clone ID: PAT_MRT3847_141011C.1
cacgcgtccggtcgaaaagacgtctgttgtctacgaacttacctctaaaactcccctnctctggcccaaacaaacttcattacaaacacattcgttcctctctctcttcttcaatttcgatgaacaacaacaacatcctcgtcctcctcaacctgtaccttattattcataccctcttgtctcgcgcgcattagtgtctcaaatctcaattccaattccctttcctctttttttggacacacttacacacacatacgttcatatatacgttaacacgttcgtaagttatatacagtaaaaaaaattttcaggatatatacgacacaatgggggctgcttttgttatctcccgcttgatgtttgccgcgttagctggcggatcttcggcgagtctgactttggagagagcggttccgcgaattacac

SEQ ID NO: 45419 - DNA, 267 bp, Glycine max
  Clone ID: PAT_MRT3847_141012C.1
aataccatacatggacttaataagcaacatgcatgtcgacaggtaggatgggtaaacagtgactgcttacttgttaattatgagtaccgaccttaaactcaaatatggccatgtcatgagaatggcattggaacatgaactttataatattaagcgggggacgaacttattgggaccttcactgaaataaataaaatgactttatgcttatctttggagataaaaggctatccgcctataactttcaaatgctcagggaatgcaaga

SEQ ID NO: 45420 - DNA, 357 bp, Glycine max
  Clone ID: PAT_MRT3847_141013C.1
cgaatagcatagagtgtggtcatactcacgaattctatcgcactgctccttagtaacaggtgctgaagaagagtgctcttgtcaggattcagacggataaaccgtgtaataatcataggtacctcgagaatcgcgaggttgttcagttgcggtacccggtctatggatctgagaatggaaatggcttttacaggggcaaggagcacggttgtggtcacgtggtcaagggcaaggagagagaggagtgccccttttagagtgatagttctttagagacaatttgaaggttgcgatagcataggcgggcgtcgcgccagttgccacatattgaatctcagtgtgggagcctgatttgta

SEQ ID NO: 45421 - DNA, 266 bp, Glycine max
  unsure (1)..(266): unsure at all n locations
  Clone ID: PAT_MRT3847_141014C.1
cacacccacctccacccgggctacacagaattggcaacagtgcctatgattgattcaccaaggaatctgattttcccaaagagcaaaccaatgttttgtttttcgtttcagtttctgccaccacaattacttgtacaataaaaccacacacaaagnnnnnnnnnnnnnnnnnnnnnnnnnnnnnnnnnnnnnnnncttcanngnatgggatggcaccatagcgagnagcntagcaanccgttcgtggcgcntggggtggccatngc

SEQ ID NO: 45422 - DNA, 2754 bp, Glycine max
  unsure (1)..(2754): unsure at all n locations
  Clone ID: PAT_MRT3847_141015C.1
ggctcgagagagagagaagctgcgcaccttttcacactagtgctgattgctgaaactggcatcgctcgccatttgcgcaaagatcccaacaacaacaccattcgaaagttgaaactgaaaaacaccaatccctcctcgtacgaggtttccttgttccgtcatcaattctcgtgtttaaggtcttgtgagtgtaagcagcatggaggatattcaattggatattagttgggacgatgtcgcctgtcccatatgcttggattttcctcataacagtgttctccttcattgttcatcttatgataaaggatgtcgtgcttttgtgtgtgacacaaatcaattgcactctaattgtttggatcgctttaaaaattcatgtggcatgccatcctctccagtgtctaatgcaacttccactgaaactactgaaaatagtgatgatcatgaggtatcaaatggtcaatgcaatctgacttgccccttgtgtagaggtgaggtttctgggtgggttatagttgataaagctcgcattcatcttgatgagaagaagcgttgttgtgatgaagtgcgatgtactttcatgggaagttacttggagctacaggaacatgctcaacttgaacaccctcatgcacgcccatcaaaaattgatcctgcccgccagcttgattgggagaattttcaacaatcgtcagagatcatagatgttttgagcactattcattcagaaatccccagagggggtggttctagggagattatgtgattgaatatggggatgatgatgctagagacgagtttgaagacttccctggagatgagggcaactggtggacctcatgtattctatatttcgacaactttagaagatccagaaatagaagaaggacaagagtcagtcatacaagaagggataatcgccgtttaagttatgatacttcaaattctgatgaaggttctgtagtatctatggagtatgcagattataggatagaagagattgatgatgagtttgttagtactagtggctcttcaaggggtagcagtggttatcgcagatcccatagacgccgttcccgcttttatgacaattaggcaccatgtgaattgaagggaagaaaaagtcatggggacatggaaaacattgtgtttcacgatgctaagattacatttagcttgtctattgcttttaccatgagatgtggtgattggagaactctgtagatttgacagttccatgtggtcacatactcaatttcttttgttttatgcttttagctttaaaatcacactttctgtctgaatctaaggaagtatgctagcaattacaagcctgttgttaatttcctcataggctagtgatttagctagcattctgctgcttgactatggaataatgattttttttttaattttattttccctgtacatataggatatagctaattgatcgtgatgtgtttataataccataaagatgacagtttccatgtcactccaacgtcttaccaaaaaaaancaagagcctaggttctcagagaatcatctgatctggtgaatatatgtacatcanattggtgcaaatttgctgaacttgaaaagaatcactacccatgaaaaaagcttgcttcgaaaatgctgaggttttccttgtgtacactcgcggaaaggagagagagaagctgcgcaccttttcatactagtgctgattgctgaaactgccatcgctcgccatttgcacaaagatcccaacaacacttgaaagttgaaacagaaaaacaccaatccctcatcgtactgttccgttatcaattctcgtgtttaaggacacaatttgcttgatacattttcaagttttcatctccatgttttgattttgaagaataaggagtatgcaattgactactacagatatggttttactataagtggcctgtatatggttttgggtcttgcaagtgtaagcagtatggaggatattcaattggatatcagttgggacgatgctgtctgtcccatatgcttggattttcctcataacagtgttctccttcggtgttcattttatgataaaggatgtcgtgcttttgtttgtgacacaaatcaattgcactctaattgtttggatcgctttaaaaattcatgtggcatgccatcctctccagcgtctaatgcaatcactgaaagtactgaaaacagtaatgataattacagtgacatggaaatgtattttggatcggaggagaatgcttccattgtgtatgctgccttagcagttgacaaagagttacagcctgataaagtaaaacgacttatgacagtgtctgatggaaagctatcagtgcactttgaggcaacagaagccagatttcttcatttcattcttttgagttggatagatttgtcctgacactagccaccaaaactattgaagaatttggtcaagtaatgaagttgtgacgtctcctcatatattgaatgttagattgttgaagtggactatgacttttactgtctgaatgtacccttatttgtttctttcaagtaggaaaagattttcaccttgttttgaatttgtattacatgtagcttgtttcaagggtttaatatgtaatgcttagtcactctaataatctttttctactactatctactctcaattcctgaatgctaattgttgacatgacacagacaaacatgacacttgttttcttatatttagaaatttttaatatattgtatttgtttaaacaccac

SEQ ID NO: 45423 - DNA, 346 bp, Glycine max
  Clone ID: PAT_MRT3847_141016C.1
aagttctctaatgcattttattctgtttattaaataagagggcatgctagctgattttaattacaaggaggccatacgggaggaatgctaatactgttttaaaattgaggtctacaaataaattctttttggcttgaacaacttacaggcgtcataaatgaaaggggtaactaatttaattgttagaggttttggaccatgactccccgaaacattttcaaaaactcctggaagactgaacgaaaaacaacgcgtcacagatttaatggcaggaccttgttcttcgggggaatttaattttctcggtcgagggaaggcgggaaaccacatttgaacaaccttcaaa

SEQ ID NO: 45424 - DNA, 225 bp, Glycine max
  Clone ID: PAT_MRT3847_141017C.1
gggacacagagaggggaactctgtatttcacctctttccgcgctttttgacagtgctcttccttttaccacattagggggagcacgggttgaaaattaaagggcttgttatattttttgagacacggaaagaaattgtttcttgtcaagatgctttcacaaatgggtgctttcattccaagaaaaactttatcgccgggtcttcatactcggagagtatcttctg

SEQ ID NO: 45425 - DNA, 444 bp, Glycine max
  Clone ID: PAT_MRT3847_141018C.1
tgcattggtctatgtgattccgtgaattttatgtatcttatctccaacattatctgctgttgaatccattgaacttcaaagaaagttgcaagtaccaaagacaatcaccacaaaacaggcacagaagaacgccacgggaatggacaacccgagaaagaagacaattagaaggaagaaacaccaagtggctccaaactccaaatagatgagtgtcccatatcagatcagaatcattggaacttatcaaacaggccaagatcattattagaatgtcacacgtaattggaaaactaccctataatggataagaaatacggaaaccaaacagcaagaaatcaaccaaaagctagacagaactaccactgctggccagtaagctgttaccaactttctgaagtgacatatcatgccagaaacatctcagatggctttgaaaacttaata

SEQ ID NO: 45426 - DNA, 241 bp, Glycine max
  unsure (1)..(241): unsure at all n locations
  Clone ID: PAT_MRT3847_141019C.1
cccactcgaccactcgaatctccatacacaatttcacacattattcacancactaacaaacacgggaccaaggagaaccatcaaatgccccataacccacatcctaacaataacacaccctactacaataattccagacccaaaacttaacatcaatcaacaaacatacaaaataacaatcacacaccaaccaaacacctcaaaacatgcatcatcaaaacaacaccaccacccaaaacaa

SEQ ID NO: 45427 - DNA, 331 bp, Glycine max
  Clone ID: PAT_MRT3847_14101C.1
ctgtcgttctttttttttttttttttttactgttttctacttaccattctcctatcccatgattagtctcttctaaatttccactggctttttttcaagcaccgagaatatgcagcggaacgtttttgtccgacggcgttttcttcttcggtggaaagccagatctgtgcttacctatcctttgtggtacgtgtaaacaccatttgttggcggtgttctcgccggcggagcctatctggggttcggatctacactccggatcttagagtggctcatggccccccttcgtggattgttatgatccgccgagaaccgtgtaacattagtatat

SEQ ID NO: 45428 - DNA, 347 bp, Glycine max
  Clone ID: PAT_MRT3847_141020C.1
ctggatcgaaaaacttttgcatgagcttgcatattgtcattgaccaaggcctaataatataacaaccggaaatatgataatattcaatcatttgggtattaacaacaacctaggaataccactctgcgaagttatccgccttccgatgcgtgagacctaaggcagggtcctttttcacctgcttgttcttaccaccggattgcttaccgggaggtcttttggattcagttttttttgcttcaaatcccgccatagtgaaggacgagcacctgatcccgttgtaaaaaagtcaaaggcgattgaaactcgcaagagctattgtggcctaaccgttgacccctcgagcc

SEQ ID NO: 45429 - DNA, 193 bp, Glycine max
  Clone ID: PAT_MRT3847_141021C.1
ctctgaccgacactacatcgtataggagaatacacttactgctgtctaacactctgtgacatttcgagatggagctatgccagtaggattctctggttaccacttgctagagaaccgtgctcatccattccatgatcatcctccaatatcttgtggcgtgcccgtggaatggagacgagtggacgatctgtct

SEQ ID NO: 45430 - DNA, 446 bp, Glycine max
  Clone ID: PAT_MRT3847_141022C.1
tcttgctaatcgagtagctacacttttagaatgtgaggttttttaatgcatacataatcaatctcgcaggaaaccaaaaaaactactagacttcgtaagcatttgtagcactgaaatgctctattgacataggtagccagggacaggaacaagtattaaaagacatatcttgagactacctaaatctttcaattttggatccattcttttggtatagaaaaaggatgtgtagtttaaatatgagagagaagtattcactacctgctggttattgaagacatgtcaactgtattctgtttatagttttaaacaatccattttagtaaatctttaaaaactaatgttttctctttattcaacctgagtctgtacatattttcttccatttcctgtacctctattacctgcgctctcagtttgttatcaccagtaactttgatgtgatg

SEQ ID NO: 45431 - DNA, 307 bp, Glycine max
  unsure (1)..(307): unsure at all n locations
  Clone ID: PAT_MRT3847_141023C.1
agcttcaaaacgcatcctcgaagacctcagaaacttgcagaaatacccaccaacttcttacatcgctaatccaatatctaataacatattccattatcaagcaacaataatagatcctgctaataatcctgatactgaaaatatattcctaatcactatgcacttccctccaaattatcctttcaagcctgctgagatggcctttatgactaaantatgtcgccctaacgtcgatatcaataatagcatgtatgcttatatcgttaagaatcattatagcgctactctgaccgtctctagaatcttg

SEQ ID NO: 45432 - DNA, 898 bp, Glycine max
  Clone ID: PAT_MRT3847_141024C.1
ccaattcggcccgtccccttggcccatcctccccaaaattaccagtcctcattgagcatctaaccatggctgctcctcttcaattcttctttctcttcaccctcactctcttctcatcatcattctccgagcaatcccacatcgaactaccctcaaacaacaacaaccctaaccctaaccctttacaaaaactgtccaatctccacttctactaccacgacataagagacaacgaaaaccccaccattgtgcaaatcgtggacaccccaaagaacgttccgaacgggttcgggtctactttcgtgatggacgatgcgatgaccgaaggaccagagctgagctcgaagcacgttgggagagcccaggggctgtttggcttggcctctcttcaggaccttgggatgttcatgctcaccaatttcgctttcaccgaaggagcttatgctggaagcacgttgagcatgcttgggaggaatcccatatcggagcagaatagggagttgcccattgttggtggcactggcgtgtttagatttgccactggctatgccattgctaatagcgttaattccgtttctacccctcaacattttgttgtcgagtacaatgttacagtgtggcatggctagtgtgttttttttttatctataaaaataaaatatgataccagagaatttataattctgttcaaatatccgaactatatccctttgtagccgtttgtagtgagaccatgggagtatgtatgccttgtggcacctagagttagaagtagcaagtgatatggtctaacttgtgtcaacctaaaagtaattttgttagcgtatcggtattgggatttttatttcttgtatttgtttttaagtgcaaatcaaacatgtattgagtagttcaacaa

SEQ ID NO: 45433 - DNA, 858 bp, Glycine max
  Clone ID: PAT_MRT3847_141025C.1
tgtggttttagtagtatttatcaggcaagtgggggttggtttgtgtttttttgttatatttgtatgttgttctgtgctgggtccttaatttgtggctgagaattaattattattattatcaattatgggtctctcaaatttcccaagtgcatctgaaggggtgctacctgtgcttgtgataaacacggttctctcagtggcagtgttgaagaacatgtttagatccatgctccaagtagtacttggtggcagtgctgctgctaatggttcaaacattgaacatgatgaaagttcatcatcatcatgggaaaggagggtgtcaataactcagtacaagtcattgtgccacagccacgacataggaggaacaagtatggctatggtggagtgctgcgtttgtttgtgtcgttttgaagccaatcaagaggtcagtgagttgccttgcaagcattacttccacagaggttgcttggacaaatggtttgataacaaacacaccacttgtcccttgtgccgttccatcgactagacagacatatacatacaaaggttgattaattaccgttagagatatagctagctagttaattagttgttgctatatactgttaactggttatagcgttccatatcctagacacatttccaaaggttaattagtttcaaatttacaattagagctagccagctagctatagttgtagttgttgctatatattgttaacttgttatagtgaaaagaatcaatgcctcttttcatttctttacttttagatttgtacacctccttcaacccaactcagtttctctatgttttagcttttatatatggaacataatgagagatgacattgcatt

SEQ ID NO: 45434 - DNA, 154 bp, Glycine max
  Clone ID: PAT_MRT3847_141026C.1
gggataaaaaaaccagctttgtcttattccttgcacgggttggctttggcttattttttcttttcctctatctgggggccaaagctagccttcaatattggcaattcaacccaagaaaagatggggaaatcaactttaattacttgcaatcttg

SEQ ID NO: 45435 - DNA, 332 bp, Glycine max
  Clone ID: PAT_MRT3847_141027C.1
aacaaatagatagtaaattaatgaactgagtacacggagcagtaccggtttcagtgcacccgaacttggatgtttcccattacatagaacagttagagcaagattataatacaaattaccagaaacgcccaacaatccttcccaattatttcacaccaaacagtcaaaggaactttattccctaaaccgcaactttcccaataacaggaatgttttaaccactgtttacacaccctttacttgacatcatcaccaatcaccaaatatatagctataaagttacagacacctgatgctagatcacacacaggatataagctgcaatactatcc

SEQ ID NO: 45436 - DNA, 498 bp, Glycine max
  Clone ID: PAT_MRT3847_141028C.1
cccacactcacactcactccactccattgagaaagttggttgcagcagcatgatggaggaagaagaagaccagcagaagcttccagattgcaacatgcagtaaagatgcagttagtttcgacattgaggcgctgtcaggttctgtgggttgaaatcaatcacttcatttcaaacttgcaatattatataatgtttgaagtgttggaggtatcatggtcaaattttttggctgagatggaagtagccaaggatcttgatgatctacttgctgctcatgaaaaatatctgcattctattgtagagaaatctctccttggagagctttcccagtctctttacaagtcactatttgtaatttttgatcttatattacgttttcggagccgtgcggatcggttgtatgaaggtattcatgagttgcaagcaaggtaatgatcttactttttcctttgtatacctatccaccctggaaaacataaatatatgccacgtctgaca

SEQ ID NO: 45437 - DNA, 746 bp, Glycine max
  Clone ID: PAT_MRT3847_141029C.1
cccgcgtccggtgagtgtgtcatcatcaagaaggacgcatatgaagaatattgaggtagatctatgacagatcactgacgcactctgtatcatacggtgacgcagtaagttacgaggacacgcaacggtgcgggatcaagaagccaactgtactactaccagattcaaatggccgttctaatgatacaggcgcctttcctcctaaaaggacagcgcctaacgttcaggcgaacgatcacaatgcaaatgattgtacctacgctaactgtttcgttgcttaatgccccaagaagatggctggtccgagtgccacagcaccaaactgtagtactggctcgcctgaggaggagattgcgatatctgaagtgcaaaacacgctggacagtgaatagtttagcccgcctgctgcaagtacaaggagcactactagatcactcttgtctacactattccatcctagatattgacgtacgtgaaaagcatggatcccacacacagattggacatgctgaagctgatgcggctggtctgaaagtatcaccaaacgctaacaacatgctctcacctatctcataaacagttcacagccacactctcctttttcattattagagactctgcgacatgactagactatctattatgatgaagatgattggactgtcgcctccttgtatcctaaatttggacattttgatggcttattgctaacaaagcaagtgatacctgcattataaccatctttg

SEQ ID NO: 45438 - DNA, 347 bp, Glycine max
  Clone ID: PAT_MRT3847_14102C.1
ggctcgagcgacaatctgataaggagctcttgcacgggtgctcaccaacaatagacgctccaatcccttaacataccaatcacgcacaccctctcaggcatgaatatgcccagccatatctttgatcatgcatcactagattctatagcacacctcaactttttgacaatctgtacacagaagcttgcggaaccctgaaactctacaccaccctgatcgacatggcttgcactaccccataagactacagcgacgtgacctactaccttaccccggctccaaagtctacatatgcgagctcatatagaggctagctggcacagcggatatttctgactaccgtcgat

SEQ ID NO: 45439 - DNA, 343 bp, Glycine max
  Clone ID: PAT_MRT3847_141030C.1
gcacttgcaatcccttttaacatttagggcaaggttcattttcgcaccaggccccagttccagcggttttcctcttaaccaaccacaggcattccaagtagattacggattgcctccacagtgccaaaaggtcgaactcatggtcgtgcagaatcattaggatcacaaatttggaaacttccacggcaacaagctcgacttcccactacacacgttatatgtgtgccacctagaaagcggataatttgaccgtctctctcctcacatatgagtgttcaggacatcttaaggtaaatggcgagagaccccaaagattccaattcctgacacctctgaactacgt

SEQ ID NO: 45440 - DNA, 530 bp, Glycine max
  Clone ID: PAT_MRT3847_141031C.1
ggcttatatcaaatccatcttttgaacctttatatatatataccgaattagtttgagaatcacaagaataatagaatgcaacccaagttcgtcgccttaacctttttggtgttgtggtcacggtggagctttgagggtgcagtaggagaccctcaactctttttactagtatcagagtgtagtggattcggggtacccaacttgtccaacttctaccaaaatctaaacgcaagttttgcagtacctgagagcacaggtgagcaacaatagcaagcactttgccacggctcaatcagtcaccggaacaagccctgtctatgctatgtttcaatgcgtcaactacctctccatcactgactgcgccacctgcttagccgccgccgccaccgaaatccgcaactgctccaccggaatcaacagcggtgcccgtgtcgtttatgacggatgcttcctcaggtatgagagcattgacttctttcaagagaccactctggcaggcaacagtatgagttgtggaaatcagacagcag

SEQ ID NO: 45441 - DNA, 380 bp, Glycine max
  Clone ID: PAT_MRT3847_141032C.1
ctgggggctttacagagagtgatttcagtgagtgatcggcgttcactggatctcatcatcatgagccctgcctattgaggaagattccgatcagaaacatcatctgcctatggcctgaataggctacttaccgctacacattgaatgcggccttggctgaactgatctcaagctacatcttcatgttctacacctcatactccaacatcttctacgtcaagctaaccgacagcagcactcacatccattacggcctgatgtactgatatatatgccattcgtttgtactactaaaccccgtgttcgacaactccaacatctactgcaggctcttaaaccccatcgtcaacttcagtgccttcatcaacaacaccatcatc

SEQ ID NO: 45442 - DNA, 1418 bp, Glycine max
  Clone ID: PAT_MRT3847_141033C.1
ctacatccttcaacatagacataagccgctctcttctgacgtgtccctcaccttatacaacaaaggtccacttgatccccttcaactaaaccacaccattcgcatcacaacacttggttgtttgttaccatcttccaaaaatatcatgctcctaacgtaaaaatcctcggtttcaacgttcaactgcgatctctaaacaaaaccatggcatcactctcaggcatttgctcctcttccccaactctcaaaaaattcccgaaccaatccccatcgttgaccgaccctctccgcaaagaccacgtgtccttccccgcccgccgcgccgatcggactctcagcctcgcgccccctcctcgtgcggtggctcgtgaggtttccgacggagcattggcggcgatggcggacgggttggagaaagatccgcgcgcgctgtggcggaaactttacgtggattggctgtaccagcacaaggaactgctacccttggaggacaaataaaagatctggtgattctttcatatgaggaccgcttggtattatttagtagatacttgccacagctggtcatggagtctctaggccaggagattgacttgaatggtaatcgggttaatcaaggaattagtgtctatggaaataaaggaagcaccgatcagcatgcctacattcagcaactgagggaaggtgtgcacaatttttttgtgacattcattgaggtgctacgcgacagaccacctggtcatgattgggagcttgaaccaggtgtcacatgtggtgactacctgtttggtgtgctacagggaacaaggtcagccctgtatgccaataaccgtgaatccatcactgtcacagtgcaagaagtgacacccagatcagttggtgcccttgtagccctttatgaacgggccgttggaatatatgcttcgcttgttaacataaatgcttatcaccaacctggtgtggaagctggtaagaaagcagcaggagaagtgttagcacttcagaaacgggtattggcagtactcaatgaagcaagctgcaaggagcctgttgaaccattaacacttgaagaagtagctgaccgttgccatgccccagaagatattgaaatgatttacaagatcattgctcatatggctgccaatgacagagcactaattgctgaaggtaactgtggttctccgaggagcatcaaggttttttttggggagtgtaatcttgatgaattgtacgcttgagtagtagattaatgaaatcctcattccataatggtattataagttgttttggttgttggatctctccatctacaatgaagatgatttttttttcttctttaaatttaaatttatttggacggacttttttgaaagggtagttgagttttggtgatctatttgagtcatatttaatttaat

SEQ ID NO: 45443 - DNA, 287 bp, Glycine max
  Clone ID: PAT_MRT3847_141034C.1
gaggaaaaaattgaggtgttttacccaacccaaactgtaccctgccttctgcttttttaaaacaatacggattagaaaaaaatgcttcttacatagctggttgacctcactgcttttattggagctcttaacgatgggaattctcaaagccactatataaaaaaggagtggtaatgggtaggaaattgaaacttccccaactccttgagggtattttagtaggcgccggataaatgtttagttgcttggtccatgatttatattccgtcgataaacctgaaaacctt

SEQ ID NO: 45444 - DNA, 558 bp, Glycine max
  Clone ID: PAT_MRT3847_141035C.1
ggggaaactgatagtaggggcacgatcttcttattgaggacttgcaaagggaccttaatgctagtacttcaaatagaagctgtattacaagcagatctatctgtgaaagtcgagatagaggatgaccttaaaagaccacttgctgatataaaacaccaataacatgatgggaatatgagcttacaaacatgcggaggctggggtcaaagatgaaaaagtatgagattaatgtagaggacacgttaactaaggatgtgcaaaccacggttaaaaatgggcatgcaacatctaatggatactctcatagaaaacattaccacgagggtgaaattttacggagcatggaagatctgattgcattaaaggaactgagggctcattatcaaagagaacgaagaatatgcaaacatctagagagtcatatttttatattgaaaggtgaagatattgctggtctggacgtcatggcccttgaacaacttcaatacctggatattgaggcaataacagagatttggcatgctaagtatgcaaatcacaactggcagcatcatgcag

SEQ ID NO: 45445 - DNA, 124 bp, Glycine max
  Clone ID: PAT_MRT3847_141036C.1
cttgatccggtttatccccacaaactatttcaatttaatgagattgattcaagttttgtaattacaataacacaatatgacatccttacaacatttctaatttaatctcatacaccaacaattt

SEQ ID NO: 45446 - DNA, 325 bp, Glycine max
  Clone ID: PAT_MRT3847_141037C.1
tgtttgatggtatctactagttttataactttagtaattctagatctaatactgtcaacgtgaccccgtcttctggaaagtattcattcattacataaaaggtcaacacattctctaactctttctttcattattcatgataactcttcatatcacactgccttaattcctgctactcattattcaaatatctgccctatctactttcgattttttgatagtctcctaccattttaattacttattactcataattaggtttcctttccatatatgtagccttataaactgttaccactttcatactatatcatcattctctcat

SEQ ID NO: 45447 - DNA, 682 bp, Glycine max
  Clone ID: PAT_MRT3847_141038C.1
gtttgtggggtcccttgccttccaagattgacaggttctggtcccttgaagtgatgaactttagctcaaacttcatttatggggaaatttcaccatcagtttcctctttgaagaatctaaaaagtcttgttttggctaataatcttttcaatgggagtgtgcctgatcttggaaaactagcttctcttgaagagctcaatttgagtggcaacaaattaggccctgagttcccttcattgagcaagaatcttgtgagggttatcttgagaaacaactcattgagatgtagaatccctcctcaactcattcatgtttataaacttgagctgtttgatatctcttccaatgtgatatttggaaatatcccatcatttattttctctcttccttccctaaagtacctaaacttggcttcaaaccaattaagtggctacctttctttgaatgtgtcatgtagttcttctctcacttttgttgatatctcacacaacctcttggtgggaacattgccatcttgtatcggttcaaatgcttcaaaccgaacaacactttattatgggaattgtttggtaaacagaagcttataagtgatcaatatccatcttcttattgccagaaagtggagtccttagctgttattaagccatcaattaaaagccagaagagggaccagagatgcaac

SEQ ID NO: 45448 - DNA, 369 bp, Glycine max
  Clone ID: PAT_MRT3847_141039C.1
gaattgccgcatgcatccacgcatgcgtccacgcattcgtccacgcggttcatgaaaaggtgctattctgctttcccaggcctatgtgttacatcggataaaattaataccaatccataatcattgctattaacaccatgtttgaacatccaaaagagatccttatccagcacaccatttacagagacactcctacttctttcaactgacattactgctctcatactgctctcactaccgctagatcaaagccaaatctgtcaccatatgtgtatatgcttaatgccaatgatgcttctcatttgctttctttgaccttcactggattgaatttggcatacatatcactactgtactaaatgtcaaaat

SEQ ID NO: 45449 - DNA, 301 bp, Glycine max
  Clone ID: PAT_MRT3847_14103C.1
ttatggtggagatctcggctgtgaaggatctaagatgacttctaactacctcaaacgaacagtctcttacttcataggatttggaaattgggctgatgacaccatcaattttgaggcttatccccacaagttggcgcattttggacagattcaggaaaaagtggtaacgaaatctcacaggaggaacttgttacaggcttgtcaaactaggtgcgtcctgcagcaacactgacagctgaggggtgatcatatctgtatgctatggtacaagatatctcagtgcctacaataccaagtgatt

SEQ ID NO: 45450 - DNA, 110 bp, Glycine max
  Clone ID: PAT_MRT3847_141040C.1
ccagtgagatatcccactggatgatagaaattgaagagcatattaggaatatgcctctgcggggtgacctgctatgaaacgcgacatctgagcaaggagataatcggaaa

SEQ ID NO: 45451 - DNA, 1190 bp, Glycine max
  Clone ID: PAT_MRT3847_141041C.1
agtccaggcgtcagacggctgcgaaaggacgataaaaagggatactttcttatgcaactggtgttggaacatttccttatctatcttcacctccatcttttaacagttcccctcgaaacttctgaagatgggtggcattgcattcggacgcttggatgattctttcagtttaacctcaatcaaggcctatattgctgagttccattcaaccttgctctttgtttttgccggtgttggttcagccatagcctatggtaagttgacatcagatgcagcacttgatcctgctgggttactggcagttgctatttgccacggttttgcactctttgttgcagtttctgttggtgccaacatctctggtggccatgtcaaccctgctgtgacttttggattggctcttggtggccacatcaccatcctcactggcttcttctactggattgcacagcttcttggctccatcgtggcatgttttcttctcaactatgtcacaggaggcttgccaactccaatccacagtgtggcttctggggttggagctgttgaaggagttgtgaccgagatcatcatcacatttggtttggtgtacacagtgtatgccacagcagcagaccctaagaagggatcattgggaaccattgcaccaattgccattggtttcattgttggtgccaacatcttggcagcagggccattctctggcggctcgatgaacccggcacgctcctttgggcctgcagttgttagtggtgacttccatgacaactggatctactgggttggacctcttattggtggtggtttggctggccttatctacggcaatgtcttcattcgctctgaccatgcacctctttccagtgaattttgatctgattcaagtcatggcctttgtaattcatgtttctttctttctatctctcttttttttttttctctccattctatgctttttttttcttctcttaatttatttgtaaagtgtgctactactgtttaatttggtgagaattcaagaggttggtggtgtgcagaagtgctttatatataattatctggggtttacttttttggctttccttttaattttggatcccgtgcatgaggactattgtaccactggcatttatcattatggagaagttcacacttcctaaccttataatactgaaaattaattaatgcat

SEQ ID NO: 45452 - DNA, 671 bp, Glycine max
  Clone ID: PAT_MRT3847_141042C.1
gattgcacagctttttggtcccatcgtggcatgttttcttctcaactatgtcacaggaggcttgccaactcccaatccacagtgtggctcttggggttggagctgttaaaggagttgtgaccgaagatcatcatcacatttggtttggtgtacacaggtgtatgccacagcagcagaccttaagaagggatcattgggaaccattgcaccaattgccattggtttcattgttggtgccaacatcttggcagcagggccattctctggcggctcgatgaacccggcacgctcctttgggcctgcagttgttagtggtgacttccatgacaactggatctactgggttggacctcttattggtggtggtttggctggccttatctacggcaatgtcttcattcgctctgaccatgcacctctttccagtgaattttgatctgattcaagtcatggcctttgtaattcatgtttcttgataataaaaggaggaaaagcagttcttgcttttctttctttttctatctctctttttttttttctctccattctatgcttttttttttcttctcttaatttatttgtaaagtgtgctactactgtttaatttggtgagaattcaagaggttggtggtgtgcagaagtgctttatatatatttatctggggtttact

SEQ ID NO: 45453 - DNA, 1202 bp, Glycine max
  Clone ID: PAT_MRT3847_141043C.1
tcccggggtcgacccacgcgtccgtacggctgcgagaaacgacagaagggtacggctgcgagaaacgacagaagggtacggctgcgagaagacgacagaagggtacggctgcgagaagacgacagaagggtacggctgcgagaagacgacagaagggtacggctgcgagaagacgacagaaggggatatttctaactcccaacacttccatatcttatcttctcctcctccatctttgaggttctcacggaaacttctgaagatggctggcatagcattcggaagcttcaatgattctttcagtttggcctccatcaaggcctacattgctgagttcatctcaacccttctctttgtttttgctggtgttggttcagccatagcctatgctaagttgacatcagatgcagctcttgatccaactgggttggtagctgttgccatttgccatggttttgctctcttcgttgctgtttctgttggagccaacatttctggtggccatgtcaaccctgctgtgaccttcgggttggctcttgggggccacatcaccatcctcactggtctcttctactggattgcacagcttcttggctccatcgtggcatccttacttctcaagtatgtcacaggctatgacactccaatccacagtgtggctgcaggggttggagcagttgaaggagttgtgaccgagatcatcatcacatttggtttggtgtacacagtgtacgccccagcagcagatcctaagaagggctcattgggaatcattgcaccaattgccattggtttcattgttggtgccaacatcttggcagcagggccattctccggcggctcgatgaacccagcacgctccttcgggcctgcagttgttagtggtgacttccatgacaactggatctactgggttggacctctcattggtggtggtttggctggccttatctatggcaatgtcttcattcgctctgaccatgcacctctttccagtgaattttgatttggttcaagtcatggcatgtgtaattcatgtttcttgatgataaaaggaggaaaaagcagttcttgtttttctttctttttctatctatctccttttttttcttcttcttttaatttatttgtaaagtgtgctactactgtttaatttggtgagaattcaagaggatggtggtgggcacaagtgctttttgatc

SEQ ID NO: 45454 - DNA, 613 bp, Glycine max
  Clone ID: PAT_MRT3847_141044C.1
ggacagaaaacgatcctaaaactgcagagagtggcgaaatggcgactaggagcaaaagagaagcagagggtgttggtgatggtgatggtaataagatcgtgtggaacgaagcgcagcagaggttcgagacgcaggacaaggaggcgttcgtagagtacgccctgaaagaaaaagggaaggtcatggtcatggatttgatccacactttcgtgcccccttccaagagaggccttggcttggcttcccacctctgcgtcgccgcctttcagcacgcccaatctcactcgctatccatcatccccacctgctcctatgtctctgacacatttcttccccggaacccgtcttggaattctgttgtgtacacagagggcggcaaatctaatatctgagctcaccaagctcctatctgtgcttcttctgagtaaccatttgaacggtaatacctggtcacatattgttaattggctctgttgctaaataatacatgtacttagcctccaacagtgttttcttgtaatatataacttcccatttataaaaaaaaacttatgattgttacttgccttagtgcattattacttatggcaaaacgcaaaacatactgaacatg

SEQ ID NO: 45455 - DNA, 852 bp, Glycine max
  Clone ID: PAT_MRT3847_141045C.1
gagcgaagaacaagcaggggccgagggaaaagaagaaaacccagaatcaaatcaaaaggtaaaaaacaaattaaaagaaaaagggaaaagtatactacgcagaagaggtggttcaaagttcaatggctgagaagaaggaaatgattccgcaacaatttgacatcgatgccaaatgggacgcctgcattgatctcaccgtccgtcgcttcgtctactccgcaaccgccggtgcatttggcggtctcctatttttcaggagtcctgtgactcgatgggcatctattgcttttggtgctggagttggaattggatctgcatatgcagaatgttctcgtctgttcgatggacctccaacaaatttacccttacctaaggtctccgaaactgctactcaggactctgattagaagccataagggatcctggttcctggacggtggtgaatcagaattttcttgtgattgttgatgttccttacagcattattgctcttcaaaatgttgcactaccatgatttcataaatgaacgggacgtatattttattcctaagcttttacgcttttgatttcctgtaatcttaagtaatgtttatgtggagaaggattaaaaaggaagctttcttcagatgtgattttccatttgctctactttgaatccaatctaacttttaagtatattctgaaaaaaaaaaaatgatttaactgaatttccaggcaatgattcaatcagtttaattggttaaatcaaattattcaccaagatatattgataattaatgtaaaatattaataaatttaatgacagattataatgcatcgaatgttatcctctaaaaaaaaaaaagagggggg

SEQ ID NO: 45456 - DNA, 742 bp, Glycine max
  Clone ID: PAT_MRT3847_141046C.1
ggacaagcacgcggtgggggaagggggaagaagaaaacccagaatcaaatcaaaaggtaaaaaagtagaagtatacgcagaagaggtggttcaagttcaatggctgagaagaaggaaatgattcccaaacaatatgacatcgatgccaaatgggacgcctgcattgatctcaccgtccgtcgcttcgtctactccgcatctgccggtgcatttggcggtctcctattttttaggagtcctgttactcgatgggcatctattgcttttggcgctggagttggaattggatctgcatatgcagaatgttctcgtctgtttgatggacctccaacaaatttacccctacctaaggtctctgaaactgctactcagaatgtgccggattctgagtagaagctacaacggatcctggttcctggttcctggacagtggtgaatcagaattttcttttgattgttgatggttccatacagcattattgctcttcaaaatgttgcactaccataatttcgtaaatgaacatgacgtatattttattcccaagcttttacgcttttgatctcctgtgatcttacgcaatgtttatgttgagaaggattggaaaagccaaggaacctttcttcagttgcgattttgtattcgctctcctttgaatccgatttaagtatattctaaaataggattggtgagttaactgaccattttcaggcaatgattcaatcagtttaattggttacctcc

SEQ ID NO: 45457 - DNA, 644 bp, Glycine max
  unsure (1)..(644): unsure at all n locations
  Clone ID: PAT_MRT3847_141047C.1
attaaatttcaggttgtgctgccagagggatccaaagatcccactgttgagattccttttgaagtgaagcaacatctagagatcaagtattcataccttgatgttgtcggcagaactgtggtggttctagaaaaaagaaatgcagttcctgagcataatactcctttccaggtatttcctaagcccaatgtgaacaaataaataaaaatttctaaaattgatttggaatgtgggcatttcacatgttctaacttctaagagcaagaaatttgtttgttgcaaccccttaatcaaggattaatgctgcatttaatttaatgtgatgatgcaacaaaaattatcaacaccatgttaatgaccaaagaaattatactaggggcatttagaatatcctttatcctttatttggaagaattaattcctagtaatgacagtcctataaatgagacctttaaacaatgtcaggtatatgctaatgaatggaggtctaatagcatatgaaagttgtgtttgacatgaagctgtttatttatcctttttggccatgttatgccttgngttgctcatgattttgggcttanagattacaaatgatgtgctggaaaacatcttcttagctgctcttttctctgctcattattttt

SEQ ID NO: 45458 - DNA, 683 bp, Glycine max
  unsure (1)..(683): unsure at all n locations
  Clone ID: PAT_MRT3847_141048C.1
ctatctcgatcgaactgtccaaggtcctgtcacgttgtaaatgttaggcgttggcaagagtggacaggaggtgaacggagttgtaagcgaacgtttggaaggctaacgtagtagccgtgcaccgacaaatattattattatggttattattataacccgtcagcagcgcttgcctcaccggcaggagaacaaccacacaactattataacgttagtgcgcactatttggcccccaaattgagccagcgtgcgtccgtgcattccgcgtggagcgttggcgtagcgaccaacgtaggaccgttaacgaaacgatttacacgtagcgtgtataccgtataaccggaccaacaacgaccagggtccaacgtaatgatcggcccgtgccccggggcgtggctgcaatattacacaaaaaccaacggaacaaacaacagcacaactgtaccaaacaactattattagtgcgggcctgcaatagcagaaagaggtagagagaaggaagaggtaactgttaacgagtattacgttgcgcgagtgtgagtagagtggttagggtgacgcgcttgggcaagaaaggtcgcgtcactggcaaaacgcgcgaggagcttgagcgcggatggagagagagaggcgtgagagagaaccagctgacngcctgagagccagagacagcgaacgagggc

SEQ ID NO: 45459 - DNA, 325 bp, Glycine max
  unsure (1)..(325): unsure at all n locations
  Clone ID: PAT_MRT3847_141049C.1
atttgattgtcattatatattatttctaaattttacaatgtgcataagtaaaagtcatcaacttatatcgacaggctctaactataggtaaagacagaaacttntacctacaacctccaactataaaagtcattaacttatgcctaacattgaaagactatagatacaaatcattgacttgtacttatatgctttaatcataggtaaaaaatcacataataaaaaactcacattgctcgttatctattgagatgctntatattttgaaaatataattaatattattattcaatnatctagataaaatgtatatcaattgtatcta

SEQ ID NO: 45460 - DNA, 259 bp, Glycine max
  unsure (1)..(259): unsure at all n locations
  Clone ID: PAT_MRT3847_14104C.1
cccacgcgtccgcccacgcgtccgcccacgcgtccgtacggctgcgagaagacgacagaagggaggaaaatgccggtggaattatacccaaggtgatggagacaatattcaagagggttcagactatgaaggaatcctcagagtttttgattagggtatcttttatcgaggtaaacaataatgcttgatgaattctctctgtaattgaaattgagcttttgaaacatggaagtttgaactgctaagatnnaannaaaaa

SEQ ID NO: 45461 - DNA, 298 bp, Glycine max
  Clone ID: PAT_MRT3847_141050C.1
attaatacaggagtgcatttataggtgataaattacataagcaaataaaatacatgggttattgacttattcagtgcaaaaaccgtaaatcaaactattgggtgattctaataccatttcttaacaagttattatacattaggcatgacgcagggtatgctatatttttcttgagtgtctcatttcatatatctacgacaattacgtatcagaaaaaaatatcacctagaccgtgatgtatatgattttaccgccttcatatattcgatggctgtgtccggaacattcaccacacaag

SEQ ID NO: 45462 - DNA, 307 bp, Glycine max
  Clone ID: PAT_MRT3847_141051C.1
tttcaaaaactgattttattgggaacagggtatgatttatttaactcaacaataaattacattgcaacttggctgttgccaattgattacagagttttgacataaacatacatatctggcatggcgttgagctcaattaaagaaacttgctcacaaaccaagtaacgtgactggaacatacatttcttggataccaagttacacccgcacattaaaatcatttctaggattactggccataacacagcccttgaccaaaaggtgccctcttatcctaataattttcgacaggagcagttttaacccc

SEQ ID NO: 45463 - DNA, 339 bp, Glycine max
  Clone ID: PAT_MRT3847_141052C.1
atggagaaaaatgcagaagcaacaatggagcttgcttgggaagcttctatggagactggatctttgagcttcaatgagccatgggaagaggaggagcttcaccaccaagagagtgtcttggataagaaacttagagaggaaacttcaatggaggaagagaatgagggagagagaggggtggggcacgaaatcgaaggagaaaaagagggagagaacttgaactttgaaaatgaaaggtgtgactttagcacatgggaaaggaatatgccacaagaatatgctaaaggaatattccaagaatatgccaaaggcatcttagcatattccatgagaagctag

SEQ ID NO: 45464 - DNA, 656 bp, Glycine max
  Clone ID: PAT_MRT3847_141053C.1
cggtccggaatacccggtcgaccccgcgtccgcgcttacatcttatgagacaccccagagcccgcggcttaataaacgctcttctgtgaaaacccccatttcttttcttctttctactgctctttcgctttgtcgatcttccatcttaggccgctgaaggtgagagggggcattggatcccccttttcccaggccggggattcaggttggaaacgcgtggtgggagctttactgcctgcaacacggtgttcagcctgacgggcagatgccaagggacatgaccgctggaggaggtgatgaggctctcaacaccgtcttcagtgaacctggggcgggaaagcacgtgccccgcacgatggttggggatggtgaccccactgcggttgatgaggttgggactggggcatcccggcgtctgttccatgctgaggctgtggttgggggaagggcgggtgcgggggactactttggcgggggggcctgtgccgttgggaaggggcattgtgggggctttggtgggggccgcgtggagggtagtggctggcggctggggcgagggtggcgggggcgggggggggggcgggggcgtgggggcggggggggacgcgcggggggggcgggggggggggtggggggtggggggggggcgggggggg

SEQ ID NO: 45465 - DNA, 459 bp, Glycine max
  Clone ID: PAT_MRT3847_141054C.1
agagaagaagaagcacgaagacatcttcttacatattgatgaagggaaaggtgtctactatggccaagtcatcttccttagctatcacattgatcggcgcggccacctgattgggggacacgagtcggtggtcgacagccgtgaacggcgaggaccaccacttgggaatgcaatggatatccagtacgagcaaagggaccatcgctagattgcctagaacaagatggagaactagttgcattagaagatcaaccgtcgcatgttatccaccaacaggctcatcagatacgtagcgctagcagaggaacactgctctctagttatccccgaatgcctgatactacaactgtctactcgaaccacacgccaatccttacagtcgcgcgtgcatgcccatcacgaggtgcaagagctgaattttgctttagtttaaaaatagattttcatgatgtaaatcgt

SEQ ID NO: 45466 - DNA, 534 bp, Glycine max
  Clone ID: PAT_MRT3847_141055C.1
ccacgcgtccgctctctagtaagggggacacaggatggtaatgctgcaatgcgtcagtggtgcctctggctgcatggccagatccagcgaaggggagagacgctcgcatggatggcattcgtacatcacaagaggacattacagcgcgctgatactgaggttatctcttattttgccatattcctgattcgggaacactttggatgagcgtgctcacagttctttttgcaagaggcgaaggaagaggggaattggtgtacccctatcttcacgcatgaagttttctccttgaatttcttgcgaacctcacagggctggtagcacgcaatgctctgcgtctatcttacaaacttactagacacaccatcatcacgctagaagaagatagatgagaagcggtgattgttcagctcagtgaataaacttatgcatgacattagtatagacagcaaggattgcggtggctctactcggaatggacacctgagctattgtcatggaaaagaaggatcgtactgtgagctcgctgacacc

SEQ ID NO: 45467 - DNA, 329 bp, Glycine max
  Clone ID: PAT_MRT3847_141056C.1
ctcgaacatgatcccatcaatgaatcaagggagggtgcaatgggtaaagacctacaaagcatgtgcccatatcctaaatataagaactcgtattgcttaacattgcgcacacttacaaatttattctacgtcaattgccctgtatgttcccaagagcaactaacgcgatcatggtaccttacatgacccacacactttctaacatagctaatggatctccattcttcaccctggtgacatcattttccctatttgtaggcacctatgaacaggtgtattgccagtgctcaatggcagtgaaattcaacaatcccgcgaacagataatag

SEQ ID NO: 45468 - DNA, 488 bp, Glycine max
  Clone ID: PAT_MRT3847_141057C.1
tcctacgcgtccgcccacgcgtccggccatgagtgagagatagagacagaggagataataagaatttggacattccattttgaccattgttcacaacaaatcaagcatccaccgtgacccaactcttttctctttccttaacggttttctttctccgatcgccgctccacagagatgtcgcgccagacgacgtcgtctgctttcactaaatcgaagaccctcgacaataaatatatgctgggagatgagattggaaaaggagcttatggtcgagtttacaaaggtttggacctgaagaatggagattttgttgccattaaacaagtttcttgggagaatattgctcaagaggatcttaacattatcatgcaagagattgatttggtgaagaatttgaaccacaaaaactttgtaaagtattttggatcttcaaagacaaaaagttacctgcacatagttctttgagtttgtggagaatggctcacttg

SEQ ID NO: 45469 - DNA, 609 bp, Glycine max
  Clone ID: PAT_MRT3847_141058C.1
gcgagccggagctctatggaggtggcggcgggtaccaggtggcggctgcagcagctactcctctgagctgagactttcaagccggccgcgtctccttcctcccccttccctcccccttttttgttttccgttccccttccccctcccttccccgtccccgacgaccggatccagaggaggcagggggggtggcagctgctgagttctcggtgaaggcttttcatttctaccatcccctcccctccccaccccatccattaatattattcttttgaagattcttcgttgtcaagccgccaaagtggagagtgcgattgcagaagggggtcttctcgtttcagtgcttcttcgggcggaggaggaagtaggggtgcacctcagcactatctcaagactgctggcaacagcgagttcctggggaaaaccccagggcaaaacgctcagaaatggattcctgctcgaagcactagacgagatgacaactgcgcggcaaacaactccggtgatgaaaaagaacgacgtgatgcaatcttggggaaagtgagaggcttgctaaatgagcttactgctgaaaaggtgggcaagctatgccttgagctcctgagtggg

SEQ ID NO: 45470 - DNA, 498 bp, Glycine max
  unsure (1)..(498): unsure at all n locations
  Clone ID: PAT_MRT3847_141059C.1
ggcatgtccaacttcttacagctatgcttatgatgatccaactagtattttcacttgttctgggacggattatgtggtagccttctgtgcttccaggaaacaacaggtatgctcttatcatagtaacaagcttcactgcagtggatcactagggttgaaatcgctaactggaaggtggtggatcgtgatgatgataacagtgttttcggtgcttagtttgtggattggattctaggtctagaccatgatcaaagttgattccactataagagcccgattcattaagtttaatcaatttgatgagtttgtgtaaatggaacccgtttttatctctttttttatgaggatgttccttacgaaggctcttatggacgggtttatttttagggaaatttctttggaaccccggtaaaaaactgtatatgggaagctgttcatatttttctttaaggaaaacagtgatgtgcacttggggtttnnnnnnncccccccaacccc

SEQ ID NO: 45471 - DNA, 397 bp, Glycine max
  Clone ID: PAT_MRT3847_14105C.1
acttacaacaaattattttcttcctccaactccaaatacacccttggatagcccacatgatattattggataccctaaaatgttgacacaagacctacaagcgtctatatgggttaagggacaactgctgcaagagctgggggagcatctactataggggctccctcaccaaaggcaccgaattagaatgtgataatggccttgaacaaggcgtgcgggggctcacaaccgtatttgttcaaacccgaattatcaaggagagcgagctttttcctaaacccaagagcaacagtgcccacagccaaggcatattcaaacagcccatattgcgcctgccacggaagtgcccctcgaataatgtctggagttccagcagcgaataaaaagaccaccaacc

SEQ ID NO: 45472 - DNA, 200 bp, Glycine max
  Clone ID: PAT_MRT3847_141060C.1
aaattagaattttttattcttcaatgggccaaacagggggcgtgacattcgagcgcagagaccactttttcacaattcctacgcgaaccatttgtggaaaaaatctgagttacttgctgtaaatggtgattaatgggaggtcaaatgggacaaattttttttattaatcgatcaccacccaacagaatacgtgtaataaa

SEQ ID NO: 45473 - DNA, 500 bp, Glycine max
  Clone ID: PAT_MRT3847_141061C.1
agcgtccattgatagggaagctatggatctcactgaaagaggagacagcagtacgacactgctgataccatctcaatatgatacgttatccatgcgcaactaaacacaccacttccaaacgacgcgcagggaaaggaatatgtgttctaggtttggagattaacaatatagcgagcgacgacactgaacaagaatataacaagctgtatgccaacgtgaacgctggtctggagcatgcttcgtaaatcccatgaatgaatgctccaacaggagaccgtgggcagagatcgcaaaaagcgaccgtgggtttgatagagccgatgctatgaaggcactgataatcgtgaacattgagaggcacaagcgcagatgagaaagcagtatgacatctataccctaagctagaaggggtgctgagggtggatcatccaaatcaaaccaatatttgccacacaaagcttcatataacgggacaaatgcaatgctatcttggcaaagaa

SEQ ID NO: 45474 - DNA, 539 bp, Glycine max
  Clone ID: PAT_MRT3847_141062C.1
ccacgcgtccgattcatcattccctagacacagttctgaaacattccattccatcttacaatgccagaggtttatactgtgaaggttgaagagggaaggcttgcaactgatggaaagccatcagcgggtcctgtctataggagcatttatgctaaagatggtctcttggaggttccttctgattttaagtccccttgggatttcttcagggactctgttaagaggaaccccaacaacaatatgttgggtaggcgtcaaaaaaccgaatctaagttgggttcctatacatggctcacgtatcaagatgtttatgatgctgccatgaaaatgggttcggccataaggagccgtggtgtcaatcctggagatcgttgtggcatatatgggtccaactgccctgaatggatcattgcaatggaggcttgcaatagctgtgcagtgtcatatgttccattatatgacacccttggtcctaatgcaggggagtttatcataaaccatgctgaagtttcaattgcatttgggcaggggaaaaagat

SEQ ID NO: 45475 - DNA, 749 bp, Glycine max
  unsure (1)..(749): unsure at all n locations
  Clone ID: PAT_MRT3847_141063C.1
ccacgcgtccgattcatcatcccctagacacagttctgaaacattccattccatcttacaatgccagaggtttatactgtgaaggttgaagagggaaggcttgcaactgatggaaagccatcagtgggtcctgtctataggagcatttatgctaaagatggtctcttggaggttccttctgattttaagtccccttgggatttcttcagggactctgttaagaggaaccccaacaacaatatgttgggtaggcgtcaaaaaaccgaatctaaggtatcaacttcacatattttggtgctttttaaaaaaaaaaaagtattttggttccatgcaccatttgttaggatcaacttttttttttcccctgattaaaaggtgacacaacacattaacaaaaataatactctcattctttattgttagactttctgcttacatgtcactttttaattaacttgactacttgagggaacataaaaatgataggaaatggagacaagttctcttattatggatatcattaagagtctaaactattggggaaaaaaaataattctctcaaattttgaaaacttcatgtgaacattgaggtgaatttaacagttgggttcctatacatggnctcacgtatcaagatgtttatgatgctgccatgaaaatgggttcggccataggnagccggtggtgtcaatcctggnagatcgttgtggcatatatgggtccaactgccctgaatggatcattgcaat

SEQ ID NO: 45476 - DNA, 157 bp, Glycine max
  Clone ID: PAT_MRT3847_141064C.1
cactcgggtggcgacgagcgacgatgaagacggagcaccgccgcgtccagaacgcacgcggaacaggatgaggcctatcgaggacgatgacgatgatgagcagaatgatgccggggaagagtaggaggtgccggagccgcctcagcttgcggaggac

SEQ ID NO: 45477 - DNA, 199 bp, Glycine max
  Clone ID: PAT_MRT3847_141065C.1
ggacaggtcacggaggatggcaaaccaagctctaatataatgttaaaatttcagggattggttaaagactgaggaaagcagagactaaggcaacgaataatctgattttgatattgaattcatgtgatacaaaatacaaagcatgaatatctgtttatactaatactagactcctaatcctaataaaaaaaaaaaaaaa

SEQ ID NO: 45478 - DNA, 202 bp, Glycine max
  Clone ID: PAT_MRT3847_141066C.1
ctgtcgtgcacagagacagagggttcattgtggaatattttggaagggggtctcacgttgctcatgacgttaatgagccccaagagcaagatttgccggaggggaatgtttgcctttgagatacaaatcacgctctacataggacaaagaggcccatgctcaagcacaatcagtttggggaaaaacctctcaagatgatgta

SEQ ID NO: 45479 - DNA, 477 bp, Glycine max
  Clone ID: PAT_MRT3847_141067C.1
gaatcaaattataaacgcttgatgatcgtaacaaatccaatgaatcaaacaataggcaaatcccaacaaagataaaaaaagaggcaatacaaggacccaagtattgctacaaaagaatcaaaaaggggaaagattatgctctagcaaggaatttgacgagtgaaccatctaagaacttttactggaagctttacaagactcactgccaaattagccaatccagcgcagcaaatgcaacatgggcacaagcaactcaatatagatccaagcacccagataactgcacccacaagagataaaatcaaagccaaaagagcaaagggcaatccgagcaagaaacccagtggcctgcattcgcaaccttcttcttctcccatcttcttgtctttgtctctatgcaattgattgtgctctgtgaatgtgaagaaatatgaggggttgtgaaaattgggatatataagcgattcaccgtcccga

SEQ ID NO: 45480 - DNA, 535 bp, Glycine max
  Clone ID: PAT_MRT3847_141068C.1
ctagctatctcgatcgaactgtccaaggtcctgtcacgagaattaaatatgtggtggtagaggtggtggtggtggtggcggtggcggtgagtgcgcatcactagtagccattgtcacactacgctgaggcggcctgagcgcgcgctggttcgcttaccggcgccattaggtctttactaaacaatttgggggctcgcaacccgtgtcgtgatgcgcatttggcttgcgtgcggggcacattgtactaattattgatagcgttgcgctcacaggagcgctaagctacactacccgactaatcaccgcgcgatattaacaacccgatatgcatgtaatccactagatataagcgatcgccatcacagtatctcagtaaggctagcgttactgcgaactctttgatttgaagctacaacgtatttcccttccatcaattgcgaggtgattctgataatctagctagatacagccggtttaacttgcctgtagcggacacgctgtgctgcctgacgttgactagatacacgcatacaca

SEQ ID NO: 45481 - DNA, 652 bp, Glycine max
  Clone ID: PAT_MRT3847_141069C.1
ctcagaacgcaatcaattgcagccagaaaactagagagcatagagacaaagacaagatgggagaagaagaagggtgcgaatgcaggccactggggtgcttgctcggattgccctttgctctcttggctttgattttatctcttgtgggtgctgttatctgggctcttgggtatgcttttttctatcaaactttctatctttttctttgttcagttatttcacaatgtgtcttttattttgttttatttcaataattttcttcctttggccccaattttctgattttttatggtgaactgaattgtgattatgggaattctcttatgcagatctatattgagttgcttgtgcccatgttgcatttgctgtgctggattggccaatttggctgtgagtcttgtaaagcttccaataaaagttcttagatggttcactcgtcaaattccttgctagagcataatctttcccctttttgatctttgtagcaattcttttctcttgtattggctcttttcttttcttctcttttatctttattcggatttgcctattgttgtgattcattggtttaattacgatcttcaaccgtttatatttgattctttcttgtgatctaaattatacctctctctctctctctaaaaaaaaaaaa

SEQ ID NO: 45482 - DNA, 206 bp, Glycine max
  unsure (1)..(206): unsure at all n locations
  Clone ID: PAT_MRT3847_14106C.1
ggtgatgttgctggttcccccanaaaaaggttcaantttttttttttctttaaactttgaactttgaagttgtggcatntaataaaaaaccggggtggccaaacaaacaaaacttaaaccccaaaactnctttatttcaacttttcactggtcaaccctatttaccctnctaacccagcaattaaaacccttcatcctcttcatct

SEQ ID NO: 45483 - DNA, 434 bp, Glycine max
  Clone ID: PAT_MRT3847_141070C.1
aaataacgaatttgtaaaaagcaagtaacattaaggtggatacggatacacaagagaattcacattatctgaagtacttcaccaaacacaaatgtaaaaactgtcaaaagggattacagagttagacgcagagtaggcggggacgaagtaggaggcataggcccaggcgttgttgttgacagggtcagcaaggagatcggcgaggatgttaaaaggaccctgaacggtgacaaaggccggaacaaagaagccaagaagagagaacatgggaaatagaccgttctagagatcattcaccttaagctcagcaaaagcctctgggtcatcaggaagggccaatggggcgaagatggcacatgagtagagaggggcaatgaccggactgaaggggtcacgagcactaaggggacgtaaacggtacgaattaggagaac

SEQ ID NO: 45484 - DNA, 495 bp, Glycine max
  Clone ID: PAT_MRT3847_141071C.1
tggaacctttgggctgatttatgtgcttgcatggtcgtgagaagatgatagaagggggataaagcagtcgagccggccacccacttacccagaaagataccgcggccatttacagctctacagcgctacatcgtaatataaaataacgggcctttccacggtaggacgggatctcatttatacagacttctaactagttatatccaaaaggaattgtctatctattaaggacgaaaccgacgtccatcggaaactaaagaagaagacagaggaagaatattccagagtcacccttaatccgctagagatcacctaggtcagtaaaagtatagaattcgagaagaagccgtagaagctaacgattacgttcgcgatttgcgtatgggatcatccaaacacgggtacagatataagcccggagtactccaccaagaaaaacggtcggcggattaagagcagtcgggtaccctcgaacgagttcttagcgatcgaagt

SEQ ID NO: 45485 - DNA, 396 bp, Glycine max
  Clone ID: PAT_MRT3847_141072C.1
agtaggagaaacatattccatcaactacctcgtatccgctattgtcatgcgtcagcttctccaacccataagtacaataactcgtcaccgttaaaccgatccaacaaaaaaatatcgaatctgattcgaagtggtagactaagcgaagcgagagcactatttgattccatgaagcaccgagacaccgttacatgggattccatgattacttggctacctgccttggagagagatcgccagggcgcgccaactgttcgacgaaatgccccgaagggatgttgtgtcttggaacctcattgtttcgggttacttttcgtgtcgcggaagcaggtttgtggaggaaggaagaaggctgtttgagctgatgccccagagagattgtgtctcttggaacac

SEQ ID NO: 45486 - DNA, 498 bp, Glycine max
  unsure (1)..(498): unsure at all n locations
  Clone ID: PAT_MRT3847_141073C.1
aagttctggcacnaggnaaagggcggcttaacggtnnaaggcttcgggggaaatttcccggggcttcgggagncccggccctttgtgggtaatccgggcaaaaaattaatggggtnccattggctntttttgggaagnggcttttncaaaaaatnaaatttngttgcaccttggattcccctggatnaactgttttaaagttaactnctncaacttcgtgnaaagttccaaaggganagttgcggcnccctggaacgggggcaaagnagcgtcgaacttaaagngtgggtggcccaggctcgtatncagnaaagaaagtgcaagggaattcctccttgtggaaagaaataattaagaaagaacganatgganccccccccccaaancccccttggaaaaaattnaggggggcaggatnattngaaanatgnaaaatgttttnccaatttggaatgggaggttncttcccacatttaaagggagggcaatggcattaaa

SEQ ID NO: 45487 - DNA, 251 bp, Glycine max
  unsure (1)..(251): unsure at all n locations
  Clone ID: PAT_MRT3847_141074C.1
tgtttttttgttcttttttcctagtcntnncaaggtaggagggggacggatttcttttcgccccccgttctcctactctttcttncggtttctataagactactgtatggtagtacaagacaaataccgtgagatgatatttgtaggaaccacggtgagaagagaataataattattattacacacataacaaacgcagttgatggttttgacgttagactgttttgctactctttactcaacttttattt

SEQ ID NO: 45488 - DNA, 188 bp, Glycine max
  Clone ID: PAT_MRT3847_141075C.1
gtctcaaaatgcgatgattgaatggtgtcagttctgaaaaagtgcagtgaaattcggcacagacctgtttaaatggataaaagccagaatccaaccaatgcactgtgtttctcgcaagtttatagcgtgcggtccatgaactcgttaacgcaagcccgaacatctcgtcagcgattttcgctcgttgt

SEQ ID NO: 45489 - DNA, 468 bp, Glycine max
  Clone ID: PAT_MRT3847_141076C.1
acgaatgatgttaatattaattgcaaggtcctatttagtagtcgaaggacccatcttttttaagccaaggcccaaaaacccttgcgccactttttttttccaaaccattttccaacctaattatttttgagtccttgattgcttaatctcaaagtcacagatcccactaagccacattgacaccatgacaatgggcttttctctatcttcctttcttgcctctgattataacctttaaataaacatgctcagattttgcatttatcatggcctgcaaataataacagaacacataaacaccgtaagccatatatgaataaaagttagatacaaattcacaagtgctttcaattttgttctctgatcagagtggaagtttcagttgaataatcagtgttaatctttaatcaaaacctttattatgcaaattaccaatataaaactaaaattctgattaaagaacaagat

SEQ ID NO: 45490 - DNA, 507 bp, Glycine max
  Clone ID: PAT_MRT3847_141077C.1
gggaaatatgcttggtgagaattattgcggtggtaaaaataacctgggttttttttctgttgaattaatttattttgatattattttttcaattttttgaaattaaattgcatatagaattgaatgtcgataaattgattttgaagagaaataactaaagtacttaactacgtggcagaaaaactgatataatgcatgcctaaaaatcaaattaaaattatttgagcaagtttaaagagctaagaacatacaaggatcataatacaaggtcaaaaagagtcatctcaaaagtacatacatgacaattgaactttcgctataaaaaaaagtgatatccatacgtcaatcagctagcaaattaaacaaacaacaaatcatgcgcacttccaattagacaagttagatatttcattttatagagtttattctaagtgaataaaaaaatgtaactattctaaagaacagtagtgcaggagtctaacgtaggagcatcaattatcatgtctt

SEQ ID NO: 45491 - DNA, 434 bp, Glycine max
  Clone ID: PAT_MRT3847_141078C.1
agaaaaaaaggggttaaatcgaagggaaaagagaagtgtattacacactactactagtattagtaccctactctacagactacccttaatgccggcctcattcgggaagaggatgcttcctttcaacaagtgattgatgataattacagggaaagggcatgaccgtgcgataccaccactagatagtgaacttaaatttctaaggaaggctgataaggctctcttttaatagtctcagggaaggagtgggagctactgctcttttcatgcgcatctgattcatgtgtaaaaccactggccaccggtgaggaggagtcggtcttgttctgcgctaggaagacctagaacaccaccttcgagttgctgtcctccccattatcagcaacaattgtgctcttcaaaaatatgctagacaggacccaattttccctggg

SEQ ID NO: 45492 - DNA, 488 bp, Glycine max
  Clone ID: PAT_MRT3847_141079C.1
tagtctgcggccccccttttgttcgtggggtagagcataattgcgtagctagggtaaagaatgacaaaggggtgtgctggtagctgcggaccacaaggtctacaacggctccaaaggggaactttgcaacagggggaccaccactttagaaatgaccccaagttgctaaggctccaacttcttcaaggcacaggtgtagatggaaacctacttatgtatcctacgatgtcactaagagactaaaaaaccgcacaaatggataaccattcaagtaccaacatatgcactaccatggtacattctgcactagtaactaacagagcttattgcctttgaaggcaccaacttcccactaaaacaaggcgataaatactggatgaatcctttcgcaaaaacaaagctgggtcacaatgaaacagaggctcccttggttctatgctgtattagagataaaaccgctttggaggatatggccccccatgcccatg

SEQ ID NO: 45493 - DNA, 168 bp, Glycine max
  Clone ID: PAT_MRT3847_14107C.1
tgttaactagaaacagtgtgatgaaaatgacagtcccagagaactccgatgctagcaatactcattcttctaaagtttcaaatccttcctaacaagccattactgcaaggccaatgaacctcaaaactttttccacttccttccatctattcaaaattaaatatccca

SEQ ID NO: 45494 - DNA, 909 bp, Glycine max
  Clone ID: PAT_MRT3847_141080C.1
ttcgggtttcggaagtcttaaatgggcattgttgtctgagtgtcgagactcgagagttttcaaatcgtaaaacctaaataaatacatcactgccttcagaaaacgactgcgcctagcttctagccaccctttaatcttcgtcaacgttacttttccacctcgtacgagggattcaattgagagggaaagggactgatggcagacaacacacagtcttactgggaaggctacaaagcgttttggtcagagaggttttcctttttgagcaactattcgaggttcatcaaccgtgataaacccatcccttcctggtcaagctctgatgtcgaggagttcattgcttctgatcctgttcatggacccgtcctgaaaagtgctagagaagcagtgcaatttggcctcacaggaagtgctttgggagcattatttactgcaggctatgcctggaaatattcaaagagtttacatggcgctggactgtcatttttagctggaggtatatttgggtggacttttgggcatgaaatcgcaaatcacacacttcaactttacagggtagacacattggctgctgaggccaagtttctggactggtggaataagaagactggagggtattaaaactgttggcttatgggaattaatgctacatttgttatcgtttctgaaaaatgaagaataatttttggtgttggcagtgcgatttatgctcactgaataagtatgttgtgaattaggttatgttttaaaactaatgcatcatcgcaaaacaaatggtgacttgtgccattttttctctgtattgttgtgctgttgtttattagtctgggaccaatggttgagagaggtcataagtgctggcattttcatattgttccaccgctaatacaatcgaggcaccatcgctct

SEQ ID NO: 45495 - DNA, 345 bp, Glycine max
  Clone ID: PAT_MRT3847_141081C.1
aaaaaaatttaactcctataaaaaaaaaaaaaaaaaaaaaaaaagggaaaaaaaaaaaaaaaaaaagggaccaaaaaaaaaaaaaaaaaaaaaaaaaggggcggcccccaacaagggagcccggcaacccggaaataaatcccggaccgggcccggcaggcgaaccaccttccccaaaagggagccgaaaaaaagctgggcgaaaccagggccaaagcgggccccggggggaaaaggtaacccgcccacaaatccacacaacaaacaacccggaagcaaaaaggggaaagcccggggggcccaaagagggagccaacccacaaaaaaggcggggcgcccaccgcc

SEQ ID NO: 45496 - DNA, 495 bp, Glycine max
  Clone ID: PAT_MRT3847_141082C.1
ccgggttcgacccacgcgtccgtacggctgcgagaagacgacagaaggggacattgatgttgtttttgaattgttttgtttgatttttttgttctgtctctctcttgtgggtcataacaattggtttttctaatgatttttattgatgctatcaatttggctaaagggtgatccttcatatccaaattcgaaacccagtttgagattttagaatttgattgagttggattcgttttcattggttgttggagtgtgaagaaattctgtcttcagttaatggacgctcttcattctcaaatgtgatcaatacgatgtttccttgcatgtcaagagtttataattgatatgtttcctaaaatattaaataaaacaatataaatgatataggcatgtgatctgtgacatagttctgtttgttaaaattgaggctgatatctgttggggaccactaaatatttggaatttacaatctcttgtggatgaagtgaatgcaac

SEQ ID NO: 45497 - DNA, 223 bp, Glycine max
  Clone ID: PAT_MRT3847_141083C.1
gttctagatcacgagctcgccgcgaacgtgttctatgaatttcttttcagagatccgtaccacgtgaaggcctatggcgtcctctggatgcttactgtttaaactaacattccatctttgtgatctattgaatgagaatcgatattgccttctcgaatgtttgcgaggaacaagatattgattcctttttgagggaccttaatttgttgattgtgcatataaa

SEQ ID NO: 45498 - DNA, 342 bp, Glycine max
  Clone ID: PAT_MRT3847_141084C.1
catgggctccagagcactaactataagcaatatggggtaagcccctaaatccggtaatctttcttccattaggttgctactgttggcgagagcttgctttgcttttacatactccatgctcaacgagtgcctatataaaacatcaacgattaggaacaaccaccgaattagcccagaggcagatagacctacttagccgctgacctaaaccctagcatgttactcttcatgtactgctgcctcagtgcctataataactgacagtgaatataatcgacatggaaggagcataggagacgacttagacctgaacgtaagatccaaagacaatcaaccaaagct

SEQ ID NO: 45499 - DNA, 547 bp, Glycine max
  Clone ID: PAT_MRT3847_141085C.1
cgcactcttctgattttttcatttaaaattaagtacgtggcggtgagcatggaaaatgcaagcacgtctagcttagcgagaacgaaatcggatcagctactggagacggtggccacaacagctgagaagtcgccaccttcggcggagggaggcggggtcctgtcaaggaaatcgagctggaggatgacggcgtcgtcgccgggtggcggcggtgggagaaacacatacataaggaaggcaaggagcgctcagttgaaggtagaggtggacgatgttggcagcggcgtggctcttagccgagctttcagcgccagcttgggcctctcattctccttcaccggcttcactctccctcccgatgaaatcgccgattccaaaccattcagcgacgatgatatcccggaggatattgaagctggaactcctaagccaaagtttcagacggaacctactctggcaatatatctaaggttcacagatgtgacatacaaagtaatgatgaaaggcatactaccactaaggaagacgatatctttaaggggatcac

SEQ ID NO: 45500 - DNA, 482 bp, Glycine max
  Clone ID: PAT_MRT3847_141086C.1
ccaccacgccttcggcaaagttaaaaggaacttcttaacttctcccacatctcaattgtgactgctatcactaccaccaaaaaactacaaatctctcactttctttggccatgccagaaaactgcatagcacccaaatctgaacacagcaacactactcaccctgaggaaggaccacctgagatgactcagactgtccttcccatacaaacaaataagcaatctttcccaaaactggctatgtaccccataactttaaagtttgaggaattggtgtacaaagttaaaatagagcagaagggtgtgtgttgggggagcacaaggagttgcaaagagaagaccatactgaaaggagtaacaggcatggtttgtccaggagaaataatggccatgttggggccatctggcagtggcaaaaccacacttctcacagcacttggaggaaggctcagtggcaaactatcaggaaaagtcacatacaac

SEQ ID NO: 45501 - DNA, 520 bp, Glycine max
  Clone ID: PAT_MRT3847_141087C.1
ggaattcggcacaggatttacatggcctgacttgcaagctaaattaaactgtgagttgctgaataatttgggcaacttcattcaccgggttttgagctttattgccaagcctgcaggtcgaggatatgattctgttattccctctattcctgatgatgtaagtggcgaatcccatattcagaccaaaatatttgctgataaagttgtggcatatatagaccaatacatagaagcaatggagaaggttaaacttaagcaaggattgaaaactgcaatgagcatatccagcgaaggaaatgcatatctgcaggaagctgaattctggcgcctttacaaggaaaatagacctctttgctcccttgtcatgaaaactgcagttgggattgtgtatcttcttgcttgtttgttagaaccttttatcccatctttcactcgtgaagtatttaagcagctaaatttgcctgcggtgacacatgtctcactttgtcaagacaaaggagatattgatagggtaaaaaga

SEQ ID NO: 45502 - DNA, 391 bp, Glycine max
  Clone ID: PAT_MRT3847_141089C.1
cggactcgtgtgcggacgcgtgggagagaaatagaaaggcatatgatcttcttcaagttgcaatctttttagagagagagggttagaagaacaacatacttgagatctgtcactttgtttgagttcagatcttcaaagtttccttccttgttcttttggtgcaaaggatcaaattaaggaatgccaaatggggaggaaggggaattggttttccagtgtgatgaaagctctcagtcctgactcaaaggagaagaaagaacagaaatcaagttaatttaagaagaaatggtttgggaagcaaaaatcggagactttagtctcatactcagaagcttataaagtaccaccaccaccgtgacctatttctccaccagaggcgattaaattaact

SEQ ID NO: 45503 - DNA, 265 bp, Glycine max
  Clone ID: PAT_MRT3847_14108C.1
aattctgctcgaggagcgttatgggttgccatctcacacaccctctcctatatattgtagcattttcctggcatagtctctaagatcatccatccatcttctcataagctttacttaattagcaaatccaaatatggcactttcttcttcatcatcttcaacatccatatttgctttagctgtggtcactctttagctgataggaagttcttcagctcaactctctgagaacttctatgatagtaaatgtgccatggttttctag

SEQ ID NO: 45504 - DNA, 510 bp, Glycine max
  Clone ID: PAT_MRT3847_141091C.1
cccagccctccaaagatctataacaaaaatcggccacacttttaaaccttccctaggaaactagaattgcctttctttggcagatcgaaaaactattacaattttagttgatttttcctaaaaaaaaaaactccagtcacatagccagttttttatccaatccgggggggcttcctcctatgggctacatgaagctaaagaatgcaaatatccaaatcagccccttgaattctcaaggtctaactaccccattccccgagtagagaaaatagttggaaacaaaaatgaccacctgcaaatctcagaaaaaaaacttcattccttttcgttttggcccacagcagttcattactggagagttgaaaaaccattagcccaagggcacaactttggctcaaaatattgaaaaatttggggcgggctctgttttctggaattcgccattcatgaaattaaaaaaggcattggggggacatttggctgccgggttctgtgtaaatgtttggcaaa

SEQ ID NO: 45505 - DNA, 299 bp, Glycine max
  Clone ID: PAT_MRT3847_141092C.1
cccacgcgtccggtaagcactgccaagggttaatcgaccattgtaggaaaggtgtgcattgcgacttgtctaccacattaatggggtggcaaaaaccttaaaaatggaattccttaataatctggggttgggtgattcctatcaagtaagtttggaaaatgtttggcctgttataaattgcaactgccggggttccactccaattaaagattcctttttgcaccattcgatgccaaaaaaaaaaaaaaaaagggccggccgttttaaagatcccaagtttacttaccctgccttccaac

SEQ ID NO: 45506 - DNA, 201 bp, Glycine max
  Clone ID: PAT_MRT3847_141093C.1
ctcgagccgctatggctcgtcactccttgctcttagccctccttctcttcgccgccgtggccaccgccagaatggtgagggtcctctttcgacgccgacgaggttctgatccgtcaggtggtgcctgatgttggctgatccatagaggagtacttccttctgatctccttgcacattttgtgagctttaatgcctagttcg

SEQ ID NO: 45507 - DNA, 701 bp, Glycine max
  Clone ID: PAT_MRT3847_141094C.1
ccacgcgtccggaataatattatggagatctccacctagaacctacctctctatttcttcttcttctctccctcacccttttatatatatattcattcttattccactctcacactcaattctccaccaaccccattctctctttctctctttacataactcaatttctccttgtatcattttcactacacatattacattattccttccaaaatgagcacgcagctgaaaaggttcaactcaatggaacgcaggccaagaatgctgaaggacttcctcagcgagaatctaaactcgtgctcctcaagcggcttcaaatcacttccaagaaaaccaaccaacaacaacagcatgcacagcctcatcgaaatggaactcaaatcttcatcaccctttcaaacactcatgaacaccataagaagcatctctctcttcacctcaaaatcaccctccgtgctttctctaccgaggagcctctcacgcaagctatcatcttcaaggagaaaaacaagaacaagaagaagaaggagccatgtgtgcagcagcgatgtcaacatcacaacggtggtgaagatcaaggacatcatacggtggaagtcattcagggatatcgtgggtggaaaccttctcttccaccaccacccgttggatttcatggggggggtccaccacaccacttgtaatagctggagcaggggctc

SEQ ID NO: 45508 - DNA, 1274 bp, Glycine max
  unsure (1)..(1274): unsure at all n locations
  Clone ID: PAT_MRT3847_141095C.1
gcttaagccttttaaaaacctgttatggcctatttcttgaaggggtacaatcacaaaaaaaaaatcgtctccttttctctctgcatttgagcaaagccaaaccacgtctgagtgagtgagttccgttggatggcgacgagcaccaccagcagcggtggcggcggcaccggcacccaaacattcaagccgtaccgtcacctgaaaaccctaaaagaccacgagaacgcggtatcgtgcgtgaagttctcgaacgacggaaccctcctagcctcggcctccctggacaaaaccctaatcatatggtcctccgccaccctcaccctctgccaccgcctcgtgggccactccgagggcatctccgacctggcctggtcctccgactcccactacatctgctccgcctccgacgaccacaccctccgcatctgggacgccaccggcggcgactgcgtcaagatcctccgcggccacgacgacgtcgttttctgcgtaaacttcaacccccagtccagctacattgtctcgggttccttcgacgagaccattaaggtttgggatgtgaagaccgggaaatgcgtccacactataaagggccacaccatgcccgtcacctccgtccactacaaccgcgacggaaccctcatcatctccgccagccacgatggctcctgcaagatttgggacaccagaaccggcaatctcctgaagaccctcatcgaagataaggcccccgctgtctccttcgccaaattctcccccaacggcaagttcattctcgccgccactcttaacgacacccttaagctatggaactacgggagtgggaaatttttgaaaatttattctgggcacgtgaatagagtatactgcataacttccacattttctgtgactaatgggagatatattgttagcggttctgaagatcgctngtgtttatatatgggatcttcaggcgaaaaatatgattcagaaacttgaaggccatacagatactgtaatatcggttacttgtcacccaaccgagaacaaaattgcctctgctggtctcgctggtgatagaactgtgagggtttgggtgcaggattcctgaataatattgaaactgtacgggggtgttgtcttacttcaaaatttcaactgcacgcctatgcgtctgatctcaatattagacactactacacatacaagttgatctcatgttggcactatttccgtcttttgtatcatttgcaaagtataatatggataaatagtcatattcgttcatgaat

SEQ ID NO: 45509 - DNA, 719 bp, Glycine max
  Clone ID: PAT_MRT3847_141096C.1
cccacgcgtccgcccacgcgtcgcatcgctcgttcctcgtggttccttcctttgtgtctctctctcttcggacacaaagcaacgctttccatttccatgtctctgtctcttcttcgtatctactcttccccccaccttctttcctcctctctcttctttccaaccccacctctctcttctttccttcccaaattaccaaatgccccccgcactccccacattgttttatgccaccgtagggacgcctcctcagcttcgaagcagcgagtcccagaagatacagaatacgaacaacccatgaggaccagttacgacgacgacgaagaagaagaagaggaatttcttggctccttagttttgcctgaaagatgggatgtactgggtctcggtcaagccatggtagatttctctggcatggttgatgataatttcctcaagaatttgggattagagaagggaacacggaaagtagtaaatcatgaggaaagaggtagagttttgcaggctatggatgggtgcagctataaagctgcagctgggaggatctctttctaataccttagtggccctcgcaaggcttgctagtcgctcccaaaaagttcccgctataaatgtcgcatgaccggtagtgtagggagcgatctattggggggcttctacggggaggaattacgccgagcaaatgtgcaatttctttctgcaccatgaaagatgggaca

SEQ ID NO: 45510 - DNA, 633 bp, Glycine max
  Clone ID: PAT_MRT3847_141097C.1
gtcgaaagtgagtgagttccggtggatggcgacgagcgcgacaagaagcggcggcgttacccaaaccttgggcttcaagccgtaccgtcacctgaaaactctaaccgaccatgaaaacgcggtgtcgtgcgtgaagttctcgaacgatggaaccctcctagcctcggcctccctggacaaaaccctaatcatatggtcctccgccaccctcaccctctgccaccgcctcgtgggccactccgagggcatctccgacctagcctggtcctccgactcccactacatctgctccgcctccgacgaccgcaccctccgcatctgggacgccaccgtcggcggcggctgcatcaagatcctccgcggccacgacgacgccgttttctgcgtcaacttcaacccccaatcgagctacatcgtgtccggttccttcgacgagaccatcaaggtttgggatgtgaagaccgggaaatgcgtccacaccataaagggccacaccatgcccgtcacctccgtccactacaaccgcgacggaaacctcatcatctccgccagccacgacggctcctgcaagatttgggacaccgaaaccggcaatctcttgaagaccctcatcgtagataaggcccctgctgt

SEQ ID NO: 45511 - DNA, 381 bp, Glycine max
  unsure (1)..(381): unsure at all n locations
  Clone ID: PAT_MRT3847_141098C.1
gatacctcaataatgctaatattttatttgcctctgtcgttgagaaaacaaagaatagtacggaagtttatttcctttaatgagaccatccaaccactctgcatttggactttttcaatgtatacttcttcagtccttcctgatttcttctgcctatgaaatgtaataatacagggaattccagataaaaaaatcttaaataagagttcattatacatttttatgaattcctaaaactggacacctccctcattcctcaatgaggtagtttaatgcttttaaatcagcattcgggatatcatgttcaattatgcaaatattatttgcttaggatatatctcagatgccatatatcattnacactattaaactgtgctaaac

SEQ ID NO: 45512 - DNA, 370 bp, Glycine max
  Clone ID: PAT_MRT3847_141099C.1
gagtttatttttttttttttttttttttttttattttttcttttttattttgatatgactgcgcataccccttaagaatttattgcgatcgatcgtgaacaacaaaagatccatgatgaggagcctgtagggggaagatgatgattttgctgtttaagagggggtaaattacgaggactactgtgttgaatgaaaaacatccggtaagggggggccgagggggaccaaaaagaggagtcgcaaggcagtgctcaaacttggaatgaaacctgtcacaagtgggaaaagagggactggaaagatgacaaaaatatcctagatggtatataaaaaacccatgttttcaaaaccccgactaatgactcataca

SEQ ID NO: 45513 - DNA, 535 bp, Glycine max
  unsure (1)..(535): unsure at all n locations
  Clone ID: PAT_MRT3847_14109C.1
ttntttatttttatttttttttatttttttttttttttttttttttttttttttttttttttttttttttttttttttttttttttttttgggaaaacaaacccaaaacccattttttttgggggaaaaaaacccggaacgaaaggcccaggaattttccccgacttcaaaggggaacaaacccgaacggtttttttaaaaccgggggaaatccttaaaatggaaaaaaaaaggtttatcccctaacaaaactttggccaaaaattaggccatggggggaaaaaccaccccctttccgaaagggcccccacccaaagcccagggggaacaagttggttaaccccttaacaagcccaaattgggggcccaacccaagcccccttttggttttccaaacggaggcaaaaaaaggggggccacggaagggaaaagattttttttccccaaaacaaaaatctttaggggggaaggaaaggaccctgggcttgggaaaccccccaccctaagcacaggctttgggtaacccataaagggg

SEQ ID NO: 45514 - DNA, 635 bp, Glycine max
  Clone ID: PAT_MRT3847_1410C.1
ccacgcgtccgtgattctactgaaagttggagaaaagcattggatgcatttcaagagagctacagtatcgctgttgaagcagacctccctgatgtgcaactcgctgccttggaaaatatgcattatagcaacatgataagatttgatgatgaggatgagacaaggaggttgaatcttctaattgataagctgaagaaattagaagaaaaagaggcagaagctaaaagtatgccagaggatttttgctctgaaactgatactgaagcagatgagtgtctgtcaaacagtgggtctgatgatttttgctttccaaagacaatttctcgatcaaaaactctgactactggagaagaattgaaagaggacgcacctcttatgtcactctatcagtccttaaaaggctcatccaaaaagaaagcaggccacaaagaaagtcttgccaactctaccaagcaagatgagcattcacccagtagtctgaaaaatcaaaccagtgatcatcagacagttgttggtcgtaaacgtgtccgtgtaattctttctgatgatgatgatgatgaagtcgagtgttaagcagaaaggatcataattgcccggtagaggacttgcccacttatgatgccattaagagtaaa

SEQ ID NO: 45515 - DNA, 524 bp, Glycine max
  Clone ID: PAT_MRT3847_141100C.1
aacgactgaaactgagggtgatagagcaagtgaacagttaacaggttgaagttgttgcaacttcttggtgcttagatggggaaatataataataacttaatgatgcgtggatgaggagtgccttattattgtggtgttggtctaaaccttcttgaaacccccattactggagcaacaagatcagcccctggaactatagcatgctttatttctaaaaggaatagtgtttctctgggagttatgatggaatttcttcttaacttgcaagtgaagcaatattgacattggggtagatgacaggtcagaagaaagatgaagcaacttattgtgttttgtacacagatgagttgtgaacaacattgtggtgcgtaaaaagcatatagtttaattggttgagtagagggtatgagttatggtaaacccttagttcagttttatggataaaaaaaaacatatgggtttattaaaaaaaaaaggtataaagttatttgtaataaaatgttagaaaataatctattactttt

SEQ ID NO: 45516 - DNA, 793 bp, Glycine max
  Clone ID: PAT_MRT3847_141101C.1
agcttctttgcttccatccaagttgtttgggaacaaggaaacggattccgaatctaaaacagaaggtgaaattcaagctctcggtgaagaaagcgctaatgccactgcttctgaggcagagttggcagagaaaacgactgaaactgagggtgatagagcaagtgaacagttaacaggttgaagttgttgcaacttcttggtgcttagatggggaaatataataataacttaatgatgcgtggatgaggaggtatgatgtctgtgtctctttaccaaaatagttttgaatcatcaacctatgttaccaacattttgaatcattttacgtataattaaatttgttggaaaggattatgcaatttatggtttttccattttacagtgccttattattgtggtgttggtctaaaccttcttgaaacccccattactggagcaacaagatcagccactggaactatagcatgctttatttctaaaaggaatagtgtttctctgggagttatgatggaatttcttcttaacttgcaagtgaagcaatattgacattggggtagatgacaggtcagaagaaagatgaagcaacttattgtgttttgtacacagatgagttgtgaacaacattgtggtgcgtaaaaagcatatagtttaattggttgagtagagggtatgagttatggtaaacccttagttcagttttatggataaaaaaaaacatatgggtttattaaaaaaaaaaggtataaagttatttgtaataaaatgttagaaaataatctattacttttaaaaa

SEQ ID NO: 45517 - DNA, 243 bp, Glycine max
  Clone ID: PAT_MRT3847_141102C.1
acgaggtgatgtggagaaaaataaatgaatatattatagtattattaagagtatttgtctgtagataacacgtccaatttcaagtcatttgttcattagtaatcatttgtcctgttatgtaccctgcaaaagatcgaccatcatactaagataaatacttatcttaataaaagcaactaaaatatttggatgaaaaaaaaaaaaaaaaaaaaaaaaaaaaaacaaaaaaaaaaaaaaaaaaaa

SEQ ID NO: 45518 - DNA, 198 bp, Glycine max
  Clone ID: PAT_MRT3847_141103C.1
cccggtcttcggctccatgtgaggagatcagtacggcgcattttcccacacgagtacacgattgcatcatgtgctctcattctggcgggtgctgcgtttagatagtcctacctgcataaagtgttcttcgcgttgactatagtgttcggttttcaatttgagggatcaatttaatagtgtgcagatcagttaagtcat

SEQ ID NO: 45519 - DNA, 108 bp, Glycine max
  Clone ID: PAT_MRT3847_141104C.1
gttatgggtactggcttgggtagcctctgctacccgctagccagaatcaatgcccaagcaccaacaggtacaccctccaattggcaatgttcaaccccttcagcaccc

SEQ ID NO: 45520 - DNA, 562 bp, Glycine max
  unsure (1)..(562): unsure at all n locations
  Clone ID: PAT_MRT3847_141105C.1
gaaatcgggtcgagtgacattgcatacacgtcttcaaaaacatatgcgatggcggtgcctaccctgaagaccggacgctctgtatcggaacttgttcgcatcgacgctatgcgcataaacggatctggcatagctgcagccactcactctcgcgggctgcacgtgcacacgcttccagaactggaggacgactatggcgctctggagccagccttcaccggcgaaaccatgcagctgctgcacgagaagcaccaccagactgacagtcaccaacttcagcagggccctcgagcagatacaagacgcacgctccaggaaagattcctgcgtcatcaatgagctccagggcgccatcgagttcagcggcagaggtgacgtgagccattgtattatccggaaaagtctagctcctgttcgagaaggaggtggagaaccacccatagggtcactgggatgggccattgacacacatcacggctcttttgaagcattagcacanaaagttaacgcagaaggtgctggactacaggggtctggatgggtgttgcttgcactggacaag

SEQ ID NO: 45521 - DNA, 820 bp, Glycine max
  Clone ID: PAT_MRT3847_141106C.1
gaatactgtcatcgataaatttgacatcttaatttcaaagaaaaatgcaatattcatcttaacagtcacatattaaacaatcaaacaaccgagaaaaaaaaaagaaaaaaatctgctaaataaattctagatacgatcctattatattgaccaacaaattcaaaagggaacaaaatcaaggcactagagaaagaatttgaagaggagaaataaataattatattcagaagaatcacagcctatttggactttagtagttatcacattcttgaaacccaacaacaatgaaacaatgctccttatcactacagaaaagcttgcgccactacaattaatatgtgaaagatacatcttatgttgcatataattcatgttgtgaaagatacatgaattatggaaccgtgtcacagccaaaagagtcacgccactctagcatttgaagagtggctgcataatgtgccaatgccccaacaacaacaagagcatgaaatatttgatggctatgacctgccaaatcgaaccaccctggcttccacctttcgggtatccttgtcacatagaaaaaggtccctgtcaagtatgataaggccatgccaatttcatatgctaaggtaatgttgcgtctaggattgctccaattcacaaagcatgcatggattgcaggcacattgccgaaaagtcccattgaacagaacaacatggcccgaaatgtgcggtatttgctagtggaaagtgttggagagagcatcgttgcgatggtgaatagtcccatggctgtaatcccagcaaggtagatgatttgccagtgaggttcacatag

SEQ ID NO: 45522 - DNA, 754 bp, Glycine max
  Clone ID: PAT_MRT3847_141107C.1
ccgggcaccaaaaaagtaaaaaaatctctcaacaccttgagaaattttatctgttagtaatttgcgaagaaaaaaaaaactcaaacaccttcaagaacttgtatctttctttgttagtatttgttactacaattttacattcttttcatctctacatatttcattagtcatggcacctcaagcagtttccttcaagtccttcgccgttgctcttattgtggcgcttttcttctccgcctccgctctggacttagtttcggggcagtcgccggtgccggcgccggcgccggcaccagatgccggagcagctggatccgtgtcgagctcggtcgccatgattggagcttccgttgtgatttcattgctcgccatcttcaagcactgaagaataatctgatgatggatcgattttgtgtgaagattattgattcgttctgcacactcagatttattgttgctgctttataatacgttacgagtgatgattattatgtacgtataaaagagagagagagagggattttacaccattcttatattgaaccatttattgtaggtgttagtgagaaataagagggattttgaaatcctctgttatcatcgtaacatcgttatttcagtgtgtaataatagtaaatagtaatatacatattccccaatcttatgattggttagttcttaaaaaaaaaaaaaaaaaaaaaaaaaaaaaaaaaaaaaaaaaaaaaaaaaaaaaaaaaaaaaaaaaaaaaaaact

SEQ ID NO: 45523 - DNA, 456 bp, Glycine max
  Clone ID: PAT_MRT3847_141108C.1
tattttttttttttctttttttttttttattgacttattttgaatttttttcaatctgtatttttgtttttctggcacacaatgatgcacattgttttaactgcaccgaaaactcccaccgccgacgctttttaccgaggagcgaatcaatggagcgccctaatttctacttttaggaaaagcaagggaatcggaccccccgagggcccttgtcctgggccgttacgagggcaaccccggattttcgcttcggttgaaaacgccggcaatgcccgtgttaaggaggagatatccccgggggaaacggagccaaaaaatttttcttccccggataacaacaaacgtaccctttgaaggtcaccccctgaaaaaagcggcaaaaatacggctttaaggttgtacccaggggagtgccccccccataaaaaaccacccataggggtagacggccccccc

SEQ ID NO: 45524 - DNA, 1552 bp, Glycine max
  Clone ID: PAT_MRT3847_141109C.1
ggctcgagcattggcattgcctgggagtgactgattagtaagtggcgcttcccttccattccaacacgttcgttcgttcgttcactgccttctcctccttaggctacgttcgccgccgcagcccggaaaggattcaaccttctgtcatgtcaatggagtatgatatacctgattctgaaatacaacaaaatagcaggagaagaaagaaatctactgtctgggaacacttcactgtgaaaatggatggacctggatgtgccagggcttactgtaaaagatgccaaaaatcatttgcttatctaaaagattcaaaacaatctggcaccagtcatctcaagagacacattactttgggaatctgtcagaaaaatcaacgaataccatgttccaaaaccgatgccaatccaccaaagaaacgagcaagagcaaaaccttgttttgctgctatctcatttgatcaggagcgttgcaacagtaagattgctaaaatgattattttacatgactatccacttcatattgtggaacaccaaggtttcattgattttgttcgagcactacaaccccagttcaatccactgagctttaatgctattcaaggggattgtgtctctatgtacctcagagagaagcaaaacctattgaatcttattgatgggattcctggacgagtcaacctcaccttggacttatggacttcaaaccaaacatcggcctatgtttttgttcgagggcacttcgttgatggtgattggaacttacatcatcctatacttaatgtattcatggtaccatttcctgattctgatggttccttaaatcaaactatagtgaactgcctaagtgattggcatttgaagggtcggctatttactcttgcacttgataaattcttctccaatgagactttgatgggaaagctgagaagtctcctctctgttaataaccctgtgatcctcaatggtcaattgttaagccagaactgttatgctcgtatgcttagtcgccttgcattagatgcactatcagctatgggagaaactattgataaagttcgggagagtgtaaagtatgtgaaatcttctaagtctaatgaagggaattttttgaatctgaggcaacaacttcaagttcctagtacgacgaaccttttaattgatgaccaaaataaatgggacacaatataccacatgcttgttgctgcttgtgaattaaaggaagtttttgcttgctttgatgcctctaatcctgatttcagaacaactctaacaatggatgactggaagcaggtggaaaaactctgtgcatatctgaagtacttgtttgatgcagctaacattttaacttttcaaccatacccaactgcaaatgtatttttcctttgagtgtccaaacttcaggtggagttgacttgtgctgccttaagccaggatcctttctgtagtcgtttgattttgcctttgcaggagaagtttgcccatttttggagagaaagccgctttgtctttggctggtgctggagccctgggttccagatttaaaatgaaaaatt

SEQ ID NO: 45525 - DNA, 231 bp, Glycine max
  Clone ID: PAT_MRT3847_14110C.1
tttttggtgaatatcttatagagatattggggatataaacacttactatttgaatacatggatactaaccaaaggcgttgtatccaagcttacgcaatttgccaccccacacttaatcgattatttataaaggaatagcgtatctaaatccttgaaacaaaaactcaatgacgtagacacttataaagctgagggaaagtatcatcaatggttaaactttatctcttgccc

SEQ ID NO: 45526 - DNA, 319 bp, Glycine max
  Clone ID: PAT_MRT3847_141110C.1
ccacgcgtccgcttacgcttctggggagggcagactgtcagctctgaaacaactcaagccttatactttatgtgaacctatctgatgggatcccaatccaattccagacatatatggggttctttcccaagtttcatcataacttgcaagcatgatgaatagacccaatctcataatatgttaactgtttagtactttagatactgaacagtgtacttcagtccagtccttttttctaatgcaaacgtctagtactttttgagctccgaaacaatgttctgttgttctgtctgttaaaatgtagcagtacgtgtttgtc

SEQ ID NO: 45527 - DNA, 526 bp, Glycine max
  Clone ID: PAT_MRT3847_141111C.1
ccacgcgtccggggggccttatattcaggctacatttacttcttcctctatcttaagatctcttctttctctacaccgcacgccgagaccatgagctgactaagaaagggtcctgctatcgaaggctaacacggaaccacctactattgcgccttcgtgtgcctgcccgaccgttttgactctatggccttggtccaggaggaacataaccacaccacgttaccttcaatctatggcacccggagctgatcatgagcgttgcactcaacaaccatgcaaccatgatccccatgatgacaccattcgatgccaaaacgcccggggacaccacattcacctttctctgagttcagagtgaccataaatggaggccttgcaggccatttataaagatggtgtcatgcctacgatagccttttactactatggagataagaagccctttgccaaaaagaaatcgtcttgatagcgctcagcatgatacaaaacaaagatggtgctcacctaggcatcgcatggaacaatg

SEQ ID NO: 45528 - DNA, 489 bp, Glycine max
  Clone ID: PAT_MRT3847_141112C.1
aagacttaattttttttttttatttttttttatttttttttttatttttttttatttttttcttttttaaaaaaattataaaatttttttgggcaccaaataattggggcatttaaaaaaaaaatgttggaaacactccacgacacataaaaattgggcccgggatggctttaaaaaaaaagggggggtttttggaaaaaaaaaacatatcaatgagggcccgataacaggtatttgcccctatcacccaaaaactttgtttttttcccacaaaaaacatgccacggccgggcttaaaaaaataaattgtgggggaccttattggtcctgctaggaaaagccaggaccccattccaaaagaaaaaagggaaaaggcccatcagttttaaagaaaacagagttggcccaaaaagagggtccttaaaaaacgaggaaattttcagtaagcacaccttgtctaagttgagaatatattgcgggggggggggg

SEQ ID NO: 45529 - DNA, 405 bp, Glycine max
  Clone ID: PAT_MRT3847_141113C.1
gggataaggggtaggactgccattttggctgtgattttggatgtggcaatttcggcagaagcagtagctacttctcaattagcattgcaaggagaagctcgtggtggtgctgttggtgttatgggagcaggcttaaacattgttatgtatttctcacctccctctgccatgggttgtagcatgcgttgagatgcttgaaaggccaagttaactctgtcataagggaaaggagcttctgtttttactgcaacaaaaatcttgggcatgatatggacatctacatgtacaggatagagtaattatcacaaactaaactacacacacaagattcggggtttgatcaaccatcatgtctgacgaagtcaacaacgttttcaagaaatatcttaatcaacttcagcttca

SEQ ID NO: 45530 - DNA, 375 bp, Glycine max
  Clone ID: PAT_MRT3847_141114C.1
aaaaaggaaattttttttaccataccaaacaagggttaggattttaatttaatgaatcccttttcctcaagaactaaaaataatcccttttcccttggcaaaatgggaaattttggtacattggtaatggaaatattcttggaacttttaaaactaaattcttcattatttgggttcattggtccaacaaaaaatgccggatgggtgggttttggaagggaaattggggcacttcctagcattaaaacaacgggggaaatagtcggtctaacttttgcattttggtgaacccccaacaaaccaatgggtaaggacttcacaactttattggccctgaaggatttttccaggggatccatcaactcaaaacatttt

SEQ ID NO: 45531 - DNA, 265 bp, Glycine max
  Clone ID: PAT_MRT3847_141115C.1
taagatccaatcaggattcagtttcatggggtcatcagaacttgactcggtcacataagtgagtcttcaagagttgaggaactctgccctcctacgctctgcagtgcgtgtgactcatgtcaattgtgacgactcattcgatacggcattccacgttgacgtgctctccgtaggctcaatggatgggactcagagccttctcatattctcgggagcacccccgggacactggtcacagattagacagttggtgaccttccacaag

SEQ ID NO: 45532 - DNA, 387 bp, Glycine max
  Clone ID: PAT_MRT3847_141116C.1
gttggggggaaaaacagcctttttttttcaaaacccgttttttttaaacagaaaacattttctttccccccccaaaacccaaattcctttgaaccaccccacccaaaactttctggggcgtgcttgcttttttagtccaggaaccatgccccccttacaccaagtttttagcaagttttgtagttgaacaacacatggggcccacaagacccttttttgggaataaagggcctaacccaggccggccaacctaagtaacggggaatggtggacaaattattcttccccgggttctgattctgcgttctgaagcccatcaatggaggggtgggcatttttccaaaacctaaaggttttggtatcacccttcagccccttttgaaaccc

SEQ ID NO: 45533 - DNA, 272 bp, Glycine max
  unsure (1)..(272): unsure at all n locations
  Clone ID: PAT_MRT3847_141117C.1
ccaattccctttgcaacccacccttcctcccacccttccnataaaaaaaaaattttaaaaccaaaaccaaaacaaatataccaaagaaactttaaaaaactagtacaccccatcccnttaaccatcaaccaatccaaatacaactcaatcaacaatacaacaaaccatcctcactataaaaaacaacaaacttaatcatcctccccctcccaccaaaaatcccttcttaatctccacccaacaactaatccatcaaccccttcaatttaacc

SEQ ID NO: 45534 - DNA, 190 bp, Glycine max
  Clone ID: PAT_MRT3847_141118C.1
caaggctatatataaagagatgaaaagtaatggagtttcaccagattttataacatatgcatgtcttttggaagtctatactatagcacattgtaatgaagaggctcttggtgtttataaggaaatgaaggggaatggaatggatatgactgcagatctttataacccgcttgtagctatgggggccgat

SEQ ID NO: 45535 - DNA, 613 bp, Glycine max
  Clone ID: PAT_MRT3847_141119C.1
cttttttttttttagggggtcctccatgctgttattaaattaaccattagatttgtggtacacattggaaaaaaaaaagttctataattggccaagctggatgaaaagatttcctacctattttcatgttgtggagttgtatatgtaaccacagtacactactcgtgttacatattttacaatacatatcattcttagaatccaatacataatttatcgtaactgctaatggaactttttataataggtgtctaatcatgtgcaacgtcaccctagaagcagggagggaccatatgcagaacatttattgatgcatttttttttattaagggtgttgaaaaggcgcattcagttgggtttttattcaagcaacaatttaataatgcacatttactttttttaatttaattcagtctataacttaataatacatgaagtaggaatggaactgatttacaaacataatataatataaggtaaatcatacaattaaaatataaaactaaagttgatgatattttaaataaatggtattaatataaacatgacatatgttctgttatttattaagaagagtagtcttgtaattaataatatgtatagtttttttatt

SEQ ID NO: 45536 - DNA, 379 bp, Glycine max
  Clone ID: PAT_MRT3847_14111C.1
tcacctatggtttcagacctacgaagttggacatcatggcagcaagattgatcgcagccgtaagtactggcactcataatgcgtctccttgcttaggccagtgcaatggtgccactgcaaatgcacttagggaagttgtttccaagagatctgggaattacaccatgggcaatgatgtgtgggatggactaggcatagtgaaatatgtgggacccttttcagctcagactccttcacacttgagcagagaattcccactggatgttggatgagacacggcaggcttacctgcataccctgaatcatttgagatgaacatggctcttgacgttatccatgggagatgggctacgcttggtgcactaggttccatcacccc

SEQ ID NO: 45537 - DNA, 1055 bp, Glycine max
  Clone ID: PAT_MRT3847_141120C.1
caaaaactggaacgcacgagaccaccgcagtcatcactcgcgacgtgagacggcgagacctccacctcctcaccgctgccttgctgcgccgccgcgacgcgagagtgaaagacggcgagacctccgcaccgctgcgccgccactagagctcctcgccctcaccctcgcgagaccccctcattcctcattcagtctcagactctcagcacctcaccggcgccgttagagacagttctcgttggacctcaccctctcatcctcacggacctcgccgccattgatcctcatcttcacggacctcaggaatgccagaacgcaaaccagttgttgggttatcatggcaaccacagttgcctattccatcatcattaaaagccactgatgggtctcacaccaaacctcaaactgaggcatcaagcactgttaggaaatccagttcagagctggttgatggcctttttgtccctccaaatgatcccaaaaaattaaacaagttactgagaaagcaagctaaagatactgctgggaaaaattggttcaatatgccagcccaaaccatcacccctgagttgcagaaagatttgaagttattaaagttgagggctgcccttgatccaaagcggcactacaagaaaggtgattccaaatcgaagacacttcccaaatatttccaggttgggacagttgtagattctccgttggactttttctcaggcagattaacaaagaaggagaggaaagcaacgcttgcagatgagctgctttttgatcaaaaccttgcagcctataggaagcggaaggttcgagaaattgaagaacaaaatcgaccagctgggaatgaaaagtggaagattaagggtagtaattcccgtaagcgagctaaggaaaggaggatttactgaagattaagggtagtaattcccgtaggcacaaattataatgctttttgcagtttagaattattacaggttatttgaaataccttagctgtaaaacctattgatgatgctatgtgttcttctatcgtgtttcaaattgtcatctttgttcccctt

SEQ ID NO: 45538 - DNA, 274 bp, Glycine max
  Clone ID: PAT_MRT3847_141121C.1
ccacgcgtccggcttatgttgttgagtcttagtgatttggagcctataaatagaggtcacgccttccttttccaacttgtgtactcttcttcttctccttcttcttgttgttgtcctcctctctggaagagatgccccatcacttctaccacttctcttacttcttgatgcctagtatcatcattgtctagtttttactgtgttttttttttttttgggttggtggtgtctctctttttttatggatcttggggtggtgggtttggagggggtg

SEQ ID NO: 45539 - DNA, 2327 bp, Glycine max
  Clone ID: PAT_MRT3847_141122C.1
aattatttgtactttttccttattcaccaaaacggcgtcgttttgatttggggggaaacagcacaacacgtcgaactaccctccctcactcaaaaccctcgacgctcactccctctctcacatcgcaagccagccaccgcctccactggtggcactgtcataatccggcgcgaagttgccccctcaacgtgggagagtgtcgctgaagaagttgtttcgggtacggctaagagatttctgggaatctcatcctgaggaatgccagcacacaaaccagttgttgggttatcatggcaaccacagttgcctattccatcatcattcaaagccactgatgggtctcataccaaacctcaaactgaggcatcaagcagcactgttaggaaatccagttcagagctggttgatggccttttcgtccctccaaacgatcccagaaaattaaacaagttactgagaaagcaagctaaagatactgctgggaaaaattggttcaatatgccggcccaaaccatcacccctgagttgcagaaagatttgaagttattaaagttgagggctgcccttgatccaaagcggcactacaagaaaggtgattccaaatcgaagacacttcccaaatatttccaggttggaacagttgtagattctccgttggactttttctcaggcagattaacaaagaaggagaggaaagcaacgcttgcagatgagctgctttttgatcaaaaccttgcagcctataggaagcggaaggctcgagccggaaaattgttagatacgacgacacctcggcagttattcctagggacgtgaggcggattgaactacattacctcccctcggtcaaagcgcaacgccatgaccccctcgaccagtgaacggcggactgaacttcacgcggggacaccgagatctgctcgcgaccgcaccctgcgactccgcgtgggtttggcgaaaccttctagaattttcttccatggaggttatcagagttctaacggcggcgatcacggtggcggttctcgcggcggcgcttccggcggacgccggcgacgacaaccgagtattcgcgccgtgttcggacacgcgagtgcagagatccgacggattcacgttcggaatcgcgttcgctccgaaggacaagttcttctacaacaacaacaacagcgttcagttgtcgccgtgcgatacgaggctctcgctctccaatgcgaattctcagatctccgtgttcagacccaaggtcgacgagatctcgctcctcaccgttaactcatcctcgttcgtggcggactcgtatggctatatggttgcatttgctggccacagatatgcagcaaggtcgcctcctgcttttgttgcaaacggcacatatactgttaccagttttactcttgtccttgagtttaagagaggcaggctgcaaaatttatattggaaaagagatgggtgttctaaatgctcgagtaactcgaaagctgtctgtctcaacaatcaggattgcgcactacaaacatccacctgcaagagccatggaggaactgtggattgcagcataggaatacaattggctttctctggcacagatagacaccttgcagttctcaactcttggtatgaagtgaaaaaccttcgccagtattcactctatggtctttattcaaatctgagagattccctcactagccagtatgataagtttttttaattccctttagttctttggttagttttatctgtaccattccgttgttatttgctcttgttattactttatccacatcccaacccttctcttatcaatatatttgtgaaaaaccagaatgatggcatgtatatttatataacagttgtttttaatattttggaaagagtgcaatacgaatgaatttgtcgttaactgaggcgaactatgttgtaactggggacataccaaatagtgtaatggacccttcaagttgaagaatgtactctggccaatttcgatcaaacaagcatgaaaaggccttatagttccacatgaaaaaaaaaaaaaaaaaaaattaagaacaaaatcgaccagctgggaatgaaaagtggaagattaagggtagcaattcccggaagcgggctaaggaaaggaggatttactgaatttctactcattttagctgtgggcgcagattataatgctttttgcagtttagaattattacaggttatatgaaaatattttagctgtaaaacctattgatgctgtgtgttcttctatcgtgtttgaccaatctctttaaactcttctgcttgggtttttcaaacttggaccccattataaaatttagggg

SEQ ID NO: 45540 - DNA, 283 bp, Glycine max
  Clone ID: PAT_MRT3847_141123C.1
ctctcccagcctctcccccacattgtccctgactctaggggcacatccagtctccatcgtgctgcagcagctggactgagggcagagcctgtaggtgcagaggccctggctcccgaggtccagccactctccctggggcctctggggtgagagcagcttccgataggacctgcccagatttctgcatgtgcacttttgtttactgaaagagagaaaggggggggtcacagcaacatgccctggactttctgccctgttccccaaccccactgaggcctgctgc

SEQ ID NO: 45541 - DNA, 718 bp, Glycine max
  Clone ID: PAT_MRT3847_141124C.1
tcggctcatccaccaccttcatcagctccataccattgctttcacattgctgtctcaattatacacaaagttcattgttgataataatggtattcttaggttcggcgtagcctatctatacaaataacacataccaaataatggatagcagaaataagagaagcattcaccccaattcacttttgaatttccagttgttaatttagatttaattagaaaaggattaataaagtaatgcttgtgatttgtgaacagcatatacggaagtaacacacactgaagtcttgtggataattatactctcataacacttttatgatactttttacaatttaaaagagaaatgttttttttttctttggataagatgaataatgtaataaagagaaaaaaaatattataataaatcattataagaataatattactcaaattttatttcaccaaatgtattagttgcagaggaagtctcacagttatttcttcaagtataccggccaaagaaaagaaaagaaaagaaaagagaagttttgaattttttgtttgtttaatattggcagcagttagagagaaattttgacatttaggatgattatccgtaggattcatagaatgaatagttacctaagattagttagtgcttattattctatacataacagtagctctgtatcagaacttataattatccttattaaaaggttaatcaaaattatga

SEQ ID NO: 45542 - DNA, 488 bp, Glycine max
  Clone ID: PAT_MRT3847_141125C.1
aaaaaaaaagggggggcaacggcccccgcaggcagttcctttaaaaaggacccaaaaaaaggcggcacccaaaaaaaaaaaaattttagggttcaggaatggggacaaacgggaggaaattttaacgaaaacccctagctcaggggaaaaacaaagggttttataaagaccatatttaaaagaggggacctttaaaaaaccccgcctaaatagctttcccaaaacaacaaaaaaaaaaaaacccccccaaaggcatccttggagcagcttccttggaaaaaagcctcccctttgctcggggtttcgctggggattgggaccccaggaccccccccccccactttttttgggacccggaaaattgggcggggaagtaacccttgaaagcccccaaaactcgggggaaccccaatttattttcttttttaacgggggccaaccccaaaaggggggcggtttttttggggacaaccgttcccaagggggcc

SEQ ID NO: 45543 - DNA, 3134 bp, Glycine max
  Clone ID: PAT_MRT3847_141126C.1
tggccatagaactcaaatgccctatctgttggagtttgctcgattctgctgtgtcgcttacctgcaatcatcttttctgcaactcgtgcattttcaagtccatgaaatcagcctctgcttgtcctgtctgtaaaattcctttcactcgtcgagaggttcgccctgctcctcacatggacaacttggtcagcatatatataaacatggaagcttcttcaggagttaatacatttgtaacccagaatgcccctgttactaacttatcagatggagaaaaggaatgtgaaggtgatgctgactctggcaagatgaaagctggtggaactcatgaaggtcgtccgcaggagaagaaaacccggaagaaaaagaagtctaagaagacggttcaggccagcatggaaagttcaggttctgagtttgcaaagccttcttttccagcaaagaaaagggtacatgtgccgcaaaatcttctttcagaaactccaatgaagaatttgaaaattggagactctctcagtgaaattaacaaagagaaagagggaacggaaaaggtcccagtcaaggaaagtgaaaggcccctccaaagtgaaaaagataatcctgttctttcgcctttcttttggttgagagaggaaaaagatggtgaaatgttaagtcaacaaactgatgaggatcaaattattgatggctcaacaccaaatcctccttcattcagtgatctcaaggactctgatgatgaagtccattctaatgttgatctaatggatgaggtgcaaaataaaagctctgttaatttatttgacagtgaaatgtttgaatggacacaaaggccttgctctcctgaattgttttcaagtccctctaaaatgcaggtcatggatacttatgaggatgatgaaaatcaagaggaattggtggcttcctcactagagctggaggcaaatctgccaagagttgatgctgacaacatggaatttgagaatcccaaagaaggaaatagaatggctgatgaagtacctccgagtgtatgttttcctcaaatcagaagttctgatgatctaaatggaataaagaagtctacaaaaagaaggaaggctagagataaaaataaacaagagcagattggagaaccaaaaaattcatttgatgaaatgtatgttgaggttactcaggaacaagcattggacaattcttctaatctggggaagggtagtagaagaggcaagagggtttgtttcaataccagtccaattccaacgcctataactgcttgtacagtccccaatacattaggagttcaaagcattggtgaaatgaagaaggctaagaatatagatattttgccatgtaaacaagaaaatgagaagcattatgctcaggaaatttctggaaaaagccagatgaaaatatctggaaaacaaaatatcaatcaaatgaatgagtttgctggttctgattcatccattttcagtctgcgaacagataataacgggaaggactctaataggaggcaatgcaaaagcaagtattccagaaaaactatatattgcagtaaagaattggaaactactaaaaggcaaaaactttcctcggcttgtatctctaagactaaaaacaatgaagaaattctacctattgaaagtattcatcaaggtcctgatgtcagggatttgaatgatacatcaaaagagaaacattgtcccttgatggatcaaacagtgttaaggaaatgtgagaatcttgtaaaaaattatcaatgtgttttctgtctctcatcagaagaatcagaggcttctggccctatggtgcattaccttgatggcaggcctgtaacatcagattatgaagggggatctaaagtcacgcattgtcacaggaactgcacagagtgggcccccaatgtatattttgatggtgattattcaataaatcttgatgcggaaataagtagaagtcgaagaattaaatgtagtttttgtggactaaaaggcgccgcacttggttgttatgagaaaagctgtcgcaggagctttcatgttccttgtgccaagtggacttctcaatgtcgatgggatacgcaaaactttgtcatgttatgccctctgcatgcttcctccatgttgccctgtgaaggttcaggatcccaaaaaaggagcaagaaatgcacagctagtgagggaaaagcccatggtcctaaacatgacacaacaagccaaagtcgggctgcttatttatcatacaaaaaaattgtactatgttgttctgctctatccgtgcaggagagggaagttgtttccgaatttgaaagagtatcgaaagctacagttttgaaaaattgggactcgagtgtcacccatgttatagcatcaacggatgaaaatggggcatgcagaaggaccctcaaagtattgttgggtatactggagggaaagtggattctcaatattgagtggatcaaagcttgcatgaaggaaatgggtcctattgatgaggagtgttatgaaattaatgttgacatccatggaattcgagatggtcctcgtcttggacgactaagagtattgaacaagcaaccaaagcttttttatggctacaagttttattttatgggagattttataccttcatacaaggggtatctgcaaaaccttgtggttgctgctggagggataattctgcacagaaaaccagtgtctggtgaccaagaatcaacttcaccagatatgcatacataccaaacccttataatttacagcctcgagcttcctgataaatgtaagccttcgaaaaaggatacaatttgcagccaaaggcgtcatgatgcagaggttctggcaagttctacaggttcaaatgtagcaagtaatacatgggttctgaattcaattgcagcctgcaaactgcaataccttgctcaatgaatgtgaaaattgaggtcatttacatgcatatgatctcaaattgatgtttttccttttcatctttaattatcatgttaagaataatattgacaatattattcaacaaaatatttagacctcataatatatactgtgaatgtatccccgatggagcgagaattgtgtttgaaaccgtcttatatcaatggtaaaatctcaatccttggcaatttt

SEQ ID NO: 45544 - DNA, 127 bp, Glycine max
  unsure (1)..(127): unsure at all n locations
  Clone ID: PAT_MRT3847_141127C.1
tattaataaactcaaannccatgaaaagctttacagngnngtatttatctcccttttggcttttcannggaattgctcgaatcccactttttanctcccaaatatgtaggcatgttttncccacaaa

SEQ ID NO: 45545 - DNA, 763 bp, Glycine max
  unsure (1)..(763): unsure at all n locations
  Clone ID: PAT_MRT3847_141128C.1
catgcctcgcagtttcgcttacctgcaatatcttttctgcaagtaaatcccaccctcttaattcattcttcctctttggcactttcttttaatagcaacgctaatttaacctaattttattttgaattcagctcgtgcgttttcaagtccatgaaatcagcctctgcttgtcctgtctgtaaaattcctttcactcgtcgaggtacgtctcatcctctcgctttctcgtataataaccctaattctgcactacacttcaaaatcgaattcaaaatgtagaggttcgccctgctcctcacatggacaacttggtcagcatatataaaaacatggaagctgcttcaggagttaatatatttgaaacccagaatgcacctgttactaacttatctggtgagtgattgcgattgcgactttgattttcatacatccgttagtacgagattatgcatggcttgctttcaattggggaacctgccattctgaatggactgtacatttttttttttataaaaaaacttatgcttaaagttatattgcagatggagaaaagcaatgtgaagttgatgctaactctggcaagatggaagctggtggaactcatacaggtcgtccgcgggagaagaaaacccggaagaagaaggagtctaagaagacggttcangccagcatggaaagctcaggttctgactttgcaaagccttcttttccagcaaagaanagggtacaggtgccgcanaatctcctttcagaaactccaatg

SEQ ID NO: 45546 - DNA, 225 bp, Glycine max
  Clone ID: PAT_MRT3847_141129C.1
cgagcctggcggctccagctcgaacgcgccaagcattcctaactttatccgccatcctgtaaaagaaggaccttagtgatctatcaccgtgaataggaagagcatgctatgctatgagcccaatcaaaatgattgcgcctgatagctttgataatcacctggagagtcttcatgacccgagcataactgccaagattattatggcaagctgactttcacataact

SEQ ID NO: 45547 - DNA, 272 bp, Glycine max
  unsure (1)..(272): unsure at all n locations
  Clone ID: PAT_MRT3847_14112C.1
anaaagtgagttcatagaaggttttggatcttggtcttggcgtgttgttgtggtctggttttttaggtttacgaatttttggntaaaaagaaaaganaggaacaatccacctactatttgtcacttttcttcgtttctctggattttggatcaatattgtgatgccaacggaganggtcgantgananncagancaagatttntagacanaggctttttnagaanaanagnctttnccccnngnttnatttcgganaantgaacctttttnt

SEQ ID NO: 45548 - DNA, 670 bp, Glycine max
  Clone ID: PAT_MRT3847_141130C.1
tttttaaattaagtataatatattatcagatatcgagagagagataggattcatcgtattgttatcatcccttgcaatccatgtttctgtttctaccaccaaagcatgaagttctgcaagacctaccagcagtacatgcaaggacatggccacaacaagctcccttctgttggcttcaagaacctcaaaaagatcattaaaagctgcaggagagcctacactcaacctacctgccctgatcattgcccagtgtgcgatgggacctttttcccttcccttctcaatgaaatgtcagatatagtagggtgctttaatcagcgcgcgcagcaattgctggaactacatcttgcttctggcttcagaaagtactttctcatgttgaaaggaaaattacacaagaatcatactgctctaatcgaagaaggaaaagatctagtcatatatgcactcataaattccatcgcaattcgaaaaatcttgaagaaatatgataagattcattattccaagcaaggccaattattcaagtcgaaagtccagaccatgcacaaggaaattcttcaaagtccctggctttgtgagcttattgccttacacattaacttaagggaaacaaaatccaagccaagggaggcatccgcactgtttgatggatttatctcaattcacg

SEQ ID NO: 45549 - DNA, 436 bp, Glycine max
  Clone ID: PAT_MRT3847_141131C.1
gaagctctcgagttccacattaccgagaaaagggctaaagttcatctggaattgggtgcagcattttacgactggaattttgatcaggtaggtgaagacgttaagctattgtggacagaagaagaagagaaaaaattcgaggatgcgatacgatcaaaccctccatcacctgagacatatttctgggaccatatctttagggcatttcctacaaagagcagggcagatttagttagttactacttcaatgtctttattttggagcgcagaggataccaaaataggcatactcccgatgacattaacagtgatgacgatgacgatgaagctggaccactgaggaatgttttcggacatcagacaccaaattctggatatcaggcaccgaatccgcgcggttccatcttattaacccccaaaaagtcacaaacaaaaa

SEQ ID NO: 45550 - DNA, 226 bp, Glycine max
  Clone ID: PAT_MRT3847_141132C.1
caccacggagcctaaaaacaaggggaagcgtggattccttttgaatattgtaatcggcgagagtgcgtccgttttcgagctgcttcccagcgaaaataaaacgctgctgatccgggggaatcccttccttatcctgaatcttcgccttcacgttatcgatcgtatcaaaactctccacctccagagtaatagttttcccggtgagcgtcttcacgaagatctgcat

SEQ ID NO: 45551 - DNA, 271 bp, Glycine max
  unsure (1)..(271): unsure at all n locations
  Clone ID: PAT_MRT3847_141133C.1
ttgacttgaaatcttgcagtacaggtctggaatttgcagaggcacataattctctttnncgctgaggagggaggcaactgnattatcnataaggggtgtaagaatgcatgtggtgnaacntggaganttgaaaanggggtnacaatttttggcagaagctcnaatggangagnnngatnncttttgggcgggccaaattggggannccaangnggttagagttnaggggtntcnnannaccggggccctncnagggnaaagttgtnttnac

SEQ ID NO: 45552 - DNA, 168 bp, Glycine max
  unsure (1)..(168): unsure at all n locations
  Clone ID: PAT_MRT3847_141134C.1
aaggtaggcagggtgaagagcaggctgaaatcatgttatacangnctgcaaantnantatccaaggcnntggagttgangcccatgagtttgttgagctgnaggncagttaggaaanacttancttcttcatggagaattgaagtgnagattagtcgtgaattgagaa

SEQ ID NO: 45553 - DNA, 545 bp, Glycine max
  Clone ID: PAT_MRT3847_141135C.1
attggccagtgcgctttaacattttgaatgcgattgctcggggacttctttatctccatcaggattctagattaaggatcatacacagagatctaaaggcaagtaatattttattagacaataatatgaatccaaaaatttcagattttggccttgcaagaatgtgtggaagtgatcaagttgaacggagtacaagcattatagttgggacacacggttacatggcacctgaatatgccattgatggattattctctacaaaatcagatgtgttcagctttggagttttattgctagaaattattagtggaaagaaaaacagagcatttacctaccaagacaacgatcataatcttattgatcatgcatggagactgtggaaagagggtactccagagcgattgactgatgcacatttggcaaactcatgtaatatatctgaagtcatacggtgcattcaaattagtcttctgtgtctacaacatcatacagatgataggccaaacatgacatcaggtgttgtgatgttgaccactgaagatgct

SEQ ID NO: 45554 - DNA, 555 bp, Glycine max
  Clone ID: PAT_MRT3847_141136C.1
atacattgactgcgaaactataatcacacattcaacatatagctaaacaataattaaaaccattcaataccagccaccaatataaattaatttatgaagatttataccacaaagatcaaagaaactgaccgaaggttcgtcaataacaatcaatatacattttgtatatgttcagaatgttcctttacctatgatccacaaccaatcaagaacagccccagcaaatatgccgctcaaaagacacaggacaagcaaattacccaaagcattctgctcaggacccttgtaacctcttggtgccacagtgagaacacacactgtgagatagccattggtgagtcccaagaaggaggtgagtagaatcatccatccttggtcaccatattttgctgtaaagtagaatgctgggatcagcaagaatcgagaaaacactgctattagtagaccctttctggattccaactttagccatggcacaaggggaatatatcttgctatgaaatccaccacattatacatagcaatcaaaacaactgggtaccatgtgcctaactg

SEQ ID NO: 45555 - DNA, 644 bp, Glycine max
  Clone ID: PAT_MRT3847_141137C.1
ccaaccccaagggaaaacgcttttaaacccaaaaccctaaaaactgggtccctagcccccaaaacactaaaataaaccttcgggggcccacccaaacaaaaaatccccgggggttaaccaaaggggggggcttcctttggggggggaaaaaaaaaatccccagaaaaaaaaaacccccaggccgggggggtgggtcccccgaacccctaaaaacaggggaaaaacccccttcctccaaatcccaaaccgaataaaaaaaaatgggggcctaaaaaaaaaagagggcctttacttttccccaaaggggctttggggaaaaaaatgaaggggcccacttaaaaatcttccgggccccactcaaaaaaaaggggggggccctaacccaagggcccgggggggccaccctaattagggctgggggcaccttcccctcccctttgggggggtgggggggcccttttttttgggcctcaaccaaaaaaggctttgcaaaaaaagaccaaggctcctgcccaggcccgggggaaaaattcccccaaaaaaaaacccttagagggggcgggccctttttttttccccccaacccaatttttttttggggaataaaaaggcccaaaaacccctacaaaaggggaggagggggg

SEQ ID NO: 45556 - DNA, 855 bp, Glycine max
  Clone ID: PAT_MRT3847_141138C.1
acctaacatcatcagaatctgaactagctgtttgctgaacccgagaataaaactcaagagcagcattctcaataacttcctcagcttctgtatcctaaaggataactttagggtgttagtgccaaccgaaacaaagtaaatgttttcttgatttaattatgagcaatgctatagtggtataccctcatacgagaacctcctaatactttgtaagaaagtattaaatgaaaaaggtaaatgcatttaataccttaagaacataaaaagtttgaatactttcttcatatagttagtagtgggttactggattagtagaagtattttagggattgagaatgattctttaactattccagttgacatgtaaaaagttccatgcaaagaatctagtatcatttcttattggacaaaacttaaatatagtaccataaatactagtgctgtcattcaccaatcaaaattggccgtatgatattttatcccggccactgctgctgaccttcaatgcagccatcaatttcatctcagtaaacaaaattggcatcttggcaaccggttttatatatattatatagccagttttgattggagaacattatttgcttagttactagtatttagttctctccaattcctcaagccaaaaccataggtgaaggctacttggtgaaggctacttgtccatgaatttgttaatttacctcagctagcagtacagttgcagaaccatgcaagacttcatcatcgtggacatggacattaacttccccgtgagcttgttcactagaacaatccacgcccaacttggaagtctctgatgatgtttcattactatttttacccggcgcatcaata

SEQ ID NO: 45557 - DNA, 173 bp, Glycine max
  Clone ID: PAT_MRT3847_141139C.1
caatattattggcctgttttgggtttattttaatattgatatatgttaatagatgcccttgtatattaaacatgagcaactacacgtgtcatattacattgcatacttgtaaagtgtaatggtaaaagaatgacacatatatcttctcattggcctgttttgggtttatttta

SEQ ID NO: 45558 - DNA, 330 bp, Glycine max
  Clone ID: PAT_MRT3847_14113C.1
tagtctcgagttttttttttatttctttaaatcttttttatttttatctgtattttgaaacatttattttatgtttttttctatagaaatcaccttatgtattgtacatactttaatattagtttcgctaaaatacctaaagagtaaggagcaataatacgtacacatgctctaatacatctgaaaacattaattttatttgacggttaaattttattaaaatttaaaagttacatagttttaattagttatttatagagacttattcataatttatataataaattatttaaagaaaaaaataggttaaaaatgtttcactgcttttat

SEQ ID NO: 45559 - DNA, 286 bp, Glycine max
  Clone ID: PAT_MRT3847_141140C.1
aacctttgggctgatttatgtgcttgactcgactctaaccggcgttccgtactatctcactcataagaggggagaatcctcgtaccgaacatgcgaattagtcgcgtaatcgacaattaccggataaagttagctgcaacaggccagaaagcgacccagtaaataatatcgagtacgaattcataattttcgaaatcatagtacacgagaagggtagcagtacgtcttaacagggctcgaggctacgcttcgacatcttaaggcctcagactgtgggtcgaaaaat

SEQ ID NO: 45560 - DNA, 413 bp, Glycine max
  Clone ID: PAT_MRT3847_141141C.1
tgctgaaggcagaggatgatatgatggatccctttagaaattgaggaattcctgctgatctactagcatagcgagctcatgaatgtcgaaatcatgtcggccatgactgccttagaggatcaggcttgcatgctatagactaagttgtacttcttcataatggcttcatgaagtcttgcagaatattacataccttatacaaagtgatgagcagggatcttaaactcttactgtactgatggccatgatggtagcatattgcagagataatatgagagcatgctaaaatctcctagatagagacccctgatggcacaagaagaagtacagtcttatactgcatataattatcccaactgcagctggatgatgtcaatctagcaatgcctggaggactactgccatgccatgag

SEQ ID NO: 45561 - DNA, 490 bp, Glycine max
  Clone ID: PAT_MRT3847_141142C.1
ttttttttttttttttttttttttttttttttttttcattttttttttttttattttttggctattcctttttgatttagatatataggttggagttatataaatgggatcccgatctattaatacaatttatattccaggcgacagatgaccaaacaaaggggaagggtcgggccaaaaaaggatggccttggcctaagaagaaacccactacacccgcccaagagcaaaaggacgagttcagaacaggaaggaaattccattgcaagaagccaaattaaagggtacaaaaatacgtgtacaaacgcaaagggcgggcaaccccctgtggagaaacgccaaggcggggaccaaaaaaaaaggtcgggaccaaaaacaacagctggcgaccgagcccaggagtcaagagggctttcataaagagacaccgaaataaatatagggggccgtacttgcacaacgagggcacgggaaaacccgtgcctgaccg

SEQ ID NO: 45562 - DNA, 349 bp, Glycine max
  Clone ID: PAT_MRT3847_141143C.1
tgattaatattatttattcaataatgggaaaagttgccacacaaaagatcacatgttttttatacaagttccaagatccggcttcccggaaaaaggagggaattaacagggacccggaggcttcggggaattttttcttcaaaataggttagacaatttctgcaaatttgcattttaatttgacagttattcagcattcacgtgcactttagttatttgaagccaaaagtttccctcaaagcattaagcgccactagctttttaccggggccactacttgggtggttaaacagactcggcctcatttgatttccaatgctcggccatgttttcagaaagtgggtccttt

SEQ ID NO: 45563 - DNA, 380 bp, Glycine max
  Clone ID: PAT_MRT3847_141144C.1
actcttcggacgatgccacattattacacactacgcctatgaacatcacaaattctgggtccacccaatcctacatgcctatctcttagacatattcattgactgactgcgcctggcccacactatcatagaatgtacactacaaccaacatgacagtcccgcctttacattaaatacactgctgaagatactacatcattactatattctgacctataacatatattacatctatgctaactgtgactcactcagtgagcttgtccactaagacgtctaagtacaacaccactacagcaatgagctctcctagatatcgaagcatttgtatgtacactacaacgcattccttagatgaaacaaacacttatgccaacat

SEQ ID NO: 45564 - DNA, 371 bp, Glycine max
  unsure (1)..(371): unsure at all n locations
  Clone ID: PAT_MRT3847_141145C.1
ctcaagccaggatcggctcgagcggctcgagctcttctcctaagctctagcccttaactagcaatattaatcagcatttgctagacagactaggagtataaacataccccaccttaagatggctgcaaaaacttggtcctgccttggccttttcctttcactcaacctggttttcttctcacttggtgctgcgtgcggcgatacaccatgccctggttcaaacccaaaggcaaggcccaaccccaaccctaaccctaaccctatcccaagtgggtgctggccccgngaggcactcatactaggtggatgcgccagtgagctaaacttggtgagcagcactttgggtgaaccaccaattaccccttgctggt

SEQ ID NO: 45565 - DNA, 1300 bp, Glycine max
  unsure (1)..(1300): unsure at all n locations
  Clone ID: PAT_MRT3847_141146C.1
gattcccggtcgacccgggcgttccacacgcgtgcgccacgcgtccgagatactatactaataaantattgttgacagatcaagagtggttttgtatctcgaggcttgttattttcattggcaatacttgtggttactttgaagattttgggaagacagaaagtaatatgaaagtgaaatcaactgtttttctgtcccccaagtttgaacttggaccaggatcagctaccataaggcattattatgacattgagtttccaagaggtcacgttgcactcaaaaatttcagtggtgaagtagttgatgaagcaaggaaccctgtgattaaatccactttgaacctgtaccatgtctctcgttaaacaaggcatttcaattatcgtgtcttcttggctctctgtttagggttgagtatgaagttgaatattgcagcactggccaaaagaatggtaatggctgtcttgatgggaagagaacaagcctcccaatacaaaagggtggttatgtcatatatggggttgctcatcagcattcatgtggcactggatcaactctatatggacaggatggaagggttatatgttcctcaataccgagttatggaaagggaaaggaagcaggaaatgaagcagactacattgtcggaatgagcacatgttatcctcgaccaggttctgtaaagataattgatggtgagactttaactctagaatctaactatagcagcagccggtgagcacactggagtgatggggcttttttttctattggaaccagaacagcttccagaccaacacttcagacatacctctcgttcttcattctttatgaatataaatagtatatttcattgatagataactagtgaaatgctaatatatttggagtgtcatcgatggtatcaaagtatgtatgacggtcaaaagaaatataatgacagaacttagaagtataattggaaaaatatacttctcttgtcggcggcaatagacaacaaaggtaaaagccggcgaagagcatatttccaagtttgaggattgttgaaatggggtcataagtcatttgtcttggtgagagtttgtactgttgtcttaaaccagtcttatatcattttatcatcttaattgaagtaatgaacccacaatatggagggatcgttacttcaactagtcccatgttctttaaatgcatttcttatttggccatgtgttatgtaatatgtttgttgtacataaagtaattttatatctttgaagttccttttttatattatatggatgatttgattcataattatcct

SEQ ID NO: 45566 - DNA, 158 bp, Glycine max
  Clone ID: PAT_MRT3847_141147C.1
ccagggggaacttatccaaaagcggcaccaatcatttacttaaaaggaaatataacactctcgcatccatctaaacccaacacaaatgcaaggctttccacaaaactaataactatgtctaaggactatcactctattgcatcttcttatcacaagaa

SEQ ID NO: 45567 - DNA, 529 bp, Glycine max
  Clone ID: PAT_MRT3847_141148C.1
ttccgcgtgaatgttatagttccccaagggtgcgaggttgaagtcttcaaaatggcgttcttagtctcctccaccttcacccttcctctgcgagtgcgcgcttcaccactcaacaaaaacaagcagggagtgcatcaacatcaattatattatcctctagatagatttttaagcaaagcaactattccagcagctcaaaagattcttggaacttgcagttcaaataaacgcatactatccatgaaaggaagctgtcatcgttgtttgatgtcttgcacaatatttctacatgaaacttactcatataatttggatgtagattattgcaccgaaatagttatatctggatattgggtgggacctgatgctgatgatgggtggggatttgtggaagctgttattaatcaaatgaattgatcttgattttttttatagataaggattgattttgattcattttatcaaagattaagtgtacgtgaggcagtttctattcttgacaggctccataaactaaccaatcttttgc

SEQ ID NO: 45568 - DNA, 1069 bp, Glycine max
  unsure (1)..(1069): unsure at all n locations
  Clone ID: PAT_MRT3847_141149C.1
gggaggcttagagtttagtatgcctttgctcctgcgtgatatttatcagcacttctccctttccattctgaagatggatgtgtgtagctttcaagtgattttttttaaaacctagtaatgattttgctgcttattaatgatcattgctggtttgtcataaagtgtgtagttgagggcattgtgtatgcatcacatatgattcagtcattattatattgaatacctgtctaaattgtataaaaaatgggtggtgtttctgctgctggtgtttataatcagatcggttttgtcaggaaaagatttgaggctatttttttcttattgactctagccctttcatcttctcttgctgtttcattgttgtcaattagtgggggtgttattgcccctttggaaacatattccttctaaggtctcataaaagacaggttttacacagttgcacaaagtcataaacttcagtgaccattttttatattagcctggcagtaagatggctatttatttctgagtgtagtttgtactgatttaatggttttattatatgcctagacttttctttgatatcaatatcttatgtcatcttctcttggttgtggatggtatttttcttctgtggtgtaatttgttaaaccaatgatattgtatattaattacttttgtaattttgatctagtaatctattttcatggctattttaaaatattgtagtgggttgaggggaaaatatttagggaaattatttaggttgactgtgccttgccttttaggaatgcataacgactttttttcttctaacagttgaattatatacttagctttgtaattaattttgtttaattattcaaccgatttttttcccactttattagcatttatcatgatctggttccttcactatattttgtttctgctagtgccaattttttacctcaagactttacttttgtagcttttgtgctgtttatttgtttctgtggatttgtctcgattcatgctctttttggatgtgatgactgacattttcttctacagtctcttttgttttgggaacanntttgtttaaaca

SEQ ID NO: 45569 - DNA, 1232 bp, Glycine max
  Clone ID: PAT_MRT3847_14114C.1
ggctcgagaggtatgccacaggcagaagaactaaaagcccagtcaaagtaaaaagtaaagcagaaaatggcggcatctctgagatgcagaaacagctcctccctcctcctaactcgcttcctcaactcagcgagtcgaaggtggttgcaaaccgtagcctacgaagaactgcgagctcacccggacaaaccctacacttcaacggcggttttcatccatggctttttgggatcctccagaaactggagatctttctctcgcaacctcttggcttctctctccaactcctctccctcttccaattggaggacggtgatgttggacatgaggaaccacgggaaatcgacggagagggaactgaatccgcctcataatatggaaaatgcggccaaagatttggtcgatttggtgaaggctgaaggctggtcttggcctgaggttgtcatagggcattccatgggtggaaaggtggctttgcagtttgctgagagttgtagccgtggtgactatgctctttttatccctcctgaagaacagctctgggtattggactctgtccctggagaagtgaaccaagaaaacagtaatgatgaagtccgaaatgttttagcaaccttgcaaagtttaccatctcaattctcatctcggaagtggcttgtgggtcatctgatgggacttggttaccctaaggcactgtcagactggataggcaccaacctgaaaaaagttggtgatcatgagacatggatatttgatattcaaaatgctaaggagatgtttgattcttactgtgaaaagtcctattggaatctattggagaaccctcccaagggtatggaaatagtaattgtgcgtgctgaaaaaagtgatagatgggacgaagacgctattgacaggatccagaaactagccagtcagggaggatctgactctcctgggaaagcttccttctttgttcttcccaatgctggtcattgggttcacgtagataacccaaagggacttcttgagatcgtggcttccaagatagcatccctttagttctgctttagttgaactatggggcatccatcgttgaaaattgttgcgtccagagtcgaaattcttacattatttatgtacaatttatcaactaccaaataatttattttacatacaattcattgtaatgcgaatatctttgcgcagattttgaaacaaccactacacaactaaataaaacccataaggac

SEQ ID NO: 45570 - DNA, 536 bp, Glycine max
  Clone ID: PAT_MRT3847_141150C.1
tgggatgtaggcctagggtttccacagccaaaccaggcaacatacaagttaaaatataaataaattagataaaatctcaatactcctgtcgcagccaaaaaaaccacttcatagttcatatggcgcaggaaccctaaataaaaacaactatagctggcataaatagtaatcatatatgcaataagcccaaacagaaacccaacatttaactataattgaccccattagtaatcatcttttgagacttgtatagtttacagaatacagagcttatctccctattccccatgcctggttactttgtctgagcagtatgattggtctacttctggattgctattttggattctgttaatctaaaactagcatgcatctactccttagaagtgtggggaatgatcatgattacttttatttttaataaagcaaatgcatatttactcagagaaattttagctacacactcctttgaacattatctactattggccaaaatttattagaattcactaaattgtgtgggtcacatctttcat

SEQ ID NO: 45571 - DNA, 259 bp, Glycine max
  Clone ID: PAT_MRT3847_141151C.1
ccgtaatgaagatcagcgtagtcgtcagcactaggccgcacgagatccgatttcgcgccaactggggttaaatgatgaaggttataaggatgatcagtagagtacctagcatcaagagtttggcgattcgtacctgttatggctacgagtgtgacgcctaaaagagtatatttatcccggcatggtcctccaccgggctagatggtagcaaaatatcgacggctccccaatgatgagatccgacgtttggattccatca

SEQ ID NO: 45572 - DNA, 284 bp, Glycine max
  Clone ID: PAT_MRT3847_141152C.1
cccacgcgtacgtatcaggacgataccagttccagtcatgccatctaacacagctgatgacgtggaagatccattgtactgccacatttgccttgctagtctgaatagcactgatgcgaacatacacagatattattactatgatctggcgaagcaatagcatggatagcacatattttgagaaccataaaaaagcttccatcgacgatatgccagtatactcattgaacctcaattacgatgactcatatagaaactaatgatccagaactgaaaacattgaa

SEQ ID NO: 45573 - DNA, 304 bp, Glycine max
  Clone ID: PAT_MRT3847_141153C.1
ggctcgagatcagctacgaaatgttgttcttcataaaaccaaagttgacatagcagatatacatattcaaactcaataaactggtaaaaagacaaataaaccatcaaaagtctccttccattttattgagtttgaatatgtatatcagctacgaaatgtggagcttcataaaaccaaagttgacatagcagatatttttcttttcaacaggcaacacattgatacaactcaagtttttgagaagacagagtcatgctcagatacaaagcattgtgaccccactgaagaaaatggtgataaagca

SEQ ID NO: 45574 - DNA, 862 bp, Glycine max
  unsure (1)..(862): unsure at all n locations
  Clone ID: PAT_MRT3847_141154C.1
cggtccgaattccctttcgcttcacaccagaacggatctctctctctttcaaatccaatcatttcctgagagacaaaaacaaaataaaaatcgcgttcagatacactcacacacaaacacaaccaccaatccccaatctctaacttttcccgagaaaattttagtttccattttcatttctccctcagattcccggaaaatatattcacaacattaatttcgcacttcgccctctgccaactaccaagctccggcttcctctgccaattcaatccgtcgtcgttttcgccaattccgaatgcgtcgatttcgggttggagaatgagttctccgacctcttcttggatctctgttcaaaccgtcacacagtctctgcgttcggattctcttgtccaattttaactctctctccctctctctctctctctctctctcagttagtataactacgtatcaggcaaagaagttttcgccggctagcatggtgccgcataaatctcaaggtggtgtggagcagcttgcaaatgctggggttttgggaggatctgctgtaaaaattgccgctgcacctgctgggggaagtgggaagcagcgtttgaggtggacatctgatcttcatgaccgttttgtcgatgccattacacaacttggtggaccagatagntggggtatttcttttcaatattgagaattntgagtttaaagaacttcttcctctagggaattttcttttcttggaaatttattattgtcttgcanaagcatgttggaaagagaaagtaatagggggaattgtttatctcattttcaagtatatgcaatgttgtatgtaagctttacttagtttagcacatgaacgctg

SEQ ID NO: 45575 - DNA, 1836 bp, Glycine max
  Clone ID: PAT_MRT3847_141155C.1
tcctttcgtccgcccacgcgtccgcccacgcgtccggtctctctctctctcaaatccaatcatttcctgaaagacaaaaacaaaaacaaaataaaaatcgcgttcagacacactcacaattcacacaccaacaccaccaatccccaatctctaacttttcccgagaaaattataatttccattctcttttctccctcagattcccggaaaatatagtattcacaacgttatattttggcaccgccaagctccaattcaatccgtcgtcgttttcgcgaattccgaatgcgtcgacttcgggttggagaatgagttctccgtgctcttcttgtggctgtttgttggcgttcttggatctctcttcaaaccctccacagtctcctgtccaattttaactctcttagtcagtttaactatgtatcacacaaagaaattttcaccggctagcatggtgccgcataaatctcaaggtggtgctgaacagcttgcaaatgctggggttttgggtggatcggctgtaaaaactgctgcaccttctgggggaagtgggaagcaacgtttaaggtggacatctgatcttcatgaccgttttgtggatgccattacacaacttggtggaccagatagagcaacaccaaaaggtgttcttagagtgatgggtgttcctggactgaccatttatcatgttaaaagtcatttacagaaatatcgccttgcaaaatacttgcctgaatcaccagctgatgaccctaaagatgagaagaggatgtctggggacagcatttctggtgcagattcttcctcgggaatgccaatcaatgatgccctaagaatgcagatggaggttcaaaaacgtctgcatgagcagcttgaggttcaaaagcaattacaaatgagaattgaagcacagggtaaatacttgcaaaagatcatagaggaacagcagaaattaggtagtaccttgacaacctcggaaaccctccctttgtcccatgataagcaaaatcatcctcagtcagaggcttctggatctagtgatgcccttgcaagcactgtgtctccacttaaaaaacagagaatcgatgatggttccaaggaaggcttcactgcttcccaagtaagaaaagaatgactgcaatgttggtcagttggatccaaacttgtatgatgatgctgggtttgaatttgatttggagacaaaaaaggatgaagataatgagagtggacagtaagaactaggttccatttgtaggtcaatgtgtctcattgtaatgtgtagtgtatttttctggaagaaaatacaaatcatgctttgtaaattatatttcacgcaatccatttgtacatattaatgtagatatagatgcattcttctctcccggtttgaaagtcataaacactgcactccacccaacagaaatgctttgacatgcattacacgtgtggtcatggatgaatgttgggtgcaagattcttgtcgatgttcaggttgctatggtcttggccaatatcaaaggtatcaattagctgatgaccacattgtttgatccttgtagccaacctaatcatgggagaatggacttggttctttttgttggagatagtaatgaccagcttcccttgatattaatcatttaatttaattatgtattttcttcgaggttaatgttgtttggcatatttagactcatgaatgtgatgctatctaacctatgagtaaatgagtaatactatatcttctttctccgtaaagtatgaaaatattcaaccaaaaaaaaaaacaaaactgtactactggatgtattgtgatttgtgagtgtaagaattcttatattg

SEQ ID NO: 45576 - DNA, 259 bp, Glycine max
  unsure (1)..(259): unsure at all n locations
  Clone ID: PAT_MRT3847_141156C.1
gcggggctactgtttcagctgttgtgcttagcagaaaaggtggttggatgtcagagctcgctaggcgacggatgcttgagcttgcctgtctgtttcacaccaacatnaacaagctnactctccttcacatcatcctccatcttcttctcttcacaccaattccacacacacaataattctttcaaatccaacagctttcccgttttaccctccaaaaaacccctttcattttcttgcaggggcctcccttctttttccg

SEQ ID NO: 45577 - DNA, 290 bp, Glycine max
  unsure (1)..(290): unsure at all n locations
  Clone ID: PAT_MRT3847_141157C.1
tgtacaaccatactgtaaaactgaacgttatcagcaggagagtacgtcaactaacagtngccacagaagggctggaagtgactggaaaaaggggaaatcactgagcattggcatgagctgaaaaccagataggngacagtttctgaaaaaaaatttagcactaatagggtccaccggaaggcatganatagttgtctcttgtcaagctctggataacatgttgaaagtaagagtttggccatcttgagctggtgccattctaagataagaacatctcttcagcttttggc

SEQ ID NO: 45578 - DNA, 1099 bp, Glycine max
  Clone ID: PAT_MRT3847_141158C.1
acccatcacaaccatcatctcccccatgtgaacgttacattacaccttagtttggttttgtagcattattatccccaacccatcaaaagcaacaatcattgaattaattgcaccaaatattgttttgctgtaatcaatactccaatggggaatgccttggggggaaagaaaaccacaaaggtgatgaagattgatggggaaaccttcaagcttaaaaccccaataaaagtttgtgatgtgctaaaagaccaccctggccttgttctgttagaatccgaggctgtgaagcattatggtataagagcaaagcctttggaagcccacaaggaattgatgccgaagaggctttacttcctcgtggaacttcccaaggaagtgacggtggcgccgaggcgggtccggtcggggatcaacatgagcgccaaggagaggcctcgagagcctcgttttggggttgccggtcgggcttcagatctcaccgatcatgaaaccgccgtcgagccaaagaaagggtattggaaagtggtggcggggtgaggcttaagatgaggctgcccaaggccgaggtggagaggctgatgagagggtgcgagactgaggctgaggctgcggagaagattatgggactttgcatggcgaataatggtggtggggttgaagctagaaatggagatggggaggtgaaaggcagagttggggaaagtacaaaggcacgtgagaaaagggtgagttttatgccaatcaatgaaggaggaagtccaatagctgtggcttcataattaccacgcactcattttaaattacattagctttgaaatacataacacccttcggtgttgctgctagccagggagggttatctcacaaaaggaatgatcttccactgatgcatatatagttaattaaatatataagagtgatgttattatttacattttcatgctatatactttgaagtcatcgcaaacggtacgttgctataattatatgggtgtttgcaaatatatatattagtttcactgaacagtaaaatgtagttcaggtaccttaattaatttgaaaaaaaaaaaaaaaaaaaaaaaaaaaaaaaaaaaaaaaa

SEQ ID NO: 45579 - DNA, 1069 bp, Glycine max
  Clone ID: PAT_MRT3847_141159C.1
tgaacgttacattacaccttagtttggttttgtagcattattatccctaacccatcaaaaacagcaacaacaactattgttgaattaattgcaccaaatattgtttgttgtaattaatactccaatggggaatgccttggggggaaagaaaaccacaaaggtgatgaagattgatggggaaaccttcaagcttaaaaccccaataaaagtttgtgatgtgctaaaaaaccaccctggtcttgttttattggagtccgaggctgtgaagcattatggtataagagcgaagcctttggaggcccacaaggagttgatgccgaagaggttttacttccttgtggagcttccgaaggaggcgacggtggcgccgaggagggttcgctcggggatcaacatgagcgccaaggacaggctcgagagtctagttctggctcggcggtctgcttcggatcttacgatcatgaagcccgcttgtcgagtgagcccggcagagaatgggggactgaggcttaagatgaggctgccgaaggccgaggtggagaggctgatgagagggtgcgagacagaggctgaggctgcggagaagattatgggactttgcatggtgaatggtgggaatggaaatggggaggtgaaacattggaagggtgttagagccagagctggggaaagtactaaggcacgtgagaaaagggtgagttttatgccaatcattgaaggagggagtccaatagctgtggcttcgtaattacaacatattttacattagctttgaaacacagtgcacccttcagtgttgctgcgagccagggagagttatctcacaaaaggaatgatcttcctggtgcatagtttaatatataagagtgatgttatttacattttcatgctatatatatgttttgaagtcacaaacggtttctataactatatgggtgtttgcaattatattagtttcactagacagtaaaatgtagttcaggtacctttgtagctatgaattactgaacgtacgtatgtttcaataacattatcccacaaattattataaaaaaaaaaaaaaaaaaaa

SEQ ID NO: 45580 - DNA, 986 bp, Glycine max
  Clone ID: PAT_MRT3847_14115C.1
ccttggagtgcaatttcctggatcaactcttccaaaccatggctaatcatctactggtgaaggattcttccttggttgtgatgtgcatggttttgggtatgcccttggcggatgcagctctttcatgtccttaagtgcaattcattgtagcaccatgccttggtgactagagaggccttggtggtggagttttccctctaccatgttgcaatggggttaggaccctaaacaactaggccaagaccaccccagatcgtcaaggggcttgtaggtgccttaagcattacctacaaaaaagtctttcaaagataatttgtaagcaataacaaaacttgctccaaaataatagtaataataagtaacaccttctaacactctttctatttttagcttaaatttattaaaaaattacaaaatcatcatcaaggtcaaataataaagaataaaaacgctgcataattattatgatttctaataaatttgagcttagcattttttcctgcgagtgtgagaatgaaaatgaagaacacaacagaccaagcgtggacaggatcgtgatccttagggagaaagttgttgagaaacctcagccgcttcgaaaccttggaacaaaggtccaccgaagttcctaaccacatatgaatcctcgttcatcaagtcttgtcgtagaatgtccctaaagcctgttcccaactccctaaatgtctatgaaatagaagtaacaaaatagagggttcttacctctatgacgaaggcggcacagtgcgacgcgggagacaccttctacaaccgatgagtgaggacacgagctaagtgagggagggagggcacaaggggtaaagtaatgaagcacctagcttgcaagagggtgcacgctagtggatcttagtacttggcttgtggtagtaataattaactagctagacaaaggttttatctcgcagcatgtgaattcagccatggctcctagaaacggtgcacccaag

SEQ ID NO: 45581 - DNA, 264 bp, Glycine max
  Clone ID: PAT_MRT3847_141160C.1
gacgcacgcgtcccgagcctccctcaacttttccccaatttaccatactcaacaggaacactgcaaatctcatgtgactgaaacctcttagactgatactgatccttctccatcttctgatcaagtaatcatagatatgtcacactgacataatatttctacaaacaacgaatgaatgtgaaatatgatttaataaacatgctcgatcatattcattaaactagcaacacaatttcactactagtagctataactttcaattac

SEQ ID NO: 45582 - DNA, 193 bp, Glycine max
  Clone ID: PAT_MRT3847_141161C.1
gtcacgcgtcagcgcagtggaatatatacttttaagcaaatgcgaaagcatggtgttcaggagacatacgacatcatgagaaaggaggagaacacgatgtggcaaaatatgcctatggcatactgaatctgtatgaggaccatctacaccatcgaggaacaacgcaaagcgcacgcactatacaacagaccaa

SEQ ID NO: 45583 - DNA, 231 bp, Glycine max
  unsure (1)..(231): unsure at all n locations
  Clone ID: PAT_MRT3847_141162C.1
cgaaattcccgggtggacccagccgtccgnccggttgtcaaaagacttcagaaggggcaccagatggggtatgggttaacgtagcaaaggatgggttcttttccttgaagccaccggatcggtatcatgcctcttacatggatattcaaatgcattaagtgtatggattacaggctacacagtgaatcgcgtagatggtagatagtgtgaacagacacttttctatgaatg

SEQ ID NO: 45584 - DNA, 166 bp, Glycine max
  Clone ID: PAT_MRT3847_141163C.1
ccacacccgccggcggtaaaatgatgtctcctatgtcattattctgggcgagcttggcgaaaaggctgggccagtaagactctccggagacattaaaatcctttcacagatcgttgatcttctcagcgcagactggtattctctccgtctggagaactacagatgg

SEQ ID NO: 45585 - DNA, 379 bp, Glycine max
  Clone ID: PAT_MRT3847_141164C.1
aaaaaaaaaaaaaaaaaaaaaaaaaaaaaaaaaaaaaaaaaaggggggggcgctataatagaagataagattatatgcgcgcgcgtgtgagggggtatcttttgggtggcgtgacctaaattcaaagtgctggccccggtttttcacagcgtggagtgggaaaaacctggcgttacacaaatttaattggccgtggtttatatgccttttgctgggggaacccatatcgaaaaggggcttaaacatctcgctttaaaaaactgttgcacaatctaaggggaaagggacacgccctgtatcgatgaattttacacgcggggggtgttgtggaaacgcaaatggaacgctccatttggcggggccttatagccggctcctt

SEQ ID NO: 45586 - DNA, 344 bp, Glycine max
  Clone ID: PAT_MRT3847_141165C.1
attcttatcattctcttatttgtccatcacttcttatcaatctgttccagtaactcaaaacaatagttctgattctcggaacaaaaaaaaaaaaaaacggtctagccaattttatgaataaaaacaagtcccccccccgctataaccaaacaaaaaacccacccccccaccgtgctatgagcccacaaggacacaaaaaaacctttaaaaatatttccaaaaaaaaaaaaaggtttggaaaagggacgacaccccccccaagggactccaaaaactaaaaaccgatcctttcccagcagaagaaaaaaacaccccccctcgaaaacccatgcgggacacctttt

SEQ ID NO: 45587 - DNA, 332 bp, Glycine max
  Clone ID: PAT_MRT3847_141166C.1
ggtcacagtgatactcatctacttgccctgagggatgtggcacatcacatacagaggcgtggctaatgatcttcgttcctctgtggtcatagtattttatcaggcaagaattctacaaacttagggtcaagcttgtcgcattaagtgactctgagcgtagcgaacgatctgtaatgttccaacgacaagtgcgtcgtcagtctcataaatcaacgttcgtctctgctcgtatggccaaaggagtctccaacactctcaccacgcgtcactacgcagctgcgatttaaaatgtaagatgatgatgagcttcatacataagcagcatcatagct

SEQ ID NO: 45588 - DNA, 245 bp, Glycine max
  Clone ID: PAT_MRT3847_141167C.1
ctttaaattgccgaaattacgtgtgaagagtgtgttatttgaaaaaaagggaaacaataaaatacgggggaggggaccaaaaaaacaaaataaaaatgcaaaaaaaatcaaatactacaactaaaaacataaaggggaacaaaccaaaaaaaacctaaaaggggcggaccccaccatacggggctgtcccaccccaaattaattttcgggacccctaattaaattcaaccccgttcccccaaggg

SEQ ID NO: 45589 - DNA, 339 bp, Glycine max
  Clone ID: PAT_MRT3847_141168C.1
aagctggcaattcggttcgagatttaagctcacaccgtaacacatttttaccatactaaattctgaaacccttttctcaagggtgaggcttaggcatatacctacctcttcttcctcctccgaccagggcccaacacaaacgcaccattgggctcgatctctgggcgacccaatgtcatggagggatccccttacaactacatcacgcttcgatcgacccaccatggtccttcccccaatgctcgtattcgacttcttcgtcatggacgccattctcgcctggttccgaggagagtccgctgccgccaacgctatgattgacggcctctgtgcccacct

SEQ ID NO: 45590 - DNA, 285 bp, Glycine max
  Clone ID: PAT_MRT3847_141169C.1
tgctccataccaggaacggcgaccgcatctacggggagactttaaagctagcggcgggacaacaacagaggagagcttgagacacactaaacatgacggaactcatcggttactcggctgaatccactactatgccattcccatgatctccgaactgatagagaaagcctctaagggcgcacttttcatgatttaaatcgggctttcaccgccccgattagcacgattacctgggggaggagacatcaaacacagcaagaaatagctctgtaacttccagaccac

SEQ ID NO: 45591 - DNA, 428 bp, Glycine max
  Clone ID: PAT_MRT3847_14116C.1
aaaacaaaaattacccatatttattggtactaacgccacatcgggtgtctgaatttcttacctatagggtaccacttttcgagaatcccagcacgtaatttaaaagcatcttaccctggtcataccctcaaaataagaaagtgtactggtcatactgatattgccccctatactagagaagtgatcattacatggcccaaatcgcttctctttctttttggggaattaacgaggcaagatcatgtgccactaattgggcatgcatgttatattcaaagaaacccgtttttgacagcccaacacaaatacaaaccattttcgacctttccagtgatttgggtaactgttttttgcgaagccatccccatttaaaaaatctcaccccccttaagccatatttgaggtgatcctttggggcctggtcagaa

SEQ ID NO: 45592 - DNA, 301 bp, Glycine max
  Clone ID: PAT_MRT3847_141170C.1
cgacaagaagactgcgacctctcacaccagtgcacgcggttacacaggagatcagggagcccagggaatccggagcagtgacgacattcgaagttggtccctaccaagtccctcaactgtggactttcttcagcaccatccatcacaaccagcaacaaagtcatcgagcaaacgtagtgacggttctcgttctcagtgatcatccatcgcatttacacgacccagaaggcaacgctacttgaccgacacatacttgcatcacggaactacgcgcctcgagataatcccgcaacgccagata

SEQ ID NO: 45593 - DNA, 1240 bp, Glycine max
  Clone ID: PAT_MRT3847_141171C.1
gcgtgataccgacataccgtgaacatgcccatacgtgatcacagagattctggtaaacacgtgcagtgtttcaaaagttactaacggacacagatccaagcagttgcgacttgcgagatgcattcgacgaagagtagcaccagcgataatatcaatatcaatatcaaatcaaaagataaagaaatccatcgatgctaccataactaccgaaagaagagaaagcgtccttgccaagacgctgtggctcccaccacggaagacgacaactgctgcaccaaggccgccgccgcatcacacggtttcatatccgttatagggcggcggcgcgtgatggaggatgcagtgaaggtggttaccggtttggtggcggcggaacaacactgtggcggttacgatttcttcgcggtttacgacggccacggagggaccttggtggccaacgcttgccgcgacaggctgcacttgttgctggcggaggaagtagtgagggggaccgcagcagacaaagggctggattggtgccaggtgatgtgttcctgtttcatgaagatggacaagggagttggtgaggagaacgatgatggcggcggaaacaccatgggttcgacggcggcggtggtggtggtcggaaaggaggagattgtggtggcctattgtggagactcaagggcggtgttgtgccgtggcggggtagctgtgccactttcacgtgaccataagcctgatcgtcctgatgaaaaagagaggatagaagcggcaggtggcatggtcattaattggaacggaaatcgtgttttgggagtacttgctacttccagatccataggggatcactgcatgaaaccttttgtgatttcacaaccagagaccaaggtgtacgcacgaaaagagtcagatgagtttgtggtagtggcgagtgacgggctgtgggatgtagtgtctaacaagtttgtttgtgaggttgtacgaggttgcctccatgggaaaatgaggaggaattttaaagaggactccattataagctatgcaacagaagctgcagcgttgttggctaagttggctatggctcgtggaagcaaagacaacatcagtgtcatagtcatccaactcaacactactacaacttgatcgttgccatattcaagctcttattttaacttttcgcgtctaattttccaaagttgtcctgtattattcatttcaatgtagtgggaatgctctttactaattttcaacagcc

SEQ ID NO: 45594 - DNA, 501 bp, Glycine max
  unsure (1)..(501): unsure at all n locations
  Clone ID: PAT_MRT3847_141172C.1
ggctcgaggtgacaggtttggatttagactgtgggcctttcctagctgtgcacgcgcagaatgcggtcgaaaaagggttgcttagcgaagctgatgtgaacggtgctttggtgaatacactgacggtccaaatgaggttaggcatgtttgatggagagccatcggcccatgcatatggcaaattgggcccaaaagatgtgtgcaaaccggcccatcaagaactcgcccttgaagctgccagacaaggaattgtgcttcttaagaacactggtcctgttttgccactctccccacagcgtcaccataccgtggctgtgattggacccaattctaaagccaccgttacaatgattggaaattatgctggttagtgcatgatatccccaagtctaaataaataaatttggctaaaacagctttaattgtcttgttacctgcctaaatangtgttgcatgtggatacaccaatcccttacaagggagtagaagatatgccaagac

SEQ ID NO: 45595 - DNA, 541 bp, Glycine max
  unsure (1)..(541): unsure at all n locations
  Clone ID: PAT_MRT3847_141173C.1
atattatgattatcagaaaagntaaactccatcgnggaggtggtgtttttgactattctaaatggagggatttgaaagtaggagatgtagtgagggtggaaaaagatgaattttttcctgctgatctcatcttacttgcatcaaactacgatgatgcaatttgctatgttgagaccatgaatcttgatggcgagacaaatctgaaactgaaacaagcactggaagcaacttcaaagttgcatgaagactcaaactttcagaatttcagggctgtcatcaaatgtgaagatccaaatgcaaatttgtacacatttgttggtagtatggagctcgaggatcaacagtaccctcttgcacctcaacagctactgcttagggactctaagctgaggaacacagattttgtttatggcgtggtaatatttactggacatgatacaaaggttatgcagaatgcaacagatcctccatccaagagaagcanaattgagaaaaggatggataagattatctactgcctcttctttgacttatttaattt

SEQ ID NO: 45596 - DNA, 114 bp, Glycine max
  unsure (1)..(114): unsure at all n locations
  Clone ID: PAT_MRT3847_141174C.1
ganaggatgngctgtccaccggcagggcttggtgatgcttgctgctggattgcgatgcctgccgctgtncgtaagatgctgcaantncgaaagnccctgcaanttgtnccagca

SEQ ID NO: 45597 - DNA, 371 bp, Glycine max
  unsure (1)..(371): unsure at all n locations
  Clone ID: PAT_MRT3847_141175C.1
atccggtccaaggaaaaaaacaaattataggaaagggttttagattctggtttagctcaaattctaggtattatgtcaagcttatctgtgcaacaagactagtaaaggttagtttggtaggtgaagtctccaagggaaaataaagaggggaaattgttagattgggttttttcttatgacttaattaacataaaatgcaaggttaatcgttctgggtttacgaaagttgcctgcttcattgattacagacctgaagagttttcanacanaggacgagggaaaaaacaacctccatggcgggtgttttctttgaaggaattacactccgctacaaataatttcaactatgataacaagctcggcgaaagggg

SEQ ID NO: 45598 - DNA, 440 bp, Glycine max
  Clone ID: PAT_MRT3847_141176C.1
gcttgggtgctatttgtggcgctggcgtggtgaagggtttcgaggggaaaacaaaatacggtgcgttgaatggtggtgccaactttgttgcccctggttacaccaaagatgatggtcttggtgctaacattattgacactttcatccttatttacaccattttctccaccaccaatgccaaacatagcaccagagactcccacatccccattttaacacccttaccaattaaattcactatattcttaattcacttaacaaccatccccatcaccaaaactaatatcaaccctactcatagtcttaatactactatcatcttcaacaaagaccttaattaaaataaacactaaatcttctaaataaaaccattcatgcatacagctcttacaacactctaccaccgagtcataatcaaaaccattgcgttcaatttcaaa

SEQ ID NO: 45599 - DNA, 503 bp, Glycine max
  Clone ID: PAT_MRT3847_141177C.1
tcgttttgatgccgtggctatgtaaggatggccaaatggaagtatacatttctgataaccaatatccattggtatcttatatacaccagcagatcatacttaacacccggaagagatcacagatacaaaaaggggatatgggaatatagctaaggtctaaaagaggattcatgaactgaagtgtcgagtgtgacctctttgttcattgaatcataatcattcagtctaagcaagccgcttagcgcatgaagtcacattgaaagatagttgtcacgaggcgcacatcctgtgcttaacatgcagtcacttgatccagttgtgcaagcgcgctcagctcaagtgtcgcgttatgcgcacaagaaagttttgattgaccaatcaattggtgaaacatataaaacgaaaagggaaacatttgtttgcttagaacgaagaaaaacaagaagttgatgaacaaagaaacaaggaaagtaaagagtcagtgtaggaaaatctatttcaga

SEQ ID NO: 45600 - DNA, 544 bp, Glycine max
  Clone ID: PAT_MRT3847_141178C.1
ccacgcgtccgcggacgcgtgggcttccccaaacacggtgtggtctgcacgcgactcctcccccctccgccgccgccgccgccgcagcgagaccccggcgaatggcgtcccgcatcgcctctcgcctcctccgccgctccaacgcgactctaggcctcatcaggagttattcacatgccaggaactacagcagtcaactttcagctcttattccaattggttcccagagctcaaagcttacaagaagacgctattacttgccaaatgcctctccgtaccaactctggagtaggtcatttgcatctgacaatggagaccaggttgaagctgttgtccctttcatgggtgaatctgtaactgatggaactcttgctaacttcttgaagaaacctggtgacagagttgaggctgatgagcccatagcacagattgaaactgataaggttactatagatgttgctagtccggaagctggtgttattgaaaagttcattgctagcgaaggtgatactgttactccaggcaccaaagttgctatcatatc

SEQ ID NO: 45601 - DNA, 419 bp, Glycine max
  Clone ID: PAT_MRT3847_141179C.1
aattttgtcttaaaacgctgtttagcattattgcgccggggcatttatcaataaccaatccctctctactcttttatcttctccttctcttctctaccgttttatcttctccctcttcacttcattctttactctcctctacattaaccaccatacacaacacattcaccgtcgccgatctcacttctactctcaacgaagacaatagaacagaccttgtctatcctcttaacatcaacatacacagtttgactctacaacactcccatattctagagtctctgtcccccaatgtccgaaagcgtcttgaggttcttatacacatccactgccaacatgatgaattacaggctaaattttttgaaaagagaacaacatctcgatgccaaataccaaaaattgtattaaccactttacac

SEQ ID NO: 45602 - DNA, 292 bp, Glycine max
  Clone ID: PAT_MRT3847_14117C.1
gaacgtgaaaataacaaacactatgcattgtctgtgttttttttttttttctattattccaattctaggtcttcttcattagagttgggggagaggggaacaacatcacatttattccttcttctttttcatacttttgttttatgataatctttttcatattctctcaaacttcctcttttcatcatcattatatccattgcttcttaatttttacttatttccttcatattccccactctttccttttttttctctccatatttctttttcttacattgttttcattctt

SEQ ID NO: 45603 - DNA, 157 bp, Glycine max
  Clone ID: PAT_MRT3847_141180C.1
cttgtttcacctcatacggtatattataaaggacttagttaccagacaaacaattccaccgatttcctgtccacgcaataacgatataagatccttaatattatttagtttcataaaatggaataaccaccaacttatccaatctgtccatttattg

SEQ ID NO: 45604 - DNA, 241 bp, Glycine max
  Clone ID: PAT_MRT3847_141181C.1
tttgctttttttacggatccatttaactattttccctattgcgagtaagacacgaggatcagggcacccatcacaccaacttgagccctaagaactatcatatccgatattaccacaggacaattagactgcacactatacaccgtactacccataagaactcacacaaaaagatcattgtttatcaccactttcaacaccatccaacaattgacactctacacctgaatgcacctcaact

SEQ ID NO: 45605 - DNA, 249 bp, Glycine max
  Clone ID: PAT_MRT3847_141182C.1
ctctgacactcacactccgttaagaatggtatctatctatctcataccctaacacaacacattcattcgactttacgtctgtgctgattcactctctccatgggcataccacaatacttgactctagactcttgcgagtggctttttccctacatatacaacaaggccctgaattcatacgcatgacaatactactagctggtcgctatctttcggatcgatgaacaacgattacgaaatcctatgaac

SEQ ID NO: 45606 - DNA, 1296 bp, Glycine max
  Clone ID: PAT_MRT3847_141183C.1
tcctctatatcggccgcttttttttttttttttttttggatcttgatcaaagaactccatcaattattattaatacaataatgaattattaaatataacttatacaaactcaaccaactagatcggcctaatgatgaaagttttggatggttcatacaagattttaggttcacaccttattctcgccgttaaaaaaaacaaaaaaattcgtacaaattctaaataggaatgatgataacacattggtacttttctagttgggcctggtgcaatcaaacctaatttcaccttgatttccagttttaacaccaacccttcccaacttagtaacagcatcaacaaaagctttctgaaaagctccttcatttgatgcaaataagttgactgtggcctttgaccttgcatctgtaaacagcacctgatcagaagtgaagagacccttaccttgctgcagattcttgaagtattggttgtcaaacttttgaggcgtgacagggtccatgtttatggctattctaggatcaacccttaaggggcacatttgcctaagttgaaaagcatattgtaaattcagtgttgggtcaattctgtttctggggctgaagttgtagattcgattcgagaatttgttgcagtgagagaacccaattgtatgcgcacctgataatgcaatcatatctgtctgggataggccattaaagttaaacatggaattgagctgatccaaattgaattcagggtgaggaagatggcgttgaacactggcaatagtagatattctcccgtcacgccttcccaattcaacattataaaatggtccaccagccaaatttacgacatccctagtagccagagcgagtatgtcagcacaagagactttgttacggcacttagggtctctatcaacagctgccttggctttaatcactgtgtcaaaaccatcaccagctagagaaatttgatcaggatgatccttctctggcctaccatttgcaagcaaaatcgaagcatcacaacccctcacaaagcaatcatggaagaagagtctaagagtggcaggagcagtcacaaaggtctgttggaacttctgtgcaacagcagagcgaaccaactgctccacattggggcatgtgttcttgtagaagccactacttagttgagctgaacttatagtagcactagtaaggagaagaagcaaagacaagaatgcaaatttaggagtttccattagtacttgctaactctttattttgctacttcgacttccccttctgtcgtcttctcgcggacgcgtgg

SEQ ID NO: 45607 - DNA, 353 bp, Glycine max
  Clone ID: PAT_MRT3847_141184C.1
ttgagtaccaataagttagttttttaattaaataaaaacattccttgaagtgtgaacaactcacaataaatgccatcacttctgtaatttaaaatttgtaatggaattgcctaaaaataaaaatagtttcaagtaataaatccaatctatttccaaatcaaatgttactagttcccaaaaagaaacctaaattgctgttcttaattgtcattgaatatatgaagagcttgtataacatgcatattttttaaatcccaattcaacaagcttttgaaactttggttttaaactcagaattcttagccttattaccagaagctccaccagaagagtggcctcctgatgatggatta

SEQ ID NO: 45608 - DNA, 683 bp, Glycine max
  unsure (1)..(683): unsure at all n locations
  Clone ID: PAT_MRT3847_141185C.1
cttaagtntacaccaagnntaatttagcttaaccccaaaatcanccaaagtacagttctgtgatccccatcagaccgatccaatcgccttattttcaaaaaatcacatccttacaaaaaataccacacattttttcaaattcatccacaaaaattgttctttattcttcaagaaggtctattattggtcaaattaatcatttgaaggacactaaaatcgagaacaagcaatgactaaattcacgaatctactttgcttgaacccctttgtagggcccttgccaaagttctcgatggcgtaaaaggcaatttccatgggaagaagcggcagtcgccgaaggagtcatagccaaagaagctcgagataagcgtcatggggggggctggcatcaccgacagcggagaagaaggtgtcgctagaaggatgtgaagggagggtgacagtggagcactaaggtggcactgtttcgggttgactgctcatctaaattgccattagcatcttctccctgatcccccattcccaaaagaattattttttaggattctgtttctcaacaatcaagaatcaaagcttctagaatctagtgttttgcgaaatcaaattggaatttggaacagtgcgacgttgctcatgactttgaggtccctcaattaaaggtttagtgtaacatttgagtgagt

SEQ ID NO: 45609 - DNA, 579 bp, Glycine max
  Clone ID: PAT_MRT3847_141186C.1
ggggcccaaaaaaaaaaaattttttccccccaacaaagggggacattacattaaaaaaaggggggggaaaaaggatttgttcttttcaaaaatgggggaaaaacaaaaaaaaaggggaaaaagggggggggtccccattaggaatccttcctcattggggccggggggggggttcccagactccagagtccaaacagacgggttgaagcttgaagccggaaaatttatcatcaaaaaagggttggccccttggataaagggaggggggtagccccaaatgggccctttagaacgggaactttaaagaaaaaaaagggtcagttagaaaaaacattccccctcactttaaccggaatttcggggggaagctttaacccgggaaaaaattctccgggtccccgggactcgggaaaaaaaaaattttttgggccccccccctttgaaggggggccttggttatggcaaaaaaattttgggcagggacccttccaaaaattgggttttctttaccacctttacgcttaaccttgaaagccccaacagtttaaaaaataaaaggaaggtggggggccttttttt

SEQ ID NO: 45610 - DNA, 282 bp, Glycine max
  Clone ID: PAT_MRT3847_141187C.1
gagtaacgtttgtctcaataaaccccagtgtaggccgcctggatctattgcctaccatcaacatgtggcgcctagcgagcaagtcagcacttaaccgagtctgatcgaattgacatcggcttagcgcaaccatggacatgatgtctgtctatatctgactgtcagtcaatggttcaacaataaacgtttcagactccccgcttatcccattactaattgtgcgcttaccgctatgcctgagcttacctaagtcacagtttttcatcatggttttctgatttg

SEQ ID NO: 45611 - DNA, 631 bp, Glycine max
  unsure (1)..(631): unsure at all n locations
  Clone ID: PAT_MRT3847_141188C.1
agagcgtgctgggtgtcanctgctgcaggagtgtgcggagaaagcgaatgtgcatcccccagagagcattgtggacgaccaagtgtatcttccacctgggcccagtggtgacaattctcacgagctctactgggccggggggggggggtggggttctcctgagggggggagtgtgtgtgaaaatactcttgaggcgcgtgcttgaggtggttttccgtgaaaagcgtccagagagccgagagcgggtctttgggcaaagtgggcgtgaggagtttgagttggatgtgttgggacccctggggctatatcccgaggcgtaagcgtgggttcatggcttgggcctgagtagctatcaagcccttgggttctgtgagcttataattattgtgccttaaattacgtgattttcggggtgcaggtgggcggcgtgctagagttgagttacttatgagttggatgaggaccagggggttcagggttgggcttcgtgggggtaaagggggggaggtggtatatatgggctattactggtgttattnnnnnnnnnnnnnnnnnnnnnnnnnnnnnnnnnnnnnnnnnnnnnnnnnnnnnnnnnnnnnnnnnnnnnnnnnnnnnnnnnnnnnnnnnnnnn

SEQ ID NO: 45612 - DNA, 433 bp, Glycine max
  Clone ID: PAT_MRT3847_141189C.1
aaagtggcaacatcttctttctttctcaagatgatagattcgtgataaagacactgaaaaaaatatgaactaaaggttagcactgctcaagcacgactatgaaatgtgagggaagagaaagaccagtttgaggaagcaaacaatcaaatagttgaacatctgaaattaaaggaaaatgaacttccaaaatcaattagctcatgtagtgttaaagcaaatgttatcaaaagccggattaattttatagaagatacttgggttcttcaacggtgaaatgcataaatgaatgacaagcaagtcaagtatgtaattgaacttattgaacttaagtaatgagaattattttgatgcttgtagaagagtctaatttgagtggtaagactccatgtgtatataaatatatacacaaaactaaggtttacgagtgtgcatt

SEQ ID NO: 45613 - DNA, 468 bp, Glycine max
  Clone ID: PAT_MRT3847_14118C.1
agcacaaacaaaccctttattgcccttggtgaaaattggaaaacatttcttattattggggaacattgagggggaatattaccaatatattacaatttttgataacaaagcaaaaaatgggcaaattggtaaaaaggggggagttaatttgctacatcacgaggaatttggaaagggcagcacacacaactaaaaaatgggaaactccaccatgtccggccaactttttctacttgggggtattgggcattcaaagaaactggagggatatttatgggcacaaaaatatatctcattaagctggggattaccagagggatcaaggtggcatggtatgccagggtttaacccaattgcacgggatattggttttgatatgttgacaaagcgggaaagggttccatctgggttgattccgttttattgaaggatttgaagggggtctaacggggcttgaggggcaaaggg

SEQ ID NO: 45614 - DNA, 397 bp, Glycine max
  Clone ID: PAT_MRT3847_141190C.1
ggctcgaggactggcaccgatggaggatgacttttacctcctcggcggctaggaaatggatctcggccaatacgacgtcagtgaggagagggagatcggctctggcgggctcatgaagaagctgcttacggactgtctaggctgggataccctcgaattcggtgaccatgttctagttcattacacggggactttgctcgacggcactaaattcgattccagccgcgacagggatcttctcttgagacttacgctgggacattggcacgtaaccaaaggatgggatgaaggtattacaaccatgaagaaatgtgaaaatgctcatttcaccgtccctaccgagctagcttatggcgaatctggatcccactctactattactactaatgctacactc

SEQ ID NO: 45615 - DNA, 317 bp, Glycine max
  unsure (1)..(317): unsure at all n locations
  Clone ID: PAT_MRT3847_141191C.1
tnnnnnnntnttnnngggggataaaccctacttataaaacaaaggggggaaacatataagcccaagttgtttactttaattgccaattccccccccccaagggaacttgtataaaaagggggggggaaagaaattattcttaaagatccaccaatttctcggctatggtaaacctgggggggcccattccaaaatttttaattttaaaacacaatactgtggccctgggaaggaaattaaaatattgggcccccatagcaaaaacaaccaggggaagggtttttggacattttttccttaaatgggggcctggaaaa

SEQ ID NO: 45616 - DNA, 355 bp, Glycine max
  Clone ID: PAT_MRT3847_141192C.1
gaagaagttctgcgacaaaggatgggaatgtatgggctggtcaatttacggcggtcaccttactataactgattatacccacacctaccagctagagaatctcttttccatgcggaactctccggtggcgcactccgccggattttgcgactaccactctggcatcgccgctgccgcgcttatctagccgcaatggttcggcaccaccgggaacacgactatgcagatgatggagatggcggcgttgctcggacacgtcagcagcagcacctcttgagggtatagagtgactaccgcaggacctgcgcactgaggtctgcgttactaccatgaaatgactcctatgcagtcatac

SEQ ID NO: 45617 - DNA, 273 bp, Glycine max
  Clone ID: PAT_MRT3847_141193C.1
cgggatgtcagtactaggctggctgtcaggaaatctgatttctagtaccaattgggcatagctaactaggacacttgaagcctgggaaaacacacgcgggcgcatgcgcacacacaagaatacagaagtgtaagttctactggaaagtagagtgggaaacttaattatgacttggaggttttaagtaaactcttctaagtgataatccgatgcattttatattcttggcattgttctaagtcttgttattatctcaattcttacaaaaatccg

SEQ ID NO: 45618 - DNA, 325 bp, Glycine max
  Clone ID: PAT_MRT3847_141194C.1
cccacgcgtccgcggacgcgtggggaacagaaggtgaagtctttggaagagctccagattcattatggccagctgcatggttagaaaacccagctggatcaaatctcattaatgaagcaaacgcttttaacctggctgtgtcggactcagggtctttatggatccttttctctggcctaaccgaagcttgtgaggtgtctatagggttctatttcatttttctcacctattcatccgtatctaggttaggtgtacataaggtgaggaacgtataggtgcgattgttgttcacgcaacacttactggtgattggtgaatgtgctag

SEQ ID NO: 45619 - DNA, 265 bp, Glycine max
  Clone ID: PAT_MRT3847_141195C.1
tggtgtcaaattcggcgaggccgtgtggttcaaggccggtgcacagatcttctcagagggaggccttgactacttgggcaacccacacctgatccatgctcagagcatccttgctatctgtgctgttcaggttgtgctcatggcgctcgttgaatgttacagagctgctggacgaccacttggtgaatgacttgacccaatctaccctggtgctgcttatgacgctgttggtctggctgatgaccctgatgcattcgctgagttg

SEQ ID NO: 45620 - DNA, 285 bp, Glycine max
  Clone ID: PAT_MRT3847_141196C.1
ggctcggctcgaccaaataaggttttttttggcttatcaaagaaacttctagttaggggcatactactatccggactcaggccaaatacaatttggttaacccaaccaaggaccgacaggacccatgatgtatgttatattcaactactgtgctgaagggtcatttacgaagactatggctatgattcatgaaggaaagcaacacaaaaatccggggtatcaagaaatggggtagctcacgatacagagacttcaaccacgatggaaatgttgctgattgtgggg

SEQ ID NO: 45621 - DNA, 281 bp, Glycine max
  Clone ID: PAT_MRT3847_141197C.1
taatttctcaatggaatactcgtcgctgggtaaatgcaattctggcgctgaagagaacggttggccaacggatcgtcaacatgacaaaaatgtgcaattgccgcagacactacgaggtagtccgcaccccgaacccgacaaaacctgacattgattccgatccaggtgacagggggggggtcctccacaagaggggctgcgtgctgcctccggagctccgaccgtcgttgtccgacggcagtcttgttcagaggatcacggaaaaggacattgggccgagc

SEQ ID NO: 45622 - DNA, 131 bp, Glycine max
  Clone ID: PAT_MRT3847_141198C.1
ggtgacagtgatcagttccttgtgaatcgtcaaatataatgctcaatacgtgggttgtaatatgagaaagttgtaagattttgttaataactaactctagcattcagcacccacttcattgttcattttat

SEQ ID NO: 45623 - DNA, 442 bp, Glycine max
  Clone ID: PAT_MRT3847_141199C.1
gttatatctctggtatgttgcgcatctgcctaaggatgtcgccctgctatcacgagttgcttgggtctggcctattcactggactagcgtgtttaccattattgtcctacaacccttttcgttttgggtcacacatcagcactgccctctgccccaaccctcccaaaatgcctcagggactggtgagcgatgccgccttgtcgaaccatgattgggaggaaatggacatggttctctcttcggccgaagatggtgccggctccgttgccgatctttatatcgtgtgctgcgccttgacgctcctggtcaaagattgtctgcctatggggagaactgtctatattcttgaaaagcgctatatataccttctggggctctctggccatgtggacaaggctgcgacgtggcctgttgggatgagtcgttgctgccctacatgttc

SEQ ID NO: 45624 - DNA, 244 bp, Glycine max
  Clone ID: PAT_MRT3847_14119C.1
ggacaacaccattgctatggggagcagaatgagtaagaccgatgacaatcttctttcaatggctcacaccttcaataaaggggatgagggctataagctgctgggccacaattatggcaagggagatgaaagtatcatatcaatgggtcatccctttgacaagggacatggatatttcatatcaatgggtcaatcatatgataagggagatgtccattttatatctctgagcacctcagatacc

SEQ ID NO: 45625 - DNA, 296 bp, Glycine max
  unsure (1)..(296): unsure at all n locations
  Clone ID: PAT_MRT3847_1411C.1
tagctcggagtcggctcgagtacggctgcgagatgacgacagaagggccataagcanatcattattattagatatctaagtgtcatgtgttactattatgtgtcggccttatctgattttcatgtattcaatttctanaattctattttagtatttatattagtttatgtgtttcataagtttgatgtggccgggatacatttggattgtagatgtccaaaggtgtatgntgatctctttgatttctgaaataatgaatttaaaataataacaactangaccatcattttcgttat

SEQ ID NO: 45626 - DNA, 388 bp, Glycine max
  Clone ID: PAT_MRT3847_141200C.1
acatcctttatatgcaacctctactatacgacaacctacaatatatggtgaataacattatgacactgcacaagtagataaacaaactttacaacctcacaaagaacttaaggacattatagctatccttggcttggacgaattatccaaagaagatcgcttaaccgtatcaagagcacgaagaattgagcgatgcttatcacaacctatgtatcaatcaaaagttcttaccgctatgcccaggaaatatgctagtctatcaaacacaatgagaggaaacaaagtgagtcttactctacaaatagatcgtcttcctgaacaaaccatttatcaggcaagtaatatcgatgaatctacatgtatagctaccaacttagaaaaggatagc

SEQ ID NO: 45627 - DNA, 208 bp, Glycine max
  Clone ID: PAT_MRT3847_141201C.1
aggggttctgtgatccacacctccgcaacgggcgtgggagagcgcgtgcaatatcaacttcgacagtggatgcgagcaggcggtgctttcctcttagcaaaatcctcgaaagggctcgccgggagaggtgcgacggaccgcgcccaccaccgagcctgtgggggggttgtgttcggacgaggggggtggaaacaggtgctggataaag

SEQ ID NO: 45628 - DNA, 295 bp, Glycine max
  unsure (1)..(295): unsure at all n locations
  Clone ID: PAT_MRT3847_141202C.1
tttgatgggtgccgttgacggttaccgtcttgctggcgggcctcttggtgcggtgtctggcccgttctatttccgtgtcggctttggcccattgtgctttgttgttgaccctttcgtttttgctgtcttcaatgcgactgagctcttctgtggtgggttggtcttgttctccgtgtctggtttctttttttctgcnnttgcgaccgtcacgggacccttggcttaccttgctgattaccttgctgcccctttctccccccttgtctgcgcttatgcctgcctgtttggtcctggc

SEQ ID NO: 45629 - DNA, 251 bp, Glycine max
  Clone ID: PAT_MRT3847_141203C.1
ccaggaacactacttcattgggaatgcctcaaaattacaaagaagcaaattgaagttacaaaaaataaagcagcagcacctaatgggagtaatatatatcttagggaaaaccaataattcctgtgattccctcgaaaaagaaagaagaattagctggcttggaaggcgagttttcttgtcacagatattcctcaaacatgtattttggggacctgacggacaagggatgaaaatgaaaacccccttcttta

SEQ ID NO: 45630 - DNA, 269 bp, Glycine max
  unsure (1)..(269): unsure at all n locations
  Clone ID: PAT_MRT3847_141204C.1
aaattatgggacaaganaccacaagttgatgaagattcaaccaagntctgaaatagcagctctcacatcttggaatngtcgtggctgangcaaggntgccagcagcaaagggacaagaaaaatctgctttagagaaagtagctattgtgcagaagcatacaaacaagaagacaccattgagtgaganagctgcaaaaattgagcataatgagaagtgtttaaagtttctgncaaagaattgaanncgaaatgtcaggctcaatcacatg

SEQ ID NO: 45631 - DNA, 419 bp, Glycine max
  Clone ID: PAT_MRT3847_141205C.1
gcataggcaatttgtgaaaggaggcccaccataaggcgcaatggcgtgtgtatctggcagaattttggccttctgccatccgccattaatgtgttttttaagtttattaatttagtatttaaaagacattttcatcttagaagaagaaatagaagtaagacgataaagagaatatttgaatataagaattatgtaatgataattttttatgactagattacaatttatatctctttcctttataaaattaacattttttatatcattatatatatgagctattcttgagcctttcatgtcaagtctataaagcttgagctaggctcatttatataaccaagcctaaagtcaaaaggttgaacttgtttgcttattaaaattaatgagcttgatcaagcatttaaagagtggaatttgat

SEQ ID NO: 45632 - DNA, 300 bp, Glycine max
  Clone ID: PAT_MRT3847_141206C.1
cacgacaacagagtacgcaagtaatgacattcacgaacattccaccttcacgtaaaggatgattgtggcgacattacggatctggagtctctgtggcacatctgaggactgagcttcctcaaaaggtattcatccacattctgaggagtcacgaggtatgcacactcgtaccattgtctcagcatgcgcacacgctgaatgcatcttcactacacttgtgaatatcggaagctgaactcggactggtcaaacttccacagctgtctgtgcacactctcacatacacgacggtctcattgt

SEQ ID NO: 45633 - DNA, 690 bp, Glycine max
  Clone ID: PAT_MRT3847_141207C.1
ttatgatgatatgaaatatgcttcagggaaatttgatgactcagaattccgcaatgccttttctcgggctttcataggggtgagggaatatgatcgaggttattctagaagtcctagtcgtgattcaaggaggagctattctagaagcctcagccgcagtccatgtatctcaagaagccgcagccatagccgcagcagaagtcatagctatagtgacaggagcagaagttggtctccgaaaccaaaacactctcgacgttcaatatctctttcaagatcccagtcaagatccagatctccaaattcatcacctcgacctcaccaaagtccaagtagctcatcataatcttgtttggggggagatttgaacgcagctgacctgttgactttggagaccactactgggcatgtaatgtattttgtgtgctgcattttaatttgataactacccagtagcacgtttaagacccaatatagctctgtcgccacattagcatgtaaggtatttgaattttaaatttgataattgaagccatgaaacaaaccttttaggcatttaagtttgaagtggatgatttgagctagaaaaaaaatgtatctgtattatcaactgtggccgagatacattctaacttggccagcgtgtttagtagtttaaccctgtgatattggatatcctagttaccgtgt

SEQ ID NO: 45634 - DNA, 322 bp, Glycine max
  Clone ID: PAT_MRT3847_141208C.1
ctggtttgtgcagtaactcgccttgctacattgtcatttaaccggccaaagacacaaccttgtgttgccgttctagtgtctgctttggacaccctctctctctctccctcattttgatgtgatgatcccagatgaaccaccttctcactgattccattttcttttgagggggggagtggccacccttttaaacaaaaagatattgaactgggacagggggcgaggagcgacccccatctgggaatgggagctcttaataaacagatccatgaggctgataaaccaacccaaaaggtttgcgggctacttcaaaacctcaagg

SEQ ID NO: 45635 - DNA, 373 bp, Glycine max
  Clone ID: PAT_MRT3847_141209C.1
aatataactatttttatgaatcaatgtttatcgggcacggaaatcaaaaaaaacaaggtcttataatttattgggtgggcaaaaggcccaccctttgtctcagtacaacatttcaagattactgcgactgcttgcaaactggaataagagccccgttcttttatttattcagcccacccccacgggatctttagatgatgatttttgatgcccccgggttttaacaccggaagagtgtttaaaagatggcggcttgtccccagaattaaaaactgcctctctccttcttgccccggtggggggagtttcatggaaagaaaccttccctactatactgattacaagggggtcttgggggcgaaacaatttgggc

SEQ ID NO: 45636 - DNA, 478 bp, Glycine max
  Clone ID: PAT_MRT3847_14120C.1
ccacgcgtccggtggttgttaacgttttagccgtgtcactgatggggggagctgacgctgatattacctcagttgattaatcgtgctgctggtcgtttctgcggatgcggaggatctcgttatacacaaccttcatgctaggacaaattttgccattattctattggtaggacattcgcactattgaggctcaattgaaaccggttgttggctataagagtctttgtgcggttttcaggacagacttattgatcggctggactgtctactggatcctagcttactttctcacgcgtgcaagatcatttttcttaattagcggtacctgctttcatgagactagccggaagcactcaactggaatacaggcagaaccttgagaaacctcaactttcattcctggaatcattcttagatgtcggattcagtcttgacaagaaaaatgctcttgcacatcccatcggctacagaatgcaaa

SEQ ID NO: 45637 - DNA, 245 bp, Glycine max
  Clone ID: PAT_MRT3847_141210C.1
gctgggaacgggctgaaactgacgattctaagaccaagtcagagactactggacgtctataagagcgactctcaacgaggacgttgagactttttgaaaaaaaaaaagattttttttggcttaatccgcctttactaaagatcaaggagtacacttgtttgtattccggctaataagggaaaggtttttttttcaaatccaagtttgactctgattagatccttagcgcaaggctaagtaagccc

SEQ ID NO: 45638 - DNA, 573 bp, Glycine max
  Clone ID: PAT_MRT3847_141211C.1
acggctgcgagaagacgacagaagggaggtgcatgtgtttatgatggcagataggtatcacaagcaatcagatgaaatatataaaaagttggatgcggtagtcagtcaactgaagctggttggctacacacccagtacttcgggcatattggttgatttagaagaggaagagaaaaaagaagtagttctttggcatagtgagaaattagcactgtgctacgggctaattggtgagagaaaagaatcatgcattcgcatagttaaaaatcttagaatatgtgaggactgtcattcctttatgaaattggtctcaaaggtgcaccgaatagagattgtcatgagagataggactaggtttcaccattttaatggtggaatatgttcttgtagagactattggtgaattgtttctattagtaaattgaattacactagcaattcctcatttttgggccgccgtatagattctacagcatgtacttgagcttgttgaaggctcactactataaagctgatcattatttctggttttgcttaaaattacataaattcatttggcagttgatactctac

SEQ ID NO: 45639 - DNA, 424 bp, Glycine max
  Clone ID: PAT_MRT3847_141212C.1
gtggctgtttgtggtatggttggttcagggaaatcaagttttcttttgtgcatccttggagagattcctaaaatttctggtgaagttagagtgtgtggctcttctgcatatgtctcccaatcagcatggatacaatcaggaactatagaagaaaatatcctctttggaagcccaatggacaaagcaaagtacaagaatgttcttcatgcttgttcactgaaaaaggacctagaacttttctcacatggtgatcttacaattattggggatagaggtataaacctgagtggtggccagaagcagcgggttcagctggctcgggcactctaccaagatgctgatatttatcttcttgatgatcccttcggtgcagttgatgctcacactggatcagactttgttagggagtatatattgacagcac

SEQ ID NO: 45640 - DNA, 475 bp, Glycine max
  Clone ID: PAT_MRT3847_141213C.1
agaaatgagcataacttaaacactaaaaatgattgttctgttcctgtaactgattactcaagaatcaaaatccaaaattcgaagttgacatcctgatatgaaaatgcttaccccatcagaagccaaaaccacacacttatccttcttgggaagttttctttaagacacatcagggactgaggcgacaccatagtcttttaggcaaaaatttctaaaggctcttgccatagccagtccagggcagtcccttttaggcatccatactctgtttacagtaggatctttttctacagcaaaaattctcatagcttctcttggaatatctggagtcaagtcaacagtaagttgaacaggaattaggcgattgtcaggtgctcttctgcaaagaactgcacgagaatccctcacattgccaattattacttggtcaccctgtttgagtacaaatacagaagtgctaccgccatgaaatcca

SEQ ID NO: 45641 - DNA, 692 bp, Glycine max
  Clone ID: PAT_MRT3847_141214C.1
aaaatcaacccgaacttaaaccgagcctcacccgaacctctatctaatccaaataaccctgtcattcactatcctccagaagctgcttattcggtaaatccggttccggttttttatgtatccggtccggttcgaccgggaactgttccggttcctatgcaaaccccttacccctacgttcaacaaccatatcatgctgtgatgccacctcaggttccaatcgggtaccatcatttggttccgggttcgggtcaattatatggggcgggcgtgaggcacgtgaccccactgcaaccttacagcccctccgccgcggtggttcatgatggtttgaagcagcatgggtatcatcccgtgccgaataccggttcggttccggttcacccggttacaccgatgacgggttcggttgaaccgcagagaggtggagcggagtttgtggcgggtcggggccccagctcgttaaataactgaacccgttttgcttagggaatggatgctgaattattcctatgatcatgcaaatgggtaattcatgtctatagtacgtgcctgtatgcaaatgggaaatgggaaatttgaatgcattacaagccaaaaaatggtaattacataaaattgtttgagaaaatcatttcaagttgtatattaaaaaggaaaaatgttaataaattatatttcattatgctacc

SEQ ID NO: 45642 - DNA, 454 bp, Glycine max
  Clone ID: PAT_MRT3847_141215C.1
aaattcatgaggtagagagctggggagagaatggttattacaagatttgcagaggtcgaaatgtgtgtggagtagattccatggtctcaactgtagctgctatatatccatccagccattaaatacaaggatatgcatatgcctgattgtagttgtgtgatatgatactgggctaggggagtttgtataaatatttatgttgtgaaccgtattgtttggtaccggtaaaattatctccatatagggtcaggaaactgctaagatcatgttgtttatgtggtatgtaattctgtatgtatgcttgttagacaaagtgctgttgtccattgttatgttatggcaacttggcagagtaaatgaattggaaatacttcagtgtaaaattttattgcctcctaatatttgtagtacatgttttgaaatatcagggtaatttgaatggaaaaaaaaaaaa

SEQ ID NO: 45643 - DNA, 240 bp, Glycine max
  Clone ID: PAT_MRT3847_141216C.1
gggagccaagagattcaagattgtagaatcaccgtgtgtgctgaggcgaccttatactcagagcaccaatccaacgcttccggggcaatgagcaatagaacaccacttcaaagatccctcagtagacccaatgactggaaaggctgcacccgacctattttgcccaaaaagtcgttccacatcacaaacaagaacggcaatcttgactgcttggactctagagagttaccaaatagcttt

SEQ ID NO: 45644 - DNA, 783 bp, Glycine max
  Clone ID: PAT_MRT3847_141217C.1
gattagatgtaaatgtaaatggaatcggaatgaaatttgtattcctccgaagaggcacagcctgtgcagcagtcggagaagatgccacatctcaatcatttcagcatcgccctcgccggaaataaataaaaaccatattccattcactttttcgctttcccttaattcttccaaatctgcgaattcagacgcacaataatcgaattccctctttctccgcaattcatcctctcttccacgaatcaaaaacaaatccctaactaaccgattcgatccacttcaatggcgggacccaacatggatcagttcgaagcgtttttcaggagagcagatttggacggagatggcagaatcagtggagccgaagccgtctcattctttcagggatccaatttgcccaaacaagtcctcgctcaggtgtgggcgtatgctgatcaggccaaaacgggtttccttgggcgcgcggagttttttaatgctctaaggttagtcactgtggctcagagtaagcgagatttaacgcctgatattgtgaaggcagctttgtatggtcctgctgctgctaaaatccctgccccacagattaatcttgctgctgtgcctcaaccacgcccgaattcgatgcccggtggtgctgggtctgtcgggcagatgggtgttaccgcacccaatttggctcaaagttttccctatagaggacaagggttggcaggtcctggtgcaaacccgcaatattatccttcgcagcagcatcctggcatgagacctcctcaatccatgcct

SEQ ID NO: 45645 - DNA, 747 bp, Glycine max
  unsure (1)..(747): unsure at all n locations
  Clone ID: PAT_MRT3847_141218C.1
gtagatgtaaatggaaatggaatgaaatttgtatgcctccctagaggcacagcctgtgctgcggtcgttcgttgcagtcggagaagacgccacatctcaatcatttcaacctcgccctcgccgggaatatatatataaaacatattctattcactttttttttcgctttcctttaattcttccaaatctgcgaattcagacacacaataatcgaattccctctttctccgcaattcatcctctcttccacgaaatcccttactaaccgactcaatctacttcaatggatcagttcgaatcgtttttcaggagagcagatttggacggagatggcagaatcagtggagccgaagctgtctctttctttcagggatccaatttgcccaaacaagtcctcgctcaggtgtgggcgtatgctgatcaggccaaaacgggattccttggccgcgcagagttttttaatgctctgaggttagtcactgtggctcagagtaagcgagatttaacgcctgatattgtgaaggcagcgttgtatggtcctgctgctgctaaaatccctgcgccacagattaatcttgctgccgtgcctcaacaacgtccaaattcgatgcctggtgctgggtctgtcgggcagatgggtggttaccgcacccaatttggctcaaagtttttcctatagaggacaaggggtgggcaagtccctggtgcanacccgcaatattatcctttcgcagcagaatccctggc

SEQ ID NO: 45646 - DNA, 357 bp, Glycine max
  Clone ID: PAT_MRT3847_141219C.1
gcgttcgccacgcgttcggcacttaaagggttctcggcggactttcttcaaacaccgtacgccacggaaattcaaattaacaccaccgctctgtcagcacaaatcccttgccactctctcccacttcggaaccctaacctcccgccagaaagaccagattcatctatacgttgaaactcttctgcaatggaacaagcagttagagaggtgaatgaagggatggaaagacacgttgaagactccgctcggactgcggcgctttgtgcaataagctgagtctcgtcgatgtcggaactggcgctggccattccggaatagttttggccataacacgccctgagtgggatgtaacgctga

SEQ ID NO: 45647 - DNA, 1769 bp, Glycine max
  Clone ID: PAT_MRT3847_14121C.1
tgtttctaaactattcatctttgtggaattgattaatcggcaacaaaacctagtgatggttttgattcgtttgtggtttgttttgttaggattctttggaggcttcggttcagctgcggagcaaagaaggtggacactaaatgatttcgatatcgaaaagcctcttggaaggggaaaatttggtcatgtctatttggccagagagaagactatgagtttgcgattattttcagattttctctctcaaataacaattacaatactaattcctgttgattgtggatagttcgtaattgcgctaatttctacggattatttcattcccttcttgatttattttccttgtgtttacatttgtttggggaaaagtttgtttgtgctattcttggttgctttggtaagctttgtatgtgatttttgcatatttttttatatttctcattgaggatttgaataagaaactgtttagaggtgtagcaactcaagttttttgaagagttggtttttgatgaggtattacaatctttgtggtaaagtggtatagggtttttcatctttaccaccactgttctttcgtctaattgaaaattgcatttcaacacaaggaccataggggcgtgagttgctatgcattttccacagttaaaccccaaagagctactacatgagcatttagcgtgtcttcacctaacaggattttggaattgttggtttgatcataagagctattgcattatacatgagctttgttgatttctatatatctgaaatggttttcttcaccttattgttttcacatgttaatttaattgtgaaactgaattgttgtttgatacagagtaatcatattgttgctttgaaagtactctttaagtcaattgcaacaatcctaagttgtgcatcaacttcgacgtgaagttgaaatacagagtcatctccgacatccccacattttgcgcctcgatggatacttttatgatcagagtgggacccaaaggtgatctttacaaggaattgcaaaaatgcaaatatttcagtgaaagacgtgtaactacttatgttgcatcattggcccgagcctttatatattgccatggaaagcatgtaatacatagggatattaaaccagagaaccttcttattggttcacagatacaagagatttatagagcttatggttactttttgaagaaggattatgtgataaaggagaaacatttttgaaagtagcagatctcttatttagttttttagttgctagcatacccaaatgcttcaagtatattccaaggtacttctgatatcctggatatgttggcattctactcctacactatatttagtaaacatatactatgtcttctatacaatgtgatatgtattggccttacctttcaagaatccaagattgaaggtatgaattaaatgtctctttatacacacctcataaatttgaatcatgtggaatgagttgagtcttgactttattgtgcagtggcttttattggtattcactttgtattcctcttttgaaaacccaagccagtgttgagaatggatctatgtgatatttacaaatgttataagaattttgtcaaatccaacatatattggataacactctttaccttaaactgctccttcctaaatttgattttagggcacataaaaaggtagaatagcatactttgtgtcaatttgatgtttaaaaggaaaaatacaattattttgttctgaaaataatgaatcaaaattttgtcttatgctat

SEQ ID NO: 45648 - DNA, 178 bp, Glycine max
  Clone ID: PAT_MRT3847_141220C.1
gcataccgtatcatgtcttgcactgtaacatgctccaatgctgtgagggcaggctggggagaggagcgcgttcctctcaggatggctgcccgatctgctttctgtctcgtgcccagagagactacgggttagaattcaactaaaggggcaggtgggagcagggatgggggatgttctt

SEQ ID NO: 45649 - DNA, 174 bp, Glycine max
  Clone ID: PAT_MRT3847_141221C.1
ctttctcttgggcaaagggagctatcgggagacaccatcatggagatcttgcccaagactctgaggggcaagagcatcaatcttgaggtggagcccactgactccatcaagaatgtcaaagccaacatccaagacaaggaacggctccctcctgaccattttaaagtgatcatt

SEQ ID NO: 45650 - DNA, 168 bp, Glycine max
  unsure (1)..(168): unsure at all n locations
  Clone ID: PAT_MRT3847_141222C.1
caactaagtgaattgccaagcataattgcataacgtggggttcacaagttctttgcaaccaaaanaaaanaaaanganantanaaaaanaaaaaaanttaagaagnnatnatnaggccatantcctataggatnnntttggatccggccatttggntanntncttact

SEQ ID NO: 45651 - DNA, 476 bp, Glycine max
  unsure (1)..(476): unsure at all n locations
  Clone ID: PAT_MRT3847_141223C.1
ggctcgaggtgcctgacttgacagaagcctttcaagccatccttgttgttgtatactggtcaattgcttccactgttgcttccaccggcaatctcatcggtgtatcgaactataaattatcagaatatacattcaggctttccactgctgttaacaagttgacaatgcatcttacgaaagtcaaagagcaaatagccaatgtacgagattacattaccatcaggaacatctttgacaggccgaaagatattgtggaccttttgaaggctctgatctacccccaacaaaagggagctgagaatcccaagatatttgaagggaccaacctagtaacaaagggcattgaagtgttcaggcagaaacatgtgttgctcttcatctcgggtctcgacagcattgaagatgagatttcgctattgaattcaatatatgaaagattgcaagaggatccaagagaagcanaaggtttcaagaaa

SEQ ID NO: 45652 - DNA, 1711 bp, Glycine max
  Clone ID: PAT_MRT3847_141224C.1
ccacgcgtccggcttaccaccaggccctagaggccttcccttcattggcaatctttatcaattcgatagttctactctctgtttgaaactctatgacctctcaaaaacatatggtcccatcttctcccttcaacttggttcaaggccaaccctagttatttcctcaccgaaactcgccaaggaggtgatgaatacccatgaccttgaattctgtggtcgaccctccctcataagctcaatgaaaattttcatataacgggctagacatggcattttcaccctatagagattattggagacacacaagaaaaatatccattatccatttccttagcctcaagcgtgtgctaatgttttcctcaacaagaaaatatgaggttacccagttggtattcggctcgagggaacacgcttcttgttccaaggttaccaacttgcacgagttactgacgtgtctaacaagcgctatagtgtgtaggactgctttgggaagaacgtacgaaggggaagggattgagacaagcatgttccatggcctgcttaaagaagcacaggatttgatatcttccactttctacactgattatattccatttgttgggggagtgattgataaactcaccggattgatgggtcgtcttgagaatttgttcaaggtgttggatggcttttatcagaatgttattgatgaacaccttgatcctgaaaggaagaaactcacggatgaagaggatataattgatgccttgcttcaattgaaggatgatccttccttctcaatggatcttactcctgctcacatcaaacccttgatgatgaatataattttagcaggaacagatacaagtgcagccgcagtagtttgggctatgacggcactgatgaagagccctagagtaatgaagaaagcccaagaagagattagaaatgtgtttggtgagaaagattttataggggaagatgatattcaaaagcttccttatcttaaggcagttataaaagaaacaatgagaatgtacccaccactgcctcttcttatacatagggaaacgattaaaaagtgtagcattgaagggtacgaaattccagagaagacattggtgtatgtgaatgcttgggcagtgcatagagacccagaaacatggaagaagccagaagagttttatcctgagaggttcctagacagcaaaatagattttaggggatatgatttcgagtttattccatttggtactggacgaaggatttgcccgggtatcaatatgggaattatcacagtggagcttgtgcttgctaatcttctctattcttttgattgggaaatgcctcaagggatggaaaggaaagacatagaccctgatatgcttccaggacttgtccaacacaagaaaaatcctctctgcctagttgctaagaagcgagggtgatttcgaatttgcatcacagtgttattataaaagtaattagaaaataatttatgtaggcattactatatgaatcgtgtaagaagtacaactgatacggggtaattacttattaaaacttaattagtgatcgtgagtttgagtcttggatatgcatgtacgattacatttaataattggaatatgagctttgctgtccatcataagtttatcttgttcaagcaagactgcttctagtaaaagacccctaggtttcttaccaaaataaataaataaattgtttctgt

SEQ ID NO: 45653 - DNA, 447 bp, Glycine max
  Clone ID: PAT_MRT3847_141225C.1
ggaaaatctttgctgtaatcagagtggtgtaaaagataatgactatataatattgtccagtgtggtaaatttttaaaccagaccaagaattgaaaatgatttgttggtccatggaagtataaaagactatggcgtacaaagatggcttattacagccaggtactcgtttgggcctagcagtgaatcaaacaattaaaaggatggtccaacagtaatcaagaagatatgaacatttgcttgagcccataaaaaaaagtggcacacaatggacaatgtacgcatccttcccgcatatcccgcacatagccacatacgtgttctattctataagcgttgtttacagaataatttggttttattcaccatccgttagttccttcacgttgaagtcatagacaataacgcataccaaacattaaaataaactaattagctagctagacttat

SEQ ID NO: 45654 - DNA, 552 bp, Glycine max
  Clone ID: PAT_MRT3847_141226C.1
gttaaaaaaagatgttcctctcactaatttcattagtatacaatgtatccgcatgaaaatacctttccctacagaatatgtcatgaaaattacaacagctgcagagacaagaaactgcgatggtgaaaaaaatcgattaggattgaaccgaattgaaactgaacttaaaccgaataggtttttccccgaactagtgcaagaaaaaatgagggtaccttttttttaaaaccaattcggctgaccaaaatgttggtacaaaaccagtccagttaaccgaactggtttttttattgtgcaaaaaatagttcaaaaattaattcgaaactgatatcactcttagaactgaactaaaaatggttcaaaattagcgcaatttaaaaccaattttggaaaactggaccggttttgaaccaacttctaaatcaaccggactgtttggatataaaatgcaactgatttaaagaatgcacaaccagggtgcttaaactcttttaacgaactaaagtttgaataccgctcactggtggtgatgaccaggaaccttaccacttg

SEQ ID NO: 45655 - DNA, 317 bp, Glycine max
  Clone ID: PAT_MRT3847_141227C.1
gtgtaactgttaatgaatgcaaatttccactttctatgcatcatctatatacaatcacacacatgaacttattttatggggggctattataaggggggggaagcaaatacataagctcgttcaacaactacttaactcttatacccagtaattaatacataaacggtacccccatacataccactttttcctatagaaattccaatcagagctaggcccaataacaactataattagttcatgaatcatattatgattcattcacaaattcacacaacatccaacaccaagtgcctaagttttaattccatcaccac

SEQ ID NO: 45656 - DNA, 209 bp, Glycine max
  unsure (1)..(209): unsure at all n locations
  Clone ID: PAT_MRT3847_141228C.1
gggcttacgtagcanattcttatgttgggtcgattctggactttcactctctcatctctcggttatgtcttggtaaactataaactcttatctctttccaacctaaaatcaagaatctaattctctatattttctccatgaaaaaatccgcctaccatcatcatctttttattcccagaggaagaaaccttgctttttatatataaaac

SEQ ID NO: 45657 - DNA, 169 bp, Glycine max
  Clone ID: PAT_MRT3847_141229C.1
aaatcattatatcatacgtagggggttttttataattggtcttcttcattaacttgatcttattctttttcttgggctatgttttttaggaaaaccatttcatgaccgggggatactaatatataaaatggtgtagataaaaagaatgggatatgcatataaaactttt

SEQ ID NO: 45658 - DNA, 2294 bp, Glycine max
  Clone ID: PAT_MRT3847_14122C.1
agaagaagaagaagaagaagcatgctgtgcttttacttgtgcctttgggtctgagaagacccaattcacgcttgatcaggaggtgcaatcaattgggtggggggaggggataggagtcctatgttagatggaagagtcctctctctgctgcgaacaattgccagatggggaatgcattgaggtggttcagaaagacaaagaagacgatacactgattgaattggactgtcaaaatggttttcctgaaggaagaaaggagtttgttgcacctgctgttggaatggagtttgagtcgtacgacgacgcttacaattattacatctgctatgccaaggaggtggggtttcgcgtgagggtgaagaattcgtggttcaagcggaacagccgggaaaaatatggtgcggtgctttgctgtagcagccagggtttcaagagaataaaggtcgttaatcatttgaggaaagagacgagaactggttgtcccgcgatgataaggatgaggttggtggagtctcagaggtggagggtgcttgaggttacgcttgaacataaccacatgttaggtgctaagatactcaggtcggttaagaagatgggaaatggaacaaagaggaagccgttgccttgctctgaagctgaggggcagacggttaagttatatcgtgcacttgtgatagatgctggaggtaatggaaattcaaactgcggtgcaattgaggacagaactttctctgagtcttctaataagttgaaccttagaaaaggtgacacacaggccatttataatttcctctgccggatgcagttgactattccaaacttcttttacttgatggatttcaatgatgatggccatttgaggaatgcattctgggttgatgctaggtccagggcttcttgtggttactttggcgatgttatttattttgacaacacttatttgtcaaacaaatttgaaatccctctcgtgacctttgttggaataaatcaccatggtcaatcagtgttattagggtgtggcctgcttgcaagtgaaactacagagtcttatctttggttgttaaggacatggcttaaatgtatgtcaggatgttctccccaaactattattactgataggtgcaaggctttgcagagtgcaattgtagaggtttttcctaaatctcatcattgttttggcttgtcattaattatgaaaaaagtacctgaaaaattaggagggttgcacaactatgatgcaatcaggaaagcactgattaaagcagtttatgagacattgaaagtgatcgagtttgaagcggcatggggatttatgattcaacgtttcggagttagtgatcacgagtggcttcgttctctatatgaagatcgagttcgttgggctccagtatatttgaaggacatattttttgctggaatgtctgcagctcgccctggtgagagcattaaccctttttttgatagatatgtgcacaaacagactccgctgaaggagtttcttgataagtatgaattagcttttcacaagaagcacaaggaagaatctttttcagatattgaatcaaggagctcaagccccttgctgaaaaccagatgttcctttgaattgcagctctccagaatgtacacaagagaaatgtttatgaaattccagttagaagtggaagaggtgtattcttgttttggtacaacacaattgcatgtggatggccccatcataattttcttggtcaaggagcgtgttttgattgagggaaaccgacgggagattagggattttgaagttttgtacagtaggacagctggtgaagttcgttgcatctgtagttgctttaatttttatggatatctatgtaggcatgcattgtgtgtgctcaattttaatggggttgaagagatacctcacaaatacattctttcacgatggaagaaagattacaagcatcctaatcacagctctggtggtgctaatgatactgactgcactaatgataccgaccgcattcaatggtctaatcagttatttagaagtgccttacaagttgtggaggaggggatactttctctagaccattacaatgtagcgttacaatctttagaagaatcactgagtaaggttcatgatgtagaacggagacaggagtaaccttcaatgtactctaaaaattacttttagtgtgctacttgtatttttctacctgctgcttagcgctgtttaactttgttctttttacattgtccataacttgtatagctaaagatatttttgagttaaaccataagtagctcctccc

SEQ ID NO: 45659 - DNA, 755 bp, Glycine max
  Clone ID: PAT_MRT3847_141230C.1
cggggatcctctagagtcgacctgcagcttttatacacgatagcttttgtttaaggagtgtctttctattggcatttcaaaatgtgatcaattattctgatactaaagattaaagaatgccaaacataaacatttataatgttaaatatgtttaagttttgaactgaaatcctacacagaacaggtaacattcccctattcttcatacgtgtgtgctcattgtgtttttttttataatatctagaaattaacaacaaagggtgcatgtgtagcaggttaaagcctaggataaggcgctaagcagaggaaccgatggcatgaagctatgaagattcaaagctgtggcatatatgaattttgttggtctagttttgttttgtctaatttttttatttttactgtttcatcccacctacaaattctcaggtttattagtgagtgagagtgtggtatagttcatgactttagattgctctttatatcatcttaccttggatgctttagattgtagagaatatatataggagcatatgatgtaaaggagaaaaataatagccatcaaaatgtcaagactgtttttggcaccacaagattcaaaactatttaattttttctttaatttttttggtaccacaagaatgttattttaaaagaaaaaatagcttgccttcatggttgcaacttgtaagaagtttcttgttatattcagtataatatgttgaatttgatcctcttaattttttccttttgggttt

SEQ ID NO: 45660 - DNA, 263 bp, Glycine max
  Clone ID: PAT_MRT3847_141231C.1
gtgtaacttttcaacagatttcctttactggaagctctgcaactggaagcaggattatgacagctgcagcacagctaacgaaggtatttttaagcagtattatctgcaaattatgtacaatttatattgtcattctgctttaaaagatataatagaggatactaagtaacaagcataagatgaaatgatagaaatcctttttatttttcctttcatattttcattctcttttctttgtgagatcgtgtaatatccatttgggg

SEQ ID NO: 45661 - DNA, 575 bp, Glycine max
  Clone ID: PAT_MRT3847_141232C.1
tcatcaattattcaaaatgataccttgtcaaatggctaaacataatttgaccatatatacggtttcaataatgttgacactggttaagcagagatgaccactagccacctttttttaatcaaaaagcttgttttcatctgcatagtcaaactgtttataaactgctttgttatgttatggttgttctcacttgattatgaacagggaagggtagaggtaggagtagctatcaatcagaggtacagagagggcgttttggtccaaggagctttggcagggtaagtggccaagatggagagtataacaaacccaaaggaatcggtttctatggacgcaatatccgtcaagagaggggatattcagggtatcaatggccaagtaatggtcagaaccttgccgaatgagcatagagttttaccaagaaaatcaaattttgagggccatatattatttctaaatttaaatagtcagcttcaatagatgttaagaaccaactattgatgaagtaagaaaaaagaacccaatattgatatttttttgtcttaatttatgatattcggggaatatgtattatt

SEQ ID NO: 45662 - DNA, 275 bp, Glycine max
  Clone ID: PAT_MRT3847_141233C.1
aacaccccaacttattgttaagagattgcgcccaacgagcaaaacttcaaagaggcacataggtttattacgtacccagacgcctttgttggggaaacattctcgaacacccacaagcgggctattaaatcacaggcggagggaaaaggacctctcccagggtcggggtaacaaacgaaaccagatgcttaggtatacagatcaaacgaatagtgcgcttggagggaacacaagagaaaaccccttcaattggagaggaccactaccggaaccga

SEQ ID NO: 45663 - DNA, 1085 bp, Glycine max
  Clone ID: PAT_MRT3847_141234C.1
taagacttagaggtcgtcttacgtcccttttctgagcgtacgcaaacaccgacctctgttacagttaatctaaccgtttgattcgctgaggtcatggcgttttggcaccgaatccgaaatcccaacctcaaaaccctctgcatccaattccaacgatgttatgttcaccgtccgcatgcttccacccccaaacccttccctgtggacattccacatccgaattctgtgtttcatggcagacccacaagtgttttcaataccgtgaggttcttcgctgcacctgttcaatatcaggtaaagcacaacaatgtggaggactcgagtgagctacggttgaatgagaaaatcaaagctccatatgtgaggcttgtggcggatgatgggcatcattcaatattgcccaggtttgaagcattggagcatgccaagacgcttaaacttgatttagttgaggttgataaaaatgctaagccacctgtctgtaaaattatggacttccacaagcaaatgtataggcggcaagaaagggaaaaggagcgtgctaaaagcagggctgagatgacactgcgaaaagatgttaaggaagtgcgattttctgaaaaaactgaagcaaaagacctgaagaacaaagcagatatgattaaaaagttaatggagaagggttatcgagtgaagtgcaaggtatcgggcaaggaaaatcaggacttgacagtattattttctcctattcttgctctgatggaagatgtctgtattgtggaaagtggaccacatatggcaaaaaaagatgcatttatgattgtccgacacattaagtatgggctatcaaagaaaggtgggaaaaaattgcaaaatgcaacaaacgttacgactcaggagggtgatatggagatatcaactgccaattctagtgattccattgaatacgagagtcatgctgaatctgggtttgaaacggaggaggaggtgctttctgatggtaacaagctttctaaaagttccttgtctgtatttagcaacaatgtgaacatgactgcctctcctaataatcaaacaaatgctgctccagaagcatctcctgtgtc

SEQ ID NO: 45664 - DNA, 375 bp, Glycine max
  Clone ID: PAT_MRT3847_141235C.1
aataatttatgattaagatatcaagagagagggagagggagagttgtttgtttcattgcgatccctcccaagaacggctctgatagctctttggtgcagcaagcggcgtaggaatatcaaagacaaagccattcgtgcctcatacctcatttcatcacacccattcatctccatcacaacacaacatacatacgaaccaggtgaagctcaggttcttcttcctcctcacttcccttttccattttcaattcctcttctgtattccctcttttcttcctttcatctatttttattttctttttcttttttaattgcatatatgtaaaaaaaaacatcttttttttctatcttcctaaaatcgttatcgcgaaactc

SEQ ID NO: 45665 - DNA, 427 bp, Glycine max
  Clone ID: PAT_MRT3847_141236C.1
tcggcacgaggctatgaaagaagaagctgccaccaatgagtttgtgaatccatattacaatcctagagcggttggattgaagaaagaacttgaaggcatgcagcaagaaatcaaagaatggcaagctaaatttaagcagaagaacggaagaaagccaactttggaagaaatgagacaggacccttcagtgggtcctttgattctgagtctagatgctcagaaaaatgctatcaaagcatcaatccagagattcagattcaattaactgaggagcaaacagtacaaaatgaaaattatccactagtaatatttatgcttttattcaggctttatatttgatagtaatctttccatataaagctataatatcacttacttcgtatcccttgaaaacaataactgagatctggttattaactactttaaa

SEQ ID NO: 45666 - DNA, 384 bp, Glycine max
  Clone ID: PAT_MRT3847_141237C.1
ctacataatgaaaatcaataaccggaagcgcatccttctccaccatctctcttactagggcacagcacgttctttcctatgctctaattaatgccttacatcaaacttgtgactctttatcgcttcatagacccctatgcctttatcttgcaactaccccttgtactcaagaatcatgtgtttcggtctgctcaagagaaacaactaaatatgcggcaatccaccctctcatatactcactttctcaaccaaaatcggcatcaccgacagtaacactaactccatccctaattgtaaattctccaagcttaataataccttttctctgcaagaactttattatttacacctcaaaaaccatccctgtcctccatcacctttcta

SEQ ID NO: 45667 - DNA, 392 bp, Glycine max
  Clone ID: PAT_MRT3847_141238C.1
tttttgttttttttttctttttttgcttcaaaacaccattaccacagacaagaagttcaatatatcaaatttacaatacaaagtgattttattttgaaaattagagtgaaaaaaaaaatgggatgtccaaattctggtttttattataaaaacccaacataaacaagggggtgggttgacaggggaccttatcccaaacagctcaaactaaactttataatgtagttctaggggcatgtatgtctcaagggcaaatattgatgacaaaaggaaatgaaaaaagatagttttgatttgattcaacatacagctgacattaattgacttccaggatatagatcttcgccttcttacataaatacagctctgagtcacttttgcttgatggagtt

SEQ ID NO: 45668 - DNA, 209 bp, Glycine max
  Clone ID: PAT_MRT3847_141239C.1
gctatttgtcaatctcgaaatggacagaatgtttcacagccagaggaagctcccaatgaaaggaaagctttctgatgaggctgcaaaaagcatgcctaccatagcacaatgaagagtcatcagcaagatgtaatgctcgacaaatgtatatgttactgtggctgattgtggtacagggcagtagtttcacaaaatgtttgatgtagctg

SEQ ID NO: 45669 - DNA, 266 bp, Glycine max
  unsure (1)..(266): unsure at all n locations
  Clone ID: PAT_MRT3847_14123C.1
gtcngtcaatangaancaccaaagtcaccaccaaaaggttatncagnatgtaatanccaananatntnaacnncnnttgcttatcattgtgattagtcagaagntagaaattcgtgttgagtnttgagttgaggcagagatcaagagnctggagggtgtgngccccgagcccctnagatcagaattngantccaaatccnnacatgacanngcntaagaagatgatgacgctttgaaanacagcactgaagccgaagtcaccanaa

SEQ ID NO: 45670 - DNA, 771 bp, Glycine max
  Clone ID: PAT_MRT3847_141240C.1
tccgatagatagctgcttctgtgtggaagttgagctcatgtgatttatgtgagattgcccgtaattcagtttatcaatcaggtttctcacatgctttaaagtcacattggattggtaaggagtactacaagagtgggccacgcggaaatgacattcagagaacaaacgttcctcacatccggttggaattccgtgatacgatttggagagaggagatgcaacaggtttatttgggcaaagccatcattcctgaagtagtagacaaataagatgccagggggcattcctttcatacacatgagtagatagtatcctcaaacccttgcagcgtcagagatgcagggctgaagacatacaatgctggtctgatgatatgagccaggtacatactatagagaatcaacaagatcgatgagcttgagcatcgaacaaggttttacagctacaaatcgacgtacccgtggggttttttctatccttgggttagagttaaaattattagggttagcaattagttcatgcttcaagcaaaatgatgcctgtcggtgttagaaatgtatgttagtaatgtaagttatgatcctttgaagggagagagatattcatctcccaaaattttgattcccattgtttatcgataataatatatcgtgaacgacagttgagacttgaaaaacggtggctctattagttttaccgtaatggtatacgatgccataatgaggcttatcctgtttaacgtaatatgagtaaaggtggccgttaagtgtt

SEQ ID NO: 45671 - DNA, 2344 bp, Glycine max
  Clone ID: PAT_MRT3847_141241C.1
ggttcgactttttatcgctgcccggaacacaccaagatttaataccctgatccattttttatacacttattgaaggaaagtctgatcgtatactttgacatatgtgatggggttattaatgtatataattctattgatcaaaaagaagagttttttcctgttacagacgcaactacatttgttaactgatctctcatagcatacttcgagtcatagcagcagggaatataagaactttatgccatcataggctcaatcttctagaacaaaaattcaatcttcatttgatgataaatgcggatagagaatttcttgctcagaaaagtgctccacatcgagacttctataatgttagaaaagttgatactcatgtccaccattcggcatgcatgaatcagaaacatcttttaaggttcataaaggtcaaagctgagaaaagagcctgatgaggttgtaatatttcgagatgggacatatctaacattggaagaggttttcaagagtttagatttatctggatatgatctcaatgttgaccttttggacgttcacgcagacaagagtacttttcatcgctttgataagttcaatcttaaatacaatccttgcggtcaaagtagggtcagggagatatttcttgaagcaggataatctcattcaaggtcgttttcttggtgagttaactaagcaagtgttttcagatcttgctgccagtaaatatcagatggctgaatatagaatatcaatatatggtaggaagcaaagtgagtgggaccaactagccagttggatagtgaataatgatttgtacagcgagaatgtcgtttggttgattcagcttccacggttgtacaatgtgtacaaagaaatgggaattgtgacatcattccagaacatgctcgacaatattttcattccactttttgaggtcactgtcaacccagattcacatcctcagctgcatgttttcctgaaacaggttgttgggttggatttggtggatgatgaaagcaaacctgaaagacggccaacaaaacacatgcctacaccggagcaatggactaatgtattcaatccagcattttcatactatgtctattactgttatgcaaatctttacaccttaaacaagcttcgagaatcaaagggaatgacgacaatcaaattccgtccacattctggagaggctggtgatattgaccaccttgcagcaaccttcctcacggctcacaacattgcacatggaatcaatttgaaaaaatctcccgtgcttcaatatttatattatttagcccagattgggctggcaatgtctcctttgagcaataactccctattcttagactaccatcggaatccttttccaatgttcttcttacggggtctgaatgtgtcactttctactgatgatcctctccaaattcacttaacaaaggaaccattggttgaagaatatagcatagctgcttctgtgagctctctctctctctctctctgcatgtgatataaacaagcaatgctcacagccaggatataaatctttacaggtgtggaaagtgagctcatgtgatttatgtgagattgcccgtaattcagtttatcaatcaggtttctcacatgctttgggctcacattggattggtaaggagtacttcaagagtgggccacgcggaaatgacattcagagaacaaacgttcctcacattcgattggaattccgtgatacgatttggagagaggagatgcaacaagtttatttgggcaaagccatcattcctgaagtagtagacaaataagatgccagtggcattcgtttcatacacaatgaggttgtaaacatattctattaccatatttcctgttcttcattttttgaaatgtgtggtgcaggttcttattgtttacgtattggaattttgcatttccttacttgctctgaagttacctgaatccgctcacttgctgtaggtagaaagtatcctcaaacccatgcagcatcagagatgtacctgcagggctgaagacatacaatgctggtctgatgatatgagccaggtacatactatagagaatcaacaagatcgatgagcttgagcatcgaacaaggttttacagctacaaatcgacgtacccgtggggttttttctatccttgggttagagttaaaattattagggttagcaattagttcatgcttcaagcaaaatgatgcctgtcggtgttagaaatgtatgttagtaatgtaagttatgatcctttgaagggagagagatattcatctcccaaaattttgattcccattgtttatcgataataatatatcgtgaacgacagttgagacttg

SEQ ID NO: 45672 - DNA, 662 bp, Glycine max
  unsure (1)..(662): unsure at all n locations
  Clone ID: PAT_MRT3847_141242C.1
gggattcnnatcatacgatttttttattgcaatatccatgacaatcgagtgaaattaatcactacaacaaaccgtacaaataagaaaacaatattggtatctgatgtcacaccatggactaggaagaagttgtaattctgaagcaggaagcacgcgtgcaaaatgtattatgtacatcgaattccacagattgatgctgttgtcattgagcttagttacacagtgctaatcggttacatgaagaggtccaggacattaggacttgaaaaccatcttcaatgatctaagttctaaatttgttgcattgcatcttcaacactagtcatactatataattctaggagcagcacatccattcgcaccagaacaagataaatgccaaaagaccctttcaaatatttgtagcagaagaggtctcaggtaacttccagtaattccatgaattaaaatcctcctgttcagatgagtttgtaggggggaacattccattcaccagagaatgcagagaagtatatgattttgtgtcaaaacaacgacgnnttacagcaatctctcccctnnnnttaatgatgaatatttttccttttgggattnnaaccttannnnnactgacttcatcggtatccctattnnnnnaaccagcatagaacggatnnnnntct

SEQ ID NO: 45673 - DNA, 1150 bp, Glycine max
  Clone ID: PAT_MRT3847_141243C.1
gcttttctgaactctggacaatttcggccccttataaatgcgtccctcttttcctgatcgccttggtcttctgacttcctgggttgccgcctccgtctctcaggctgtgcaaaatctgattgatgaggagtttctaggcattgttcatctgcgcacgtcaacattgcataaaaagatttcttctgctcgtcatgattttattaaacttgcaggttctgagaacaagcttgaagcattacttcaggtactcgcccctagcctggcatctggctttcgggtgttcgccttcggctgttctttggaggctgggcgtgctggggttcatcttctggctctaagtctctttgctgctgtgtgctcccggggggaggtcccacccgagctgcgcggcgttcacctcagttagtgcgagagtgatggtgatgattgtcctacattggtttgcacggacttggcttacggctgcgagaagacgacagaagggcatgttgtcatgtttgacttccccttgaattccattgactaccttcatcgcactggtagaactgctcgtatgggtgcaaaagggaaggtaacaagtttagttgctaaaaaggacttggacttggccagcaaaatagaggacgcattaaggaagaatgagagtttggaggctatcacaaaagaaagtgtccgaagggacattgcaaggacccaaaatcaaagcactgagaagggaaagagcaaaagattggttaaagtttcaaaagttatgggcaaatctggtagtcgttttggttctgggaataatggatcaggtatgaaatctggtaaagggtcaccagtcaaatctatgaagaaagggattcaagtttcaaaatctggaaaatcttctagtgcaaatagcttaagaaaagcttctacagagaagaggcaatcaagtaaaatggtcagtgccaccaaatctacgaattctaaactcaatgttgtggggtttagggggaaaaattcgtcttcaaataataaagaatcgggtttgtgaagttgattgtgggccatattgtaccgtataggaactaaatggctctcgtttttgtattagataagattttttctgtagtaaagatagtattataatttaattgttttagttcctgccttttacgtgcct

SEQ ID NO: 45674 - DNA, 422 bp, Glycine max
  Clone ID: PAT_MRT3847_141244C.1
tcccggtcgccacgcgtcgccaccgtcgtacgtgcagagacacagaagggaagtggaagaagagaaagggcatcgcttaggtacagatacagatacagacacaacctggaaaaaattccgaccccagcccttcactcttctctctgcagcggaggttagggtttctttctttttttcgttttctcaatcttcacttcgcttgcgctatttattgctaattttttcgttctttgtgtgtccgacccaatccaccttcaatttctcgcttcgttttgtctttgacttgctttgacttttttcttcttctcacctccgagcatctgaaaccgttgtacatcctctgatttcggtttctttctcttcaataattgctcactttcgctgcaattgctacttttttttaaaaatctttttactatttc

SEQ ID NO: 45675 - DNA, 352 bp, Glycine max
  unsure (1)..(352): unsure at all n locations
  Clone ID: PAT_MRT3847_141245C.1
acttctctccagcccttgcagcgcatacagtacgctacactcttagaaagccgtatctgtatatctatacactacatagctttgccaagatacgncgacactgcgaggcaaatttttcatacanngtttagcagtaggtcattctcccccaattattctttgtcgacagttttatattatccctggattgcagcacnnnnnggagcatcctccataggtactaatcttctcactttctacgcccttgctgnngtgctgattgtcataggctgatatgtgcactccaagtgctgttctagcacaatgatcaagggtgatagaccaagcgccatccgactcaacnncnntggct

SEQ ID NO: 45676 - DNA, 197 bp, Glycine max
  Clone ID: PAT_MRT3847_141246C.1
gaaatctgtcttaccattcaaaagatatcaatatagaaatattcaggttgataaaagctatacaatttaatacatataaggctcataaatatgcacccacaaaacaacttttcaaggatgagaccagagatccaagttaaataagctaggatctcctcaaagaaaattaatgctaaatattttaaaacaacatttct

SEQ ID NO: 45677 - DNA, 386 bp, Glycine max
  Clone ID: PAT_MRT3847_141247C.1
attttagtcaatttcagacttgtagtgtttttggtgtaattgtttttaaaatgcccttttgctttaatcatttgctaatagacaaggctgctgttgagctaacaaaattgcaccctttttgtgctggtttttcttcccttgtgtgactgttatatccttgattcactgtcatgcacctggtggaatgttcatttctcataattgcctgcatgattaatcaggcaatgaatttcctcatcacaattgtaacatgttcagtcaactttttccttccatattatatgaagaactggaaatgactcccacacctcacattgtggtgacatgaaccctttagttgacacccttttttttttgagaattcccgccctattgtttggtattta

SEQ ID NO: 45678 - DNA, 401 bp, Glycine max
  Clone ID: PAT_MRT3847_141248C.1
aattcggctcgaggtcatggtcacggactcatgattcaccatgaccataaccacattatatcctccacggcaccttcaaatggcatacctaccatgcagcaggaggaggatcatggacttggaagctacaagaaagtagttcggtacagagaatgcctgaagaaccatgcagcagccatgggagggaatgccactgatgggtgtggtgagttcatgccaagtggagaagaagggaccatagaggcactgaactgctctgcctgtcattgccacagaaacttccacagaaaggaagtggagggtgagccttcatgtgactaccaccacctcaacatcaacagaagaagacacattctaggccctgacaagaacctcctcccacctgaggctctgggataccc

SEQ ID NO: 45679 - DNA, 146 bp, Glycine max
  Clone ID: PAT_MRT3847_141249C.1
ctcatatgcaacaccaaactcagcaaattcaaggctcgccaaacagaggaccacccagagcttccggcagagcattcgatggcactctcggcgcggtgcacaccaaggatcaagaggacctccacatcaatataaaacgggcacca

SEQ ID NO: 45680 - DNA, 486 bp, Glycine max
  Clone ID: PAT_MRT3847_14124C.1
tgacgaagcctgcgcgcgtcacatctgactcaggacattcggccggagttttttttttgttttgttgaaaacaggcgccgtcgcacaacccgaatccattgacaggcaggttggttatgcggtcgcgagacctgaggcaaactcaatacggtcgacgacgtggactacatttgggaattctcccgccagccgattgcgtgcgctacagcgcatggcacaaagaccgtcacttgttccggccgtttaaggtccgcaaccctgcgccctctagcctacggcaataggccctctaggtattgacccagagcaattttgcccacgccgactctcactatcgaataccctaattggcgcctcgcctcctgttgtgtgagcaccgagagcgacgggtaaaccttctccgacgtactgctcagcctcagggggatagggtttctgcattatcgcgagtatcgggggcggagaaacgacttagttttgactgac

SEQ ID NO: 45681 - DNA, 699 bp, Glycine max
  Clone ID: PAT_MRT3847_141250C.1
aacacatgatatcaattttttaatattcaaaatcaaactctaaagccaatttatccactatatcgtaaatcgtaaagtggtagcatggtttgaaacccttaatctattgaaataaaataaaagcctaacttactaaaacccttaatctattgaaataaaagtggtgggatgaatactaattcaccgagtaataagccatattactttctgcctactgttgatttctgtctgattattttatatcagccggcttcatgctccatgctttgaggttttccaccgagatgggttcagttccgttgttgaacacaaacaagtgaccttgattagccactgctaactgtggataaacccgagacaaaatgtttgtcttccctccttcaccaaaactctccactactgagtgatcaatcaaactcctaagagagagttttttattagtggccaaatccacatctacaaagccagcaaatgatggcttgtacatattactcttcaaagaggaacttgttgcatcggagcataagagaaccacatgcttaactggacctttgaaaattctaaaaaacacaggggtgaactcctctaaattttgagaagctaatgtgagaagcccaaatggtccaaccccaccttgaagttttgaacccttttgggcacagaggtcctgtgcatttacccacttaggatcatatgtct

SEQ ID NO: 45682 - DNA, 244 bp, Glycine max
  Clone ID: PAT_MRT3847_141251C.1
gaccaaaaataagggtcttaactccaaaaagtttccaaattttggacttaaaaaataaacagtcccggcaattatcttagtggcttcttgggcagctttgaaacaggatccgcaatgaactttcacttatcattttcattattttcagcagcaaattagaagggtggcacgcgtgcaaccaacttatccttcctttgctgattagtaaagtccttcatgtgggcccttttgcgccccttcgggg

SEQ ID NO: 45683 - DNA, 128 bp, Glycine max
  unsure (1)..(128): unsure at all n locations
  Clone ID: PAT_MRT3847_141252C.1
cccaaaaaccctaggtagagagctcttcctcnctttctcanagcaatggccgaagcagcacgcnctctcgtnancgtgnagggctcganggtgacanggcaangtaagngtnnnnnaccgttcgcatc

SEQ ID NO: 45684 - DNA, 267 bp, Glycine max
  Clone ID: PAT_MRT3847_141253C.1
attaattattgccctttcagttcgccatcggcagccgagcaccatgagctccacaggcggcgacgatggcgccaagaagtcttggccggaagtggtcgggctcagcctggaagaagccaagagggtgaagatgtgcgacaagcccgacgacgacatctgagtgctgcccgtcggcacgccggtgaccatggatttccgccccaaccgcgttcgcatcttcgtcgacaccgtcgcggaggcaccccacatcggctgagaatcaaatct

SEQ ID NO: 45685 - DNA, 323 bp, Glycine max
  Clone ID: PAT_MRT3847_141254C.1
aaatccttatcatacattttttactttatacttacttataacttaaataactacagaatttttttaaatttttacaaatcttcttacattcctactttcaaaaatctttttactaacttatattaaataccattaaccttataaactcattaatacttcaaaaacttctatattctctacactatttttaaacaactattactcttatacatcaattatccctttcaaaacttatactttttaactattcaatctacacctattatctattttattctaacttatcttaacaattttattcctctaaattccaatcatactac

SEQ ID NO: 45686 - DNA, 624 bp, Glycine max
  Clone ID: PAT_MRT3847_141255C.1
ggacaaaaaaaaggggtttttttgcccagcaaaaaaggcaaaaggggggcttttggaaaacccaaattaggggttaaaaaattttttacgggttcaataaaatccttcccaaggggggaaaaagggatacttgccctatttgggaaagggggggggggtagattccctttcataggaaaaggcttcaaatgaactataaacttcgccgcaaacttgtttggggggggccccaaaggtttaaggatcactgggggatcccaatttcaagcccggtttaagttttgttttaaaaatactcattggaggtctctgaagggggggtgttttaaagcatgacattgtttttccaaaagttttccacccaaaactagcttaaaattttcctgggggcctgggatctaaaattttaccaaaatttcctttttaaggccaaggtcttatccactaaggggggggcctccctggggggcctttaaaatttgcggggggacctgggggtaattccgggggaacaattccaaaactttgggaggacctttttttaattgagcccccctaaatgggggaaacccggggaaacaagggcccccgtggtgggccccaatttcggggcaaaattttttt

SEQ ID NO: 45687 - DNA, 197 bp, Glycine max
  Clone ID: PAT_MRT3847_141256C.1
gcggccgccctttttttttgggttaattgggagtaatcatggagatagaaagaaaggcagattacaaccccagaggggcgacttataggaaggctcatatatcctcccggtgcacttttgtgaggagtggataagaatcaacaatgcgggggcacaggcattaaaaacgtactacagtctaaagggagaattgaagg

SEQ ID NO: 45688 - DNA, 1229 bp, Glycine max
  Clone ID: PAT_MRT3847_141257C.1
acggctgcgagaagacgacagaagaggaaatcacaagggtttggtgttgggggccaacaatacgacctgcgtctgtgtaattgtaggtgccaaacatatggttgccgagatgaatgtccgtgaattttccatctctaagaatgaccgtacttcaaattccaattccaaatttcttaccttgcccaccattttgactcttggccgtgtcgccgctgtacctcttcttgttgccaccttctacatggatggttggcgaggaacagttgttactacaagtatcctcactgctgcagcagttacagattggcttgatggttatattgctcgtaagatgaaaatgaaatctacatttggtgcctttttagatccagtagctgacaagcttatggtttctgccacattggtcttattatgtactagaccgttggaagttgctgtgtttcgacaagtaccatggctattgattataccttcaatcaccataattggcagagagataaccatgtcggtactcggggaatgggctgcttcccagggtagcaagcttctggaggttgttgcagttaataatttggggaaatggaaaacagcatcacagatggtggcgttaatcatcctccttgctacccgggactgcagtcgtggaggacctgctattttggtgggatctggggttgtcttgctttacatttccgcagggcttgccttatggtcatttgtagtatatatgagagaaatatgcaaggtgttgcggaggtagcatgtttgattgctctctgccttcacatatatccgcttgtttggtgggttttattcttttgatcatttcttacgtaaacagtttagttagtgattccatggaagggaatgtagtccttgtgagttgtgaccaatatatataatgtttgctctccacaatgtctaactctgcaaagcaccattcctcctattcttgaaaattgtattgtttttcccccttagttacccctggtaaaggaaagatggaaaaaaagaaagaaagatgacatgtggattgaattggaagaattcaggttactagtcacgcgaatcgaattcctatctacagtttggagcctattaaagtttgctacctgagaaatttcgccagaggaatcaatgtatggttctagttgactcttaaattgatttttgtcctggtcatattatttgccaatacttaaatacaacagttatttttcagtgtctgt

SEQ ID NO: 45689 - DNA, 1938 bp, Glycine max
  Clone ID: PAT_MRT3847_141258C.1
ccacgcgtccgtgaaaaccctggtcttctttctcatgcctcttttattgtggtttttttttctttcttttctctctctctctctctgtgaaatggagccgtttgcttagagctgcttcttctgatctttgaatcttgatctagatatctagatacagaattggaaatggattcaaatgggagcctacgtgctaacacctgggcaaggtcgtcgtccttgacctctcctgcaagtggtttatcctcagatcctctttctttcccaggttttggtttgcagcataatcaacaaaaatgggatgttccctcaaattcagattttgggatcagggctgaagcacctttcaaagaattcaatcagccctctcaaacccagtctccgcttccttgcaactcaaacaatgagattgaaatccctggtcaagaaaactgtcatctgagtgaatcatcacaaaccaatacactccaagattgggaccccagtgtgatgttgaataacctatctttcttggaagaaaagattcatcagctccaggatctagtgcatttgattgctcgtcaaaaaggcattggacaacctaatgaacttgtaactcaggaacagcagctcgttacaactgatctcacatcaatcattattcaattgatctctaccgcaggtagtctcctcccttctgctaggcataaccttgtaaacactagttcattggttggacagattgaccagcttcgtgggacgaccattcctcctgggaccggtgcaagtaacggctgtattcaaccacagaataatggtggaaaaatattgtctgatcagtccatgcagactgatctacctaatagtggtgaaatggagcaaaagtacaatatggtagaacatgacttgaaagatgaagaagatgtagaggatggagaaaaccttgcccctggttcatatgagattctacaattagaaaaagaagaaatccttgctcctcatacccatttctgtacaatttgtgggaaggggttcaagagagatgcaaatcttcgaatgcacatgcgaggccatggtgacgagtacaaaaccccagcagcgcttgccaaaccgcacaaagaatctgcatcaccaaagcctatcaagaggtattcctgcccctatcctggctgcaagcgcaacaaggatcacaagaagttccagcctctgaagacgatcttatgtgtcaaaaaccattacaaaaggacgcattgtgacaagagttacacttgcagtaggtgcaacaccaagaagttctcagtcatggctgatctaaaaactcatgaaaaacactgtggtaaggataaatggctctgttcgtgtggcacaacattttctaggaaagacaagctttttgggcacattgctcttttccaagggcatgcaccagccattcctttggatgacactaaaggggcaggggtagctgaggcacccattcatgatagcaaagagaacaacagtaaggtgcagagcatgaacttcacttttggatcaaatccttcaaatgcaaatgaagttccaaatgccatggatgcaaaaggcgatagcgatgatcctatcaattatttctcatcattgaactttgaagccaactttggtgagtttaatgaattcaccagacctctatttgatgacccagaaggttcgttctcttttgtcatgcctggatctttcaaatctggaggagaatctagttctgacaatcttttataacaatggtactaccattggttctgtaataacttaatatctatgtttctcttaattgtgaagatataactttcgggtttgtgttaaatttgtaaagccggtttaatttcatgaccatgcaaatccttaagaaggatgttagattttcttgatgattttataaattataaattgcgcgtctcggttattcagctaaaaaattccaaattc

SEQ ID NO: 45690 - DNA, 147 bp, Glycine max
  Clone ID: PAT_MRT3847_141259C.1
catcttcttggtccttcacaccttcacttgagtctttcatttgcctcaaaactttcaaacacgcagttccccattttcttcttctgcatcctcacaatcgcttgttcagatctcccttgtacaaaagactcatttttcatcacacag

SEQ ID NO: 45691 - DNA, 348 bp, Glycine max
  Clone ID: PAT_MRT3847_14125C.1
tgttcagcctgggaatctccttggatgatgaacacttttttgtccagccccaagattgatactgaaattacaatggaggattttgggtatttcatgagccctggtgacagaagctatgatgcaatcgggttgatgaaacagatcagagaacaaactgtttcttaatatgcgggcgctcaagacattctgggaaatgagactcctaaaggattatcaaaagatgcttgcagaaacgacaggggtgaagatcaggaacatatcgatgctcataatcagcatggggaccactgtccgctgagttaaagtgctctggcggagcgacccgtactcgacttccacgaatgtgga

SEQ ID NO: 45692 - DNA, 411 bp, Glycine max
  unsure (1)..(411): unsure at all n locations
  Clone ID: PAT_MRT3847_141260C.1
cccacgcgtccgcccacgcgtccgcccacgcgtccggagaaaaagaaaaaaggaaagaagaatataattggatgtagagtacgttttaagtgtgagtctctttttacttcgtgtacacttctgccaaaaaaatggttgttgtttacttgtaacattttcatcatcatccttgcttgaactgtaactcaaaccctagctggttttgttagcttgagttctttgtaaatcatcacttcagtttagtgtttcaaatttaaataataacttatatgatgattcccttagtttgctttgctgcnnaaaaaaaaaaaaaaaaaaaaaaaaaaaaagaaaggccggacaaattataaaatctaacgttccctcctctggaatgcgacttctttgctcttgtgtcgcgctacctaaatt

SEQ ID NO: 45693 - DNA, 420 bp, Glycine max
  unsure (1)..(420): unsure at all n locations
  Clone ID: PAT_MRT3847_141261C.1
ccgggcaccccccctcctacgctgcaaaacacaagggggtctcggtgttatttttactcttcttcttctcttatcttcttcttttggggtggtggtttttttctctacctaaaatcttgctcggggaacctgggtcggagaccctcaatgcggaaccggtcgggggggganattacccagcttgagctacaccgagcaaccaccaccgaaccttggcacgggagtggaccagttaaggctcaattcnaggaggcggaaatgggggttccccctgagaacnatggctggaaatggggagctaactgcgcctcgggcggggcacttncgagggaggggggggagagcgtaaaccttcaagcagaaatgggccttanaaataatgataaaaactatatgggaggttcaaaacttcaaaattat

SEQ ID NO: 45694 - DNA, 426 bp, Glycine max
  Clone ID: PAT_MRT3847_141262C.1
gcctatcattatgttgcgttggttgttcgttgggcttgtcctctcctcgcatcaacagatggcacaaatgggtcgaatggaaggggatcaaaagcgcggcatggaaatgggccaaatgcgcggcatggaaatgggccaaatgcgtggcatggaaatgggccaaatgagcggaatggaaatgggccaaatgcgcgggatggaaaggggccaaaagcccggcatggtcatgacacaaaaatcagaaatggatatggcacaaatgcgcggcatggacggcgatgatagccagatgcgtgcttcatgggcagcatcgcaaaaattgttacgcgcagaggaaaaggaaaaagggccgaaatcgcaaaaaaatgaaactgaaaagccgccccagcagaagcagcctcaagaaaagccgggggcgcaacagga

SEQ ID NO: 45695 - DNA, 117 bp, Glycine max
  unsure (1)..(117): unsure at all n locations
  Clone ID: PAT_MRT3847_141263C.1
gcgcttgattcnctcttggctatggactaantcnnactggntgagcngntgttcaactcntgctgaaccaagtncattggtactgtgacacngtgaagtcgngatantgccntatag

SEQ ID NO: 45696 - DNA, 984 bp, Glycine max
  Clone ID: PAT_MRT3847_141264C.1
ggctcgaggtgatttttcagggctattatagtttcagccagaagttgaaatttattgtccgcataccctttgctattacagcttatgtttgattttatttcaggaactgctgcaatgctacttgttatagtctggaaaccttacactggttttctgtcaatctctgcaatattgaggatcattatggtagttgaagcagtatgtgccggctgttttatgagtcttttcattggttacatacaccagtacaattcattaaactcacatcctgatgttctgaagtccttatactcaccactacaaccatcaagttctctggagggtctaaggtaccatgatggtaggctctctgatcagcaaatggctttgctgcaatatcagcgtgaaaatcttcattttttgagtgaggagattctccgattgcaagagtgtctaagcaaatatgaacgaactgatgatcggagcacaccactaaatgaccttgcacatctacttgatgctcgggacttttggttacggacactgtctactgagatgatcaaaatttaaactgagttgaagattgccggttcgaaggaattatagagatgacctatgccttgcatggacgcatgcccccaacctatcccccattggatgaaaaaacactagaaaaatgtattgcattctaccaatatacccttttaatttaaagttattattgatatgttttgcttaaattcaccacttttataattataagatctcttcttcgtatatagtagtaatagaagtagtttaaccttgtcctttctaactacatttttggtgcaaacaggttacatacaccagtacaattcattaaactcacatccagatgttctgaagtccttatactcaccactacaaccatcaagttctctggagggtctaaggcaaacattttgtaatttagtttctttttttttaatttacttcatgacataatatccatgtttgattttc

SEQ ID NO: 45697 - DNA, 153 bp, Glycine max
  Clone ID: PAT_MRT3847_141265C.1
attcggctcgaggggaaaaagagctgcaatccgacttgcagacctcaagaggaaacgagaggggctcccgacaatggcgtgggatgatgccgcataagccctgatatgccaaaccctttctttcaaagcatgactttttgccatactttcaaa

SEQ ID NO: 45698 - DNA, 421 bp, Glycine max
  Clone ID: PAT_MRT3847_141266C.1
aaacaaaaaaaaaggcccctcttaggggggaggaagcatattttgtttaaaaacaccatcttccaaaagaaaaaatccccccccccatgttattatagtgaagaccacactctatacaaaaaaaaaaaaaagaaacttttttttccccctaaaaaacaaggggaggactcttgtgaaagggggaccccctttggggagaaaaaaccccccaaccaaaataagagggagggataatattggtggggggctttatagggggacaccaattttttgtacacaaaaaaagccggggggggtgggcaccccaaaaattactcggcccacgatgggaggcaacacaattgtaccaaaaggggggctataaaaagggggggaaaaaaggagtgtttcttttttcgggggaaaaaaaagattgcccccc

SEQ ID NO: 45699 - DNA, 479 bp, Glycine max
  unsure (1)..(479): unsure at all n locations
  Clone ID: PAT_MRT3847_141267C.1
gcgtttcaaaaaaaaaacttgtctctccattttgaatctggatccagcgccttctattcagcattcaccacccaaagccaaaccctatttctctttcttccctgtttggttctagccagcacaatgaggagaggagctaagagaaagaccaagcaggaccaagaagccaaacacgacgcacccgaagataacatgcccaaagctcagcctcgagctaaacgagccaagacctccaagcctcaatccgaacctgagtacttcgaagacaagcgcaacttggaagatttgtggaaggaaacattccccgttggaactgagtgggatcaattggattctgtctatcaatacaagtgggatttctcaaatctagaaaatgcgtttgaagagaatggcgtgttgtatgggaaaaaggtttacctctttggttgcactgagcctcaattagtcatgtttaaaggggaaagcanagttgtctgcat

SEQ ID NO: 45700 - DNA, 1585 bp, Glycine max
  Clone ID: PAT_MRT3847_141268C.1
cccacgcgtccgcccacgcgtccgcggacgcgtgggtgcgtttcaaaaaaacgtgtctctctattttgaatctggatccagcgccttctattcagcattcacccaaaccctatttctctctctctttcttccctgtttggtatcagcgagcacaatgaggagaggagctaagagaaagacgaagcaggaccaagaagccaaacacgtcgcagccgaagataacaagaccgaagctcagcctcgagctaaacgggccaaaacctccaagcctcaatccgaacctgagtacttcgaagataagcgcaacttggaagatttgtggaaggaaacattccccgttggaactgagtgggaccaattggatactgtctatcaatacaagtgggatttctcgaatctagaaaatgcgtttgaagaggatggcgtgttgtatgggaaaaaggtttatctctttggttgcactgagcctcagctggtcatgtttaaaggggaaagcaaagttgtcttgatacctgttgtagtagctgttgtatcacctttcccaccatctgataaaattgggataaactcagttcaaagagaggctgaagagataattccgatgaagcaaatgaaaatggactggattccatatattcccttggaggacagagatagccaagttgatagactaaaatcccaaatatttatcttgagttgcacccaaagaaggtctgctttaaaacatctgaagttggatagattaaagaaatatgagtactgcttgccttatttctatcagccgtttaaggaagatgaacttgaacagagcactgaagttcaaataatatatccagctgagccaaagccggtcttctgtgaatttgattgggaattagatgaacttgaggagtttactgataagctcatagaggaggaggagttatccgaagatcaaaaggatgccttcaaggaatttgtcaagggaaaggttcgtgaagctaagaaagctaatagagaggcaagggaagctcggaaaaaagccattgaagaaatgagtgaggaaaccaaagctgcgtttgagagtatgagattttataagttctaccctgttcaatctccagatgcacctgatgtatcaaatgttaagtctccattcattaacaggtattacggaaaggctcatgaggttctgtgattggctccaagacaataatgacaatttttctggtttgttttgcccaacacgagatgttttgttattatgaactatgtagttcaggaggcaaccccctgatgtcccatcaaattgtctttgccagtgtagttgtctaaagtgacatataccatgtaaaactgtaggtcagagatcctagagaagtgaactagatgttgggaggaatttagacatgtttctggcttccttgttgaagagaatttctgaggttctggagctgcaatttgcgtggctcttgcattcttggttttctcttaagattattctttttcccttcaaaatagatgtacgacagttttgactatgagctaaatgaaatcaattcattattgtttcgttttaaaaaaaaaaaccaaaaaaaaaaaacaa

SEQ ID NO: 45701 - DNA, 230 bp, Glycine max
  Clone ID: PAT_MRT3847_141269C.1
gcagatatcactaaaacctctacaagaactaactgatatatgatcattatgtggctctttcacttgttgttttagcaaggtatatacagtgcttgagtttgttacttttaacagcactaacaggcaactgcctgatattgtatttgttaccaccaacaacgtcactttaccctgcgtcatacaaccttttcgactggaaacatgcccctccaattttgacgggcaatttc

SEQ ID NO: 45702 - DNA, 498 bp, Glycine max
  Clone ID: PAT_MRT3847_14126C.1
ttcttttttctctctaaaatttaagggggaatttatggaagtctcaacccaaaattttaaaatgcccagtgggaaaacttgaaggtgatagtaatacatatgcgcctcgtatttgtctccttccccccactcctcgtgaggacctattggctaagggagacaagcagcttggtattttatccctccgtcaccatggaatcatgtgtctgaatcaactacaataactaaaaatagtatacacttaactagctacataattggtgctctacacatcactactgtggctctctttggcatcagatctccccttgagatcacaagtcgaagtcggtttctggcagctcgattgggattgatgcatgtttcttgaggaacttgcagaaggttaccactgctcgatctgtataccaggaatagggacaaaacttttggttcctgcacggaagaagaggagagtgggaactccatgaggcttagccctgggacgctcatttgatg

SEQ ID NO: 45703 - DNA, 259 bp, Glycine max
  Clone ID: PAT_MRT3847_141270C.1
acaccacctgacaggccttctgggcctccaaagcccatccttggggttccccctccctgtgtgaaatgtattatcaccagcagacactgccgggcctccctcccgggggcactgcctgaaggcgagtgtgggcatagcattagctgcttccggccctcctggcacccactgtggcctggcatcgcatcgtggtgtgtcaatgccacaaaatcgtgtgtccgtggaaccagtcctagccgcgtgtgacagtcttgcattc

SEQ ID NO: 45704 - DNA, 189 bp, Glycine max
  Clone ID: PAT_MRT3847_141271C.1
gatcgcgagaacttcgcgtacatatgcaaactctccgagctgcccagccttccaagagatggtggaatcaatgaagaacgcgtgcgaatctctgcattgtactgtcgggggaggagcggaatttgctctctgttgggctcacaaatatgattggtgctcgcagagcgcgctggaggatcctgtcttcca

SEQ ID NO: 45705 - DNA, 332 bp, Glycine max
  Clone ID: PAT_MRT3847_141272C.1
gtatttttttttattacccttcgaaccgcctcctgctgggtccgggctttacattatctgtagtccgcccacacaccggatcattgatgcccctggatgttttctgtgacccaccaccaatttcttacactaagccatttctgaacggctgagtgtgcaccgtgaacatcctactggactctttggcttgacatcctcacaggaacatcttgttactgcctgccgggatggacttatgggcaattggtcaagcgccaggggttgctgatagccacttaagctcgtattaggaatattggtaccaggtctcctccaaaagccatcactttcaa

SEQ ID NO: 45706 - DNA, 283 bp, Glycine max
  unsure (1)..(283): unsure at all n locations
  Clone ID: PAT_MRT3847_141273C.1
cttgaatatgctttgtctggatagaataaaactcataagancagtacacaaccaaattcctataatgtttaacaacctagaaccaattatctaacaatttgtggggcaataaatatttttaacatttnttttaccctcctattcaatgatgaggctatagagttatgcctatatgcatacttgtatagttgtgtttgtaacaatggatgagtgcagggggcagggcatcagaattggnaggctggnaggaagggatcttcgtttttgnttggntaaatagtgt

SEQ ID NO: 45707 - DNA, 428 bp, Glycine max
  Clone ID: PAT_MRT3847_141274C.1
acggctgcgagaagacgacagaagggcagttgtagcttccatattttaacaaatttagcgcagttttctgcgttacagacgtgtatccaacaaattccattctcagcatgtctggttaagcatttaattgcatgtttgacgtggctttctgcgtctagacaaaagctatcagttgtagcatccatacattttaaaatttaactaaattttctgcattactgacgtgtgtccatcaaatttgattcacaacatatcttgttaagcatttgactgcatgtttgacgcagctttctacatctagacaaaagctattaactgtagcatctacacatttaacaaatttaactaaattttctgtgtttcagatgcgagtcaaaacacatgcttacactctaccctacaggttacaactatgggaaacactttac

SEQ ID NO: 45708 - DNA, 164 bp, Glycine max
  Clone ID: PAT_MRT3847_141275C.1
aataatcacccataggcaccgcaagtaagaacaggggagtttttgaaaacaacacccgcgaattgccagccagaaataaggcgaaaagaatgcaattgacgaactacaaacgactggaactcatatagtgctcaaccacaggggcagtagcatggggacactat

SEQ ID NO: 45709 - DNA, 314 bp, Glycine max
  Clone ID: PAT_MRT3847_141276C.1
cgggtggaggcacgcgtgcgcgcactccttctgacattctttgtgaccttttttccgaaaacacttcctaaaacaatggttaaaaaacggaggacagaacagaggtccaccaacaaaagtagaaccaaacttggctcgaagcttgacctgtacccaaacctggctgaaccgagagctgattcgacacacacaatcggcgacaccatctgcgacggcacctccgacctcacccgcgtactcggagctgtaccaagaggtcaaccaatactataacagttactataacacttccatagctactgtcatgggtcctg

SEQ ID NO: 45710 - DNA, 402 bp, Glycine max
  Clone ID: PAT_MRT3847_141277C.1
gagaccgcggcagatttctgtgccaacaaaagaagatggcctcacaggtttgcaaagctgcttccagagccgcgaggtcccttctctccgcttccagagcctcccatggacgtgcggttggggctgctacggctgtttcattgagctgcaaagtgcctcttttctacggaaagaacggttctggaagtggttccgcttcatcatcatcatcatcatggatttcaggagcacttgctcttcctgccgcagcttacatgttccaagatcaggaggtgcgcgcagctgagctggagcgcactttcattgccattaagcctgatgaagtgcggaggaggctgtatattgatgacgtagcgcgttttgggcggaaagggtacaagcgaattgcaacactatacactg

SEQ ID NO: 45711 - DNA, 444 bp, Glycine max
  Clone ID: PAT_MRT3847_141278C.1
gcagactctgcttaaagatatgctgaggtccctttttatcatatgtaaagcatcctctaaccaagaagtcagatgatcccttccagcgccttcagatacatgttggatcatgagcatctctagcagtcctccaaactcgtacggagcctcgacggtggccaaggataacagaagtctcatcggtaaatataacagccttccagtcctccagagtccagtgttggtgatccaagcagaacctaagacgagtagcctttgcagcttcagttagaccaggtttccaagaaggtttaacaattgtaaagccatgcttgtggaggatttgtaaaacagaagaatgagatatacctgcttcaaaggcaaggatttcagaagatttctcacgtccattcctatcctgcttgacagatgcaagaactgccatatctgtagcttcagaaatct

SEQ ID NO: 45712 - DNA, 338 bp, Glycine max
  Clone ID: PAT_MRT3847_141279C.1
tctcactccccacgcgtacgaggacgcgtgggctgagaggatgtttcttaaagtgcttcactccttggtgtcgagggcttggactacatggaaagaatgtctcttgccacatctgacggttttcctattctgcgtccgcgcgaaaatggtgacataggcaaaatgagaattgttactggggatggtgaagagactacaatgtgttcgggaactcaccgtggatgaggctctcaacaagcaattataggaactggaaaaaagtggcgctacaatggattgcatgagatgccccaaggatgagaaacctctctcgcggcaaaatttttgacaaatcctta

SEQ ID NO: 45713 - DNA, 313 bp, Glycine max
  Clone ID: PAT_MRT3847_14127C.1
cgtcaatttccaactgccagccacgtggaaaccacgtgcttaacaattaagaataacctcgttaagtttttcaaaactagcttccaacaaatgccttcaaagaatcctaacacagttcaatggggtagtttttaaaggtgattaatttgaccattagcgaagcttaaacatgtataatgaacagggttgattcctaatcctttgtatctgttctacctttggagtaaacacatgcatgtactcccttaattattgtaaggcccgacgacagcagatattattataaaatttacaacttgatatttttagattg

SEQ ID NO: 45714 - DNA, 224 bp, Glycine max
  Clone ID: PAT_MRT3847_141280C.1
aacagcgtgcggaacataaaaggtagctgccaatttgacgtactcagtctccgaatggaaacctcattacgcaatccgtaagtttctagtgacccttgtcattatcatcctcctcgtcgtcgaccgctgtttgccctaataggctctcatgttgcggctgcatgatgattgatcgattgattgggatatataacgctgccgtcgaccatgatcaaccattcata

SEQ ID NO: 45715 - DNA, 1307 bp, Glycine max
  Clone ID: PAT_MRT3847_141281C.1
ggtaccctccacggcgagaggggaacagtcttagaagcaaagtctttggtgtgaggaaagtgttgatggcgcagagagctgaaccaatattggtcaccacagatgttttccaaatgggaaatatcaaatggaagcaattcaacattgatacatccaatgcttcctcctcacctccaaaaccattgttaatctttacaccaaccgtgcctggctcataccctgtaatattgttctgccatggattttcccttcgcaatagctactactctgagctcctaggccacatagcttcacatggattcataattgttgctcctcagctgtgttggagtgtacggtctatgttggaacctggtgatgaagttaaatttgcagggaaagttgtggattggctagccgaggaggggcttcaacctctgcttccagagaatgttgaagccaaattggataaattggttttatcaggtcacaccttgggtggcaaaactgtatttgctgtggcacttggttatgctaaaactgacctcaagttgtcagcactagtcaggcatagaccctgtggctggcccatgtaaatcttgcgaaacatttcctcctattctcactggcatgtcccaatccttcaatttgaacatacccattgttgtaattggcactgggctaggcccagagaaggctaatttttttattccaccatgtgctcctgatggggtgaaccataaggagtttttcaataagtgcaaacccccttgtgcacattttgttgcaactgagtatggtcacatggacatgttggatgatgtgacacctggcttaattgggtcaatattgtcaaattgtatatgcaaggccgggaagggtcctagggacttgatgagaaggaccgtgggagggttggttgtggccttcttaagggcacagttgaatggcctatggaaggattttaatgctgttttggcgaatcctaatcttgctcctactaaactggatgatgtagtgtacgtacccgcatgaagtccatactcaatattaaaggctctttggttcgatgctgaattgctttcaatgccaaagtttcttttcaaagaaatcaagtttctttcgatgatgtttgtttttgtttccataaaaggcttgtaaatggaattttaaaataatcttctattgtttacattctctgtcgagtttttacgtgggataatgtttattcattttggagttgtagtttagacaaacatattaatggaatttaattcagttaattccaaaaaaaaaaaaaaaaaaaaaaaactagttctagatcgcga

SEQ ID NO: 45716 - DNA, 743 bp, Glycine max
  unsure (1)..(743): unsure at all n locations
  Clone ID: PAT_MRT3847_141282C.1
ccacgcgtccgtgcagattcagtttcctcttcggcattaattctgcctatatatcagtggctgtgtcattcaaaaataataagagaaattaaatatttccttcgctattcttatcgtcacaaataaggaaaacaaagcataacaagaggtcatctagaagctctgagcgagtatggtattattgccatgcatcctaagcctcaagaaattcttacatttggtaaagccaaggagattgaaagtttttggcagtgtataatacatgcagttatatggtgtattcggttggtgaggaatgattgcatctttatgcttcagaaattgttttggaataagattgtcttctagcctctatctggttctcctgtggttcttttgagggagttttcatttatcatacggagagagactggagagctggacagctttgttgaatttttaatttgttttggaggatattttatcctccccttgtttcagtttgtcttctctcataaaatatcattttctattttaaaaagacttgaaaagttntatatcgtataactggtagtactctgtcaggaataaactatcgtaaaagcttaagctattgggtgaacttgaatggttntatattgcatctctgaaatgccccctcacacaatagccctttgggattaaaatgtggataatgcacacgcccatctatcttgcgctgaaatttatctttccattagaataattgggggcacattgatcga

SEQ ID NO: 45717 - DNA, 445 bp, Glycine max
  Clone ID: PAT_MRT3847_141283C.1
ttatggaaggaccttgcttcatggaggtgcagagtacaaaagcactgggagcggttctgttgtgttatatgccatatctgctgatgactctgggctttgttacacggatcattctgatcaacggattgaagtgatgattctgcttgtggtctaccatatctatggccatgactacagatgagtgctcgcctatatctgaattaccgtgacgatgtggttcatggtggggacatggcttgtggctcccttgcttttcaatacatcaagattggagtggcagctgatcgcacatgactagacatattcgttgacctggatgagcctgcgtgtagggacttgtgtatcttctgcaaaaagatacgaatcctggtgggcaaacggacttgagccctcccgttgttcggggaagcgtgtatatttagtgatatgatattctcccttgcga

SEQ ID NO: 45718 - DNA, 170 bp, Glycine max
  Clone ID: PAT_MRT3847_141284C.1
acgatcccacagcgtttcgcttttctttgtaggtgcaaagacacactacctggtaacatgaagatgtacaggcccctctctttcatatccactcagcaaatttcgcctgactgaccccatctaatatgcgatggctgttccccacaaagctgtctgcctacctggagaga

SEQ ID NO: 45719 - DNA, 490 bp, Glycine max
  Clone ID: PAT_MRT3847_141285C.1
tacggctgcgagaagacgacagaagggggaggagaagagagagaaagagggaaactcaaagtcatcatccaccatggcaaattctgtggcattttccgacgagattccgaacatgagcatgagcacaagcttccctttctcccctgctttctctagcatctttgacatgatgccacctccaccaccttcctcatctcacgatcctaaagctcccaacaactttgctggcttcatggacttgctcgctgtccctgctgattattatgccccttctttattcgactggccccaaaacaccaccgccacgtcagcaccaccacctctcaccgcccaaatcaaccaccctcttccgtctccggccagctccaatgtccccgacggctccgaggttctcaacactccggcatctcccaactattcgtctatttcgtcgtcgtcgaacgaagccgccgccgccgccgccgccaacaaagcaacgggaaatgataat

SEQ ID NO: 45720 - DNA, 461 bp, Glycine max
  Clone ID: PAT_MRT3847_141286C.1
gctattttaatttctgtaaaagataattttgtactctttataaaagagggatgcatggtttttaatttatagagagacttattgggtaggatgtttatttgaatttataaatgtattatgtttatgcaaaaatttatctaaagaaaggctatttgattggtgttaaaggtgtttgaatgattaattaatataaataattatacatttgtacacgaaataaaggaatatcgtaaaagaaatgaccttgacaaataccctttctttgtgaagctgaattttaaaatcaaatttgagctatattttcagagcaaagaaaaaacttagtatgcataagaatgtttttaaaagaatatttttaaatataatttgattaaaagatattcacaatattctttataatatcatgtaattaatgataaagtattatatatgataaaatgattgatgttgatataagttat

SEQ ID NO: 45721 - DNA, 469 bp, Glycine max
  Clone ID: PAT_MRT3847_141287C.1
ggccagccttggttttttttttttttttttttttttttttttttttttttttttttttggggaaactaaatttggtttttttatttggaaaaaaccatttttttcattaatttttccagggaaaaataaaagtagctctttaccctaaaaaaaaaccgggctttattatttttcttttataaaatcatatgggtaattattattttttccccccacgggttatggaataacatcgggagccacaatcaaatagtggggaaggggttaatcctgggaacagggacacaatttttggggttagccctcggaagagggatgccagactttttttccatgtccaccttgccttggccaccaacaagcttccttgggaaacatggaatatttatagccagattcacaggcacaacctgccacgctagaaaagcaccagggcacgttttttttccactcccgaagggaataaaag

SEQ ID NO: 45722 - DNA, 205 bp, Glycine max
  unsure (1)..(205): unsure at all n locations
  Clone ID: PAT_MRT3847_141288C.1
cggttcgacccacgcaaccggccccgttttnntttaaccaagacccccaaagcgcaagcaaacgggggagaggctagacaaaaacaagaggacgcgcccccacaacacaccaagggcgagcgcaaacaacacaagcaagcaagccaggcacgaaccgcagcaagaacaagaccccagaagcagaaccaaccaacaacaccgcaca

SEQ ID NO: 45723 - DNA, 289 bp, Glycine max
  Clone ID: PAT_MRT3847_141289C.1
gggcaaggtcaagatcggaatcaacggatttggaagaattggccgtttggtagccagagtggctctgcagagagacgatgttgaactcgttgccgttaacgaccctttcatcaccaccgattacatgacatacatgtttaaatacgacagtgtgcatggacactggaagcgtcactatgtcaccgttaatgacgaaaagacccttctgttcagggacaatcctttcactatttttggacacagaaactctgaagatatcctattgtggtcaactggagctaaatcatat

SEQ ID NO: 45724 - DNA, 115 bp, Glycine max
  Clone ID: PAT_MRT3847_14128C.1
ctagccgcatcacgaggagcgcacctaaggcggagacgcgacgtgtcacaggaagttcaagcacccagcgggcagctaactatgaatcctttatacaatgcgtgctattggatac

SEQ ID NO: 45725 - DNA, 3020 bp, Glycine max
  Clone ID: PAT_MRT3847_141290C.1
ccacgcgtccgcgtggatccagagagaaagagtccctttacaaagcttaaagcactcccccaaaacaagtgttcttggagacattcccacctcaacccaaaatacttttcctaagctttttgtgacaaatttaggacccatagaatagaaggtagggagggagagagcctcacacacccacccacccaagtttccaaagccatcaaatcccttcccaaaccccaaatccaaacacacttcaaaaaaagaaaaaaaaaacaaaactaagaaaaaaaaactaaataaaaaggcaacaaaactccccccactctgccttgggggatggtgcgaagcagcggtttccttggccttctgcttcctttcgacaccaccctgcaccacacctcctcatgttcttgccccccacgggggccgcatgtggtacttccccccaagcctgtgccattgccctcaggcttgttttggagactgcaagtgcaaccttgcttgcagctctcaaagctgaaaaaatatttgctgtattctctgctgcacattagcaccatccactcactcacttccccaaaaacacatgctcttccacatccctatataaaatcttttcaatcttcatattcatcatcatcaccaccaactccaactcaaaatatccaaaacttgccacttcaaccttcctatatattccttcctccactctctttctttacttcttctgctatctttctgagagacctgttgacacaaacccacaaatatgatcaccttaacagacttctaccatgtcatgactgcaatggtgccactctatgtggccatgatactagcctatggctcagtgaagtggtggaagattttctcccctgaccaatgctctggcatcaaccgttttgtggcactctttgcagtgcctcttctctccttccacttcatagcctccaacaacccttatgagatgaacctgaggttcctagctgctgacacccttcaaaagatcataatactagtcctccttgcagtttggagcaacatcaccaaaaggggttgtttggaatgggccataaccttgttctctctctccaccctcccaaacactttggttatgggcatccctttgctcaaagggatgtatggtgacttctcagggagcctcatggtgcaaattgtggtcctccagtgcatcatttggtacaccttgatgctcttcttgtttgagtttagaggtgccagaatgctcatctctgagcagttccctgacactgctgcctccattgtctccatccatgtggactctgatgtcatgtcattggatggaagacaaccacttgagactgaagctgagatcaaggaagatggtaaactccatgtcactgtgaggaaatccaatgcttcaagatcagacatcttctctagaaggtctcagggtctctcttccaccactccacgcccttccaaccttaccaatgctgagatatactctttgcaatcctctaggaaccctacgccgagaggctctagtttcaaccacactgatttctactccatgatggctgctggtggcaggaactcaaactttggtgcctctgatgtttatggcctttcagcttcaagagggccaactccaaggccttctaactatgatgaagatggtgggaagccaaagtttcattaccatgctgctggtggaactgggcactaccctgcacctaaccctggcatgttctctccctctaatgggtccaaaagtgttgctgctaatgctaatgccaagaggcctaatgggcaggctcagctgaagcctgaggatgggaatagggaccttcatatgtttgtttggagttcaagtgcttcaccagtctctgacgtgtttggtgcccatgagtatggaggaggtcatgatcagaaagaagtcaaattgaatgtatctccaggaaaagtggagaataatcatagggacactcaagaagactacctagagaaagatgagttcagctttgggaatagagaaatggacagggagatgaatcagcttgaaggtgagaaggttggagatgggaaaccaaaaaccatgcctccagcaagtgtgatgacaaggcttatattgattatggtgtggagaaaactcatcagaaaccccaacacctactctagcctaattggtctcacttggtctcttgtttcattcaagtggaatgttgagatgcctgccataatagcaaagtctatctccatattgtcagacgcagggcttggcatggccatgttcagtcttggtctcttcatggctttgcaaccgagggtcatagcatgtggaaattccacagcagcttttgccatggctgtgagattccttacaggtccagctgtcatggcagctgcttccattgctgttggactcaaaggtgttctcctacacgttgccattgttcaggcagctcttccccaaggaattgtcccatttgtctttgctaaggaatataatgtacatcctgatattctcagcacagctgttatttttgggatgctgattgctttgcccataactctagtgtactacatcttgttggggttgtgaatgaaagaaatgatggatgatacagaagattcacgtgtggcatccatgcaaagcttggttgaggttgttgagaatgagagaaaaaaaaggtcataaagcaacaatagaaaagaagcatcacgagaatttggataggaagaagaaccccaggatcagttttttttatttatttgttttctttttcttttttgaatgaattgccctttcttagtgaaaattaatgtaaaatcatgatgtagctaatttacaaaatgattatctcgttaaaattttatattataatgacctcggattccatgtcactcatcaattgaaggataagaaagcatgggaaactttgttgatgaaaatggtagtgctatgatcattttccccaatataatattaaccttcatattgctttttctttccaaaaaaaaaaaaaaaaaaaaaaaaaaaaaaaaaaaaa

SEQ ID NO: 45726 - DNA, 1211 bp, Glycine max
  Clone ID: PAT_MRT3847_141291C.1
gctttctgtgacaaatttaggacccatagaatagaaggtagggagggagagcctcacatccactcaccaaagtttccaaagccatcaaatacccccccaaaccaggcactaccacctcccatcccttcccaaaccccaaaccccaaatccaaaccaaacacacttcaaaacaaaaagcaaaacaacaaagtggcaatacaaaaaaaaaaaaaaactaaataaaaaggcaacaaacccccccactctgccttgcggacgcgtgggcggctgcgagaagacgacagaagggggtgctttggagactgcaagtgcaaccttgcttgcagctctcaaagctgaaaaaatatttgctgtattctctgctgcacattagcaccattcactcactcactgccccaaaaccacatgctcttccacatccctatataaaatcttttcaatcttcataatcatcatcatcaccaccaactccaactcaaactctccaaaacctgccacttcaaccttcctatatattccttccctcactctcttctgcttctatcatctttctgagaggcttgttgacacacaaaaaatgatcaccttaacagacttctaccatgtgatgactgcaatggtgccactctatgtggccatgatactagcctatggctcagtgaagtggtggaagattttctcccctgatcaatgctctggcatcaaccgttttgtggcactctttgcagtgcctcttctctccttccacttcatagcctccaacaacccttatgagatgaacctgaggttcctagctgctgacacccttcaaaagatcataatactagtcctccttgcagtttggagcaacatcaccaaaaggggttgtttggaatgggccataaccttgttctctctctccaccctcccaaacactttggttatgggcatccctttgctcaaagggatgtatggtgacttctcagggagcctcatggtgcaaattgtggtcctccagtgcatcatttggtacaccttgatgctcttcttgtttgagtttagaggtgccagaatgctcatctctgagcagttccctgacactgctgcctccattgtctccatccatgtggactctgatgtcatgtcattggatggaagacaaccacttgagactgaagctgagatcaaggaagatggtaaactccatgtcactgtgaggaaatccaatgctt

SEQ ID NO: 45727 - DNA, 1280 bp, Glycine max
  unsure (1)..(1280): unsure at all n locations
  Clone ID: PAT_MRT3847_141292C.1
ggtaccgccctcgcaggctacaccggtccggnnaattcccgggtacgacccacgcgtccggcctcaagagggccaactccaaggccttctaactatgatgaagatggtgggaagccaaagttccattaccatgctggtggaactggacactaccctgcaccaaaccctggcatgttctctccctcaaatgggtccaaaagtgttgctgctgctaatgctaatgctaatgccaaaaggcctaatgggcaggctcagctgaagcctgaggatgggaatagggaccttcatatgtttgtttggagttcaagtgcttcaccagtctctgacgtgtttggtgcccatgagtatggaggtcatgatcagaaagaagtcaaattgaatgtatctccagggaaagtggagaatcatagggacactcaagaagactacctagagaaagatgagttcagctttgggaatagaggaatggatagggagatgaatcagcttgaaggtgagaaggttggagatgggaagccaaaaaccatgcctccagcaagtgtgatgacaaggcttatattgattatggtgtggagaaaactcatcagaaaccccaacacctactctagcctaattggcctcacttggtctcttgtttcattcaagtggaatgtggagatgcctgccataattgccaagtctatctcgatattgtcagatgcagggcttggcatggccatgtttcagtcttggtctgttcatggctttgcaaccgaggatcatagcatgtggaaattccacagcagctttttctatggccgtgagattccttacaggtccagctgtcatggcagctgcttccattgctgttggactcaaaggcgttctcttgcacgttgctattgttcaggcagctcttcctcaaggaattgtcccatttgtctttgccaaggaatacaatgtacatcctgatattctcagtacgggtgttatttttgggatgttgattgcattgcccattacgctcgtgtactacatcttgctggggttatgagtgaatgagaagatggaggatatgaagattacatgtggcatggcatgcatgcaatctcgtttgagactccttagagcacgacaacaaatgttcaatgaaatacaaaagcatcaccataattgaataggaggaatcgatcaacggatgagttttcatttttcttcttctttttttttaatgaattgtccttgctcagtgaaaatgtaaaatcatgtttgtagctaatttataaaatggctatctcgtt

SEQ ID NO: 45728 - DNA, 563 bp, Glycine max
  Clone ID: PAT_MRT3847_141293C.1
ctcgagccgaatcggctcgaggtttggaatgatgagcatggcatgcggcgtagcagcgaggcagagagagcagtaatccaagtaaagcgacgtcgtgaaggcaaggaagggaaattgggaatttgatctccgtcaatgtgatggctccgaatccgatgaagcaatctgcgaattccactacaactaccatcgctaataaggagattctggtccgtgaaacgatgcgtatcagtgccaatttggcctccccccctcagccgccgccgccgtctcccatcgtcggaattatctgctgcgaagaaatggacgggcgtcgttggaagtacttggctgagagcgatggctttggcggattcaagaagaattcatttctccctgtcagcctcaactccaaccaccctcgcgaccctctccacgaagtcctctctttcgttacatcctatgttgtccccgaaggtttccctgatagtgttactccttcttatgtcccctacatgacatggagggctcttaagcactttttcggtggagcaatgggcgttttcaccactcaaaccctcttg

SEQ ID NO: 45729 - DNA, 508 bp, Glycine max
  Clone ID: PAT_MRT3847_141294C.1
ggagagatcccatcaataaaggatcgaattaccatagttcccagctttgggatctaacacgggacattctggttttggttgaaccaggaacacctcatggatctaatattatagctcagatgagatctcacatattatggatggaagaaagaaagtaccgtaagtcttctcgtaagaataatgaagtttgtaaagatttgatcactgagaaggccggtgcctttgtggttgctccttgtcctcatgatggggcttgtcctctggtaaaatctgggaaatattgtcattttggtcagcgtttggaaaggacatcttcacaacgtgcctacaagcgttcgaagggtgatcctttacgtggatttgaagatgaaaaattttcctatgttgtttttagacgaggatcaaggccaagtgatccttggccccttgatggtatggaatttgagactctgaaggagcagcatgcaaaaagaaatccagaggatcttgaaattgactacgaggactg

SEQ ID NO: 45730 - DNA, 106 bp, Glycine max
  Clone ID: PAT_MRT3847_141295C.1
ctcacttcacacctttcatggatgcaactggaaccgcgtggagcacacaggtactatcccgaaatccagtacgaatattctgcagcacatgggcaacagagaggtg

SEQ ID NO: 45731 - DNA, 399 bp, Glycine max
  Clone ID: PAT_MRT3847_141296C.1
aatctttgctgccccaagaagcatagcgacatgagcatcatgttttcatgcgtttttctttctaggtggttaagtagctgacttcttgtgctttgctgacttacccagaaaattgtttatctttttggtaggcctccattgcatttgatggagagtatttttttgtgactccaatatgatgcaattataaggataatggtagaaataaatatagagaaaatttctttattttgagatatagatgatcctatcatgtaaatatgcttatggtgtaattatgatgttttaagacactttgatgattagtatatatgaccaacattattattagttgaacgggaaggggtcagaggacattagaaactgcgttaagttacaagacttggacttgggaaacaa

SEQ ID NO: 45732 - DNA, 287 bp, Glycine max
  Clone ID: PAT_MRT3847_141297C.1
ggagaaaccaaactgcgcaactctgaaattatatatatacgaacaaaaattggatttaagaaaattatctaattaaaatacgttaatccaaatttgaggcatgttcaaaggaagaatctgaagtgggtatgagatgtggatttacacgttatggatgtctgccaataaggccgttcactttcactttattaagaacaaatacatcttagctacctattaagcatggttaggggcccaatactcaactaacctagaaattctcctatctctgttatttttttagaact

SEQ ID NO: 45733 - DNA, 506 bp, Glycine max
  Clone ID: PAT_MRT3847_141298C.1
gagagagagaactagtctcgagttttttttttttttttttgtgattgaattatatcgtaaaaaatatatgaattatttattcttttatctaaactataatattttaatgttaacaatttataaatactgattaacaatatttacactaattcccttaaaaaacaacatttacattaatagtaggcaactattaaactcaaattgacatataattaagttttctcaaactcaaactatatataagcggagtcagccccaacaaaggaatgcttctaggaaagcaaataccaacagaatcactcggtaaactataatgacactcctgaggagacaaataaaaaatatgaactcccaaaagaatagctgcaagcttgtcagccacagaataagttaatttccccaaccagaggaggtccttgaatcaacttgacagcagtcgctgaatttgatattgttcatcacccatgcataaaattcaatactgtacactattggattttagcata

SEQ ID NO: 45734 - DNA, 167 bp, Glycine max
  Clone ID: PAT_MRT3847_141299C.1
ggctcgagatgccattccagaccctaaggcatcagggcacttgttcagaatgtgaggggcgtggacaggtttaagagctggatcaatctctggggacaaactgtgcaccatcttcacacgaggggtttgagcaatactgcgtgctgcaagaaattcaactactctgg

SEQ ID NO: 45735 - DNA, 490 bp, Glycine max
  Clone ID: PAT_MRT3847_14129C.1
accctgtagagcgtaggatgagatgatggttatgggagctagagaggatggtggtataatgatactaatactgtatggaagggatgcgttgtgacttacatatcaaggatgtcatgtcatgaatctgatgatgcgatcctctaactgcagaagaatattggtagggaacctgagaatgtatactataggaggctcactatgaatgagcccaagattaaagacgatgtgctcgatgtgctcgcgggagagaacttgctgacttttctaagcactgagctcagggacgagaatcgtatagacttaggcagtgatggacctcacttctgacgaacacttcgtattgattcaaagagcatgcttgttgctggactcacaccttatacagcacggaccttctatgagagacgatacgctgtatgtaactactaacgatatgcatacataggcctacacggatccggatgacagacaagcgaacgacttgattgct

SEQ ID NO: 45736 - DNA, 446 bp, Glycine max
  Clone ID: PAT_MRT3847_1412C.1
acatggattatgagtgacgaacacaagcacaggccgacaccccaactacatctctacaacatgcacaactaccagaaggaaacacatatcatcaacaccacatacttccaaaaccaaggacagctctacacaatccaaaaagccctcaaatagacaaacggtcgggaacaccacagaaagacaaaccctccacactacaaggacacaagcaaagagaacggcattaaacccgccccatacaagtcacacaatgccacactaatggactccactataacgctgttttcaaccacttcaagaatcatatccaaacctcaaaaaggcctccaatggccaggcatcaaaagtccagaagtcacacgcatgtctctgcccaaggaaaaactcatcatatgcgtaccaggacaaaatcaccataagcgtaaggccaacgagggcctctccct

SEQ ID NO: 45737 - DNA, 258 bp, Glycine max
  Clone ID: PAT_MRT3847_141300C.1
ggcagaaatagagattggtgacgggctacctgacattggagggactgctaaatgagttggagctctgaagcaagcacgctttgaggttagatgaaagaaagatatgacattgggctcgactctttctgtggatatgcctttagacaaaagaaacttctcacacgagtagctaccgtctaactgatgtcgggcagagtgtgacctttaacaaggtcaaggttctggagtatgttggactggctccaaagggtagtctaa

SEQ ID NO: 45738 - DNA, 403 bp, Glycine max
  unsure (1)..(403): unsure at all n locations
  Clone ID: PAT_MRT3847_141301C.1
aaaattgatataannaattaattnctntaattaatttcccccaacacccaaatccacccgcgaattatttaaaaaatatcggcgcccccaaaaaanaataacactttttcaaattaaaatcaatccttttctaaaacaacaacaaccaaatgaattctaaggtttcttttatttctttcactcaaacatttcaaaaaattcacattcttatttttaattattataatccccactctccccttaatatattttccttacaaaatcttcattttaaaaatcctactattaaattcatttattatatttattaagcacctattaacatctctcctccaactaattttatttttacaaattaatttccaaaataatttcaataattttattttttcctcctttattt

SEQ ID NO: 45739 - DNA, 825 bp, Glycine max
  Clone ID: PAT_MRT3847_141302C.1
cccacgcgtccgcggacgcgtgggaaagttcacttcctctcctctcttcttctcccttctctctctttctccattgcctaacacagtaacactctagtactgttactttactctctctctctctctcgccacaaaaaatgtcaacaaaaacaacaacaacataagcatagcggtacaagacaaccttagtttgcaacaaaaatggtggtcggagagcagaccaatgggtggccaccaatcggtgctcctctgaacgtccacagagacgagcattggaccaactttgacagctccgtcaacgccgtctccttcggcttcgtcgccaccgccattctcatctccatgttccttgtcatggccatctttgagcgctacctccgccccacctcgccgccactctccccctccgccaccacccgccgacgcagcccctccgacgtcgaggcccagatcggcttttccggcaaactcgctcacgcttcccctaaaatgagtgtatatgccagtggtgttcagttctaatgcctggagatgagattcctacatttattgcgcatcctgctccatgttatccggaacgaatttcttggccttctcatcagcataacaacacattaccttgttcctcttccaacaccctccctactactactatatgataatatcattaaaaaaaagtgattttccctcgttccaaggttaaagcctctaccttttcgtgccaaaagttggtttttttccttgctgtggcgtgtttggagcgttttatcatttttattttgatttaatttaatttaattgctctcggaatgctggatcttgggc

SEQ ID NO: 45740 - DNA, 1982 bp, Glycine max
  Clone ID: PAT_MRT3847_141303C.1
ccacgcgtccggggagaacgaacctgtttaattcccccaaatcggaagttgatcctgaaaccctaaatagcccttaacgttgtgtctatgtttttgaattatggacgcgaaggatatcctgggattgcccaaaaactcgttcccatctctcgagaagaaatctcgtcctcccaaagagtctcaaagaaaaccagatggcatttcgcgcgaggtgtatgcgcttacgggcggattggcctctctcatgcctgcaattgaagcctctcagttgaagaaaaagcctcttcctctcgaaaaaatcacttggcagtggcttcctttcaccagttctgctcgtaaagataatcttcatctttaccattgggtacgagtcatcaatggtgttcctcctacgggggactattcttttgccaagtataataagtccgttgatgttatcaaatacacagatgaggagtatgacaagtatttgtcagatcctacgtggaccaaagaggagacagatcaactatttgacttgtgtgagagatttgatctccgatttattgtaatagctgataggtttccatcatctcggactgtagaggaattaaaggatagatattatagtgtttcccgggctatattgattgctagggctccatcttctggagatgttgtggcacattctattgttaaggaaacatataatgttgcacaagaaatggagcgaaaaagagcactgtccatggtcctctctcgcagaagctacagagagggctgtccctggtgaaaccatatctccatcaaatgtgcaaattccaatggctgttccagataatgcatctactctagctactcttcggatgctacgtctatatctgaagatatatgcactggagcaaatggtgcaagctgcgaacgcatctgctggacttcggactatcaaacgggttgaacaaactttgcaagatcttggggtcaatttgaagccaagggttccaacgaaagctgtttgtgcagagcatcttgaattaagaaaagaaatactaactttggcttaatctccagaagcaggtgcaatataaagaggctgaaggttcctcttttcgtgatgggtcatatggtgaaacacctggaacaccaaaggaccgaacatttgttccagattcaacgaatttcggagtggaaagggttggcaaaaaggaccaaaagcgcaaggcacctggagctccatcagctcataaaagacctagaaaactaaaggcctcagatctttagtttctcaggtggcaaccgggaaaggtgtttcaattcacagaattctttcaatcaaactgaaatttggtttacttcggtctgcaattttagattaatgccactcttgttattcgatgtaaaaagaaaagtgagatccctgagatgagtgagatctgccatcttaaccatgccctgagaagctggactttatttcttgtgctgttaatgctttgtagaattgtagggagaccaggtacaaaaaaggcatcttatttgaatatgcatgtatataagtttggacatgggaattccagatgcctttgacagcttatgtcgggatgtagaaattgggtgcggatggaacaagtgtcctgcttcataaatgtttctaatcgttcacacacccaatgaaaaaaaaaatgtttttattcctgctaaggatttgtagaattgtagggattccaggtacaaaagaggcatcttattggaatatgcatgtatataagtttgacatgggaatttcggatgactttgatagcttatgaagataattttattgtcattgtaagaaaatcgtggaatagcccaggagcataaggaagaagccaggagtaactgattgaacttatcaccttcccatatctataactattaataatgggaatcatccaatttggtgtacatatttcaatggataattttatcattaaacccctttttaaattttttttttttttcctttg

SEQ ID NO: 45741 - DNA, 509 bp, Glycine max
  Clone ID: PAT_MRT3847_141304C.1
agaaggtggaaccggcattctgacctctgacgaggtcctccgcgcctacgccattgcccgaggtttctccacacaaggtctcggtcaaccagatgagtcccgagccgcacgctacatcctcaaggactacgtcaagggcaagatcctcttctgccatcccccacctaccgatcccccgctggaccccaagcacttcaaccgcgaactctacgacgtaaaccacctccccgccaagcgccgccaccatcctctcgccaacctccctggtaaccactcccttgccggtcctgaggccactaccgacgacatgtcactcatggatgacgagctgctcgacggcggtggtgtacccgtccaaggtgcaaagacgcagcgcatggataaaaggttttttggcccgggacaagggatgggcagggttaaccagccgtttcactacaagtatagtgagcagggtaaggagctgagtggtaggaaagcgaagatgatggctgcgttggagaaggatg

SEQ ID NO: 45742 - DNA, 2008 bp, Glycine max
  Clone ID: PAT_MRT3847_141305C.1
tccggaattcccgcgtcgacccacgcgtccggagaaaagtgagagggaaaactggaacaggaagaacgaacctgtttaattcccccaaatccgaagttgatcctgaaaccctaaatagaccttaacgttgtgtctatgattgtgaattatggacgcgaaggatatcctgggattgcccaaaaactcattcccaactctcgagaagaagtctcgtcctcccaaagagtctcaaagaaaaccagatggcatttcacgcgaggtgtatgcgcttacgggtggattggcccctctcatgcctgcaactgaagcctctcagttgaagaaaaagcctcctcctctggaaaagatcacttggcagtggcttcctttcaccagttctgctcgtaaagataatcttcatctttaccattgggtacgagtcgttaatggtgttcctcccacaggggactattcttttgccaagttaacaagtccgttgatgttatcaaatacacagatgaggagtatgacaagtatttgacagatcctatgtggaccaaagaggagacggatcaactatttgacttatgtgagagatttgatctccgatttattgtaatagctgataggtttccatcctctcggactgtagaggaattaaaggatagatattatagtgtttcccgggctatattgattgctagggctccatcttctggggatgttgtggcacattctattgttaaggaaacatataattttgcacaagaaatggagcgaaaaagagcactgtccatggtcctctctcaaacaaggcaacaagaacgaagagatgaagaggttcttgttgaagcaaaaaaatagcggaaaaacgcctacctcccaaggttgctggacagtctcagtttgttgcttctaatgctggtgcagaagctatagagagggctgtccctggtgaaaccgtatctccatcaaatgtgcaacttccaatggttgctccagataatgcatctactctggcttctcttcgcatgcttcgtgtatatttgagaacatatgcacttgaacaaatggtgcaagctgggaatgcatcagctggacttcggactatcaaacgggttgagcaaactttgcaagatcttggggtcaatttgaaaccaatggttccaacgaaagctgtttgtgcagagcatcttgaattaagaaaagaaatactaacacccacgcgtccgcagaaacaggtgcaatataaagaggctgaaggttcctcctttcgtgatgggtcatatggtgaaacacctggcacaccaaagcatttacatcgtggtggggatcaggatcgaacatttattccagattcaatgaatttcggagtggaaagggtaggcaaaaaggaccaaaagcgcaaggcacctggagctccatcagctcataaaagacctagaaaactaaaggcctcagatctttagtttctcaggtggcaaccgggaaaggtgtttcaattcacagaattctttcaatcaaaattatgaatgttgtggaaggtgtggctgtgaactcaacacctgaaaattcggattgtggtatatctagtccaactgaaattcggttcacttcggtctaaaattttaaactaatgccactcttggtattcgatgtaaaaagaaaagtgggatccctgagatgagtgagatctcccatcttaaccatgtcctgagaagctggactttatttcttgtgctgctaaggatttgtagaattgtagggattccaggtacaaaagaggcatcttattggaatatgcatgtatataagtttgacatgggaatttcggatgactttgatagcttatgaagataattttattgtcattgtaagaaaatcgtggaatagcacaggagcataaggaagaagccaggagtaactgattgaacttatcaccttcccatatctataactattaataatgggaatcatccaatttggtgtacatatttcattggataattttatcattaaaccacttttt

SEQ ID NO: 45743 - DNA, 493 bp, Glycine max
  Clone ID: PAT_MRT3847_141306C.1
tttttttttttcaaactaatagaaataaatacgaatgaaaggggactctctgcctgacccccataatgatactacattcactccaattgttgtggaccaggtgagtgataaagagagagctttcccagaacgcaaataatttaatttgcaaaaaaacatgttgttcatctaccttcccacgatttaacacaaatggccttattcccccctctttaagtgatttaggaagaaaacccagggaaggaagacccttcccagatgaagattcccgagaaatacaacaatacacaaggtttttggtgattcacattttcccccctttaaaatcaacggtggtaatctgctcgtgggtggggctgataaagacaaccttgaaaacaagggccgcgatttctccttcgatgagaggccccgcccaaaaaaaccaatggtgggtccgggtccatctcaccacaggaggcccaaatgttacagcggggtttatggccgctcc

SEQ ID NO: 45744 - DNA, 611 bp, Glycine max
  unsure (1)..(611): unsure at all n locations
  Clone ID: PAT_MRT3847_141307C.1
agctgcgaacgcatctgctggacttcggactatcaaacgggttgaacaaactttgcaagatcttggggtcaatttgaagccaagggttccaacgaaagctgtttgtgcagagcatcttgaattaagaaaagaaatactaacttggcttaatctccagaagcaggtgcaatataaagaggctgaaggttcctcttttcgtgatgggtcatatggtgaaacacctggaacaccaaagcatttacatcgtgttggggatcaggaccgaacatttgttccagattcaacgaatttcggagtggaaagggttggcaaaaaggaccaaaagcgcaaggcacctggagctccatcagctcataaaagacctagaaaactaaaggcctcagatctttagtttctcaggtggcaaccgggaaaggtgtttcaattcacagaattctttcaatcaaactgaaatttggtttacttcggtctgcaattttagattaatgccactcttgttattcgatgtaaaaagaaaagtgagatcccntgagatgagtgagatctgccatcttaaccatgccctgagaagctggactttatttcttgtgctgntaatgctttgtagaatt

SEQ ID NO: 45745 - DNA, 421 bp, Glycine max
  Clone ID: PAT_MRT3847_141308C.1
ctcatcactctgcggagtcactgacagccatccgactttggggagcgcaagatgggcattttcactgcagtagatcactctgccaatccggcacccgtcgaggtgtatggctggcgcatatatctgctcgcaatctccgctgcatttggttcggcaatgttcggctatgacagcgccttcattggaggaactctgtcgctggcgtccttccgaaggacatttggtctcacgcccgagacacaagccgccctctcctctcatatcgtttcgacattccaagggggttgctttttcggcgccctcttcatctatccagcccttgttcgctttggaagacggccatgcctaatccttgctggcatcctcttcacgatcggtgcccgcatccaaaactgaaccgaccgacatgttggcatgatct

SEQ ID NO: 45746 - DNA, 239 bp, Glycine max
  unsure (1)..(239): unsure at all n locations
  Clone ID: PAT_MRT3847_141309C.1
cacaatttctntnaagctnaagctngtggtttctttctcatctctcaaccaaaggtnaaancnagaagagagtgagagaaganaaggtcngangtaaacatacaagctttgctcttctgctcatggatcggttccaggnatcngggtacgatcaaagggngtgttgantgcacagngctatntgcgtgaaaatcntcatgcnnantactggagngancnttgtgagtcatgatatcang

SEQ ID NO: 45747 - DNA, 385 bp, Glycine max
  Clone ID: PAT_MRT3847_14130C.1
gcatattcgtctgtaattcttcgattttttgaggcttaccctctattaaaaactttgggaatcccatatatattataacttgaataagatcaatgcttttttgaatctttatctgtccaattccctcaacaccagaggatattcttatatttctccgtatataatgtttgatacagtctcggattactggatcatcttgtatattctaggcatactttgatggtcgagctaaccattcgggtatataacaaataccacgttgtagatcgagtgccatggtgccaccctcctattcataaaatgatacgtctaaatcgacaattgcccttggccatatttacggacttttacaggcacccttgtctgaaggagcatgccataatct

SEQ ID NO: 45748 - DNA, 175 bp, Glycine max
  unsure (1)..(175): unsure at all n locations
  Clone ID: PAT_MRT3847_141310C.1
tcgcccacgcgtccggaaaagggacgtaacttatttgttaatatgnaggcgtcataaactgaaggcaccgtcccttctaagagacactagtcagggtcaagtgatatatatgctgctcaaggcaaaaattgcttgaaatggagagaagattgattccaccggaatgagttttgaa

SEQ ID NO: 45749 - DNA, 277 bp, Glycine max
  Clone ID: PAT_MRT3847_141311C.1
ccaatactcgagataaggaataggcgacagtgcgcttggctgcccccatcaatcgaactccttgtgctactggcaccatattctatgtctctctcggatctgcaacttcaactaactaactttgatgaagacgaaggcgtgagtgaatatacccccaacaccagatgtgggcccaaatgtgccttgaagagaacccacgcctttagagctcatcaacatcgagggtgcatcttttcttttttaagaagggcaagattgacactttcacttggtactc

SEQ ID NO: 45750 - DNA, 490 bp, Glycine max
  Clone ID: PAT_MRT3847_141312C.1
aggaaggtttcccgtcatcactgtatgacgtcctccttctttgggggggggggggggatttagtaatagtaaaggtaatgaggaagtaatggaacgatagaaggaaccgtattgaggagcattgaaatagaggggaaaatacaggataatgaataaaggatatgatgggaaaaaaaaatgaacgataggaagaataagaggagcgtactgatggacttgataacataaatacacgagggtgaagagccgggataagagttggcacacgtgaaatagaaagagcaggagcagtgcatgagtcagggggccagacccaacttggttagtggggtgggtaatgcgagagtactacggtgttttgtttgtacggtggagccacaaagcgcgcaagaaggggagtagtgcgacgtcaaatatgccaggtggcagttataagggcagctgttggcaatcggggaataataggacaaataccgcgcaagagtgaacc

SEQ ID NO: 45751 - DNA, 189 bp, Glycine max
  Clone ID: PAT_MRT3847_141313C.1
agtcttctatagcgtcacctaaataccttggcggtatcatggaaatccctattaacattcaaagattttctgtttgtggctttaagatttccaagacgtctctcgtgcagtgtttctgaacttggtgagggaaaccgtacgtgccttataaaaaaaagacatgatcactcactgtctacctttatactt

SEQ ID NO: 45752 - DNA, 564 bp, Glycine max
  Clone ID: PAT_MRT3847_141314C.1
caaacttcatgctgaattttcctattaatttttttttctgggtcgtgcctttcaatctagaaactatgctcgatggatttaacctcatgcttgaaatgatcagtagttttctaattaagagctttcttctcttaatctaatttctttttaataataaagaaaaacttttgttgagaaacgatttatttaacaagaaaaatttatatttgattatctctaaattaagtgtaaaaccgtgatctaaaaaaaactcaatcaactcaatactctcatagtgtatatagtgttagttgagagtgagtggattttgaaattggattgtgtttgcagataaaggaattgaaatcgaggctgctgcaagaagagaacacagcaggaagcggtgtttcggtgaaggaagaagagataacaacgatgcctgcagactcagaagagaaaacgatggaacaaagtaagagtgacccaccttctgaaacctcgaacattaatcctagttcggagtcgtcggaggaggaccacttgaattacgaatgttttaacatcaacagcgacgactgtgtcgtc

SEQ ID NO: 45753 - DNA, 243 bp, Glycine max
  Clone ID: PAT_MRT3847_141315C.1
ttcttttcaaagaaaagcgaatataagaattgtttgcccaatgtcagtcagacgcttcctcatcagagatagggtgtggccttgctttcatatcttgcccattgttgagtgtatatgtgggtaaacttctatctctcaactctcgggtttgcgacctaggcacgataatactcattataggatttcataagctttttccacgatctgtatcgtctggggtatgtgcataggtggactccattt

SEQ ID NO: 45754 - DNA, 1820 bp, Glycine max
  Clone ID: PAT_MRT3847_141316C.1
gaaatgatgaggagagtggggtgggaggccatggcttaaagtatgagtatagccagctagaaaaggttaacaaatcatgccctaaacacaagcctaatgacaaggggaaaagatatcctgaggcctattctgatgacatgagatttgatatgtcaattagagagtccaataaaagggtagcatggggttattcagcacccttagctgttgatgatgaattttatgagtctggcatgtatgcatcttcttattctttctcaagtttctcaactgaagttcctgatggaaccctcaacatcaacgacaacaatggtagcttatttaacatgagctacaagattagcctctcagtgatatcatattcaaagataggggacaatacttctgtgtttaatttgtcctctgagagagtgaagatctctgcagaaggagtttatgatgccggagcaggaacgttgtgtatggtaggttgccgtgaccttctctcaaacacaaacactgagataccaatagctcattctgtggactgtgagattctactgaagtttcagttcccatcattggacacatatgatggaggctacattaagggaagtattgaaagcacgcgtcatgaatctgatcctctttacttcaagcgtttagacatatctgcagtggcatattatagggaagcagcaagaagaaatgtttggagaatggatgtggaagtgatgatggctctgatatctacaactctatcatgtgtttttgtggggttgcaactcaacaaggtgaagaaagaaccaaatttgctccccttcatctcccttattatgatgtcaattcttactttgggtttcatgataccccttgttctcaactttgaagctcttctcactcaaaatcccaacaacacaatgcgggtgtttagaaataatggatggcttgaggttaatgaaataagtgtgaggctgatcaccatggtggctttcttgttgcaatttcggcttctgtatctgacttggtcagcaaggaagagtggtgagagcaagaaagggctatggattgctgagaggaacagtgcttatgtcacttcactcttgtatgcagcagggttattgattgcatggttgttgaagttgaagaatggagataataaggattctgtgtatgtccctatgtaccagccttcaccttgggagaacatcaagtcttatggtggtttggttttggatggttttctcttgccacaaatcattttaaacctgtttttaaacatgagagacaatgttctttcattttctttttactttggaactacttttgtgagactcttgccacatgcctatgatctttacaggactcacagtgatgctgccctagatagtcgatcatactactatgctgatccaagtgaagatttttactccactgcttgggatattgccattccattgggaggtatcctatttgctatgattatttacttgcagcaacgttttggtagccattatattttgcctcataggttcaaagggtctaaggtatatgaaaaggtgcctgaaaaggtgcctgtggttactgaatcagaagctgaagtagatactaccaaaatataacatgctccttatgtcaagtgcaaatggtctgatcagggtgactcaaaaatggtcactctcaagcagttctgctcaattttcatgtattttagctatgaagttctgtaattcaaatatagtgtctgccatatttttttttgtaaaatactgctcgtgtggctgatgaagtaaagccttgtgcccttttcctctcaatttaatgttaaattaagtaacttg

SEQ ID NO: 45755 - DNA, 237 bp, Glycine max
  Clone ID: PAT_MRT3847_141317C.1
gtcttccccgaactgttgtcccgcaacggggtcaagtttggacaagctgtgtggttcaaggccgggtcccacatcttcagcgacggtgagctggaccacatgggcaacgcaagccttgtccatgcccagagcatcctcgccatctgggccacccaggttatcctaatgagtcctgttgagggttatcgtatggctgggtgggcccctcggtgaggtcactgggccattctaccctgg

SEQ ID NO: 45756 - DNA, 167 bp, Glycine max
  Clone ID: PAT_MRT3847_141318C.1
gagtccttgttccttgtctcaaaaacaaagtttttacatttcatataactctcatcgttaattcataatgacatgcacggtccctagatagtaaaagatgtgctcggtagcgtgccggaaaaattgaattgtcgaaatctttctaatgtattttcactgatggtacc

SEQ ID NO: 45757 - DNA, 195 bp, Glycine max
  Clone ID: PAT_MRT3847_141319C.1
ccatgggagaagatggttgagtcatgcaagcgtttgtaaataatgaacggaacagaagcgatgggcatggcgccaagagcaaaggaaatatgcaaaagcagaaagctgaagcggtcccaaatacaatgtacaatgaaataccgaaccaaagaggacgctataaaaatatatatatacatatatatgaagcacttt

SEQ ID NO: 45758 - DNA, 247 bp, Glycine max
  Clone ID: PAT_MRT3847_14131C.1
ggctcgaggttacgatatggtaagctctttcattggctgacaccccattgccgagcctgaagacggggtagaagactcccatgacattgaaaagggcgctggcaggctagagcgatggtttacatggtactacattgcggaccgtgacccgccggggcaccatgtttgcggattgtgagcgggattcaaactcgacggagtgatccatatagctgatgcctgtgcgcaatggtgatccgaccacagt

SEQ ID NO: 45759 - DNA, 379 bp, Glycine max
  unsure (1)..(379): unsure at all n locations
  Clone ID: PAT_MRT3847_141320C.1
ngaaatgaagtgtccctttgtccagcttgaagaacatcatgttcagtgagtggaggtgcactccttttattgcgatcactctcacacactaattgaataattagctaactactgtgataaagatataaatgtcacctactagctatagtcatttatttttgtccatggaagttcaaactcactccctctcccccacctttcatttccaccttctctcccaatggaccaccgacaccaaccgaccttctctcgggcctgccatcggcgtcctcaagctgcataatgtctaccggaggtaccgtactcggcgggaggtggtcgactccgtcgtctgtcgtctaggagctatggtcgctagcccatagactatggttgacta

SEQ ID NO: 45760 - DNA, 320 bp, Glycine max
  unsure (1)..(320): unsure at all n locations
  Clone ID: PAT_MRT3847_141321C.1
cacttgtgattgaagaaaaatagttgcatccaccacaatctgatcaaattcgcctgaagatgctttacacctatacttgccacacctacgtttacttctgggaatctaacggccataccccatacgattcctcggtatttgggccgaagcttgaggactctgtaaagcgtacgtgagggcttgactcatgtcctaccaagggaccatgcccttcctgtttttaccacataatgatcagactgccctacatgcaagtcagaggaaaccaacatgcttgagcttctcgngctcaacactgatatgggtgtgctgatccacta

SEQ ID NO: 45761 - DNA, 360 bp, Glycine max
  Clone ID: PAT_MRT3847_141322C.1
caataaaaaccccacccaaaaattaggcccaaacccggaattaaaaagggaatagatttctcgtttcacgggaacctcaaataaaggaaaactatgggggatccttgttagaaaacacctagttatttccaaatgttaaaggcctaaacctcacccatggtaatcccgaatcttacattaaagggcggccatctacttgcgaaaaaaagggcctgaaatcaaaaaccccggactagcagttccaatctcgggtttccccttgcgagggagcttcttgggcaaaaaattctggggaatgttaggcaaaagacaaccggtggcaatgggcaaagatcccagaagtttggttaacccccgggg

SEQ ID NO: 45762 - DNA, 613 bp, Glycine max
  Clone ID: PAT_MRT3847_141323C.1
cccacgcgtccggtagtttccacatgtgccgctgtggcatcaattttgactggtgttcttgctgggatgcttgctttgggtgaacgacttccttcggaaccaaaagctcgcttggcacttcttcttggatgcgaaaaagaagcaatgtggataagaattttgaccttagaagagccacttcttcccgtgtgagggaaacaagtccaagtgctgtcattcaagcagcaacattaaatcatttactatcatcatcttccaaagaaaaagcttgagctggcatgagctggatcatgttccttcatccttcccaggatttctaagcattattaagttgctttctaatccatctgccaaggccagggagtattctgtatagcatagaggctgcttcatcagagggcatggcattttggtgatcattcattgcttctggctcacattttggatgaaatatttgttaacttctgatgcaacttgtaaaaactattcatgaacttacactactagtgagtgtacccgtgcactgcacgggttgataaagaaataaattttttgttaaaatgaattaatttgtataaaaaaatagacctttaatatccacattataagattc

SEQ ID NO: 45763 - DNA, 386 bp, Glycine max
  Clone ID: PAT_MRT3847_141324C.1
cccacgcgtccgtctatctctctgacacacactcatcattttctagcaaactctctagccgcttcaaatgggctaggaaggttgaataaaaagaaaacaaaccctagcttaattaattaacttgcttgtgttgttaattaatttgttcaacatggaaggatgagtgcctgaagctgatatctctgcctttagagaatgtttgtctctatcatggaaaaatccttatgttcttcgccttgctttctccgctggaattggaggctatctctttggctatgacacatgagtcatatctggatgcccaaacaattttgtacatcatagatgatttcaaagaagcagatagaaagacgtggctgcaagaagctttaatgagtatggcactt

SEQ ID NO: 45764 - DNA, 156 bp, Glycine max
  Clone ID: PAT_MRT3847_141325C.1
aactaaaacaaatttcattttccgctcaataacatggaatccctaagcaagcggacttgggattgttcacaaatttatgatttgaaattcttacaattggcttgaaagggccaatgcccaccccttttgaaaaaaaagggtccctcattaataatt

SEQ ID NO: 45765 - DNA, 814 bp, Glycine max
  Clone ID: PAT_MRT3847_141326C.1
tccacgcgtccgggagcctcgaggtccaaatgacaaccggacacgtcaaagctgtcatatgggacatatttgctgctggaactgatacctcagcatcaacgttggagtgggcaatggcagaaatgatgaaaaataatgacagttgggaaaaggcacaagctgtaataagacaagcattcaaaggaaaggaaacaatacgtgaaactgatctagaagaacttagttacctaaagtcagtgatcaaagaaacgttaaggttacaccctccttctcagttgatccctagagaatgcatcaaatcaaccaacattgatgggtacgaaataccaataaagagtaaagtcatgataaacacatgggcaattggaagagatccccaatattggagtgatgctgagaggtttatcccagagagattcgatggtagttatatcgatttcaaagggaatagctatgagtatataccttttggggcaggaaggagaatgtgtccaggcatgacatttggtttggctagcattatgcttccattcgctctattactctatcacttcaattgggaacttccaaatgagatgaaacctgaggatatggatatgtctgaaaactttggattgacagttacaaggaaaagcgagttgtgtttgattcccattgttaatgatctttgacactgcacgattgatatggttggaggaatcaagtttcttttactaaggaaataaatgtgttttaaaatcgcgtctagcaatatgcatgtctctatctgttttaaaagctaggttatctaactagccatccgagctatattttt

SEQ ID NO: 45766 - DNA, 414 bp, Glycine max
  Clone ID: PAT_MRT3847_141327C.1
ggaaaaaaacgtttccaaaaccatataaaaccctaaaaggccaccaggcaatttcgaataaagggccacaacttgacagaaagccccaaaaggaccggaccagggcaggttccacgaaaagacctaccatccccagggcccggggaaaaaaaaacaccccggccaaagttccctaccggggcaaacttctaatgaaaaattttttccttcatcaccattttcttaagttgcctttgccccgacttcctaataaattttccccagggcggcaagatcttcacgggcctcaaagaactttaccttttccatacccttaccaacataccaatgaacaaaagccctctggggatacatgagggcaaatttggggccgaggccagaaaaaaccggacccgtgggcggaccccggggccc

SEQ ID NO: 45767 - DNA, 248 bp, Glycine max
  unsure (1)..(248): unsure at all n locations
  Clone ID: PAT_MRT3847_141328C.1
tatgctcggatattcggctgcgaggttttccttatatctcccaaggttcttagtagacaaatgattttgtctatatatatagtgagggagaatattttaagagccgtgaagtagctttatacaagatgcgcgtatcctagatnttctaccatgttcttcatatagttctcatgaacatgtatgacatgtagtgtaagctcacaaatattctgctcggaaatatatgaatgctttttggattacctttc

SEQ ID NO: 45768 - DNA, 216 bp, Glycine max
  Clone ID: PAT_MRT3847_141329C.1
acgctgcacgcagtccgtgagttcggctcgacttttacaattcacttttttgcataattggtaatattaaatttgtaatttgtataggagttaaaatattcaggaactaataatgttttaatccctatttaactgacactcgtccacttgacgaccatgacaatgcttacaaaataatgcaatttttaacaaaaaaaaaaaaaggaaaagagaaat

SEQ ID NO: 45769 - DNA, 504 bp, Glycine max
  Clone ID: PAT_MRT3847_14132C.1
tttttggagaaagtcatttagaaatgacattactcactactcataaattgactacatttgtatgtgaacaacaatgacaatggtttctcgtaggcccaatctctcgtttgtcttctccagctaaagcactaaatttcttcaactacctacctagagaatataagctacaatgaccccatatagaccatacaagatggcacagagatctaagcaaaaattatggaccaaaaaaacaattgatgaaattgcaatgtaaaaccatgtgaccttctggtcatgacaacaacagagagaaaaatacactaataaacgatatcgaatactgaagtgtggacacttgcaggttcaaaccagctccaactggacttacaggtccaagtccaagtgctgtagaagatgaacttcttccaccatttcttgcgttagcacttccagcgtatatacaagatccataactaggatcctcagtagttgttgtagctgtaccatcaaagtcacatgttc

SEQ ID NO: 45770 - DNA, 130 bp, Glycine max
  unsure (1)..(130): unsure at all n locations
  Clone ID: PAT_MRT3847_141330C.1
cgcgggtgaaacggcacccacctaaaatgaaaggcacctgncnctcacgcccttaaccaccaaagactaaactctcgatgctctatggctgacgacccccttgtttgacctacacgtacatgctcctttg

SEQ ID NO: 45771 - DNA, 493 bp, Glycine max
  Clone ID: PAT_MRT3847_141331C.1
caaagatggctaggtctagtgcttatcctttgttcttgatttcttccattctgtttatttcttccatgattgttttgttcagggatgtgatggatcattgctgctagatgggagtccaagtgaaagagaccaaccagccaacggaggcatcagaactgaggccttgcaaaccattgatgacatcagagctattatccataaggagtgtggaaggatcgtttcttgcgcagatatcactgttttggcagcacgtgattcagttttcctgacaggaggtcccgattatgcagtgccactaggaagacgagatggcctgagcttcagcacatcaggaacaagtgatctccccaaacccttcaacaccaccggcgtgacccttgacgctttcgccgccaaaaactttgatgtcaccgacgttgtcgccttatccggcgcacacacctttggtcgtgcccattgcggcacattcttcaacaggctctcccctctcgac

SEQ ID NO: 45772 - DNA, 415 bp, Glycine max
  Clone ID: PAT_MRT3847_141332C.1
tcacgtcatgaccaagagaacaatacagggaataaccgttttctgcgccaggatcacgtggagtaattacgactggaaccaatatcacacccagagctatcgctatcggttgattgagcatcacacacattgctgacaaatattatgtgctacattcctcgtgatattgctcttgctacagcatctgcacatgatctgtcactcatatggaccatacctagggcaatcaacttctgctggaacttatagcgctggtctcatgatggccaggacacttctcaaaacgctggaaatggatgaggaatctgaaggacatgatgtggctactggagaggactatacaatggtgcctgctcagagcgagaggccgtacggggctgatactaatgtatgtcttatatagactacaactggc

SEQ ID NO: 45773 - DNA, 2161 bp, Glycine max
  Clone ID: PAT_MRT3847_141333C.1
ggaaaaagtggcatgaagatggttgttctattcatgagattgctaactttccaggtagatcggctcctataaaagaacaaagtgttgctgaatatctgctggaagctgctcaagaaggattaccttttgattgggctagatttagcgagatgataggactgacacaagggatcatatcagaaattcagggtgctatttcaaaagttggatctacagataagctgaaacctataaaaaatgaattgccagaagagataagttatcagcacatcaagacttagttgacaatgcggaactgttgttcatgggaatatcatgattagggcatttatttccttaataagcaagagaaaatggacaaaatagaagcacataatactgaacactttatccttattacatgagtcatatgtcaaacaggaaacaacaatccccaaaatagaacacacccatatccttagcaattaaacaacaccacacaagaagaactacacataacttacaaacttttgctccattcaaaactgatcaaccaattgcaccacctcttccaccacagacgtcaacaaagacttcctagcattcaccacattgcacttgccacgaatttcaccttgatttccagtgagcacatccaattgactcaactttatagtagcatccacaaacttctcaaagaacaacgtttggttcaacgcaaatgcattgaccaaccccttagtcctcttatcattgagcaagtcctggtcagaggtgaacaccccttggcggttcattaggtcaaggtagtatttgttgtcgaacacagtcggggttctgatgtccaagttggcggtgttgccggagtttgcgtcggggcaagtggattgtagttgcttggctagggttttgtccatgttggggtcgagaggggagagcctgttgaagaatgtgccgcaatgggcacgaccaaaggtgtgtgcgccggataaggcgacaacgtcggtgacatcaaagtttttggcggcgaaagcgtcaagggtcacgccggtggtgttgaagggtttggggagatcacttgttcctgatgtgctgaagctcaggccatctcgtcttcctagtggcactgcataatcgggacctcctgtcaggaaaactgaatcacgtgctgccaaaacagtgatatctgcgcaagaaacgatccttccacactccttatggataatagctctgatgtcatcaatggtttgcaaggcctcagttctgatgcctccgttggctggttggtctctttcacttggactcccatctagcagcaatgatccatcacatccctgaacaaaacaatcatggaagaaaatgcggagtaaggcaggagcttggccattgtcatccttgaacaccttcttgagatgtttcctcacaatggactcaagcttggggcatgttttggaatagaaagaatatgatagtcccttcactactgggggcttggcttctacttgggaggcataaatgtgtgaaataaacagaatggaagaaatcaagaacaaaggataagcactagacctagccatctttgtttaccttgatgcctttcatatttgagatttactaagagggtaagatagaaacatgccacgtggaaagatattgtgaagacggcatctctgccaaaagttctctggaaaaatgggacctagaaattgatgaggtgcctattcaacctgtcaatggttcggaggtacagaagcttccattagtctgtgagggggaattcacaaacaaacgacaaaaagtcagtgaaacaaaggaagtaaattcaactaaattgaaggctacagagagttctgttgtagagtggttgaagaaccttgatgaaggggctacattgagcgatgttttggaacacttcaatggatccagtaaagattccgtggttgaactgctaaattgccttcagtctgacttttcaatatatagtaaaggtggcacgtataagattctgtaaaaaagttgatgcatcaggattttttatggattaggcttgtaaaaagcagtttgtttccatggctttttattttgaaaatttgtacacaagtcattgcgaaacagggtaaatacttttttgcttaattacgtgtttcgtttttatattttatcctatatgtaactttgatcc

SEQ ID NO: 45774 - DNA, 231 bp, Glycine max
  Clone ID: PAT_MRT3847_141334C.1
gtcgagttctagtagagccaccgagaagtgttcagtactccagttccagttctgcttatcttcgccgacgcagcctgaatgctggcgtgactctgcgtctgtttcatggctcacgaatgattgaccaacactctggctaggacactttaacttgtggcgacatgctatgactatctcgtattcacgagtggagctctccttagatcctcaactcgtgattccagttgcggc

SEQ ID NO: 45775 - DNA, 418 bp, Glycine max
  Clone ID: PAT_MRT3847_141335C.1
agtgtgctggaattcggcttgaaacgggtgcaaaatatcttattcttttagaacaaagccacattgaattcgaaaaggtagagacttaagcaagaaagacatgtcataaagggcccacaagtattgtttatttgcttatataagaatgctatttggccttctttctttcttttttttccctagtgcagcgtacaggttactcattctacttcctggagaaaattgctttaaacttattacaacacacgttataagctaagcctgactacatgagccaccaatgcacctcagcggctcagatcccaatgagcttacaagtcaagagtatgagagccaataaagtattttttataacaccccagcttagccttttttatcatgtctaaccctacgcattatatacactacttgcagtaca

SEQ ID NO: 45776 - DNA, 345 bp, Glycine max
  Clone ID: PAT_MRT3847_141336C.1
ccacgcgtccggcttggaaaagaccaccgaaggggggagagtgatggatcttttgtgtatcaataatgagggggtatcatatgaatgtactgtacccaacaattatgtccactggggtggtgcataaagcattgatattagatattactgagactacaatgatctaatggcatatcctcgcaattgcatattataactacagatatgatgctacagatgggtacttttttccaccacctgtcattagagattcatatactgtatatcattatcatgatggcaactcatacgtgggactctttcctaatgatgatgatcatcggatgtcttacctattggctttga

SEQ ID NO: 45777 - DNA, 374 bp, Glycine max
  Clone ID: PAT_MRT3847_141337C.1
aataagggtagtattagtcgaccgcgcacacgaatgatcacgcgtgcgggggaagaaggaagggaacatctggctggggtaagccaaacattaaaagaaagaggaagcgggcgtttcaagtgctaaaaaacagggcacgaggccctaacgaagagatagcgcactactcgcacagcaaaaaatgcggggcggcgtactaaggatgacaatgttgtacaatcacggaccgcctctcaacaggttcaaacagcgcccactatgccgatcacaagggatgtgtaagaagactggagataatggaaaaaagcctggggaacccatttagaggcatatgagtggaacaaggtttcccaataagtgataacaagaagaag

SEQ ID NO: 45778 - DNA, 463 bp, Glycine max
  Clone ID: PAT_MRT3847_141338C.1
tctgcagctgccctaccactactactcactaactgcagatgtcaatatgcctcagctgtccatgggctacgcggtattacatcaaaggcacatccgatcttgagcagatgaacgaaattcagctgatgacgctgctatgaattgctacaatcctactcaagacgcagactttgtacccggtgacgcatctaactgctaggatctcgagcactttgacttaagcactgtctgtctatagagctctctcactttgcggatcttgcctgatggccatgctcacacagtcattggcccggcaatattagccgtagacacactggcgcggactgtaaccatgcctgagctggacacctgactttatacaccggcgctcgaccgtctatcgttgatgcgaacgcttgcttcaaggacgagtttttcgcttactacatgacaatcttctacgccggccacaacaccccgc

SEQ ID NO: 45779 - DNA, 612 bp, Glycine max
  unsure (1)..(612): unsure at all n locations
  Clone ID: PAT_MRT3847_141339C.1
ttcccgggtcgaccacgcgtccgcaacgaagtgcgagcgacccacgtccacacgacacgaaccaccaccaccaaccagcagccgcaccacgcacccagcgcaaagcgatggcgtcgctcaccatgatggcgtccttcgccgccgtggcggtggccgcgccctcgcgccgcggcaccttcgccgtggtcaggtccgccaaggtcgaccgctgccaggagcccgccacgctagcagcaaccgaggccaggcccgccgccgacggacgccgcgccgtcatgctcgcggctgctgcggcggccgtggcagccatcggcggcgccggcgccgccatggcgggccccaagaacgggacccccgaggcgaagaagaagtacgcggccatctgcgtcaccatgcccaccgccaaggtctgccacaactgagcacgcccgcgttgcatgcacctgcagggccggcgggtggtatataatcaatgtacgtgccacggtgatgatgtccctattgntggttcgagctttagatgcatgcatgacgtgaggccgcttaattgctttctgacggcctcggagctggtagaatatcaagtgcactgcanaactgaattcggttgag

SEQ ID NO: 45780 - DNA, 671 bp, Glycine max
  Clone ID: PAT_MRT3847_14133C.1
tttaagaaacaagtaaatagagaattttattgcaacatcagagtacccagtcttatttaaccaccccaattacaacatagtatataaggtttaggcaacactagaaaaccataacatttacttatagagcaaactttcattattggtaattagtgcatcatatacttatagtagtaaaccatagcatttacttatagagcacactttcattattggtaattaatgcatcatatacttatagtagtaaaccatgttactgcgccgcatatttcaaatacagatatctatctattcaccttgacttccaccgaggttgatggtgccaccgtatatagagccgttgacactgtgattacattgattgttagtgtaagtactattttgaccttttgtggtatcattgattttctggtcgccttttttttttgccattactagcttccttattatggttggagttggacactttgtctgctgctttggcctcatctacatgttcgaggttgatttccacagaatcgggcattcttttcataggcatagaacttgttagcgtcgtgatatatcttactagtaaattgctgctctttgatctctataccctattctttggcttgaattcttggcctcgagggccggaggacctataggcagacgtgtgccagttgcag

SEQ ID NO: 45781 - DNA, 217 bp, Glycine max
  Clone ID: PAT_MRT3847_141340C.1
ggaaaaaggcaaaagattctatcttgggtgaaagcgaagatgacactgaagatagaatcaacaaccatatatcaaaatgaagagtgagagataaagtgaaagagggaagacaaatatcatggagaaaattgacataggaaaggaccaagtcgacgaaagggtaaggaaacagcgtggcaatcccagtggcggttgcaagtttgacccactgatgaag

SEQ ID NO: 45782 - DNA, 410 bp, Glycine max
  Clone ID: PAT_MRT3847_141341C.1
tccgggtcggaccaacccttccgcccacgcgtccgcccacgcgtccgcaccctcgccctccacaaggccctcatgttcttcaatggccaacgatcggggaagttaccgaagtggtggacgaagacggcaaagtcgttggcgaagaatgcaacgtttccatttattcgactaattacccattttagaaaatttcctcggtggataattttgtggaatgattagtgaattttttaatcttgcttttatgtttggtgaagtaggttaagtatacaatttcatgaatataaatgttggttttgggaactgaacacactcatatacttgagtgtactccatgtaataactagtatatatatatctaaaagaaaatatatatttagttattttaatatattaaatgattaatacat

SEQ ID NO: 45783 - DNA, 371 bp, Glycine max
  Clone ID: PAT_MRT3847_141342C.1
cccacgcgtgcgagggctgcctacagacggttttatggggaaactacaactcgttctgggcggcgccatattgctgaagggaaggtaaagtaaacatacatactgcatctcttttgtcaagtcgacttttaaggatccgattaaatacatctttatgttataaaacaagccgttgtactatactatacaatgtaactgttgatgtattgcacaaaataatcactgccaatggtcacgcctataacaaatgatgggaactctactggctatgacacgacatgtagactcttgggcagatgccaaatgatattactagagctggatgtgataatgctttcatcagattactcagagaaactggaactgaaaag

SEQ ID NO: 45784 - DNA, 361 bp, Glycine max
  unsure (1)..(361): unsure at all n locations
  Clone ID: PAT_MRT3847_141343C.1
tcctctagagcggccacttattttttttttttttttttttttttttnggataaaaaaacatcctaattatttcacagtagtctgttttattaaagtcaaatatatctcaatatttaacacaactattttttcaaaaactctaactcccgactaataattaaaataaacacacacacataaataaaaaaccctgtttacccctaacttattcttatacaaataaaacacaactactacactaatcttccccaacccctatttgataattctcaattttcacccaaaaaaatcaaccttttcaaattacacacaccctcctttttcttcaaaattccaaccactcctttcatcacctttttac

SEQ ID NO: 45785 - DNA, 1644 bp, Glycine max
  unsure (1)..(1644): unsure at all n locations
  Clone ID: PAT_MRT3847_141344C.1
caatcgtgctcgagaattaaattaaaagaccattttcgtccgcaccaactctcagaacatcaatcacttgatcacgtcacgcgaaaaccgaatggaagaagaagaagaagaagacacgtcgccaccgttctggacggaaagcggcggtcgccgccgtctccgccgctcgtactcgctgttcctcagctccagtgcacctctaatatgccttctggtgattgcactcgcattcatgctggtcataattcccacgctgcactctttcaccacccaaattttcaaacccaattcggtgaagaagagctgggactccctcaactttgtgcttatcctcttcgccattctctgtggcttcctcagcaggaacaactccaacaccaacgaaagcttctccgacacgccacttgagtacgacaaaccaaaccctccattaccgcgaccgtggtacgaggaatcagatcgaacgccgtacaaatcgtataacaggctgaggagtttcagctcccacccggatctccggcaagagtcgcagtggctcgccgccgatgaacggtggcgattctatgacgatacgcacgttaacggttaccgtggatttgacttggaggaacaccggcagcatagaacggaggccggagaagaagagagcgttgagaacatagaagtggttgcgaaggaggttccaccaccgccagctccggcggagaggaggagtgggggaaataagaataagagaacaagtgcaactaaagagttgttgacatcttcgaagggaaagaagaagaaacaaagacaaggaaacgttgaaagtgttaagagcattccttcacaaccttcctcagtttttcataatatgttttcttctaaggaaagcaagctcaagaaagttaactctcgcgtaccgtcgcatgtttcattttccaaaacccaaccggttcgtggggatgtggtggctacttccagtagatcaaacaagagagaggatttctatgcttcagaagaaaatgtggttgttactggcaacgactcacctttgatctcgatacctccaccgccgccaccaccgccgttcaaaatgccggcatggaagttccgggtgcagggtgactttgttagaatagatggcattagtagctggagtagtgatttggaagatgaaattgtggaatcaccgagcagtgaagatggtggagcacctgaaatcttattgttctatcctagtcctgatgttgataccaaagctgatacttttattgaaaggttcagagctggtttaagggaggagaagaagggaattcgtacgtccaatctacgcccttcaccaaagccagaagctggacggaccaagtagaatttaaggtgcaaaattgataaattaattctttgttttgtttgtttttgtattattttgagacttgttctgaatgaagtaaattcttttcctctcaagttatacatttgagtccagagtcatacagaggaatagaaggattagttttccttttgcaaaattaatgtttgcgcataaatagccacatctctcgttttttgttttttaatgtataaacgcttgaaatgttcagttttggatattgcgccttttactccatatttaacgaaaaaatctatnnagtcgnnannaaa

SEQ ID NO: 45786 - DNA, 332 bp, Glycine max
  Clone ID: PAT_MRT3847_141345C.1
gccacgcgtccgctggtccctacaacttcacttaacttctccctctatatgtgtctgttaatacacaccaaaacattcattcattggtattattcatacaacaaatcaaaaaatgttacccaacaatacttgcactattgttcccgacgcgggggcccggcaccacacccacgtggtgtccccgcagcaatgctgatccgccgtggtccaagagatcgccagcccggtcttcaacggatggtccgaagtgcggggctttgacaacccgcaaggctacaagcactttgctaaaaagctgtcacgtgattctcggcgactgcgacatcaggacc

SEQ ID NO: 45787 - DNA, 177 bp, Glycine max
  Clone ID: PAT_MRT3847_141346C.1
ccccctgacctggaattggtgttaactttggtttgttcgattgtttaatgcaattttggaaattaggcatgaccctttggtcgagtatgctctgcctatttgaaaatttccacacctcttttaattgtcgtaatgatgggtgaagcgtgtggcatttttactaaaatgcaaggtact

SEQ ID NO: 45788 - DNA, 597 bp, Glycine max
  Clone ID: PAT_MRT3847_141347C.1
gcgcccttttttttttttttttttttttttttttttttttttttttttttttttttttttttttttttttttttttttttttttttttttttttgggggccgaaaaaaactattattatcggggaacaagggttttaaacaaaagggtcacccccaaaaaaaaacaacaccccaacttcccaaaaatggggcgggccagaaaaaaacattcaaaagctttttaaaagggggggaacccccatggggattaaaaacccggaccacaccattttttaaaaaaaaaataggggccccaggccttttaaaaaaaccccaaaaggggggttagggataaaaaaacccaagctgggaaaggttttggggggccccagcggaaacaaaaaaaaaggggttttcccccgggggaaatttaaaaacgaggggggggaaaacaggggcaaaaaaaaaaaccctggaaaaagggaactaaaggaaaccttttttttaaccaataaaaaaattggggaaggaggggggggcaaaaaaaaaaggattaaagggccagggccccctaaaaccaaaacgctccttgggggccgccccaaaagggggaccccc

SEQ ID NO: 45789 - DNA, 376 bp, Glycine max
  Clone ID: PAT_MRT3847_141348C.1
gtcaggttgacgttattctcagcgatggatgcttccacagagccgccgtgcctagcggtgcttcaacaggtaaatgattgctgtttgtttgagagagaaaaagaaatgtgtttagtgagttgttagtgttatgctgcttgaagtgtcattatcctgcaaaacagagattgttgtgtttgaagtgtggtagttgattgtctatgagtggaaatgtggaatgcgtaggttttgcgtgttatattgatgttcattggctgtaaagtttgattttatctggttatggcatgggttggtagttctgaaaatggactcgttttactttctataaaggtgtttatgaggctttggaattaagggatggaggctcatactacct

SEQ ID NO: 45790 - DNA, 452 bp, Glycine max
  Clone ID: PAT_MRT3847_141349C.1
ataaatggtctttttctttttaaaaacgggaagctccttttttttccctggagcctttgtttttttttgttttaattccgcggaaaaggggaaaaaaacctcctcctaaggggggggaaccctaaacttcggggggggtaaaaaaaaaaacccccaaattaaaaccagaaaatggaaattcaacaccaaaggcattaaaatccccgcaaacggcgtttaaaagcccgaaacccccggaaaaaaatgtttttcctttaaccggccctggatttaaaataaagggcccccagtgtcctaacaaaaactaacagtgcctgaagaggagcaagtctaccctggaattgtgcaaaccgacccttcgaaggatctaaaagccaagatgccggatctaactgctcggcgccataaaatgtgggccccgccaaaaaagattttcctaaccccaaaaaggc

SEQ ID NO: 45791 - DNA, 590 bp, Glycine max
  Clone ID: PAT_MRT3847_14134C.1
ttttttttttttttttttttttttttttttttttttttttttttttttttttttttttttttttttttttttttttttttttttttttccggaacccgggggcccccccggaaattccgccaccgtccccctaggcggaccatttttccccatagggaacccaagaaaatcggggccaacccaagaaaaaaagccgccccctgggaaaaaagaaaacccccccacaattcaacacaaaaaaaaacccgggaccataaaaagaaaagcccggggccccaaaaaagggatcaaaccaacataaaatgcccagcgccaaaagcccgtttaacaaagggaaaaaccgaggcgcccaaacaaaagaaaaaagccccaacccccggggaaaggagggtggcatattgtgccccacagggagattttttttcccccagagaaaccgacaaactctcaatgccattaacccccggacccttaaaaaattgtaaaaacgcaaaccccacaaaaatttgccccaaaaggggaaaaaaaacgctggcaaaaaaagaaataaaaccggcccgaaaaaaaaaaaaaaggaacccgccaccccc

SEQ ID NO: 45792 - DNA, 245 bp, Glycine max
  unsure (1)..(245): unsure at all n locations
  Clone ID: PAT_MRT3847_141350C.1
tgcactccctgttattactnnnttgnctantatgacctagtttccttcttaaatacttgtgtattgtgttctccagaagagctctgtgtctgcagatccttngtcagattttgacagaattgaccactatgatgataatactattgttgaaatttctnctctatttgggcatcaactgcaagagctcatgttggaggtcagttctcttaaggaaagaatanacatgcactcaagtttgacacagg

SEQ ID NO: 45793 - DNA, 203 bp, Glycine max
  unsure (1)..(203): unsure at all n locations
  Clone ID: PAT_MRT3847_141351C.1
ttggattggttttcttcttcctcttcctaaagagnntcctaatctcaatcctcattacacacatatctanagatttcttnattcctctctcaatcttttctgttttcttttcccctctttgacatcctcgttttcgccganacaaaaacaactaagattttgtnttntgttgtatttntctcctgntgttatttgactcggtt

SEQ ID NO: 45794 - DNA, 599 bp, Glycine max
  unsure (1)..(599): unsure at all n locations
  Clone ID: PAT_MRT3847_141352C.1
tcctctanagcggccgcttttttttttttttttttttttttttttttggtttttttttttttttttttttttttttttttttttttttttttttaaaaaaacaaacgggccaaaaaatggcccaagaaaaaaccctccccggaaaaaaccccccaaaaaaaatccttaaaacccaacccgaggccgagccccatcccaaaaaaattccaccgagaaaaaaccggggaaaacccgggaaaaaaccagcctccctttaaaggggccgggacaaaaaaaataaaaaaaccccttcctccccccatgaatggcccattttaggtccaaaatggggttaaaccccccccccagccaaaacccaggttatcttaaagaacaggggtaagggagggatcacccccaaattcctggcccaaatccggaaccacattttggaaagggaaatttgggggcccccgaaaaattcccggggtgaacccatgggggccaccaacaccaaaagaaccccctttggcacttgttttaaaacaataaacccccgacaaaggcccccctttgggcgccttctgcccaccggacggacccgggggtccccccccgaa

SEQ ID NO: 45795 - DNA, 1506 bp, Glycine max
  Clone ID: PAT_MRT3847_141353C.1
gctttatcatctgtaaaccttttgatcctgaagcatggaccaagcctttgccaactgatattttctaccacaagttgttttaaaatgagaataaagcgggtactgaggattgaactctcgactgcttgtttcactggaaataatttgagttgtggtgcgagttatcatcaaccttgcgaaactgataatgcagatcaaggttcatcacataaaccaaaaactggtctcattgttggaattgtgatagggttagttgttatccttttccttggtggtctgatgttctttgggtgcaagggtagacacaagggctacagacgtgaagtttttgtagacgtcgcagaagttgctgtcaaaaggttaactgattatgaaagtcctgggggagatgcagctttccagcgtgaggttgagatgataagtgtagctgtgcataggaacctgttacggctgattgggttttgtactaccccaaccgagcgcctcttagtttatccctttatgcagaacttaagtgtagcctatcgtcttcgagaaatcaaacctggtgaacctgttctggactggcctacaagaaaacaggtggctctgggaacagcccgtggcttagaatatctccatgagcattgcaatcctaagattattcatcgggatgtgaaggcagctaatgtattactagatgaagattttgaagctgttgttggtgattttggcttggcaaagttagtcgatgttcgaaaaactaacgtgacaactcaagttcgtgggacaatgggccacatagctccagagtatttgtccactggaaagtcttcagaaagaactgatgtttttggttatgggattatgcttttggagcttgttacaggtcaaagagcaattgacttttcacgtttagaagaggaagatgatgtgctgttacttgaccatgttaagaaattagaaagggagaaaagactagatgcaattgttgaccacaacctaaataaaaattacaacatacaagaggtagaaatgatgataaaagttgcattactctgtacgcaagcaacaccagaggaccgtccaccaatgtccgaggttgtaagaatgctagaaggagaagggttagctgaaaggtgggaggaatggcagcatgtggaggtaaataggaggcaagaatatgagagattacaaagaagatttgattggggagaagattcggtctataatcaagatgccattgagttgtctggcgggagatgagaggatctataaatttaaaacatttatgttgtatggtgtacctcaatatccttttttgtttattatttattaagacctctatcttttttttggtaggttaagcttgattagaaatgtattttttttcttgttttccaactgtaaaaaaagggggaaatagttgtaaaattttggtgttccaacgtgcttgtgttttccattccaagtttgattccatatcctatactttcagtgaatctaccatttttctgagtgattttc

SEQ ID NO: 45796 - DNA, 1433 bp, Glycine max
  Clone ID: PAT_MRT3847_141354C.1
cggcgccggggagtccatggtggagcacgccgatttgaaggacggcggcggagacgccgtgagctggcagattgggcggtgtaagacggagattctgcagcacccgctgtacgagcagctgctgtcggcgcacgtggcgtgcctccggatcgccacgccggtggaccagctgccgaggatcgacgcgcagctggcgcagtcgcagaatgtggtcgcgaaatacgcagtgttcggacacaacaacatcgtcgccgatgacaaagaactcgaccagttcatgtcgcactatgttttgttgctctgttccttcaaagaacaattgcaacagcatgtccgggtccatgcaatggaagcagtaatggcttgttgggagttagagcaatcattgcagagtctaacaggagtttcacctggagaaggtacaggggcaacaatgtctgatgatgagaatgaccaagtagatagtgatgccaatctcttcgattgtagttttgatggggcagatagcatggggtttggtcctcttgttcctacagagagcgagaggtccctcatggagcgagtaagacaagaattaaagcatgaactgaaacagggttataaggagaaaattgttgacataagagaggaaattttgcgcaagagaagagcagggaaacttcctggtgacacaacttctgttcttaaagcttggtggcaatcacattccaagtggccttaccctaccgaagaggataaggcaaggttggtgcaagaaactgggttgcaattaaagcagattaataactggtttatcaatcaaaggaagaggaattggcacagcaatccttcaacttctactgccttgaagagcaagcgcaaaagaagcaatgcaggtgataactgatgatcgttgcatgaaattcaactctttgtcctttggtcaatcatggaaagacaatgagaaagaaccacattttgtttctgatgggccagggttaaagcagatcaaggagctaatattggtgaaccagtttacttatgcttaaaggccagcaaatagttcatatagtacttgtgatgctacataattaggaagttcaattaagaatcatataccaacagagaattatgatttttgttcatgttttattgctttgtgaaatatagtatatggtagcgaagggggttatgggtgtacagtaataagctgtgcattttttttcccttacaatcatactcttgtttttgttcttggtctttcaattggtatttggtaatgtagagagtaatttgttgtagaaatatggtataagtttttacttgttatataatttaaatgctcgttgtcatggtgctacaaatcgtaaacacttttaactgttgtctgttggaaggtataataatagtgtggtgggttcttgtgatttgacatgtagatggatgtgcagtgt

SEQ ID NO: 45797 - DNA, 308 bp, Glycine max
  Clone ID: PAT_MRT3847_141355C.1
aaaaaaaaaaaaaaaaaaaaaaaaaaaaaaaaaaaaaaaaaaaaaaaaaaaaaaaaaaaaaaagagggggggccgcttttaaggttccaagcttgggtgcccgtgcttgcgaagtcaaacttcttttctagtggggcctaaattcaattcacttgacgttgtttgacaaaatcaaaactgtgaaaaccctttaaaacccaatttaatggacatcccgggcattcccttttttaaagtttttgtaaaaaaaaacaggtccgcacccttctttacttgccaaaaagggcccaaccttaatggctaatggg

SEQ ID NO: 45798 - DNA, 497 bp, Glycine max
  Clone ID: PAT_MRT3847_141356C.1
aaattgacgagaaaaagaaagaggttgttgttgaaaaaactggaggccctgctgagagctatgatgatttcactgcatccttgcctgaaaatgattgccgatatgctatctttgactttgattttgtgacatctgagaactgccaaaagagcaaaatcttttttattgcatgatggactcgaagaaaacttattactgaggtctccttcggtagcccgcattcgccctaagatgctatatgcaacatccaaggacaggttcagaagggagctgcagggcatccattatgagattcaggcaacagacccaaccgagatggatcttgaagtcctcagagagcgtgcaaactgagcacctacacaagagggttgtgtctaggtgatgtagttaagatatctgaggcctcagggaatgatgttgactgataccctttagttgttctactatgatctctgtctgtttcgcgacatatttctcataaatagctgacttatcat

SEQ ID NO: 45799 - DNA, 528 bp, Glycine max
  Clone ID: PAT_MRT3847_141357C.1
caaaaaccggaaccaaccaaggattattggaattttggaaacctttcgggcccaaacccagattggcggggcccccccaccccttgggacgggggggacaagcctttttttttttacaaataataaaacaataaaaatcaggtctaaaaagggaacctttcaaaacaaataaaaatgggaacacaaaacgggggtatcaacggcaaactgggggcctaacctaacataggaaacaggttatcaaaaaccattcaccctttttttggaaaagccggaagcctggggaccattctggccagggatgggaccccttaaacacccccggaacccaaaaaatggcctgaacaacaattaagggggctgccaggttctggagggcccatcaccccatttatacccctacaaacaaatggaagggcccaaggggggccccaagcttttttaaagatatttaggcaaacccccccagcctaaaaaggcacattggggggaaatatttaagcaaaaacccggacttgagggggctga

SEQ ID NO: 45800 - DNA, 1331 bp, Glycine max
  Clone ID: PAT_MRT3847_141358C.1
ttcctttggttttactttatctttcttccaggaaagtgatgagaatatatacctttttttgcgttttataattttcttttccttgcttctcctttttttctcctcttctgccctccacacaatttctctctcctctctctctctacaaatccttctttctttcttctcttcgctgctcactgtagcgtagccatggctttcagagtaggaggagcgggagggggaaatgcctcttctggcatgggtgttgctgagcatagtgtaaacaccttcctggaattgcagaggaagaaagttcatcgctatgtgatttttaaaattgatgagaaaaagaaagaggttatcgttgaaaaaactggaggccctgctgagagctatgatgatttcactgcatccttgcctgaaaatgattgccgatatgctgtctttgactttgattttgtgacatctgagaactgccaaaagagcaaaatcttttttattgcatggtctccttcagtggcccgcattcgcccgaagatgctatatgcaacatccaaggacaggttcagaagggagctgcagggcatccattatgagattcaggcaacagacccaacagagatggatcttgaagtcctcagagaacgtgcaaactgagcagtcacctacacaagagggttgtgtctaggtgatgtagttagaatatctgaggcctcagggaatgatgttgactgatgataccctttagtttttctactatgatccctgtctgtttcgacctatttctcataaattagctgacttatcatttatcaagtaaataacctgcacctgtgaaggctgatcaggggttcctgcctaagaaaccccactgcaggggaatttatgcttttccttattgccatgatgcttctcgggtgcagatttatatagtaatggctattggaaattcgacttatattatatgaatttcaaatggacgcagctggtgagtctgctttgttacatgccaatccagtataggtttgtttttgtagcgaattccagcattggaatatttgctttctgaaccaaggtatgggaactaatgtacacaaggcattgtgttaagcttattttgagttgtttaaataaaaaagaattaaaagctatggcacgcaggcgtatgaagttggaggagggaagaaagagggtggcagagtgaggagggagaaatacgtttgacgatgtatggatttaagaggacggacgatgcttgtcggacttctaatcttttgatttgggatctgagtgatatttggtatgtgcaagttttttatcagatggaatcgaacaaaacttattactga

SEQ ID NO: 45801 - DNA, 305 bp, Glycine max
  Clone ID: PAT_MRT3847_141359C.1
ttctttttgttttattggaagtgattttcgtttttatcttgaattccaacgcttcgatgtttttgtcttttgccttatcggacgggggcggccttaaacaaccaatggagggagctttttcggtactaaaactggggaaaaaaaaactgaaaacgtgagggcttccaaaattcccagtaaaaaaaccttgacgttttctttttggactttgacctaaacctaagaaactcccctaaatttttatcttcaaaaatttaaaaaaaactcaaaagacaaaactattgcgctagaaaattttttttttt

SEQ ID NO: 45802 - DNA, 229 bp, Glycine max
  Clone ID: PAT_MRT3847_14135C.1
acggctgcgagaagacgacagaagggtgtagcactcacgcatagaaggagactagccaccgagtacgagcaatcaaattagctttcagcctttggaaaataatgtgttttagccagctacacatttgcggaccataggtgatgataatttatagtctacaagtccctcaatcattatcactactgataataccgaggacgttgatgttgaaagataaagttgaagagaa

SEQ ID NO: 45803 - DNA, 299 bp, Glycine max
  Clone ID: PAT_MRT3847_141360C.1
cggtttcgtgggcaaggatgagaaacttcctcgggacatacaatgggacagaccgaagaccctctgattgactatttcacatatggagtttaatagtgtcgcccgtcagaagcaagcacacctgggaggtctattacgcagaatagggacaggcttacttggtaagacggcattaaaccatgctctctggaatgcactggctaggccaatccattactgagttagggacatcgattatgtgtgatgcgattatgataatatttggggtttgcttaccaggcgagtgggtggcgagatgg

SEQ ID NO: 45804 - DNA, 450 bp, Glycine max
  Clone ID: PAT_MRT3847_141361C.1
ggctcgagatcaattataagcatgggattgcggtttacaccgtatgctgtgtcttgccggtttcgcaagtatggtgatgaccaagagaatctggtcttctaaggtgatgctatagtgtttttcaggggcacaggactcctaacgtatggattgagtaggatacccactgggtggcaccgtgcttagagtgccatactcttttccatcgcacctttgtggaaagctctacagtgctcacatgctttgaaaccgactctacactttttcataatcatcaaactttactactccatgtgctgggcttgccttcttcattgcaccagttgacactaaaattcctataaactctgctgggagcaaccctgtactattcccattacacatcgttgttgtagacgaggctgacacctacccttatgcggataagggtgaatccacattatttgacac

SEQ ID NO: 45805 - DNA, 480 bp, Glycine max
  Clone ID: PAT_MRT3847_141362C.1
aatctctctcctctttctttccctctctctttctcagactcataacaaccaaaagcacaaaagtattaagtatgctgtatgccgcaaagaaagagagattgcgcaaacatttcagtgatttttgggtaattatcctcgtgatctgtgcacaatcgtctgctacttcatataccttcttccttctcccccacctcttttcctcctttctttgttcaacaccattcccataggagcaacccttttaaaagttttgggatttggagggtgcaaaagggcatgagttttgtgaaaataatgctttaaaagcaatggggggacaattgtgacaaacatggatcctcaggcgttcattaggttgtcaattggttctctggggttgcgatgcactggaattgaactgagcactgcaaaatctggaattcaaacactctctttaccttgtgtttgtgagatacggcttcgaggttttcctgttcaaac

SEQ ID NO: 45806 - DNA, 589 bp, Glycine max
  Clone ID: PAT_MRT3847_141363C.1
ttgtatttttttttttttttttttttttttctggacttgaggccatcacttgaccaattgacacaaaatgacaattagggttgatttttagtgaaatgacgacgctaatttttgttattcttgtattgaatgataattaatatcttcaaccaataagagtagatcaagtggtagggtttattttgtacaaaatgattaaattaacaaccaccttaataacacatgagagatattcatatcgggtgaaatcatttcttaataataattgttgtatgaagtatggaaaaccaataaaaaagatataattttctaacttattctttatctctaaatcttaaactatttcgtactcttacaatttgtgtgaagaataatagtaaagggcataatcattgagaagttaaaaagtaatcttttttatatctgaatattaattgttttttaatttatatatatgcatatgctataatcttaaaggatcgatagatgaaaaggaatgggcataatgagaggagcaatcctttttgggttctgtgcacgtacatgttaccattcctggtatcatgaggcaagcaaaattatcacatgc

SEQ ID NO: 45807 - DNA, 1472 bp, Glycine max
  Clone ID: PAT_MRT3847_141364C.1
agccttccgaatctctctcctctttctttccctctctctttctcagactcataacaaccaaaagcacaaaagtattaagtatgctgtatgccgcaaagaaagagagattgcgcaaacatttcagtgatttttgggtaattatcctcgtgatctgtgcacaatcgtctgctacttcatataccttcttccttctcccccacctcttttcctcctttctttgttcaacaccattcccataggagcaacccttttaaaagttttgggatttggagggtgcaaaagaaagaaagagagattgcgcaaacatttttcaataaattttgggacatgagttttgtgaaaaatagtgctttaaaagcaatggtgggacaattgtgacaaatatggatcctcaggcctttattaggttgtcaataggttctctggggttgcgatgcactggaattgaactgagcactacaaaatctggaattcaaacactctctttaccttgtgtttgtgagatacggcttcgaggttttcctgttcaaacatcatcagtccccgtgatatcctccacagaagttatacctgatactcagaacgttgcttttagcttttaccttgaggaatctgatttaaaagcgttgttagctcccggttgcttctacaacactcatgcttgtttggagattgcggtgttttcagggaggaagggatcccattgtggagttggcaacaaaaggcagcaaattgggatttttagaatgcaggttggccccgagtggggtgaaggaaagccagtgattctttttaatgggtggataggtattggcaagaacaaacaggataatggaaagccgggtgcggagttacatttaaaagtgaaactagatcctgaccctagatatgtgttccagtttgaagatataacaacattgagtcctcagatagttcaactgcaaggatccatcaagcagccaatcttcagttgcaagtttagtaaggacagggtttaccagattgactcgttgagcgcttactggttgggttcactcgtctaagaaatctttagaagtcattatttagttgttctcaaataacttgcatttgagttttaaaattgaaatcaatatcatgttttacaaggtttttcttctgtcaacataattaagtatggatctggctcctctaaagtgaactcactttagagagtgaagtaacaaatttttcaatcatcaatgagaaaatcaatgattaatattatgtgcacgtgcattataaatcatgcacgtgttagaatatcaaccattgatttcttcgtcaacaacttagatttgttactttactgaccaaagtgaataactcgctttggaggagccaaatccattacgtataattttctttgcatcctgaagcatggacaaaacacttataccagaatgtctgtgtggactgatgtagttaaccagtctcctccaatggaagcttaa

SEQ ID NO: 45808 - DNA, 457 bp, Glycine max
  Clone ID: PAT_MRT3847_141365C.1
ctcttctgataatactgaatttgaggatgatcgtccacctataattgcaattccaccatatgacatattcacaatatacaagccgatatatcaactagtaaaacacgctcaacctgtagccgctgatgaaacggactataagctatcacaactatatgcatatgacaaatcgagaacacccgcagaattcgctgacatcccttatcatcgaaatgaccgcgccctctccatgaccagaacatataatcgattgcacatacacctgaccaatgagactgcctatccaactgacggacctctgcacatgataaacctgaggtgactgcatgtgtcattggacccctaattttcaacctatatacactatgacttcctgtctgtcctctctgacacaaaacagacgccaggaattctcttgaagaggactaaacgcagacatgccaggaatgatgaatta

SEQ ID NO: 45809 - DNA, 178 bp, Glycine max
  unsure (1)..(178): unsure at all n locations
  Clone ID: PAT_MRT3847_141366C.1
aatgttaaccgtaattttatacattattacacgtcaattgtttctcctcgtattatacatgttgaaagagagagaagtatgataccaccgaacagctcgaccatgtgcagtattctcttcaccagnncaaccctttttncttctngnnctttacaaaacangattgaacaaacttttt

SEQ ID NO: 45810 - DNA, 340 bp, Glycine max
  Clone ID: PAT_MRT3847_141367C.1
cgttaacccaatcagagaaatcacagatgacatcattttttttatatacttaaaatcagtttttaagttgatgttactattttttctctttctatttagttttacatatagtgaaagaaataggagaagcattactaacacattatatttattattgttaccttcttcctgtatcttttaatattttgcctcaagatatctgatccaactacaattgggagctgacctgaaaacttgagatcacactgctagtgcttcacttcttaacgttaagtgttgtattatcctctccccaattttccttgtgaaatggagatttttatttttttgttgcaaaaaa

SEQ ID NO: 45811 - DNA, 381 bp, Glycine max
  unsure (1)..(381): unsure at all n locations
  Clone ID: PAT_MRT3847_141368C.1
tacataaactccaattcacttcaaccttactatctcgctcactctcctncaagtgcgggataaaaaacatttttctcgccactatcctcttataacttcttactatattttattttacaataacttttaaatcaaatttctcatacctttctccacatcatatcttcttcatttatttatactataatactataacaaaattcacttcttatttttccaaactttttttcccctattcttcttcttacaaattaactccttatctctctcttttatcaactatttctctttatatctacatttataacatcatttttatcttacattttttactcataattattctatttactttcttaaaccctacttaatatttttcct

SEQ ID NO: 45812 - DNA, 251 bp, Glycine max
  unsure (1)..(251): unsure at all n locations
  Clone ID: PAT_MRT3847_141369C.1
cttctnacccccanactcccatctcacacncgcctcgcatncaacaatgtctctcaccatnccntccaanctctccaagcccgcngncctccgccccanactaagcccatagctaaggtcngngcnacanccaccatcgtctgcagcanancaanaacaacaanaanaacaacgtgtcctcgactgaagcgtctccgngcgtgggcctctntcatctnttccgcncttncngtcgggngaattcgggtcac

SEQ ID NO: 45813 - DNA, 345 bp, Glycine max
  Clone ID: PAT_MRT3847_14136C.1
ttgtagacctttttttgcttatatttctggtttgagaacttagacaagtctagctagaatgtataaaaatgttcgatttcatgagttacggaatgacaaaatcagattcttggtgttgattattggggaagcattgggaacatttggggtgtgtgatacaaagactaaacatactttaaggattttgagagtattgtggaatgtggacaaagtagaggctcaaagaatggaggaaatatttgtgcaccctgctggaaggatgaccctcattaattctatcccttcttaccacaagtcttttgatcttctttccaagagaataagtgactttacttgatagaagtg

SEQ ID NO: 45814 - DNA, 271 bp, Glycine max
  Clone ID: PAT_MRT3847_141370C.1
gttagtttcaagttttaatgtaggtggggctatcctgaagcaaaggagcttttgaactaagtaaactgttgggtatagaggtcacaccttcgcagtttgtttgttgcatgcacctgtctctgaaacagtcgcaagtgatgccatttcacattgttgccctaaattctgttgacattccaaatgttcttcccttgcccaaacctgattgctgtgcaggttttactgggtcattctccatttaaacaattgttcaagagatttgataacaatc

SEQ ID NO: 45815 - DNA, 397 bp, Glycine max
  Clone ID: PAT_MRT3847_141371C.1
tgcagcagccacacctctcaaccctaacccttttgccccaaaaatttaatcttttgatctttcactcatctccttccataattccgaaatttacaagcttattacatctttgggtttttttttccaagcacgagaaggtaacgggaaaaaggagaaaacactacgcgtttctttggtctttctatttgatctctttaaggttctgtggaaaatactatggttgaccttcctaacaacggtaggagtcagggattgcgttatttaaatacccagtagtggagtaaccgatttcctgagatttactgacacacccaggaactggattatctttttggtaggtccccattgtgtctgatggatcttttggttgaactccagtataatgcagctataggga

SEQ ID NO: 45816 - DNA, 619 bp, Glycine max
  Clone ID: PAT_MRT3847_141372C.1
cacgcgtccgccaagccccactcaaccaccacaccactctctctgctcttcttctacctttcacgtctctaaagtgttaagatggcagagacattcttatgtaccttagagtcagtgaacgagggacaccctggcaagctatgctaccaaatctccaatgctggccttgacgcttgacttgaacaggacccagacagcagggtgggctgcgaaacatgcaccaagaccaacttggtcatggtattcggagagatcaccaccaacgccaacgtcgactactagaagatcgtacgtgacacctgtaggaacatgtgcttcgtactaaacgaagtgggacttgatgctgacaactgcaaggtcctagtaaacattgagcagtatagccctgatattgcccagagtgcgcacggtcacattaccaaaatacccgattagatcggcgctggataccagagtcacatgtttggctatgccacggacgagaccccacaattgatgccattgaggcatgttcttgcaactaaactgagtgctcgactatacgagtgtgcaagaacggaaccttcccatggctgaggcctgacggcaagacctaatgactgttgagtattacaatgac

SEQ ID NO: 45817 - DNA, 592 bp, Glycine max
  Clone ID: PAT_MRT3847_141373C.1
aaaaaaccatttttgggccataacaaaaggacaaaaactttccccgagttttacccagaaaaccgaaaaaaaaaggttcccataaaaaagttccccgtgaaataaccaaatacctttcccgggggttaaaggacttgggaaaaaaacctttgggaaacaagaaaagggtttttggtcccaaaaaactacttaaaacttggaaaaaataagggttggtttttaaaaaaatttatggcaaaaaattcagggtttcccttccctaggggggtttgttttcccccccttaaccgggttataaaaggagaaaactcggcggggggaaaaactggcaaaaaccacttttcctttataaggaagcccaacttggaaattcgggtttttggcccaaagcccaaattaaagcaaatttctttttttccagaaaaggtggacggcccccccaccacaagctttaaatcttttaacacagcctttcgccctttaatcacggggaaaggcggaaagcaagaaaaggcccttcgttgggcttagaacaacctttcttgcaatggcggcggaaaaccggcctccaaccatggttttttctcaccca

SEQ ID NO: 45818 - DNA, 661 bp, Glycine max
  unsure (1)..(661): unsure at all n locations
  Clone ID: PAT_MRT3847_141374C.1
gaaaaaggtataggtgtatatggtggattatttaatgttacaacatttacacaatctttcaacatatttatattcttaattagtgccgttatactggtattaactgctttttatcctagaaaagtctttataaaagaacaatcatctttttataaattgttaactagcaaattaacatacaataaaaactctatttcaaacaaaacagcagaacagtttcgtataatagaatacgcacttataatagtatttatattatgtggagcggtatttttaatgagtacagcagacttaatttctgtattcttatctatagagttacaaagttatggtttatacatactgtctactttatatagagattcagaatcagcaactgctagtgggttaacttatttcttattaggaggattatcatcttgttttatcttattaggttcagccttattatacgttaactctggtactactaacttagacaatatatatgtgatatgcagtataagtgaaatagaggacttaaatactcttacatactgataccaaccatattatctacacttatctntaataatattatcagtgtgattcttattcaagtaagtgctgctcccttccattttgatctccgatgttatgatgaatactacatagtactact

SEQ ID NO: 45819 - DNA, 1547 bp, Glycine max
  Clone ID: PAT_MRT3847_141375C.1
cctacgcttccttctctctctctctcttcccaaccttctcttccctccatttccctttcctctttcaaaaaagcatatatctatataaacttgtgatattgggagttgaaattaaacttgagaaaatggacaaccagcgtagccctcttctaagctgggcttactacttccagggaaagtcaatggaggagctgaggcagtccctgatatacacaactctggagctagaacaaacaagggatgcagtgcaagaagagctaaaaaagagggatgaacaactactcaacctaaaggacctcctaagcaaaaccataagagagagagatgaagcacaagagaaatgccagagacttctcttggagaagctagttttccaacaacaacaacaacaagcagctcctgtgtctggaatttcaagcatcgaagatgagccaagaagaggaattgactccaacaatggccactcattatcagattgtgaagagagcattgtttcctctccagtcattgaccatttacctcaacctcaacctcaaacacaatcaatgattgaactaacaccagacaaaccattaccagaaaagggtaagcttttgcaagcagtgatgaaagctggtcctctccttcagacccttctccttgcaggacctcttcctcaatggagacacccacctccaccacttgagtcctttgaaatcccccctgtcaccataccctcaccaccaccaccaccacaaccacaaccacaactattccaccaagacaccttttttaacaacactaacggtagcagcagtaccacaaccaactgtggaagactcagtagaaaaagggtcttctgtgatggctctgattttattaccgagaccaagtcccaaaggcttgtacttcactgacttattatcacaagtcagagattcacacagtaatttctaatttatatatatccaagttcttaggattagagagtaagcaattaagagtaacaagctagtatgcaactgatctagcttctgtacagtggttgttcacttgttctaggacacaacacaagctatccggatttaactcattgggagagaagatgaggatgaagaagtgcttgattttaggctttctggctttattttggtgaagagtttgtcaacccttcacattttgcttcctaggggccttgagttctcttaaattgttattatgtaacaaagattactgtagtccaacaattaagcatgttatttgagtgtgagtgtgtgtgtgtgtgaagtgagattgattgatctttataagatcacatcaacaattaagagaatgggtgtggagtgggtggattgggagatgagtgtgcccaacgaccaaagagaaggtctttgagttctgctttccgggttcggtggacccaaatattaggaacacaagatctgttacaggtgtggtgcatcattatgttaaagcctttgttagagatgttatcgttgcgcagctctaatcttgtgcttttccggaatattatttccatttcctcttgttttttcctcccatttcac

SEQ ID NO: 45820 - DNA, 341 bp, Glycine max
  Clone ID: PAT_MRT3847_141376C.1
tcggccacgcgttcggccacgcgttcgggacaacttggctattcttggtgaccgaagagaagcaaaaatttgcccccaaaagggttccaactttttggacattggcgcttttatttggaccggccgggcccatggggtggccctggtttacaattattaacacccttttaaatacaccgagcctacctattaacgctttattggtcggaacggttttattggccccggttatgccgtggaggcaatcctggcacttggtctaacccaagggtcaatctattttaaatcaatccggggaatctatgaagcctggggtaattataaattcctatcgctatgtc

SEQ ID NO: 45821 - DNA, 1140 bp, Glycine max
  Clone ID: PAT_MRT3847_141377C.1
gttgaggttatggacatggtccagaatgttgggggtggtaagaggtcaacgtatgaccctgatgagcttgaagaagaacagcgagagcgacagaggaagaataaaattaatgtagaattccaaacctttgtgaatcgggtgaatgatctctggggacaacctcaattcaatggccttgacctggagtttgatcaacctcttagagagcttggcttccctggtgtgcctcataaatcttcagtatttattgtacctacttctgcctgcctggttgaactgatagagacccctttccttgttgtcacgcttagtgagattgagattgttaatcttgagagagttggacttgggcagaataacgctcgagccgattcggctcgagaggacttcaagagggatgtcctcaggattgattctatcccttctacatcactggatggcatcaaggagtggcttgacacaacagacatcaaatattatgagagcaggctgaatctgaactggcgtcagatcctgaagacaatcacggatgaccctcagagctttattgaaggtggtggttgggagtttctgaatttggaagctactgattcagaatctgagaactcagaggagtcagataaaggttacgaaccatctgatgtggaacctgaatctgattcggaggatgaagcttctgatagtgaatcacttgttgagtctgaggatgatgatgatgatgatagattccgaggaggattctgaggaagagaagggaaagacatgggaggaactagagagggaagcaagcaatgcagatagggagaagggaaatgagtctgacagtgaagaagataggaaaagaagaaaggcaaaaagctttggtaagtcaagaggagccggtctaagtagtagcatgacaaagcggcccaagttaagatagatttttggcttttgttcttagctggtatatggtttagttcagttactctatgttgttgctgcggtagcagcttttgcttttgtagtagtagtcctatgatgattgtaaattagggtttttctttttataatatagttcagtcacttaatagcaatccttgcatcaaatgttctttaaaatatttacgtactttaatcatttaatgacttatttaaaaa

SEQ ID NO: 45822 - DNA, 1667 bp, Glycine max
  Clone ID: PAT_MRT3847_141378C.1
tacggctgcgagaagacgacagaaggggttgaggttatggacatggtccaaaatgttgggggtggtaagaggtcaacgtatgaccctgatgagcttgaagaagaacagcgagagcgacagaggaagaataaaattaatgtagaattccaaacctttgtgaatcgggtgaatgatctctggggacaacctcaattcaatggccttgacctggagtttgatcaacctcttagagagcttggcttccctggtgtgcctcataaatcttcagtatttatcgtacctacttctgcctgccttgttgaactgatagagactcctttccttgttgtcacgcttagtgagattgagattgttaatcttgagagagttggacttgggcagaaaaactttgatatgacagtagtatttaaggacttcaagagggatgtcctcaggattgattctatcccttctacatcactggatggcatcaaggagtggcttgacacaacagacatcaaatattatgagagcaggctgaatctgaactggcgtcagatcctgaagacaataacggatgaccctcagagctttattgaaggtggtggttgggagtttctgaatttggaagctactgattcagaatctgagaactcagaggagtcagataaaggttacgaaccatctgatgtggaacctgaatctgattcggaggacgaagcttctgatagtgaatcacttgttgagtctgaggatgatgatgacgatgaggattccgaggaggattcagaagaagagaagggaaaaacatgggaggaactggagagggaagctagcaatgcagatagggagaagggaaatgagtctgacagcgaagaagataggaaaagaagaaaggcaaaaagctttggtaagtcacgaggagcgagtctaagcagtagcatgccaaagcggtctaagttaagatagatttttggtttttgttattacccggtttatggtttagttcagttgttctgtgcagttgctgcggttagcagcttttgtgtttggactttggagctgtcctatcattgtaactataagtgttttgctcccatattgttcagccactcgatagcaatccttgaatccaatgtatgtctttaaaatgtttacgtgctgtttttcatttattgactgcttttatttttgtttcttattattggaactaatttttctgtagtcaacaggcaagagaatccccatgaatgaaaccagtgatctatgcccaccatagccaagcttccaaagtccaaaccattccgggttttagagggaagcaagcaatgcagatcgggagaaagggaatgagtctgacagtgaagaagataggaaaagaagaaaggcaaaaagctttggtaagtcaagaggagccggtctaagtagtagcatgacaaagcggcccaagttaagatagatttttgctctttttcttaactggtttatggtttagttcagttactctatgtatgttgttgcctgcggtagcagcttttgcgtttgtaggagtagtctcatgattgtaaggtagggtttttctttttatattatagttcagccacttgatagcaattcttgcatccaatgtatggccttaaaaaatttacgtgctttactcatttaatgacttcttaattttgtttctt

SEQ ID NO: 45823 - DNA, 1417 bp, Glycine max
  Clone ID: PAT_MRT3847_141379C.1
ctccgaatacggctcgagacggctgcgagaagacgacagaaggggaggcgcggcgggatcagcacaagattgcaaaatgaagttcaacattgcaaatcccaccactgggtgccagaagaagctggaaatcgatgacgacctgaagcttcgagcattttgggacaagaggatctcccaggaggttcttggtgatgctctgggtgaggagtttaaaggatatgttttcaaaatcaccggtgggtgtgacaaacaaggattccctatgaagcagggagtgctgacccctggtcgtgttcgacttttgctccatagaggaactccttgtttccgtggatatggaaggcgcaatggagagcgtagaaggaagtctgttcgtggttgcattgtcagtccagatctctctgttttgaacctggtaattgtgaagaagggtgagagtgatttgccaggtctcactgatgttgagaagccaaggatgaggggtcctaagagagcatccaaaatccgtaagctgttcaacctgtccaaggaggacgacgtgagaaagtatgttaacacataccgtcgaacctttacaacaaaagctgggaaaaaagtgagcaaagctccaaagattcaacgactagtcactcctttgacactccaaaggaaacgagcaaggattgccgacaagaagaagagaattgctaaggcaaaatcagaagcagcagagtatcaaaaactcctcgcttccagattgaaggagcagagagatcgccggagtgagagcttggcgaagcggagatccaaactctccagtgctgccaaaccaactgttacagcataggttgcttcctggtagagatatggtgaagtttaaacttcaccgtagtttttggtagtcttgtttgagggcgattatgataaacatttatggttttttactttaaatacatttgagttcatttaagtattttgcaatgatttttagagttcaatcgaattgatgtgttgttggtttctataaagatgcatcatccttttcattttaccccgccgtgattaacatgaacaaaatctcttttgtaagcttgtagggcgcaatgtacaggttttttcacttggcaaaattgcccaaatcgaaaggtagtcgcagattctaaatatgacctcaatttttatttttttttactgaaatcaaattaaatcttgtatacagtaaaaaaaattgtagttttatgtttaggactggttctaacatgctgcagcttgaaattggtgtgcaaaaaaaatttaattactggctcgtcaaatgatttagactgaattaagtaattttaatcattgctgaaaattattagttgatgtttaatttcatgatttggtatgtatgtatatataaacgaaatatgtaatatcaattttttattttctcaat

SEQ ID NO: 45824 - DNA, 396 bp, Glycine max
  Clone ID: PAT_MRT3847_14137C.1
aaaaaggaaaaaatggggggcttcaccctttttctttttaatttcccaaacaaccccaaattttcgccccttttgtttccaaaattttttaaaagaaatttttgaccaaataaaaaaagtttccctttttttgggggaacaaatggaaaacccattttgggggcccaaatttgggagttccttttattcgggaaaatgggctcctatttccccaaaaccctttttttaaacccgggggttggccttgaataacaacaaaaatgtttgaaaaaatggggggataaaaaatcatttttttaaaatggggccaaaattttttttttttcccgggtaaaatggccggcccttttttgaacccattttttcccttaagccaatttgggttgagcccaaacc

SEQ ID NO: 45825 - DNA, 283 bp, Glycine max
  Clone ID: PAT_MRT3847_141380C.1
cggctcgagacggctgcgagaagacgacagaaggggaggcgcggcgggatcatcacgagattgcaaaatgaagttcaacattgcaaatcccaccactgggtgccagaagaagctggaaatcgatgacgacctgaagcttcgggcattttgggacaagaggatctcccaggaggtccttggtgacgccctgggtgaggagtttaaaggatatgttttcaaaatcactggtgggtgtgacaaacaaggattcccaatgaagcagggagtgttgacccctggtcgt

SEQ ID NO: 45826 - DNA, 222 bp, Glycine max
  Clone ID: PAT_MRT3847_141381C.1
agctcggaattcggctcgagcagggagggaactagataacaggctattacagaaaaatcctacacaactattgttctatagatattggtattaagacgggcatttcttaatgaccaggctgggctcttccaatcatatataggaaggtgcatgattcagatcgaactctatatggaacataccatcctacattactacatctggacggatttcttcttgcaa

SEQ ID NO: 45827 - DNA, 187 bp, Glycine max
  Clone ID: PAT_MRT3847_141382C.1
gtttaagatctctctctaaaatatcaaatatgtcaatccattttcccgatagaaaccactcataccaccatcaaataaccttaacatccatcctttgcagaagctatccaaaagcacaacctactggtaaaaaaaaacaagcaagggcgctctcagtctaatcagcccccctacccgtcaattaatc

SEQ ID NO: 45828 - DNA, 1486 bp, Glycine max
  unsure (1)..(1486): unsure at all n locations
  Clone ID: PAT_MRT3847_141383C.1
agtttaccgtatgttattatagtttccaaaggcacgcagcgagtttaggcgcggcgggatcatcacgagattgcaaaatgaagttcaacattgcaaatcccaccactgggtgccagaagaagctggaaatcgatgacgacctgaagctgtaatcatttcactctctcttcaattttcatttgtatcactcttctgatcgcgtgtcttgtgttgtgcttagaagaaaaatcgttactttaaagcggggatgctcagaaacgaagatttacttcaatgttgttttgtgctctgtgtttgggactcctattgattacgatttcgaatttgcaaaagggattttgagtttaattgttgctttcttatggttggctttttttcctattaaaatttgttagctttatgtagtgcaagcatgttatctgcttctccatagatttgaggaaatgcatgcataatgaacattttgtctttgctgacttgatattcgtgggaatttgaatttcactattactctgtgtagttactatgggaagtttgtttctttgttagtttcttatgggggatttttaagtgacttgttagtctgttatggtttttttatcggtaaatgctagttgttagtattgttagtttttttagcggggaaatttgatacccgcgatctctccccccttcccttctcccttcaccactggaccaacctctgttattgtattcttatgctatatattgcagtcgagcattttgggacaagaggatctcccaggaggttcttggtgatgctctgggtgaggagtttaaaggatatgttttcaaaatcaccggtgggtgtgacaaacaaggattccctatgaagcanggagtgctgacccctggtcgtgttcgacttttgctccatagaggaactccttgtttccgtggatatggaaggcgcaatggagagcgtataaggaagtctgttcgtggttgcattgtcaatccatatctctctgttttgaacctggtaattgtgaagaagggtgagagtgattctgccagtctcactgattgttagaagccaaagattaaggggtcctaagagagcatccaaaatccgtaagctgttcaacctgtccaaggaggacgacgtgagaaagtatgttaacacataccgtcgaacctttacaacaaaagctggtaagtttcctgaggtccacaaattctctatctgtgtatgtatgctgggcagatagggaaaatatatttgcttatgaaaaacaatgttggaagtaactcactcctataatcctattgtgtatcgagtatcaactacctagttccaagtttgaatttattcatctgtttgatggatattcttatcacatagttgtattttctattgtggaattgtaattttatttttaatttttcagtgaaagcaaaacttgacttttactcatagtgttgctttatctcagtccttggaaagttgtcaatgtaacatttt

SEQ ID NO: 45829 - DNA, 159 bp, Glycine max
  Clone ID: PAT_MRT3847_141384C.1
gcgaggctatccttgaggattaaaaatggcatctgcctggcccagggctctatctttccaatccttgggtggcaaggccattaaacttgtcccatcttcccccgaagcccgtagggtctgcctgaggaagaccgtcaccaagcgtgccttctaccggag

SEQ ID NO: 45830 - DNA, 1136 bp, Glycine max
  Clone ID: PAT_MRT3847_141385C.1
cggcgcttcaactcatacggagtcctcagctcaaaacatagtgggacacaactgaatacttcaaaattcaaattaggcctccttctctgtgcagcttccaccaaatgaatcgccttcttcttgttcgtcaccctctactagctttatccaagctaccaccactatcacccttttcccaaacctattattattcatacacacccacacggataaataactgagtacttcaaattaggcctctttgcagcgtcgacgaaatgaatcgccttcttcttgttcgtcatcctctgctagctctatccaagccaccattatcacccttttcccaaacctattattattcatacacgccggcacgaataaattctgaattatataagattaaggacccacctggagtctcttctgttcacacaagctctacattttgcactaccaacaaagacttatcaactgagaactgtgtaccgtgcaatacaaaggacttgcagcccatgaccgaggatgcagcacgcacaatgcttcaacagattgcccagtggaatttggttaatgaggatggtgtgttgaaattgaggagatcatggaaagtaaagacttttaccaaaggattggaatttttcaggataatagctggtcttgctgaagctgaaggtcatcatcctgatcttcaccttgttggctggaataatgttactatagagatttggacgcattctgtgggtgggctgacacagaatgacttcattctagctgctaagatcaatgagcttaatttgcatgacttgctaagacggaagacttctaactgaattatcaaagaggaaattgaagaaatccaagtttttgtaaggtttttgtttttctttataactaggccatgagctatccttctaataatttggaagctctagttcgatctattaattttcttctaccatcatctgagatgtcaataacgtccaacgttagcatgaaatctacatgatggtaattgtcaaagagaaccattaactaggatggttaagacaaggaacaaaataaactagtccatacttctgttgggaataaactcataaatcaagagtttctctttttgttgaatgcaacagccaacaagattggtgctgaaattg

SEQ ID NO: 45831 - DNA, 536 bp, Glycine max
  Clone ID: PAT_MRT3847_141386C.1
ataaaaattaaaatcatatataaattatgtttatttggtccaatcattcataaaaaaaaaaaaaacatatcaagtttaaaaacaacatatgtaaaaaaaagattaaacaataagtaatattatacttttttgatatagccaaataattaaaatttcggagagtcttgttgctggtcatcctgttgttggcgctcctagtcccgtagtgtcgtcccttaattgggcttgccaccatcagcttgggcctaacattgagtcctaatactctcctccaaagtaggttcaagagggctggtttctacttcacaagcagataatgcaacctcagacctagtgtaacaccctgttatactagacacaacccacactaatgtttttatttgttttagccattataaaaatgagggtaaattttttgcgattaaatgaaatatttattaagcttattgaaaaatgttggattaacaatgatgtaaaagcataaagtatcatacaaagaatcgtaatcctcttttaattaaacattagttcatgat

SEQ ID NO: 45832 - DNA, 182 bp, Glycine max
  Clone ID: PAT_MRT3847_141387C.1
atagtattggggtctttattctttggtattcaatcaaagtatttttgtatgcgtcagttctaatagtcagtttgtgactgacgcaaatacagcggatgaatgtacatgtgatcatgcactaagagaatcactttatggtacttgtgcgtgagagagacgcgaactggtggactgacatagtt

SEQ ID NO: 45833 - DNA, 395 bp, Glycine max
  unsure (1)..(395): unsure at all n locations
  Clone ID: PAT_MRT3847_141388C.1
ttnttttcccttaataatcctcttttcttgggaaacaaaaaacaaaattcttattgactaggtaaggccgactatccaaaaagcaaactgcattttggtgacgactgaataaaaaaacatcttaccgtgtatagcaaacgcaagctcaaacaaaggccatttgcaaaaaacctttctccatgccaaaacataacccggaaatccactcaaaccgcggcgtatgctgcgctcgcaaccctaggccacataacaacccacgcttctccaatgcaaccggacgaggcagaacctaccatttcgccgtagggagtgccaatagcaccggaaccaatcttcgaggatcgggtccacgccatgcttttggagaaaaggggcgcgcgcaaaaaaagggaatt

SEQ ID NO: 45834 - DNA, 579 bp, Glycine max
  Clone ID: PAT_MRT3847_141389C.1
gtttttactttttcttttttgtttttttattttgttgagcgccctgaacactcctaacgccgtttggagccaaacaccgaggagagagactcctcacagccccccaggttgtttcgcctagaaccttgagaaaagaactttggggaggcctttgctgaaaaagaaactcctttgaaggccccggacttgatttttgggatagataacggggtgccaccctttttttcactgagtgcccaggaacacttattagttgctatgggggtggcagccatgctggtaacctacggccaaagaaaaacttgttctttttggggggggggcaccctagactactccccggaatcggtaaatcttattttttttaattgtcaaaaaaaacgcgaaagccacaataagctcctttgcaaaaaatgtgccctattatagccttctgcgctggcccctttcctgtttttgtgaacgtttaacctccttatcacacgccctagcaggaagggactttctttacgggtgggcacactccttccaggagcgaatgctccccggtataaactggcacatattgctttttttaac

SEQ ID NO: 45835 - DNA, 440 bp, Glycine max
  Clone ID: PAT_MRT3847_14138C.1
gaccacattcacacatgacagcacaaacacgaggtctcacataacaccaaatctcatcacgaccatcatcatcataatcaccatagcataaccctccttttctctctctaaatctctctcaattctctctccttagatctgcgaattatcttagattccgatagataaaataaaattcaatcaataatcaatttggatcctcgcggcggggaatggaagcgttgttgttgttgttggtggtggtgggtgaatctagcagactctgaacgcgaaaaatgcctgcgttaccgcacgggaatcaccaattcggtagtagtaatggattctggtcgaagaatcgcgacgatgttggatacaatcagctccacaagttttggtgtgagctgttgccgcaagctcggcaggagctcttgaggatagacaagcaaccctttttgagt

SEQ ID NO: 45836 - DNA, 275 bp, Glycine max
  Clone ID: PAT_MRT3847_141390C.1
atgacaaatgcatattccataacgctggataggtctgagtgtctttgaattagtcattagctaagcgtagaacagaaacttatttttatgtaagaaataactctatatgagggagacgatagtgatgagagcggtgcttttgcatataaagcttaacatgcaaatgcatggagtagatagccctaaccgttggcatgcagcaatatagtaccaagctgaactatgatttgcatagcgttacatgcccacgaaatttgttcacatctcatacattt

SEQ ID NO: 45837 - DNA, 748 bp, Glycine max
  unsure (1)..(748): unsure at all n locations
  Clone ID: PAT_MRT3847_141391C.1
cccacgcgtccgcccacgcgtccggcaccctggccattgtccctatggagtgcatttccctttccattcgtcaaaatcatctttttttttttttttctttcttctccttcagtaaaaatcactgaacagttctaaaatcaaatcacccaaatccacatcagaagcccattttttttttcacacccagaatctttcttggtctttttcttgaattcaagtaccaaagtttgagtctttttcgactttggttgaaccccattgaaggagccgcatctgggtgttcgtgtgcatgcgggtctttttttttttttgcatgcggggtttgccaaatctttaagcttttccccattctgctgcgacccaattgatggaactctaatgggttccttggaatcagggatctcattgaagaaagggagcttgttcggttctcagttcagcagaaaagagaagaaccctttttctcacaggttcagatcgagcttctcgaggttgctcttcaagaagctcgattacgtgcaatggatttgcacggtggtggtgttcctgtgcttggtcgttgtgttccaaatgttccttccaggctcggtcgtgcaaaactccggggaggagtccttgaaagatgtgagaatgcggtctgataattttttgcaatatggagacattcacaagggtttgttggacattggggaagatgctgtttttttgcctaagatttcggagaaatcancanaggtagtgggggtag

SEQ ID NO: 45838 - DNA, 519 bp, Glycine max
  Clone ID: PAT_MRT3847_141392C.1
tgccagagtgctgtgcaccgcacaacgcacgacacatcagcaggggctggggcgcacacacaggtcaaaaaagcaaccgggccacagccggcagcacgggcgccgggcgccccggacgcggccgcttgcgcgtaagaagcccgtcaggtcgccgccacaacaatacttgcacacgcatagtcttccacaaaagaacacccatatatcatacgcttaggcctaatggtccaagattgtaagatccgccgactagcctacccaatcgttgggatttgaaccagaataaaaaaccggctaaacacgggcagcatgggcccagggttggtaaagtagtttttccgctgtggtttattaggcggtgatgtcagtctccaacggctggtgggctgggcaaccgtgccaagctttacaagctgccgctggtgctgcggtggcggcttcagcagcggcaacagtttggaaggatgagccatattttggcacaacagcctgtggtgcatacgatcggcacaataggat

SEQ ID NO: 45839 - DNA, 267 bp, Glycine max
  Clone ID: PAT_MRT3847_141393C.1
gttggtttatttccgtgatagtgcaatattattgacttatttctactgggaaaggttactgagaacgtgtcgatgtggatgacacctctaatctctggagcatacatctacacacgcgcgtgctcggagcgccagagtactgccacgcgaacttcaccaactacttcacgcaccgattctggtcaaaccctatctacgcggcgtcagttaagagacgcgacccgtgctactccaacactggcgtaatggtgatcgatctctggaaat

SEQ ID NO: 45840 - DNA, 457 bp, Glycine max
  Clone ID: PAT_MRT3847_141394C.1
ccaaggataggtttcccgtcatcactgtatgacgtgctccttctttggggggggggggggggcgggggggggggttttaccttaaagttacaagtccaacgccaagtgtggccaagtgttgtattgtaagttagtggtgaggggacaataacagtgaggtggataagaaatacgggcctagccccagtggttaatagttaatacggcgcccctgagtgtaacgtgaaccgcgtgaggggaacgatacgtgagaagtaggccatgtaaaggaccagaggataaacggatcgagcgggttaaacgtggtgaagaggcgtgagaacgtgttccgaaatgaatattgacaacctgaggttcgtccccaaggatccgtagcttcagtcaggtgtggccagcgcaccatccggagggggccggttttgtgcggttagaaaattggcacggtattgtgtggtgg

SEQ ID NO: 45841 - DNA, 386 bp, Glycine max
  Clone ID: PAT_MRT3847_141395C.1
cggacggaaccggcgcgacccaccccgccggcggactcgtacccgcccacaacgacccgggcacgggggcggcaagagaagcagcagccgagggcacaaaacggcgggcggagaaggcggccggagcggaccacggggagacagcaggggcaaaacaggcgcaagagcagaaacaaaggccggcaaaccccggccaaacgcacgcaggcacaccaggcaggccgggagagcacacagagaaaaccgcggggccagcagccaggcaggcagccaaggaagacgcggcgacagacaaaggagagcacggacaagacacgggacccaccacaggcagagcgaagaaagatgcggccgaccccaaacaagaaccaaccgggagggaaaag

SEQ ID NO: 45842 - DNA, 636 bp, Glycine max
  unsure (1)..(636): unsure at all n locations
  Clone ID: PAT_MRT3847_141396C.1
ctttaatttatttattctgaaaacccacgaaagttccatatttgtaaaatttgctagtaaacttggagtttaaatcacaccagaaccacttataattaaggttaggatgctactctgttaaaaacacgtgtagaaattaatgacactttgtatactgaaaaacccttcaccaaattttgaccttttttttatatagggaaaattagcgatccaataattgatgactgctggataacacataacaagttggtggtagcacatagcgcgttcgtttgaaattaattaacaaaactttggcatcatgctcacatgcttagtattttggaaaatgttatgtgaacattaaaatgagataataaaaagctgtcaatcttgagtttgagatatatttttaaaatgtgtacatgcaaaaaatacaaaatgaaaaaatatagaaaattatatataatatcaagtactactatgttagttttttgatgttcaaataagaataagaatatgtggacattcatatattacacatacttattagacacttttaatttctattcggctcttcttggtgtatcatattattatctactacaagtgtgtgtgtatgatttatattntataatcaaattctattgtcacgcg

SEQ ID NO: 45843 - DNA, 269 bp, Glycine max
  Clone ID: PAT_MRT3847_141397C.1
gaggaacatcagcaatttgtcaaggatacttgcattggtaagggagtgtcaccagaaggcaagtgtatgtcagaagattgtgcagtaaatcatgatccaatgtcatgtcactttgagaatgacttgaacaccagaagagattcaaatctaagaactatggaagcaatgtcaatcaattcaaatgggccagagtatgaatctaaacctcttacccttaaggatgccatggaattttatgattcaagaggtttagtgatggatggtgaaga

SEQ ID NO: 45844 - DNA, 258 bp, Glycine max
  Clone ID: PAT_MRT3847_141398C.1
gcattcccaaaatactggtagccttaacaggatcatgtacacgtacagctaacaattccacattatctaaaaactctataatgtcgtttcccatgaaaaaacgaaaacgaaacgtaacgtcatctttctgcagtcatcaatgtaggtgaaacgaaagctcttatgacagatacaaagcttctaaataatcatcaatgtaggccaagctcggccaatgatctgtacgaatacgaactaaagttgaaagatcaccaactt

SEQ ID NO: 45845 - DNA, 210 bp, Glycine max
  Clone ID: PAT_MRT3847_141399C.1
atcttgaaattattacaatttgggaaattcaagggatagatgttgcctgagcgaaatagaaatccggcacaaaaccaggcaagatacaagccaaaaacatggagggtaaagactgacgagcaaaatgagagagctaactgacattaaacgagttgcgctcaaagtcagctttacaatcgggaggcctgccgagccaactgcatgaatgaa

SEQ ID NO: 45846 - DNA, 344 bp, Glycine max
  Clone ID: PAT_MRT3847_14139C.1
gaaggaccagacaagcggagctaaatgactctcggtgcccactgtgcaacagtccggacgaagatgcaacacacctatttttctactacactaagaccctacccctatggtgggaatctcagtcatggataaattcatcgggtgtatatccacacacttccaaagatcattttctgcaacatgataaccggtctgctgttggagttagagctagaagatggaagtgctggttgataacactaacatggacaatttggaagcatctaaacaggatagtcttagataatcaatcttttgatggaagttaagtcatggatgacgcactatttctactatggtcttgg

SEQ ID NO: 45847 - DNA, 166 bp, Glycine max
  Clone ID: PAT_MRT3847_1413C.1
gctggcccagtcgaggctcgtccatgcccaatcccaatggacaaacctctgatccgcccctagctctataatccacccgtcccagtccctgaaagccctcctatccttggcctagccctctttctcaactcgagtcttaagttcagcggctttcatcattggacga

SEQ ID NO: 45848 - DNA, 170 bp, Glycine max
  Clone ID: PAT_MRT3847_141400C.1
ttctcgagtcgaatcggctcgagctgctcgagcaaggagagcgtgccaacaaggtgatcatcggcaccaatcatgagcaagttgagctgatcatcaatgacatgaaggcgtttaaggaggctgccactgtggcctaggtggttgtcctgaggactgctaccagagagagg

SEQ ID NO: 45849 - DNA, 496 bp, Glycine max
  Clone ID: PAT_MRT3847_141401C.1
gaattaattggaatattttactctgtggtaagtgctgtgctgcataattggtgtgtgtttctattaatgccaattatgtttctattaacttttcctttcaatttcagtggttggcttatcgctatctcatattcaaacctgaccggtaagcatgttggtcccctttattcttatttccacaagtttgtttaatattaaccacatcataatattaagacctctgatttaataactgaagtgagaaaagtaaaagaaaacttacagtggataatgattaactatctaatgaagagattaatctcatgtaactaatgaaactttttatttcataaataagatcactcacggattcttgtcaagagaatctcattaaaaaaaatttagcttgtagtgcactcagtttgcaagcaacttcacttgaattttcttaatacagggaagagctttttcaaatcttgaacaagtcagcatcagatatcttgggccaataagatgt

SEQ ID NO: 45850 - DNA, 680 bp, Glycine max
  unsure (1)..(680): unsure at all n locations
  Clone ID: PAT_MRT3847_141402C.1
gcggcgcgcgnngcctccgagggcttcactagactctcgaaatccgaggccacatgaccgcagatatagtagatggagatcggccaaatgagaccccaacagttccagatgtaggtctagggtatgcatggctgtctgattttcctcaggcctgggcggaaaccgggggcatgggactggcagttcgccaagctcctctgatcatacttctgaaagcaacctctacccccgtgtccataaaacaataccccatgtcacaagaagccagactggggatcaagccccacatacagagactgttggaccagggaatactggtaccctgccagtccccctggaacacgcccctgctacccgtcaagaaaccagggactaatgattacaggcctgcccaggatctgagagaggtctagtagcggggcgaacacatccaccccaccgtgcccaaaccttacaaactcttgagcgggctcccaccgtcccaccagcgggacactgtgcttgatcataacgatgcctttttatagcctgaagactccaaccccaacaatcagcctctcttcgcctttgagagcagacatccagacatgggaatctcaagaaaattgacctggtaccaaaattcaaaaggggtacaaatacacttccctccctcgattgataaaggcctgaaacataga

SEQ ID NO: 45851 - DNA, 436 bp, Glycine max
  Clone ID: PAT_MRT3847_141403C.1
aaaaagaatcaagcgtgtaactttttaacattccccaccaaaaagctggcaacttaaacccaagggggtaatttcgcccttggtaaacgcagcgttcatgttcataatttaatttccctaaacaaattctgttaaacatgacacccttagcaaaacatatagtaccggttccaggaaaacactttttggaccctttataccctcctaggaaaatttttttgcctatcatcacaggtgaagcaggggtaatgcctttccacccccaaaggtggaaaagagtaatcccttcctccacgtgggaaagggttttttgtttttcctcacttccttaaacccattaactttttgaatgggttctcgatgggattcaaattccttttacaaaactggccttaaactctgggggggagaggtttccgtggagacccttttggga

SEQ ID NO: 45852 - DNA, 328 bp, Glycine max
  Clone ID: PAT_MRT3847_141404C.1
cttgcccagctcttgcatgtcattcctgcacatggctgtagtgaatgctcagaagttcatgtagcccaaactggtcaccacattcgggattgttctggcactaatggtcggcagcgtcgtagttctcatgcatgggtaaagggttcagtcaatgatatacttgtccctattgagtcttatcatctttttgacccctttggtaggcgtattaaacatgatacacggtttgaatatgaccggattcctgctgttgttgagctatgcattcaagccggtgtagatatcccataatatccttcgcgccgaaggaccaaccccataccgatgt

SEQ ID NO: 45853 - DNA, 1369 bp, Glycine max
  Clone ID: PAT_MRT3847_141405C.1
cttgcctgcgtaagaatctcctaaaattaaaaaattcctacctagcttaataagtatcttaagtattttgtgaagaaaacatgaaatgaaaaattaaatgtatttcttacttttcaaaaagtttagtaaaaataatatattactttaagacaatatagaattatttccataattactatttccatttatttttatttttctaccgcgtccggaaaaaatatacaatgtattataggttagaccaaaataaataatagagatgatattaggacgttaaaattaattttaacataaacgaggatatatattacagtttttaatctatgtaaaaaaaatattctaaatgaatagtagataataagaatggcagtaaaaaaagtagataataagaatggaaagtatatgcaggttaaatgcagtttcatatttatttaaagtgtatctgatactattttaaatcatatattaatgccatgtagtagtagcattcttcggtttcttttcatatgtaattttgtgtaattgcacaaggattaagtaaacaattaatgagtcaaccaggtccactgcacatgtattatggcaaatttgaacgaaattcaattttaaataccacttttttccccttagaatttaatgtgatgtaatgttagcgcaaatgtttgtacgagcatttattgtggtgttactgcatcattaaatggattaattattaacatattaaatgcattgacagtttaattttttaaaacattaacaactcattataattaaatcaatttatatttgagattgttaagtggtcttctttatttggggattctgaatttggaattaagccttttgattatttctcattttaacaactaattcataattaagaatggaggaatgctgttgtactctctctctcgaaaattctatatttgattagaatttattagaaaatattaattttggtaggttttacttttcatttaatataaattaagagagaattattaaatgagaaacaaaacataataaaaaacataataaaaatagtgatttctaataaattttaaccaatatagagttttagaaagagaatgtcataagcatttttcttaagaatgttaaagatgatgcttggattgaatgttttttgttttctattttcaaataaaacataaaataagtgtaaaaatatgtttgtttgaaaattcagccatattttctctaaaaatattttcaaaaatagaattaaaactgaaaacaaatcatcgttttgagcttattttgaagaagtgaaaacgcagtgataccttgagtattttcttctcaatacatgttttctaaatcttaaaaaattaaaatgaatttttttcag

SEQ ID NO: 45854 - DNA, 684 bp, Glycine max
  unsure (1)..(684): unsure at all n locations
  Clone ID: PAT_MRT3847_141406C.1
cggacgcgtgggcggacgcgtgggtgaattttgaaagtgagtgtggcgtaccgtgtacgtatctgcagaaagtgaatgaatggtaatgggggaagaagggtgcaagagaatgagtcaaaggttggcctcttaaagagccttccacaatcagaaggaaaactggtgctgtttgaagctgatatttacaacccaaatgattttgaccttgcaattgaaggctgcaagtttgtgtttcatgttgctactcccatgatccatgaacctggctcccagtacaaggatactagtgaagcggcagttgctggaacaaaaagcattttcctgtcttgtgtgagagcagggacggtgaagcgtctcatctacaccgcgtctgttgtttctgcttctccattgaaagaagatgggagcggtttcaaagatgcaatggatgaaaattgctggacccctctcaatgattccttggcatatatataccgtgatgatccttttcttaagggctatacttattcaaagacactgtcggagagacatgtgctgagctacgggaacgaagaaaatggtggaggaatggaggtggtaacactcacttgtggactagtgngaggtgacacccttctatcttctacacccgctagcggagtagtttgtatcgctcagatcatgcagaatgaaagggcgtacata

SEQ ID NO: 45855 - DNA, 1463 bp, Glycine max
  unsure (1)..(1463): unsure at all n locations
  Clone ID: PAT_MRT3847_141407C.1
ggctcgaggggataaggacctatatgttaggccataactagcctgcactttacggctgcgagaagacgacagaaggggaaatctatttcagtttgaattttgaaagtgagtgtggcgtaccgtgtacgtatctgcagaaagtgaatgaatggtaatgggggaagaagggtgcaaggtatgtgttacaggaggcagtggttacattggttcctggctcatcaagaagctactggccaagggctacacagttcatgcaactctcagagacttgaagaatgagtcaaaggttggcctcttaaagagccttccacaatcagaaggaaaactggtgctgtttgaagctgatatttacaacccaaatgattttgaccttgcaattgaaggctgcaagtttgtgtttcatgttgctactcccatgatccatgaacctggctcccagtacaaggatactagtgaagcggcagttgctggaacaaaaagcattttcctgtcttgtgtgagagcagggacggtgaagcgtctcatctacaccgcgtctgttgtttctgcttctccattgaaagaagatgggagcggtttcaaagatgcaatggatgaaaattgctggacccctctcaatgattccttggcatatatataccgtgatgatccttttcttaagggctatacttattcaaagacactgtcggagagacatgtgctgagctacgggaacgaagaaaatggtggaggaatggaggtggtaacactcacttgtggactagtgggaggtgacacccttctatcttctacacccgctagcggagtagtttgtatcgctcagatcatgcagaatgaaagggcgtacatatcactcaagttcctaaaggaattgttggggaaaattcctcttgtacacgttgatgatgtctgtgaagctcatattttctgcatggaaagcacctcgatcagtggaagattcttgtgtgcaagttcatatatttcattagaagagatggctaatcattacgctcttcattatccagaattcaatgtgaaacaagaatatgaagatgggctgaagaaggatatcaagtgggcctcaacaaagctgtgtgacaaaggctttgtatacaaatatgacgccaagatgctattggatgattgtatcaaatgtgcaagaaggatgggtgatatctagtctccatctacacccttgattgctatatctgcttgtaatacaatatgcaccaggcgtctgcctcatttcttcttgctccctatcttactgttgttactattgttttcgcaattatgattaaaaaataaactcggcttcaaatctatcagaaaaatgaataaattcttctcgttccctatccaaatgttattaccattgtttttgtcattttgttaaaaaataaactcagtttcaaatcaattagaaaagtgaattaactgagacnaaaaaaaaaaaaaaaaaa

SEQ ID NO: 45856 - DNA, 324 bp, Glycine max
  Clone ID: PAT_MRT3847_141408C.1
ggggcggcctttttttttttttttttccacagggagcagagataagtaagtaggcacgcaggttaacattacctcccaatgtagctctacatgataaatctacagaaagcaacatcccacctaggcaggcgaggaatatagcagatactgtaactagctggaagatacagcgcagaagcaacacgctatggggacagacattagacacgagcgaaacaatccttaaaggagagtgagagagagagggagaacactaagaatcaagataacagcagcgtcaggaatgtaggcagcaagacctctaaagaatatagagggcgcccc

SEQ ID NO: 45857 - DNA, 667 bp, Glycine max
  Clone ID: PAT_MRT3847_141409C.1
aaggagttagtttctggatccctcttgcatcgctttgttgacggtgatgatgagtttcgaaacagcaggtttaagctcataccatcagtcccaaagggctcatggattgtacgccagagtgttggtagtactccttgtttactgggaaaggcagttgattgcaactatattcgtggtcccaagtatttagaaattgatgttgatattggttcttctactgttgctaatggagttttgggtctggttattggtgtgattacaacattggtggttgatatggcttttcttgtacaggcaaatacacctgatgaattgccggagaggcttattggagctgttcgtatttctcatttagagctcaaatctgccatcatcccaaaactggaatcagatccatcatgactgacgagttgtttcagttcttctatacagaatcatttgtttgaaatatgcaggtgtaccattttttttcccactgggatgtaggttcattgttttataattgggttcttctatgaaatcttataaggaaattcttctttccttcagcaagatattgtagtaatgtagtttctttctcattcctaaggttttatacgtgaatatgttgtacacttactatgtttactaatgagggcagaatggatggtgtcattcttaccattct

SEQ ID NO: 45858 - DNA, 256 bp, Glycine max
  Clone ID: PAT_MRT3847_14140C.1
cgtcctttttttttttttttttgacaacaacaaactatctatgcgcgatccagtaaacttgggggcttcaggtttccatcgtcaaagtggattataacacctccgctgaattgttctagttgcgttaccataacagatggcactcacattctgctcaaaagatggatactatccttctaagtccaacttagggccggaacttactcccttactttgagggggcatgcaaaaatacctccaattgaaattttatctt

SEQ ID NO: 45859 - DNA, 1952 bp, Glycine max
  Clone ID: PAT_MRT3847_141410C.1
ctatgggggtggaggtttatttgaggaggtggatgggcatacagcagttctttatcaccgacttcagctagactggttcggaatgtatgtgtggactcgtgaggggcgctttgtgcgatactggcgccgaaatgatgatggaagttatgttgttttatttcgctctagggaacatgaaaactgtggtccacagccagggtgtgttcgggcacatattgaaagtggaggatttaatatttcccccttaaaacctcgaaatgggaggcccaggacccaagtccagcatcttatgcagattgatctgaagggatggggtgtgggttacttgtcatcttttcagcagtattgtgtccgtcaaatgttaaatagtgtagctggtttacgtgaatggtttgcccaatcagatgaaagaaatgctcatccaagaattcctgtcatggttaatatgtcctcaacagctgtttcttcaaagaagaatcagaagccaaatgatttttctgtcaatcctacttctcttgatcaaatgaatgctacaagcagaagttctgccttgatagatgaatattctgatgatgaagaagattttcaaatagcagaacctgaacaagaggcataccaaattggtcttgagaatgatgtgagaaaaacagccttggaagaagaaccggcacatgaaattgacttttcttccttttcgggcaatttgcgccgagatgaccgtgataatgctcgggactgctggaaaatttctgatggaaacaacttcagagtcagaagcaagcattattgctatgacaaaacaaagaaggttcctgctggaaaacatatgctggaccttgttgctgttgattggtttaaagactcaaaaagaatggaccatgtggctaggcgtcatggttgtgcggcgcaagttgcttcagaaaaaggatttttctccattgttattaatcttcaagtgcctgcatcaacacactatagtatggtattttattttgtgacaaaggagttagtttctggatccctcttgcatcgctttgttgatggtgatgatgagtttcgaaacagcaggtttaagctcataccatcagtcccaaagggctcatggattgtacgccagagtgttggtagtactccttgtttactgggaaaggcggttgattgcaactatattcggggtcccaagtatttagaaattgatgttgatattggttcttctactgttgctaatggagttttgggtctggttattggtgtgattacaacattggtggttgatatggcttttcttgtacaggcaaatacaccctgatgaattgcccgagaggcttattggagctgttcgtatttctcatttagagctcaaatctgccatcgtcccaaaactggaaccagatccatcatgactgaccgagtcgtttctgttcttctatacaaaatcatttgtttgcaatatgcaggtgtaccattttttttccactgtgatttaggttcattgttttataattgggttcttctatgaaatcttaaaaggaaattcttctttccttttccccctttcttggtttttttttttttgtagttcatttaagtgttaagctgataggatctgtattttgtcaatgtattcatattcggatatatttcatctgattatgaagtattgccatatagttctaaacatttttttttgtaactcccagtaagttagaagaaaaagggaaagttttcggtcatttcatcccgtcatggaatttgctcgtgtaataatgtacatagtttctccttcatgacatctctcatcaccaaagattgtatctacattttgtagtaatgcagtttctttctcatttctaaggttttatatgtgaaaaggttgccaacttcctgtttagtaatgaggggaaaaaaaaaaaaaaaaaaaaaaaaaaaaaaaaaaaaaaaaaaaaaaaaaa

SEQ ID NO: 45860 - DNA, 893 bp, Glycine max
  Clone ID: PAT_MRT3847_141411C.1
gatagtaagagtaccttccatttccatgtgacaggggacaattggttgtagtgagtgtgggaggagagtcacaactaccagtccttgctttgcatcgtgtgagtttgggagatgagtgaaaaatatcactatgaattttctggtttggtaagagaaaaagggattcccagttgacaccattgctcactcagggtaggatttttcttcattgctgttgtgtaaagtttcttcctttcttgctcttctgttcattcaacgctggtttggcctctcttgagcttcttcgttcatcaaaggaagatgggctaatcgagcatttttatatatcttggtgtttggatccatttaagtgttcacgcagccttcctgaaacgttgctccaattctcagtgttagtggatgcattttttccttttgatttctgaaatttcatccttattatggctgtttgaaggactgtgaagtgaacaattaatataagcctgcttctgcatcttgtccaccaaagctcatcatttgaccatcatcaaaatggtttcaagatcatattctaacttgttagatcttacttcttgtggctccccaactttcggccgtgagaagaaaaggctccctcgagtggcaactgttgctggagtactgtctgaactagatgatgagaccagcaacagtgtttgctctgatactccatcctcagtctctcaagagaggatgatcattgttggtaaccagcttccattaaaggcacacagaaaagacaatggtacttggggagttcacatgggatgaggattcacttcttttacagctgaaagatggtcttggggatgatgtggaaactatatatatttggtgtcttaaaaaagagattgagccaggtgagcaagatgatg

SEQ ID NO: 45861 - DNA, 670 bp, Glycine max
  Clone ID: PAT_MRT3847_141412C.1
atcactatgaattttctgtttttgtaacaaaagtaagagaaaaagggattcccagttgacaccattgctcactcaggtgaagtgtttgtgtgtgtgactgagaagagaaagaaaagaagaatcttttgctgtctgtctctcatatcacaactcacacctctcttttgcttgttgttttcaagggttaggatttttcttcattgctgttgagaaaagtttcttcctttcttgctcttctgttcattcgttcattcatcttttgggctagtttggcctctcttgagcttcttcgttcatcaaaggaaggtgggctaatcttgcattttttatatatcttggtgtttggatccatttaagtgttcacgcagccatcctcaacgttgcttcaattctcagtgttagtggatgaatttttctttttggactgtgaagtgaacaattaatagaagcctgcttctgcatcttgtccaccaaagcttatcatttggccatcatcaaaatggtttcaaggtcatattctaacttgttagatcttacttcttgtggctccccgactttcagtcgtgagaagaaaaggctccctcgagtggcaactgttgctggagtactgtctgaattagatgatgaaaccagcaacagtgtttgctctgatactccatcctcagtctct

SEQ ID NO: 45862 - DNA, 881 bp, Glycine max
  Clone ID: PAT_MRT3847_141413C.1
ggaatttggtgctgaatcatcagtcattgccacaagtagttcaaaagatgagatgcatgagggaaatagattgaaagctgcaatccaggcagctttgcttagaaggcctgaaatacacaagaggaaagaagctcctgaccaaactaatgagtttcctacatcaagcactggtttgaaacgagaagtcacttctcaaaagcaagtgttggtttccagcactttgaagaatggtatatctgctgaagaaagcaatatgaagcaggaaatcattgagaattctacatttgaaacctccaaatgtccatctgccaatgatctgaagcaagttaaattttgtcgaactgatttttgctctcagctgagaaagtcagattctgttggtcccacttctggaaagcctgtagtgagagacttgcccaataatgccatggaaatatcaagtattctttcaaagatgtcagtcattccagaatatgagtacatctggcagggtgtctttaaagtgcatagaaatggaatgcctcctgacttgtatactgggattcaagcacatttatctgcatgtgcttcccctaaggttcatgaggtagtgaagaaatttttacctgaagtttcactaaatgaagtttctcgattgagcatatggccttcacaatttcatcaaggtggtgctaaggaagataatattgctctttacttctttgccaaagacattgaaagttatgagaggtattacaagggtctattggatcacatgattagaaatgatttagcacttagggggacttctgatggtgttgaacttcttatatttgcatctaatcagcttccggaagattcacaacgttggaatatgttatttttcctatggggtatattta

SEQ ID NO: 45863 - DNA, 442 bp, Glycine max
  Clone ID: PAT_MRT3847_141414C.1
tacggctgcaagacgacagaaggggagaggaagcggtgaactgcctcacccaatgcgctttgaacaacaagcttaacgccatcttggatcgccttgctaccctcactccagcacccatatcgactccgcttcccatggctgcttcccacctctctgccaacagcaagccccatgccccctccttcgatctccatcgcagtggcaaccactcagaccattatgccaactccacctcccatagctgcttcccatctcccttcatcgatcacaatcctatttttttctctctttgtctctctcgctctcgctcctgtgacgaccagaggagcgttcgagatcacggcctctctctccatctctgtcgtgatccttcttggaccctccgttctcgtcgtcgcccctcgacctcttgctctgtctgtcatcggcatcaacgttcgcc

SEQ ID NO: 45864 - DNA, 505 bp, Glycine max
  Clone ID: PAT_MRT3847_141415C.1
tgggatcctctagagcggccgcttttttttttttttttttttttttttttttgcatatagcatgtttagctagtgacaggaacagttgagtttgcggggaataagattagttctataatgcagaatacactctttgggcctggagctttaagtgtatcaaataaaaaaaaaaaaaaacttatagcaacatcttttatcatctattttaattcttttttttaattttatcttttctatttttatcttctaaatcaaacaaatcctttatctcaaaaagattaaaacaattttcatttcagtttgaattgttttattaaaaaaaccaattttatttatttatttatttattattattattcaaaaaattctatctaatccaatttaataaaatacagtttggattgaatttgactattaagtttttagtgacgcacttttacatttaaaaacatattacaatctttttttattgcttagccaactaagtgtcaaattctataaccat

SEQ ID NO: 45865 - DNA, 242 bp, Glycine max
  Clone ID: PAT_MRT3847_141416C.1
ggaaaaaaactggcccacttttttacttccccaagggaccgggaaaaaacaattttcgggggcttggggaatttaaagggcccccggggtgggcccgaaaaataaaactaaaatacccccacactttggggtcaaacaaaaggattgggaaatcccgggggatgggacccaacggaatttggggggcccctgggaattggaacccaaaccgggcgggggggggcaaacctggggcgggaaaa

SEQ ID NO: 45866 - DNA, 275 bp, Glycine max
  Clone ID: PAT_MRT3847_141417C.1
aaaaaaaacaagtagtatgaaaactaagaaagataaacaaaatactataataatagatctattggaaaaatgctaccaatgttaagggatcagatgtcaatatggctgcttcatacactatcactaagatcatgggttgcttaactaccataatgtccaatattgttattacctttattactagcaacggtagaatattacaatgcatgctagtgttgccactagtcagcaagaagaactatgatactctgtactacctgccacaccttgatgat

SEQ ID NO: 45867 - DNA, 1092 bp, Glycine max
  Clone ID: PAT_MRT3847_141418C.1
ttgtcgcgtgggttgagtttgtatggctcggattacagatatacaaaaaacgattgaaccaaactttctttcaattgattgcgtggatgccgcaaatttttcgtgtttctcagatgggtccccgtgtgttatgggaattgatgaggcggggaggggtccggtgctcggaccgatggtttacagctgtgctattgtcaaggcggacggcttagcaaagctggactcaatcggggtcaatgactcgaaggctttgaccagtgccaaacgaagagaaatattcgcgaaaatgcaggaactaattgcgtctgttgacccaaaacaaattctcacatattctcttcgcattgtccatccccgcacaatcagtgcgcaaatgcaacggcgcgtcaaacagtcactcaacgaaataagccatctttgtgcaatttcactcatcgagaaagcaattcagaatgggatttgcattagcgaggttttcgtggatttagtaggcaacaaagaagaagtgtatcaaacctttctcaatgagcgttttcctacactcaaaatcaccgtttccaaaaaggctgatgcaatttttcgcattgttggcgctgcttccattgttgccaaagtgacgagggatgacaaattggccgaatgggtctttgacgaaattggttttattgcgcctgaacgaggattggggtcaggatatccgtcagacccaataactaaacacttcattcgcactatggtggatcccatctttggctatccgtcgttggtcaggttcagttggaaaactgtcgaaagggttctcgagaggaaagcaatcaaatacacatgggattcttcttcctcacttttggacacatcgaaacaatttacactcactgaactttggacaaaagcgaaagtaacgaaacactgtcagacgaagaagaaatatcggcggcactcatttttcactgaaagaggactctccaacacgacggaactcagctgacggggccgaatttaggatgatttaacaggaaaagcatttcagttactttgagctcagggaaaaattcgttttgtataaacttttggtaaattattcgtatgtac

SEQ ID NO: 45868 - DNA, 437 bp, Glycine max
  unsure (1)..(437): unsure at all n locations
  Clone ID: PAT_MRT3847_141419C.1
gctgagcaaccagaaactattattaacaactttaccttccaatgggagacattttttgcttccattaccaattaaccagatggggatttccaccccttaaaattccacccgcccaaataccacattacttaatccattagcctttaaccagagggttaccccaccccccaactggtttttccttttttggaaaaccaaaaaaacctttattccaaaagggaaggttctggttaacttccaccttttatttaaggccctttggaccaatttcattacaaaaaatggcttattgcaaacccatttttaatggatggccacccacccacccccatgctttgggggagctgaatttgctaatggaagatgccaatcatcactttattttaccccctcccaccatcaataccaatttttttagttatttttgncgttatctg

SEQ ID NO: 45869 - DNA, 383 bp, Glycine max
  Clone ID: PAT_MRT3847_14141C.1
accagagatcatcaatctctctttcagttttccttgaacctatggacggaagttggagtgagggaaaaaggagcatgagttacaaggaggaggatgagtacgaagaagaggaagaggaggaggtgagtgagtatggagatgatggtaagaaaaagagggtggtgagtaataagagagggtccaaagctggaggctcagtgccaccttcatgtcaagttgatggttgcaacgctgatctaagtgaagctaagccctaccataggcgtcacaaggtttgtgagtaccatgccaaggctcctgctgtagtcattggagatcagcaccaacggttttgccaacaatgtagtaaggttcatgagctatcagaatacgatgactcaaga

SEQ ID NO: 45870 - DNA, 2786 bp, Glycine max
  unsure (1)..(2786): unsure at all n locations
  Clone ID: PAT_MRT3847_141420C.1
ctcgagccgaatcggctcgagcgcttggattagttctggaggggacaatcgctcctcagatatcaacaaaaggattcgcacagcacttgggaaaggtaagaaaattgattttcttactagagttgatccaatctcctttttttttttccctctttgccatttttcttattttccaaaattggatctaccatgggaattcgtgccttgtttaacttcgactcgagattatattagattaaggaaggagagaagaagggacaaccaggcacatggcgagcaaatagttatatatatggttgatctatctttggtttagccacacaaatctgacttatcggttggtcccttcaaccttggcctttcactttctcttcctatctctctctcacgttcacattccatgccagtgttttaggcagcaccccttcatattctttcaaccagacacagagccagaaaaccctgaagaagccagagtcagagagaaacagagtaatagatagtggaatatttgttggaccatgaagcataaagatggaaaaccgattaatcagccaaataagaaccgggctgtgactttggcagtcactttaattgctctatgtggtttttctttctatctgggaggaatcttttgctctggaaaggatggggttgtggttaataccattcagaagacccttgattctcctaagcaatcctcaggttctctgcaaattaagccaatcagtttccctgaatgcagcatagactatcaagactacactccatgcacagatccaaagagatggagaaagtatggtatgtaccggcttactttgttagaacgccattgtcctccagtttttgaaaggaaagaatgcttggttcctcccccagaaggttacaagcctccaatcagatggccaaagagtagagatgaatgttggtacaggaatgtgccgtatgactggatcaacaagcagaagtctaaccagcattggttgaaaaaggaaggggagaaattcctgtttccaggtgggggtactatgttccccaacggtgttggtgaatatgttgatttgatgcaagatctgatcccagaaatgaaagatgggactatgcgaactgccattgatactggttgtggagttgctagctggggtggtgacttgttggatcgtgggattctaactctttctcttgcaccaagagataaccatgaagctcaagttcaatttgctctggagcgtggtatccctgcagttctcggtgtcatttctacacagagacttcctttcccatcaaactcctttgatatggctcattgctccagatgccttatcccatggacagaatttggtggaatttatctcatggaaatacaccgtattcttcgtcccggaggattttgggttttgtctggtccacctgttaactacgagcgcaggtggcgtggatggaacacaaccattgaagaccaaagatcagattatgagaagttgcaggaattacttacttcaatgtgctttaaattgtacaataaaaaggatgacattgcagtatggcagaaggctaaagataacaattgctatgataagctggctagagagtcctatccaccaaagtgtgatgacagcattgaaccagattcagcatggtatactccacttcgtgcttgttttgtggttccagatccaaaatacaagaaatcaggcctcacatacatgcctaagtggcctgaacggttgcatgctacccctgaaagggtcacaactgttcatggttctagtactagtactttcagtcatgacaatggcaagtggaaaaagcgcattcagcactacaagaagttgctgcctgaacttggcactgacaaagttagaaatgtcatggacatgactacagtatatggagcttttgctgcagccttgatcaatgatcccttgtgggtcatgaatgtggtctcatcttatggtcccaacacactccctgtggtttatgatcgtggccttattggaaccttccatgattggtgtgaagctttttcaacatatcctcgaacctatgacctccttcatcttgatggactcttcactgctgaaagccacagatgtgaaatgaagtatgtgttgctggaaatggatcgaattttaaggcctggtgggcatgctatcattcgagagtccacttattttgtggatgccattgctactattgccaagggtatgagatgggtgtgtcgcaaagaaaacaccgagtatggagttgacaaagagaagattctgatatgccaaaaaaagctatggcactcatccaacaacggttcaagatgacaaactctggaacctgtgcagtggtgagagggggtggctacaattgtaaatccagaagcagaagcaaagggaaatggattcagagccaccatcaactaaacattgattcattctataatatagaagccaagaatcggtcgagttcaaatttatcaaatgaagaattggtaactcaataatctgatcttgttaagttatatagaaaattttcatatagatactattctttatatggcatcaattgtatcagctaccactctcctatatctattttttgttgttgttgttgtgtaatatccaagtgaattcatgtgagaaatgaaagttttaattccgacagaaagcatatgatatgctacctatacataaattggaattccgtaccagacaatactacaacattttgtattaatattcgcactctataatcatttaattcaatgtcgtattatacaaaaanaaannnaaaaa

SEQ ID NO: 45871 - DNA, 403 bp, Glycine max
  unsure (1)..(403): unsure at all n locations
  Clone ID: PAT_MRT3847_141421C.1
ctctctatatatatagagatgactatattctttgtaactagcctttcattttctgatcaatgagaaattagagtttcccaaactctattagttngtatccagagaattgtagatttgtgctgcaatctttgaacttcttttatatttctatcagtaaagagagaagagccctttgatagatagatatcaggagaaatgttctttacttattttatctctctctctccctttctttattacatgtatgttcttacttcttttaagatttcatattcttgactaatttactcctgcagtttcttttcctaataaaatttcttattttaaattaaaaaggagttttgatagatgtacttctcattacccccagtttcttattctacttgtatgctntttctctatg

SEQ ID NO: 45872 - DNA, 1413 bp, Glycine max
  Clone ID: PAT_MRT3847_141422C.1
tgaataataataaaaaatgtagactcatcattttaacttgacaatatattgttttgaataatataaagttgggaactaaataaacatctaaaaaaaaagaggaactagaataatatatgctcacaatttcatgaagtattttggatatttactttaaaaataaaaataaaaaagatggagccaacccattacattacacaataggctcccacttagtccataaaccatcaaattttgttgccaaaaatggatttactctgcttgaaaaaggagtaaacatgacgaagatttcacagaggaataaacacaaacagatgaagagcaaaagagtaaggtgctactactgagagtaaggtgtccacatgtcagcgtaacatttgaagggaccaggaaggcggttcttccattcctcaaggtgaggcaaatccccagtgagagcaagcgagctatcatccttacgattccccagactcagaacaaaaaccttctttccgaaaacctccttcatcgctccgagagtctcttccataacaaccttcccatctctgagcctattctccgcctccacgcagctcccgccaacgttcaccatgatcctccctcccttcctcaacctccccctcagcatccgccaagtggcgggatcctggagctcggggattaaagagcccttcgaaaagaggtcgacgacgatcccggagaagccgttggggacggtggcgttgagggcgtcgccgacgtagatgaagaggcggtcttggttgtccctctcgaggcgggcgaggttgaagtactcgcgggcgacctggatgacggcggggtcgagctcccagcagtggaggagggcggaggggtggtggaggaggaggaggcgggcggcggtgccggcgccgaagccgaggagggcgagggggccggggggaacgatgggagggagcgtggcgaagacgtcgaagtaagtattggtgagggacttgaagaggaaagatatgctgtggatgtttccgggggtgtcgagaaggaggagcctggagccgcggaaggggtgttctgcttttctagaaacttctagaacgcggatgtagttgtggcgggacttgaatttcgcaaggattttaacctcgtccgcgggaatgccgtcttcttgagttttttgttgttgctggcattttgctgttaatgaagaacacggggttttgagagaaagggacactctggttgggctgggaattgaatttcggaggaacgctgtttgtgctagggtttgcggggaagaaagcaccaccatccacatccttgccttctttctagggattctagaattcgaggaattctttcttatccaagtgttgtaaaaattttgtattgaataaacattttttaaaagttctcagctcttttgctgttgattcc

SEQ ID NO: 45873 - DNA, 133 bp, Glycine max
  Clone ID: PAT_MRT3847_141423C.1
agagtattatgaatgacatggcctccaagtccaggtggaggtgggatgagagcatgatccatcctcttgatcgctattacaggaacactaagaagctcctatcagtaccgatggacaaatgagcaactgctat

SEQ ID NO: 45874 - DNA, 246 bp, Glycine max
  Clone ID: PAT_MRT3847_141424C.1
gacccaatcttccgttcggctgacacaacactaccgaatgctaccacctgctagaacacctcagataggctgataacattcaccttatctaagcatatataatatatggtaagaagattataatatgcatcctacttagaatttctatcatttgtgtacatgtattcgaatatttcaactgtaatctaagtacatcttacattaattaaatgttccccaatattaaccatacttaatgattaaacc

SEQ ID NO: 45875 - DNA, 294 bp, Glycine max
  Clone ID: PAT_MRT3847_141425C.1
ggggccaaaaaccctaagggtgattccactcggtctaatttaaaacatctatgtatgtagaaataacaacaaaaattaaaaggcttgagaaataaaatataataaattaaaaaccacgaaaacacgaaacgagaagcataaaacaaagttttattttttaaagcagaagagcctccatcattgtcagtacctcctggtgaaggggaagttcttctgaacagggacaggatcaacctgggtgatgccggtgatgtcgttaataccttaggagtggagcatttcgagggtttcctt

SEQ ID NO: 45876 - DNA, 448 bp, Glycine max
  Clone ID: PAT_MRT3847_141426C.1
ggaagagagcaaatttgcacacctacaagtacaaggaagttactttcttcgtttgatggtgaattatctcattgttgttcccaacatgtttctcatcacaaggcatttaggtttggagttacttttaatgtgtgaatcaaattaaggtttctgacaattttgtactgaaaaagaaaatttggaaaattgtgcaaaccaggtattgaaatttgtagtcaacaatcactaatttcaactataatacactgctatttatgcagataattatgtggatgtaccatgattagataagattactaacctacaaaacttcggaaacctttgcaacagcccaattgtcttctattgtttgtcagcagaaagacatctgaaatcacgtgtgaaccaatatggccatacatgaaatccacacttacatacacattccttcatggctagaggaacacct

SEQ ID NO: 45877 - DNA, 334 bp, Glycine max
  Clone ID: PAT_MRT3847_141427C.1
tattacggctgagagaagacgacagaaaggctccacgtacagatataaggctctcaacagctccacaatgcctgatacgtgaaggcatgacatgcgttgtgcctagaactagatcttatggaatactacaccgagcgaacacttgatgagttcggccttgttcttctaaaaaaggcggcataactgacacccctggagcaagatatcaagctgaatctacaggacaaaatacgatagttagatctctaacacattacaacaagtgtctagccaaatcacacttactgactactgcctccttgaagagcttgaacacgacagcctctgatccttt

SEQ ID NO: 45878 - DNA, 405 bp, Glycine max
  Clone ID: PAT_MRT3847_141428C.1
ggggccagaaaaaagtaattttttttccaaagggaaaaacggacccctgaacattaaaccaggagggcggggttcttaactggggggggaaacccaaaaaacccctggggggggggaaaatgaaaaacccaggggcattattgggggggaaacaaaaacaccccttatccattggaaatgggacattataaacctttccctttttaaacatagggggaaacaaaaccccttcgggagaaaaggaggccaagaattttttgggcaaattaaaaagtaaatctttgggcccccaaccccaggcggggaatcaaaaggggggtgggcccccattccctttttttgggggcagggaaaacccccctccaaaacgatggcccaaaaaaaacccttgggttaaaaacgtta

SEQ ID NO: 45879 - DNA, 247 bp, Glycine max
  Clone ID: PAT_MRT3847_141429C.1
ggcttcatggcgcatcctcctggagctcaaggacttgcgcaaatacccaccaacttcttgctgcgctggtcctgaagctgcggacatgttccattggcaagcaacaataatgggtcccgctgatgctccttactctggacgtgtacccctagtcactctgcactaacctccggaatatactgtcgagcctcctaaggtagccttgaggactaaagtgttacacaccaacaaccataacactggagca

SEQ ID NO: 45880 - DNA, 1461 bp, Glycine max
  Clone ID: PAT_MRT3847_14142C.1
aattcggctcgagaagggagttaacttgtgaagaggctattggtggaagttcctacaaaacagcagcactatggctctgtttatgaagttctttaattcttcttcgacaagcttaatgctccgtttcatattatcgttagttctatcattcagagcgaaggctgtggtgaaactaccgccaaatattaccattcctgcagtgatagctttcggagattccatcgttgacccgggcaacaacaacaaggttaaaacactggtcaagtgcgatttccctccttacggtaaagattttgagggagggatcccaaccggtcgattttgcaacgggaaaattccatcagatttgctagttgaagaactgggtattaaggagcttttacctgcttatttggatccaaatcttaaaccaagtgacctagttaccggagtctgctttgcttctggtgcttccggatacgatcctttaacgccaaaaatagcgtcggtgatatcaatgtccgaacaactagacatgttcaaagaatacataggaaagcttaaacatattgttggagaggacagaacaaaattcatcctagccaacagttttttccttgtggtagctggaagtgacgacattgccaacacctattttatcgctcgcgttcgacaattacaatatgatattccagcttacactgatcttatgctccactccgcttctaatttcgtaaaggaattatatggacttggagcacgcagaatcggagtactgagtgcaccaccgattggatgcgttccatcacagaggactctagctggaggtttccaaagagagtgtgcagaagaatacaattacgccgccaagttatttaactcaaaattatcaagggaactggacgctcttaagcataacttgcccaatagtaggatcgtttacattgacgtttacaaccccctaatggatatcattgtgaactaccaacgtcatggctataaagttgtggatagaggttgctgtggcacagggaaattggaggtggcagtgttatgcaaccctttgggtgccacttgtcccgatgcttcacaatatgttttttgggatagttatcatcctaccgaaggagtatacagacagctcatagtccaagtccttcaaaaatatttgactcgattctactgatccagtttgatcacgcatggcatggcgttaataaattaattacaacacatttcatccaagattatcaatatgcatgttagtgactgtaattgttaagtgcgtgtgcatataatcgtagcgggtctacgctccgtagatttgtattttttcttcttccttatttctatttgttaaatttaagaataagagtactacaaatgttgattcttttttgttcatttaatttttaattcaagtttgtactctttttttttttaatcaaaaacaaaaaaaaaaaaaaaaaaaaaaaaaggaag

SEQ ID NO: 45881 - DNA, 583 bp, Glycine max
  unsure (1)..(583): unsure at all n locations
  Clone ID: PAT_MRT3847_141430C.1
ggtgtatcaaatgacaattcaattgaagaaaaatacatctttgtatttacaattgacaagatgacattgggtatatagaatggaccaaaaggcagggagcgatagatcaaagaactgtaacccttgctcagtaagaaactaaatccgcaaacttgttaatttgcatgtatactgttcactacgctgcgtaattaaaatcattttttctatccattactctaagggtaaaagacgttaaggaattattaaaaagaatgtccttagggcaatggctagtaaaaaaaatttaattgaaataaaattataatttcctctgaatattagttcacccccaaattagggtatgcagcagtgatgtaaccccaaattcagaagaactttcagcacagccatcaatgtgaaaagaagagttgcaagcttaataccttacttaaccaaaaccatgtcatccctcacggcttgtgcagccactgcctccaatttcttccatgttaactccctcttctcttccaactctctagccctggcttccttctctaagtactggtttttgacactcttcanacaattcggcatccatctc

SEQ ID NO: 45882 - DNA, 453 bp, Glycine max
  Clone ID: PAT_MRT3847_141431C.1
tcgttgaggcgtccgatcttagattcagatggcaaactccacattaccatggggctctctgtgtgcttctccttcagatgcctaacctaatcatcccagacaaacatgggcaagtagatcttatgaatggggcggaaataaattcagatcgcactgcacctgtgagatatatcatggtgggtgggcgctacggacctctggattgctggtgccgacaccgggggggtcgtgtcgatgacggagtgctttggcacaccgactcgatgccctacgcttgcggggactcttccatcgctcatggccaggcgaattacagtcttgaggatgagagccaagtcgtaacatccgattccgacacctgcgtaggagcctactacggctaccggggtcccgaagcttccagatgcttcaacacgcgtctctgcctttatatgcacaaattcagcactgagc

SEQ ID NO: 45883 - DNA, 167 bp, Glycine max
  Clone ID: PAT_MRT3847_141432C.1
cacccatctggtctaaaaccaaatggtgggttctcctgaccaggtccttgcctctggacctgaagggttccgccaactccaatcagtgttatatgttctcccacaaatgtaaaatgcacccctacatacaatcgcgcggaacaggactaattacactcgttttcggc

SEQ ID NO: 45884 - DNA, 462 bp, Glycine max
  Clone ID: PAT_MRT3847_141433C.1
aaaagggaacttggccccatttccttttttaatttttcactttacatttcaaaggggttttccaactttccagcggattttttttttgcccacttaaaaaaccccttacctttccggttttttaaaaataaccccccatttttcccctttttttgggttggttttttaaaaaagctttttttttcccttcctccctgaaatttcaaccttaaatttccttttaaaggcctttttttacaccttaaaaccattttcttggttttttagttttttaattcccccaattaatcccttattttcaagctttttgggttggggaaaacccccccccctttttttccccccaaaggggttttttttttctttcggggtttttttttaaaagggggggaagccccccccgctttttgggcccctttgggaattttgttcttgggtttccggttttttttttttttttta

SEQ ID NO: 45885 - DNA, 543 bp, Glycine max
  Clone ID: PAT_MRT3847_141434C.1
cagcaaattagccatgagtatcatcagaattggagtacttgtgtgctcaagcttgcctcttttgagctgctttatggaactttttgttgctgtcactgcttctcaaacacacttcaacacagcaacgtcttccgaagaaaatgagttgcccaagaagaaagaagatgtatcaatcactgctaatgtggcatcccaaaagcactttcgacaaattcaacatatatgttaagggggtcttggattaaagttttggaggtagtaaaatgttctgataatgttgttagactttttaaaattttgggtagaaatttccgttagccataagtttggcccctatatgtaaacctttattgattgttgtgttgtctgagtgctgcttgtattgtattagtagctgatttttaggtttgttgacttttatatacaagaaaaattggtactgacaggtggcggctgctacaagtgttgaaattcagaaacaagtgagagtttcacagagaaaaaatgggttaaattaaaactgacaaaaaaattgttattttg

SEQ ID NO: 45886 - DNA, 1037 bp, Glycine max
  Clone ID: PAT_MRT3847_141435C.1
cggtccggaattccggggccggccagccgacaatcgtgccggccagccgacaattacgggaggttatgtgggtccctccacttttatatacacaacaacaacacacatactagtcatttgttgttgttgtgtttgtgtttgtgttctctcctttcattaacgttgtgttgggtttgctagtgtacttggttttcattatggcgtcttcttcagcctctcgtgagggacactacagaggagttaggaagcgaccatggggacgctacgctgcagaaataagagatccgtggaagaagacacgtgtctggctgggcacattcgatactcccgaggaagccgccctcgcctacgacggcgccgcccgctccctccgcggcgccaaggccaagaccaacttccctccggcgccgcctctctgcctcgacctcaacgtcccttcctccgatcaccgctggccccacgtcccccctcgcagcctcgtcctcagcgagttcctccacaccgccgttctcagagacattgaaccgccgcaactaccttttccacccgccgccgccatcgtcgctcaccgaagcccccacgccgggggagttcaggtggtggagagttctccaacggcgtcgtttttgggtctcgttaggcgcggcatccccatcgacttgaacgaacccccacccttgtggctatgaataatgaatgaaccctgactaggtttctttcgacgtcgttttatgttccctagtattatctactactactcccatgttttttcattttaattttccctcagcatgcttaggtttttattagtagcgttgtacgttcatcgtagagggagtagtcgtatgtatctgtccatgtgagtctaacattaggttaatggaaggggaaaaaaactgctatgatattttgtatatacagtacattttttttatattttcctttatcaatgtctctacgcattttgtcgttgtacgtagtactatgttattcgccgatctaatttagtggattatgttgggatttttttcatgatt

SEQ ID NO: 45887 - DNA, 1027 bp, Glycine max
  Clone ID: PAT_MRT3847_141436C.1
gaagggctcgagccggtgccggccagccgacaatcacgggaggttatgtgggtccctccacttttatatacacaacaacaacaacacacatactagtcatttgttgttgtgttctcctttcattaaggttgtgttgtgtttgttgggcttcgttactgtactttggtttcattattatggcgccgtcttcttcagcttctgcttctcgtgagggacactacagaggggttaggaagcgaccatggggacgctacgccgcagaaataagagacccatggaagaagacacgtgtctggctgggcacattcgatactcccgaggaggccgccctcgcctacgatggcgccgcccgctccctccgcggtgccaaggccaagaccaacttccctccggcgccgcccctctgcctcgacctcaacgtcccttcctccgatcaccgctggccccaccacgtccccccccgcagcctcgtcctcagcgacttcctccacaccgccgttctcagagatatcgacccgccccaacaacctttcccacccgccgccgcagtagctcaccgaaatccccacggcggagctatgcccgttggcggcggggttcaggtgatggagggttctccaacggcgtcgtttttggggttcgttaggcgcggcatccccatcgacttgaacgaacctccacccatgtggctatgaacgaatgaaagccctgactaggtttcttacggcgtcgttttacgttcagtagtagtatctaatttatcccctattttctcttaatatatgcttaggttttactattagcgttgtacgttgatcgtaaagggagtcgtatctatctgtccatgtgagtctatctaaccctaggtaaatgaagggaaaaaagaacagctatgatattttgtatatccagtacatttatttatttttccttatcaatgcctctaggaatttatgtatggttgcgttatgttggaatgcgaaacgagcgtgtgggtatgagcatgatggcattccttttttagtcc

SEQ ID NO: 45888 - DNA, 157 bp, Glycine max
  Clone ID: PAT_MRT3847_141437C.1
aacgaacttcataaatggagtgggggaggattattcattcatcgcatatagtccaccggaaggcactgttccagccaatataaccactacccgcctctttggaaccatgactgaaaccccacacaacctctgtcatagttacagcaatgcgattaaa

SEQ ID NO: 45889 - DNA, 269 bp, Glycine max
  Clone ID: PAT_MRT3847_141438C.1
tgcccaacattggtgaaccagggacattttcttaccgtattcgaggcacaggtgtagccgaccatggagacttgcagcatgccgatgatctcacaacaccgacaacgaagctcctggtggtcgtgccgaagattccggcagtcgttttgaccagcgcctacgctccggaagtacgcgtacatgaatacgtcgtggtcctagccgtcagtggcggtggagggtacaggggtgatatcacccctgacatcactatgtcgtcagctgactga

SEQ ID NO: 45890 - DNA, 1489 bp, Glycine max
  unsure (1)..(1489): unsure at all n locations
  Clone ID: PAT_MRT3847_141439C.1
ctcgagccgaatcggctcctctctcttctcttcattctccctcttaattcttttctcttttctttctttcacacaaactcctcttattatgatgggtcttgatcaagatgctagcagcaactctggccttcatcttattctagggttagctttgactgccaccaccaccactactccatcactaccatccatttccaacaagcttgatcatgttgatcatcatcaccatcttataactcttagaccaacaacaaagtcaccctataattcctctgaggctgaaccatcattaacgttgggcttgtcccgtgagagttacctcaaagtacccaaaaacatcataggacaaaacagcaacaacaaagtctcgtcttgtgatgaccctcttgatcacttgtccacacagactaattcacctcatcacagtgctgtttcctccttctccagtggcagggtcaagagggagagggatctcagttgcgaagaagttgtggatgcaacagagattgatcagagggaccatagctgtgaaggaatagtaagagccactgacgaagacgaagacggcaccgccgccagaaagaaacttaggcttagtaaagaacaatctgctttgctagaagaaagcttcaaacaacatagcaccctcaatcctaaacagaagcaagctttggcgaagcagttgaatcttaggccacgacaagttgaggtgtggttccagaacaggagagccagaacaaagctgaagcagacagaggtggactgcgagttcctaaagaaatgttgtgagacattaacagacgaaaacagacggttacagaaggagcttcaagagcttaaagcactgaaactggctcagcctctgtacatgcctatgcctgcggcaacactcaccatgtgcccctcttgtgagaggctcggcggcggcatcaacggtggcggcggcggttcccctaagacaccattctccatggctcctaagcctcacttcttcaaccccttcgccaacccttctgcagcatgttgattgattgttattataattaggcttttaattagttttcatttaaaaaaaaaaaaaacagcaaaaaccaaagaagagttgccccacaacctttgtatttttttggttgagggatacgtcttatgaactacatagctagtgaaaaaaaggttaagggtgtaattaattaactaatatactgtagaaatttgtaactgctgattcagaattactttttactcttcctttattaaaggtattttgatcaagtgaaaaaaggctaaaggtgtaattaactaatatactgtagttttttgtaaccgctgattagaattactttttactcttcctttattaatgtatgtttataaatcgttatagaagacatccatctatgaaggaattaatgactattttttttaatagcccnaaaaaaaaaaaaaaaaaaaaaaannnaagcggccctctagaggatccaagcttacg

SEQ ID NO: 45891 - DNA, 259 bp, Glycine max
  Clone ID: PAT_MRT3847_14143C.1
tcactaccttattcttaaaaggtatcaacatccgcatatttttaatagagggaaaggggccttcctaaatattttttaatcttatttttttcatgtttaacatatgaagcaactgcttcaacagcccctgtaaacactgcagaaaaaaaaacaaattaatgcacattcaccctgcaactaccacagtaataataacccccaaagtaactgctaacccaatcccgtaccctccttccatcactccctattacaactaccc

SEQ ID NO: 45892 - DNA, 166 bp, Glycine max
  Clone ID: PAT_MRT3847_141440C.1
cacaggctttccgggccccaaagtggcccaggtcctggcatttttccagacagatggcacaagactctttttctggactttgctcagatgaccaggattttgtttgtggcaactccttggaaatgaaaacctcagacaaccctgtgctctcttggcctattctctc

SEQ ID NO: 45893 - DNA, 899 bp, Glycine max
  Clone ID: PAT_MRT3847_141441C.1
gaagacggcgccgccaccagaaagaaacttaggctcaagagggagagggatctcagctgtgaagaagttgtggatgcaaaagagattgatcagagggatcttagctgtgaaggaataataagagccaccgaagaagaagaagacggcgccgccaccagaaagaaacttaggctcaccaaagaacaatctgctttgctagaagaaagcttcaaacaacatagcaccctcaatcctaaacagaagcaagctttgtcgaagcagttaaatctaaggccacgacaagttgaggtgtggttccagaacaggagagccagaacaaagctgaagcagacagaggtggactgcgagttcctaaagaaatgttgtgaaacattaacagatgaaaacagacggttacagaaggagcttcaagagctgaaggcactgaaactggctcagccgttgtacatgcctatgcctgcggcaacactcgccatgtgcccctcttgcgagaggctcggcggcagcgccgtcaacggtgccggcggttcccccaagacatcattctccatggcccctaagcctcacttcttcaaccccttcgccaatccttctgcagcatgttgattgatattgttattataattaggcttttagttttcattaaaaaaaacaaaagacaaccaaagaagagttcccccacaacctttgtatttttttggttgagggatacgtcttatgaaccagtgaaaaaaggctaaaggtgtaattaactaatatactgtagaaatttgtaaccgctgattagaattactttttactcttcctttattaatgtatgtttataaatcgttatagaagacatccatctatgaaggaattaatgactattttttttaatagtccatttttgtaatggt

SEQ ID NO: 45894 - DNA, 196 bp, Glycine max
  Clone ID: PAT_MRT3847_141442C.1
cggttgcgtggtttctcacctgtctctctctctctatccctccctcctagggtttcacgtttccatgtgaaaatggattgcgaatctctctctcattctctctgtattttatatttcctttcacgccaattaggactttcttgctggcccgactctccaggcctcggctccggctctcctcctcgcttctccgctc

SEQ ID NO: 45895 - DNA, 258 bp, Glycine max
  Clone ID: PAT_MRT3847_141443C.1
ctcctttttgggtgaacaagcaagtttttctgcataggccatgaaattaaacctctccaaaaatcaaatttagaataatttttctcaaattttaaaggactttctacaggatgctgggagagcccacttgggttgtttgccaaacacatatgacctagcaatttataaaacgattaattctgaaccggcacattatgtattcacccaaaagaggaaatcctattgaaacagggggcatttataaacgtaggggaattc

SEQ ID NO: 45896 - DNA, 500 bp, Glycine max
  Clone ID: PAT_MRT3847_141444C.1
cactgtatgacgtcctccttctttggggggggggggggggggcaaactaaaggacgtttggaatgcacgcaaggatgagagcgagcatgtcccaacgtatagggcggtaggtaaagttacaataagcagcgtactgtaaacgcattatgaaggaaggagagagagcagcaagggtagtaagtcgtacgttatggagtttattaagggtagccgaggacgaagcgctagcataggcattggacagtagggcgagccaacgtgataataagcgtgaaggaaataaagttcacattgggatggaaaggggctgcatgggtgtggtggcagagaggcgcgttggttatagtatggggggtagtaccatcagccatgaaggaagttggaggaggaggcagaacgtgagtaggttgccactgcgcattccgactgcgtcggccgtggtccaaacggaggggtgcgtcccccatccgcgtagtacattgtgatcggtgggactgggg

SEQ ID NO: 45897 - DNA, 163 bp, Glycine max
  unsure (1)..(163): unsure at all n locations
  Clone ID: PAT_MRT3847_141445C.1
acaggactcatttttttatggaacttatantaaaattgaacacgcactgccttagtcataatatgcgatacatcntcaaaaaactgcggctttcgttgccactgggcctagaccactaaactgttacgtggtgccgcatctataatgtgcctggccagaatat

SEQ ID NO: 45898 - DNA, 393 bp, Glycine max
  unsure (1)..(393): unsure at all n locations
  Clone ID: PAT_MRT3847_141446C.1
acaatacacaagcatcctctgcgggattaatgcagccctagaatatagagaatagagtggagcttacgttcttataagtacatggagcccattnattccacgcttacgatgagcttctaccgcttacaatgacgtggctatacagtagagagcgcgtcggaacgaatgataaggaccttctcttcccttactacacccctccttctggctaggctgagcataaccactgtaggattacctactgttctttaatagcccctaaacgttttgagcatacccatggtacgcaagctgctgcacttgtcttctgatctaccttaccacattgtggttgtagcacgacaggaagttcctctggttgttctcagcactgctaccacttgcgaggatatt

SEQ ID NO: 45899 - DNA, 1001 bp, Glycine max
  Clone ID: PAT_MRT3847_141447C.1
tctctcttcactctccacaatcccacacccaagcccctctctccgaagttgggaacatgagttggcggtcggtgaggggaagccgtaagaggaagatggatttcgaactggacctcaaccgtgatccgccgctggttcgagaagaggaggaggaggaggaggagggggggccctcaaggcatcagcagcaccaccaccaccaacaagaacctcaaactcccattgtcgatgtcgacgccattgacgacgatgttgttgaaagctcgcctaggtctttcgctcaggctaagagcaatgctgatgagaggaggagagttcgcaggaggacgactattgttgatttggactcagaagatgggaccggaggagttcctcaaaaccaaacaatcatcaatggcgatctttatgtaaatttggccaacaacagcagttctgcgagtgaaaatgctaagaagacacctgaacctcccaaggagcctgaagctcctaaggagccgttttttaattgcccaatatgtatgtcccctttggttgaagaaatgtcaacaaggtgtggtcatattttttgcaagaattgcatcagggctgctatatctgcacaggctaaatgccctacctgtagaaaaaaggttacaaagaactcactaataagggtgtttcttcctgcaactagttaaaggatctctatccaatcattaattgaggagaatcaggatttaggaatgtgagaagaagcttcattgtactctgcagaatgctgagtggctctgttgttgcttacatgtttgttgtagcggatgcttatttattttcaaggagctgtttctcctcattaatttgtcatgtaatacatagggatgctctgttttttatttaaattgttcataaacctcagttttttttactttttatatttattggtcaaagaataatcttataaacaatttatgaatgtgtagtttttttttttttttgtcataaaaaaaaaaaaaaatatccat

SEQ ID NO: 45900 - DNA, 183 bp, Glycine max
  Clone ID: PAT_MRT3847_141448C.1
tcgtttacgcgaaggctggggcacgtatgcagcagctaaattttgagaggcctagtataaacaaatgggacctgcctagttggtaggttggatgtaacccatgcttgacggaaagagcaggttaggcctaacgatgactgtgatgaggcaaacagggtcattggcggaagtaagatgaaggtg

SEQ ID NO: 45901 - DNA, 1295 bp, Glycine max
  Clone ID: PAT_MRT3847_141449C.1
atctcgttctcattcctctgtataaataaaatacattgttcttccatcaagtttgtgatgtgagagaagaagagatgggtagaggagaagatcgagaaggggtcgcagtagccgggggcttcttctggtcctacacagacgaaccccatgccacacgacgtcgtcagatcctctccaaataccctcaaatcaaacaactctttggccccgaccactctgctttcttcaagattagtggagttgttctgcttcagcttggtacgggtgctttacttcatgatgctggctggctgaagatatttttagtagcatacttttttggttcttttctcaaccacaatctctttttggctatccacgagttgagtcacaacctggccttctcaaccccagtctacaaccgttggttggggatttttgctaacctccctataggtgtgcccatgtctgttaccttccaaaagtatcacttggagcaccaccgcttccaaggtgtagatggcattgatatggatgtccctagcctcactgaagtccgtcttgtgaaaaatattattgcaaaaaccatttgggtctttttacagctctttttttatgcacttagacctctctttcttaagccaaagcctcctggcatttgggaattcatcaacttctctgttcagatagcacttgatgtgtcaatggtttacttttttggctggaaagcccttgcctatttgatactttccacttttgttggtggtgggatgcatccaatggctggtcacttcatttccgagcattatgtgttcaatcctgaccaggagacttattcttactatggacctctgaattatctcacttggcatgtgggataccataatgaacaccatgatttcccaagaattcctggaaacaagcttcacaaggtgaaggagattgctccagagttttatgataatttagcgtcctacagatcttggagccagatcatttacatgtacattatggatcgaacagttggaccttttagccgaatgaagagaaaatccagtaaagccgaatagatgttcccatacacatcattcatccccacctttccctcttgtgatgtctcctactttgataatttttgtgcaagtgaagaatggaatgtagtttttgacccaaatagcaagtcatttgttcattagccaacattttgtataaaatatcttggttttggggcttcctccttcaattcaaatgcacacatgttctccctcccccctatctctctcggacacacatgctaaaaaatgttcatggttcat

SEQ ID NO: 45902 - DNA, 435 bp, Glycine max
  Clone ID: PAT_MRT3847_14144C.1
cggagccggaattccccgggtgcgacccacgcgtcccgaacttaccatgcaagaaggaaatgcgcggcgcatcagaaaataccatatgttcaagtgcagctctctctccttctgacaatcaggacctttccggctttcccattccatattgctggctccagggagcgatcacttggccttgctgtgttgaccgaatcaggcgccctgaccccttcgaatgggtggagctgagggcgcaggcgccttgctaaccatgtgcacgctccagccgccgcagatgccgacaccgcagacagctcctgcacctgcttgattgaggattgcgacagcgagggcggccactaggaggagccgcctatcgagatggaagagtcccccacccgcctcgagggggagggcgttacccacctcggaaaccacactgcgcctgcagcg

SEQ ID NO: 45903 - DNA, 163 bp, Glycine max
  Clone ID: PAT_MRT3847_141450C.1
acgcggagaggacaaagcagacccagcgccacgagaccaaccacaggcagaaaccgaaacagaccaccaacaagcctagaacaagggcagaccccgcaaaccaaccacacaaagacgcgcaagactggaacgacgaccacaccaccactgctaaaggccaaaa

SEQ ID NO: 45904 - DNA, 411 bp, Glycine max
  Clone ID: PAT_MRT3847_141451C.1
tccgggagtatataaagaataaagtcaagctttcgggaaaggagtgaatgatttgaatacttcttcctctttcccttcttctcaagctctgactctgactggcgcagagaaagtctttcttacggccagacgacttaaacacagcgctctgatctccgacctcctaggacccaagcaaaggattgacttcgctaacctcagcttaaccgaagtcaatattctaacagaactataaagggcataccttgaatacagatcaagattcactcatgcactctggaacttacttaggaaagctagccttagcccaaaaataaaggaaggcagccgaaagccctacaaagaatatcgcttatgaacaggcccaggggttgtcagttgagaaggaagtctttattgaattgatcatag

SEQ ID NO: 45905 - DNA, 211 bp, Glycine max
  Clone ID: PAT_MRT3847_141453C.1
aagctctcttattacttcataataaacacttatattacttaataagctctactctagcaagaataatcttcacacatttaccataaaaccacttgtcacagatatcacagcaaatccagaattcatcagtaccataattctcaccacataccccacacaagatatctccatagtcatcattatcttactcttctagttcttcatcctcatc

SEQ ID NO: 45906 - DNA, 184 bp, Glycine max
  Clone ID: PAT_MRT3847_141454C.1
gtgcttatgaagacgacacgaacggggagtttctacaagtgagtgttgttcgatcgatgataacgtgagagaacagtgtcgatcgaacaatgagacggtcccttgttttctttcgttgcgtacaagttttcggtagcaatggcaactgcgcatgccgtaccgtatatgtttccctctccgaatg

SEQ ID NO: 45907 - DNA, 332 bp, Glycine max
  Clone ID: PAT_MRT3847_141455C.1
cttttttgttgctgagtaccagggattcaaggctttaataccattccataataactttatagtaggtcaagatgttaggtgaaaactgagaatttgcttttgtgtctgacattaagtcataattctttatttccaggcactgcttcaagtgaaagaatatttacagaaggagctaccaacagaacctgcagatggtgaactagctgatgcaacaaacatgagcattactcaagtaaagaaagcaatacatgttggtcaagctgctagaaacaaactcataaagcacaatctccggcttgtcttgttcgtgatcaacaaatattttacagatt

SEQ ID NO: 45908 - DNA, 258 bp, Glycine max
  Clone ID: PAT_MRT3847_141456C.1
ggctttggtaggacaggcgcccccttgcacgacggacacgaaacaagggataggcacaaaaaaaatcaggaatgggcacacgagaccaagtggggattaaatccacacaaacgcaatgccgcaaataggcggacggggaaaccgacttaaccccagggcagcttaccgaagtgtaaaaagaaagccaatcactatagggggaggagccagtccaaagaacgaggggcgtacgaataagccaaaagctgaacgttcaat

SEQ ID NO: 45909 - DNA, 568 bp, Glycine max
  unsure (1)..(568): unsure at all n locations
  Clone ID: PAT_MRT3847_141457C.1
ggcataaaaaaaaggatctttagccccgctcagcgccccaaaactggacatcatgtctttgcattcaattaatatctactattatcccaaaaaaataaaaacaaaacatttagttttaggagcatttgcatcctgtctttctaatgatatattatttcatccaacatgctccccactaaacaaccttctatgttgatctctctctctggcctctctgactgcgagtattcatttatgttacagggatttttctcctttgtttttagacaagtctcattttgtgttatttttcccctttcagatgaaaattgctttggaaacaaatcataattccgccttaagtataaattggatgaagcctccatcacaaggaaaatgggggaacaaaggtatcttgtgaagtccatcactccacctaatccagaaacactagtggttagaagatatattgggcagagactactaancttttcttctaattggaatcagttaaacaggtcattacaacaccatcaacttaaagggggtggaagacacaaacccactccttcccaataaagaaccaggc

SEQ ID NO: 45910 - DNA, 174 bp, Glycine max
  Clone ID: PAT_MRT3847_141458C.1
ctcgaggaaagacatctcccgctaactttgtcgggctatatcactacttttatttcttgcctatggcagcctacccaaggaggctatcatatctttattcccaaacctgtcagctgatctgggaaccattggagggtcccactgtgcagctgaccttctgcgttttcatgattg

SEQ ID NO: 45911 - DNA, 179 bp, Glycine max
  Clone ID: PAT_MRT3847_141459C.1
aaacaataaataaaattattacagtgaaccccacccaatttcgcggtgacagggataaccaaggcccaccaggccaacaaagggaaaaatgaccccccccgtgggacagcccgcgaactcgggaccaggcccggaaagatcgccccttcccccaagggggcgccctgtaaggccaatgg

SEQ ID NO: 45912 - DNA, 253 bp, Glycine max
  Clone ID: PAT_MRT3847_14145C.1
cgcaacatcttagaaagaatcccacgcgaggagcaagatggaggggaaggagcaggatgtgtcgttgggagcgaacaagttccccgtgagacagccaattgggacagcggcgcagtgccaagacgacggcaaggactaccaggagccagcgccggcgccgctggttgacccgacggagtttcaggcatggtcagtttacagagctcggatagcagagcttgtggccactcatctgtatctctacatcactgtc

SEQ ID NO: 45913 - DNA, 377 bp, Glycine max
  Clone ID: PAT_MRT3847_141460C.1
ttaataaaaattgtttcaacttctttctatgagggtgctacgcctcattagaaaactaggacattaatggggatattagatatccttttaaaatcagtgatttcaagaggagctaaagttcttctgctgttttctgaaaaagtgttgacataaggagggatgttcactattcaccaattaacaaaataggagcaggattcacttctatttatggataaatatacccttagggcaccttacacctaaaacaaatttccttgcccatgagcgccgataggaggtggtcattcttcaagcaggaacccaagaggaaacagcaaaaagaattgggcctttccattcttgcaaaacccatttgccatccttatcaaccacaa

SEQ ID NO: 45914 - DNA, 279 bp, Glycine max
  Clone ID: PAT_MRT3847_141461C.1
aggaagtaggagtaagaaacgcgttgctttgtgccaccattgatgaccttaccaagctcttgataccatagaagagttctaacagatcataatagaggatcttttgagagagaaaaactctagaaagaggaagtaaaatttattattggcccccaaactgagttacaactcagtatatataggcttatatagttagttatgactaactaactcagaacataaaactaaatcctaactaactgacttaactgagggtgaagttgaatactgcaactctct

SEQ ID NO: 45915 - DNA, 480 bp, Glycine max
  Clone ID: PAT_MRT3847_141462C.1
ttttttttttttttttttttttttttttttttttttttttttaagaccaatcagcacttcagtagtttgatatgggtacctgggtaattctaatgcaagaaaaaaaataccccttggttcatgatgcagggcctacaatcagatggtccaatgatagcagtaaagcagtttttttcaaaatttaaacaaggaaatcgggagtttgtgaatgagatgggactgatttttggacatgaacatcccaatcttgctaagctttatggatgttggggggggggcaaccagctaatactgatttttgagtccctggaaaacaattgtctatctcgcattttttttgggaagcttcatgatgaataaactttagccctacgtgccatttgaatcaaacatttgacataaccaactaactgattgtccttcacccaatcacatacagggggggatccaaacaaaacaaaacttgactggccaacaagg

SEQ ID NO: 45916 - DNA, 389 bp, Glycine max
  Clone ID: PAT_MRT3847_141463C.1
tccgagtccattttgggtgttcgggaaaatttcatagcattcacccttcaggtgcatacacattattttcaaaaactggttatgatcagtgaattttttcaaagaaaagccggaagttatttctttttaaaaacgtgctggcttttcagccgaaagatatattttctctccgcattatttctttgcctttttaagttattatcatttgtttatttccttctttttcttttctttttctctttgaacaggtcatgcggacgagggcgcacactacctacttacgtctaaccacaaggtaaacgaaaaaacgcacaaaatggtaagtcgtaaaaaaaaaacggtgacgaaataactgagagccataacgcaaaattctaatagaaacaaaa

SEQ ID NO: 45917 - DNA, 584 bp, Glycine max
  Clone ID: PAT_MRT3847_141464C.1
gatccccttgagtgcttgaggaggtaaaatccaaatctatcttggtctgcactcaaagaacaagtgctgcagctttaataccaaatccacctattccccacaattctcatacccctcaacataactattctcccttcttctcaattctctcattgaagatgtctttacaagttcagccacagacacagccacagccactgatgcagcagcaacagcaacctgtccaggtctatcctaccagtgtcacatatgagtcaccaccccaccattcaaatggctcttttgggtcagtttttgttgttttggctataattatagtcatttctgcagttgcttgctgccttggaaggctttgcaaccgtcgcggtggccacagccacaaccagaaacatgttaagccacaaaagaagcagcagcagcagcagaaccaccacaacttccgtccaaaagaagtggacatcgaattcgggtttgacaagagaatcgcagcttccaagcctaatggacatggagcaggcgcgggcagcgggcccaagccacttcctcatcatggtgacatgagaacttttgaaatgaagcttggc

SEQ ID NO: 45918 - DNA, 430 bp, Glycine max
  Clone ID: PAT_MRT3847_141465C.1
tcgcccacgcgtccgcgcatttgagaggtggaaggtcaattctgatggttacattttcgaataccattgtgcatattgaaccaaacatgtattcaaggtttgaggttttgagtaccactaccaatggtgattgtgctcatggaaaagatcttataatgttttaagttaatgaagcatgtgctgttgttgggttgacattaagttacactccatctacattgttgaaatctggtttggaaaaagacagaaggttaaatgtggaatatttcggaaggatgaattacagttgctcataacgttaatcaggcacaagagaaagatctgttggagggaaagagatccttcggtattaaatgttgctctagatgggaaaaaggttgctctacaaaaacacaatttggtagtggaaaaactttcaaatatagatata

SEQ ID NO: 45919 - DNA, 362 bp, Glycine max
  Clone ID: PAT_MRT3847_141466C.1
gcttgttactctcttctctctcaaaacaaaacttgaatccatccatactctacataccccttgcccttgctttgcttctttctttctcacaagcaccagcagcactcaaatcaatcaatcgtttttaatgcccttgcttctccctctttccgtgtgtatgtaaaatctttgtttttatcagaggtggtgcagaaagttgtatctcagatccctatatacaccgaaaacgatacaactgtgtgctgtgtacactgtgcactgtgcttctccctctctctctctctctctctcacaaaatcataatcattttacatattacacctattaccgaatagagtggtcctcaacctcaacctaaaagc

SEQ ID NO: 45920 - DNA, 481 bp, Glycine max
  Clone ID: PAT_MRT3847_141467C.1
gggacgcttgggttgacctggtaaggacgcacgggtccccccgggaataccagctctgcctatggggagcggaataaaatctcgtaaaaagaatggaaataaaagttgcctgaataaaagtgaaatccgctcccagtgcgaaacagcaaaccagccaaaagcctaaagagaaaagccgggggagccaaaagagggaactaccggggatcaaatggggggggctaactgccatttttcgagtggggaaaactgcccggccaccagcataaaaaaatgggccaccacccggataaaggaagttggcaaatcgggggcaaggggggtttgttttttgaccaccgagaggggcaacattttatcgacataaaccgccaagccctgaaagactttcaccaagcggcccagaaagatttgccccaaggggccaaaactgtgttggacggcggggaaaaaatccatataaaaggagctgaacggggga

SEQ ID NO: 45921 - DNA, 459 bp, Glycine max
  unsure (1)..(459): unsure at all n locations
  Clone ID: PAT_MRT3847_141468C.1
attcccgggggcaccccgccggcggggcctaaaatcaaacttgggtaaggggtctgggggtgcantttcatcctcttctggggggggttcaaacttttactctantgcaggggcgaggggacctcttcctcattacattgccacttctcaaatccaccatttataactctatcagtagtgggcattttcagaacctcaacttggggggggggggctttttttttttttcatgagataaatcccancaaggtctgggaaattcaggttcataacatttttgttatttggtgaattctacttttgggggaaaaaacaccttggggggggagtaacaaggaggaaccanaaccaacatantgtggggggggggtttnngangaaaataagtttatatacttcattgggtgacttgggttgggttccatgctctcttttggggcttctgtgatgatcccttca

SEQ ID NO: 45922 - DNA, 845 bp, Glycine max
  unsure (1)..(845): unsure at all n locations
  Clone ID: PAT_MRT3847_141469C.1
cccacgcgtncgacggctgcgagaagacgacagaaggggattccattttctaaaatggcaagcaacaccaccatggtagacgagcgtgcaggggcggagatcgtgtatggcgcggaggaatgccaccgcagctccatggagctcctggaagagcttggattccccaaaggggtgatgccattgaaggaccttgtggagtgcggccgggttcgcgaaacggggttcatttggatgaagcagaaggcgccaagccagcacttcttcgaggcaaccaagaccctcgtgagctacgcggcggaggtcaccgcctatgtggaaaagttcaagatgaagaagatgaatggcatcaagagcaagcaagtgttcatttgggtgccaattgctgagatgagcattgatggggacaatgggaaaaagatactcttcaagacccctatggggcttggtaagtcctatcctgccacagcctttatgaccatagaggagaaggaaaagaacctgcagcttcagggtaaggaagagatcaaagatatatgattatttaatcacaagttcatttggattgagggtctagaaccatgtacttgataatttgtttttgatttttgaataatagatgaatctgctgagaatttgattataaaaaagtatagaatcggctagctagactggaatgtgtgttccctatatatgcaatgttgatttgatgatgatgataataatatgtattgaaagatatatgacccaaatttcagatgagaaaatcctagaaactaacagcttgtgcttgaaaatgtttgtgaattagtttatcattctagaaatgaacttccttttcttttccc

SEQ ID NO: 45923 - DNA, 218 bp, Glycine max
  Clone ID: PAT_MRT3847_14146C.1
tggaatttaatcaaacttgcaataatgggacattcacactgcaatggaacttttctgttggcagagcaacataaatgaatgtactcgattaaacaacggcaatggagcatactagttaccatttaccaggcaacttaggatcaaacggtaacaaaacctgattttatacaaacattacttgggtttggcgagccataaaaggaagggaaaaaataaat

SEQ ID NO: 45924 - DNA, 1646 bp, Glycine max
  Clone ID: PAT_MRT3847_141470C.1
tccttttcacccaattgattgggaagcgtccggtttatgaatcttatccttacttatcgtcggttcgactgctgctgatatgtccaatcttagactttcacttcacacttatcctctaataattcgtaatgaactcaatgttacacattaagaaatatcaaatattggttgatctagttattagatttaatgagtgaagaaaataaagtgtagatggattcactgaggaaggattttaaacgccatctgttgcctcgatctcataagtaagattcttctataacaaaacttggatcatcatgttcttagcatcttcttgtttgaatgatccctaccaattcttgcagcactttcggaaatgatcttgaacccacaagcaactggctagaagtgattttcagtatatgcatagtactcagtggactattgcttttcacattattgatttgggtaacattcaggtattcttacatgcagtcatggcaaagaagagaaagatgcagctgagatgtcgtgacatggaatggtggatgaggaggaggcagttgccatcgcgattaagacaaagagttcgccattttgaacgtcaaagatgggcagcgatgggaggagaagatgagatggaaatgatcaaagacttgccggaggggctgaggagggacatcaagcgccatctttgcctcgacctcattagaaaggttcctctattccacaacatggatgatcttattcttgacaacatctgtgacagggtgaagcccctagtcttctctaaagacgaaaagataatcagagaaggtgatcctgtaccaaggatggtgttcgtcgtccgagggcgcataaaacgcaaccaaagccttagcaaaggcatggtagcctcaagcatccttgatcccggagggtttttgggtgacgagctactttcatggtgccttcgtcggccgtttatcgacagacttccggcctcctccgccacatttgtatgtcttgaatcagcagaagcctttggccttgatgccaataacttgaggtacatcactgatcacttccggtacaaatttgcaaatgagaggctgaaaagaacagcaagatattactcatccaattggagaacttgggctgctgtcaacattcaatttgcttggagacgttacaggcagaggactaaaggtcctgtgatccctgtaagggacactaatggaggcactgaacgcaggctcttgcaatatgctgcattgttcatgtcattaaggccacatgaccaccttgaatgaaagctggtgtgtccatgttttttctcgttattgattcttgatcctcaataaaactgtgtccatgttgaagtttccgtggaagtcctggaatcattcatgaaatgtataaataggaaaagcaagaaagtgagtatgagtatttgaaaaatcactgaggccctgttctttcatttgattttaagtttagaataatgattttttcatgggatttgtatcttgagcaatcccctgacgaggctgttatgtgcttattggatgattggttgagaagtagtagagtcagttacttccagtttaatactggaatgagaatttaactatatattgtcaagtaattatttaattttataatacatgttaaaattagataat

SEQ ID NO: 45925 - DNA, 594 bp, Glycine max
  Clone ID: PAT_MRT3847_141471C.1
ggctcgaggtgtgtcttgaatcatcagaagcctttggccttgatgccaatcacttgaggtacatcactgatcacttccggtacaaatttgcgaacgagaggctgaagagaacagcaagatattattcatccaattggagaacctgggctgctgtcaacattcaatttgcttggagacgttacaggcagaggactaaaggtccagtgacccctgtaagggacactaatggaggcactgaacgcaggctcttgcaatatgctgcaatgttcatgtcaataaggccacatgaccaccttgaatgaaaactggtgtgtccatgatttttcttattgttgttggttattgatcctcaataaaattgtatttcaaatccattagacctgttgaaggtgaaatgtattaaaaaaaaaaaaacaacaaagtgagtacgagtaattgaaaaaattattgagaccccttctttcattgattgtaagtttaccataatcatttttcatggaaattgtgtcttgagcaatccccatcctgccgaggggctgttaggtgcttaatggatggacaatcagttgagaagaaatagtagagtcagttact

SEQ ID NO: 45926 - DNA, 500 bp, Glycine max
  Clone ID: PAT_MRT3847_141472C.1
gtgtcgttttctgttgctagtgccactgacaatatccaacattatcatcgctctttactctttcggagaaacacagaatccttctgaactcttagaagagcacacttttcgctaccagttacttccctctttcatttcttatatctgctaagtaaaatcaaaagggtgaatctgaatggtttttgctgttagtttctctcaaagcctccttctgtgcaagccatcatcatcatcatcatcatatcaggtcaagtgttgctcacggtcacagaacaaagaagccacgtcacatattcaaacaaagaaacggtgcttgaggtgcaacaccctttactcagatgaagataattccccacttgcttgctccttccatggccacaccaatggagataagggtctattttcatttgctccaccacaccgaggaattgatggggattggagtgataaatctggagtaatagtatacaaatggaatgagaagaatgacaggccaaaca

SEQ ID NO: 45927 - DNA, 444 bp, Glycine max
  Clone ID: PAT_MRT3847_141473C.1
ggcacgcgtccgtaattttagtggacgcacaaagaaaaacccaaagtatggaacaaatctaaagataccaatttcaacccataacaaaatatcccaaactatctatcaaccatcttcactgcgtcaccggatcgacctcaattcgacgcgtccaagtcggtttggcattccagctctctcctttgacgccctacgtttagatcagattagaagtaacttaacccattgtacgaccaacaaactactccaagtccaagaaggaaattaaatgtcctctgaatcgctcttaagttgtcactgatggggagtgggcattctcgtaagaaagcactctgcaaatgggctttcctaaatttctattgaactgacaccattcaacaactaagttgtttgttgcagggctttcctatgacgccaatgaactgattctcatagatgccttta

SEQ ID NO: 45928 - DNA, 385 bp, Glycine max
  Clone ID: PAT_MRT3847_141474C.1
aaaagggaaaaaaaaaaaccccaggggcatacgatttttttagggccctccaaagcaaatagtaatttttttgacaatggggggaatggttttttaaatagcatttccaacaaaaattcggaggttactttataaaacgggttattggaatttttcaacaatttcctgaataaacgggaatcccatttatttttctggtaaaaattgggggttcttggctggatacagggtgaaaattattaggggaaacttggtcaccctttagcataaaaaattttttggtggaaacattttataacataggaaaaagaagggcgtttccagtgttccggggcccaccaaagctcaatcaagggagccacttgaggattcacatgccctggaa

SEQ ID NO: 45929 - DNA, 422 bp, Glycine max
  Clone ID: PAT_MRT3847_141475C.1
ggtcaaattattgtcaagcgggtggaacgctcttcattatcttcacgattaccctgctcaatgctggcttcatagggatatacaatccgagagcgggtgactatacactgagttcaacacacagatgactaatttctatatggctaatttaatatatccaacagctaagactcattaaacagtatatatttaaacctattattatttatcgccttgaaatgttaacaccgggagcgctatatatgaacatatctatctacagcttttgagtagtatcactagagatagctagtggtatgagcacttaccaagattgacagtgtcatgtttctttgatgaacatggtgtggcaactatatatttgaccagagattatcagggctgcttaatagaaactgaacaatgatacttatgcggatcaa

SEQ ID NO: 45930 - DNA, 308 bp, Glycine max
  Clone ID: PAT_MRT3847_141476C.1
tttttgtcgcgtgcggctgagggtggactacgatattgggggcctttcttatactcgcttcgatggactgatccccatggccgttcagagcgggctggtttgaatgacacacaggctttggggcagaggtgagcgactgaaacgtgaaatgacgcccccagggtcactgagaagacaatggatactagcatggatgagagcatcttggtgggttatatgacaataccaacttagtttagaaaatctcctaccgcatcacatgcggtggcatcgggatgcccagtagatatacatattaacatcttctg

SEQ ID NO: 45931 - DNA, 402 bp, Glycine max
  Clone ID: PAT_MRT3847_141477C.1
tactataaggaaagctggcacacctgccgtaccggtactgccttttcgagtcaacccacgctttagttgtcccgcgagcggacgcgtgggcgcgatcatatgctgacggacctctagaacctggcccaaatgaaaccgtgaggggcccacataaatgtctcaattatttacaaccattttacgatcctgaaggtaaggtatggaaaataactgtactgcggtggtcacagacttgcaggatcattttcttttgcatgcttattatatttggtgaacactgttctatatcacatacaaattggtggctgacataaacttggtctgaaaagaagacaggtatctgcttaattgcaagcttaagctgagccaatcttgcaatatagctgccactatcctatttgg

SEQ ID NO: 45932 - DNA, 441 bp, Glycine max
  Clone ID: PAT_MRT3847_141478C.1
aaaaaaaaccccccccttcccccttttttccaacatttaaaagggggggggaatttttaaaatgggcagaccttcctcaccaggggggccatccccaatttccttttttgaattaacccacccaccccccaaaaaaaaccttaattcccaaatcttccaaaggattcccctttttaaaaaaatctggcattaccctgggaaacaaaaaaagctggcttaaaatttttccccccattttcaaaattttgaaaaatccccaaaaaaatttcaaaacctgtaaactgttggggattgccaataaggaaccccaaaccccatgaagtttgatttcccccctcaaaactccccttttcaaacccttttttaggcccccttcccttttttgggaaaaccaatccccaggaagggggttctgattttgcccccttacatgcctaaaaa

SEQ ID NO: 45933 - DNA, 487 bp, Glycine max
  unsure (1)..(487): unsure at all n locations
  Clone ID: PAT_MRT3847_141479C.1
gggtcctnttgggggtcgggggattcagttagacctatagtcgcgcgcgtgcccggtgttaaaaccttcgtacgcctgtcgcgccgctctattcgagacgatcgtgatgagagcgagcttgactttagagactgccactgatttaactttgtttttatgtgatggaagatcgtggtgagagtggagatgtgttttgagtggtgggggggtggttatgttcgtgtgtatacggtagcgattgcctctgtattattgcagattgcgtatttaaggatcgtgcaggtattgtgacggtgggtggaaattttttttgaccctctttgaaatgcttgctggtcgtggaacactatggtatgtagctagtgtgagtacttgattattctacctaataaattgttatggttgtgtgtaggtggcggttatgataatgtgtgcgaaaaaaggggtatttattttgcgaacttttaggcaattgattttgtaaggg

SEQ ID NO: 45934 - DNA, 1801 bp, Glycine max
  Clone ID: PAT_MRT3847_14147C.1
tcgctaagacattcatactcgagtcaaaggctggcttggctagcttgcgtctttgttaagactttgatgacatgttcacaaccccgcccgagaacctacttttttgtttcataggaataaaacatttactttgatcaccttttcattccttttatgtaaaaaaaaaaaaaccacaacacatgggtgtgtagtagaattgcagtgaaattggaaaaatactcaaacatggagcgctatgagatcctcaaagatattggttctggaaattttgctgtggccaagcttgttagagacaactgcaccaatgagctttttgctgtcaagtttattgagagaggccagaagattgatgagcatgtccagagggaaatcatgaaccacagatcattgaaacaccccaacattattagattcaaagaggtcctgttgacaccaactcatttagccatagtaatggaatatgcttctggaggagaactctttgagaggatatgcaatgctggtagattcagtgaggatgaggcaagatttttctttcagcaattgatatcaggagtcagttactgtcattcaatgcaaatctgtcatagagatctgaagcttgaaaacacactcttagatggaagcactgcaccacgagtcaaaatttgtgactttggttactcaaagtcatcagtattgcattcacaacctaagtctacggtgggaacgccagcttacattgcacctgaggttcttacaaggaaagaatatgatggaaagattgcagatgtttggtcttgtggagtcaccttatatgtgatgttagttggggcttatccttttgaagacccagcagatccaagaaacttcaaaaaaaccattggtaagatacttagtgtccagtactcagtcccggattatgtacgagtttccatggaatgtagacatcttctatcacaaatattcgtggcaagtcctgaaaagagaataacaataccagaaattaaaaaccatccatggtttttaaggaacttgcccatggaactgacggaaggtggaagctggcaaatgaatgatgtaaataatccatcacaaaatgttgaggaagtactgtctattatacaagaggcaagaaaatctcttaatgttcccaaggttggaggccttcttactgggggcagcatggacctggatgactttgatgctgatgaagatcttgaagatctacaaacaagtggtgaatttgtgtgtcctatttaagtgtgtacatgaacaagctgagttatagtttgctgtgaaaatgtaaatagatttttctgtaggggctaaaattccttgatggttaacttaattttcaattaagatcagtagccccatttgtatggcttgttatttattagttttgacatttgaaggttttgtttccttatgtttatttttccctcttccctatcacacgtgtggatgtgatcagatttaggaacttccgaaaccatgtgctgttttcctagagaagtaataccacatgttccaaagatgagaatataaaataaagcaagttgtggcaggttccacttttgcatcatgggaaactgagacatgggaagtaagtagacttttgttagtggattttattttatattgtagagtgggaattgagcaagcaatgctctccttggaggctttgccctcaaccgtgacgtcccccccattatgtaggatttcttttgtatatttacatatatcctttttttaaaaataactattgtaattaggttttcgattttttgagttgattataagactaatctttcacttc

SEQ ID NO: 45935 - DNA, 165 bp, Glycine max
  Clone ID: PAT_MRT3847_141480C.1
gcacgaggcaaactcaaatatggcatctttatttggttcgtgattttggcttctatcctagtgtgacctcgccatcatcgccaatggcttcacatgcttgaggctcctcaattaatttgcatatttgtaatttataaaggtctatttgtcttatttcttcttgtg

SEQ ID NO: 45936 - DNA, 570 bp, Glycine max
  unsure (1)..(570): unsure at all n locations
  Clone ID: PAT_MRT3847_141481C.1
tggcggggggatgctgatagtggcacgtatcataatgctggcaccgtacttggaggtagtgagagtgggagccatcgaagcaactccgtcaacctgcaaagagttcggacaggtggtggtggcttcgcgagacggccaggaatgcggtccgcacgatgctcaactcgacctttcccaaggaactccaaggatctacattatcaagcttgaaagatgccctgcttaagtattcgagcattacacatcatgcgatcgtgactcagtgcctcggggctatcggtggccatgttgggcatctcggagtgggcacgtgatccgttagccgattcagatgggatcaagggtgacacaggctagaagattgtgcagccacgttctggtcattcatatgtgcctccggccgttgacgatgtgcaagttttcaagatntcaggttccaaattgcttaagcttaaccggcgaacatggcacgccggccctatatttaggctgctgaatggactatacaatctcaactgctgacacaatgagactgagctaccaccactatttagaagccgatggatgatg

SEQ ID NO: 45937 - DNA, 170 bp, Glycine max
  unsure (1)..(170): unsure at all n locations
  Clone ID: PAT_MRT3847_141482C.1
atggctttaagagggcngtgcnaagnctgnagatacnccnnctgagttnagcntgantggggaagaagctgncaaagttntgggtcgtcaatttcagcccgnagntcatnctcanngatactnatganagaggctttcacctttaacataccagangctcgtgagataca

SEQ ID NO: 45938 - DNA, 290 bp, Glycine max
  Clone ID: PAT_MRT3847_141483C.1
agataatttgctataaaaaagaaagaaagagaatagagaaggcgttgaaaggtgttgaggcttggctcaactcaatttcccacacaacacgcatcataatcggagcaatctctgtttcatcttctttctttctgattctgattctgatgggtatctcgtggagtggcaacagcagaagaagaaacaattacctccaaaaccgaccaccacccccttcttactactaccctcctgaatcccaccctcctcctccgctagctcgcacaccaccaccgcagtctcaaggctac

SEQ ID NO: 45939 - DNA, 412 bp, Glycine max
  Clone ID: PAT_MRT3847_141484C.1
ggttcaatagaagactaattgggtagtgtcaatggaagaaatggagaggatatttttccgtcttttgggactaggcattgtgggagataaacttattgttgaaaagaaaccttaattgcggtcacccctagcccgtggactagagaaatgctaggaatacactttattctattggttgaaatttattgaaaattacaaaattttgtggattttacatcatatttaatgtacctctcctgatttttgtactttccaatagattttaactaaggggagagtgtgtgttagagagtgtgttcccagcactcctcttgtggcttaagagttggttgctagtgtcttagaaaggaatacctacagaaggctgattagaaaggctgaatgaagtgtcatagtttgtctcgatacctat

SEQ ID NO: 45940 - DNA, 408 bp, Glycine max
  Clone ID: PAT_MRT3847_141485C.1
agatcgagtcatatggcaccctattccgatgcctcgatgagaatatcaatacttcgaatagacttgaatactaaaataaccagttatgaagagatacaaggaggcaacttcactgccaactacagtcatcatagttgcgcctaccggtctcgaccctattgcagtgctcattttacttaccatatattgcaagatgaggaccaaacgacacgcaaaatcttctaacggacgaacacaaggatgaatatgaagtggctgaaacgtcggaatgtaaccatgccacactgaacgttgcagcacaacacgccttaggctgtaagtagctcactacagatgtaactctgaaactggagaccaagcactttaatggacgagaaaatggtgacgataggactgcaagagagcctg

SEQ ID NO: 45941 - DNA, 344 bp, Glycine max
  Clone ID: PAT_MRT3847_141486C.1
agctcgattcgctcagcttaaatttaatgcacttttttttttactcaagaataaaactcaccagggaggggtttgtgataactctcgaaagctgataaaatgctaaatgataacaccaactacctgacgcccacctatcaaacgtctattacaggaaagtctcagaacctaaaacccttcaaaaaacttctcactgaagagaacatggatacaggctgtgataccccaattcatgtgcatactaacagtgtgggggtcaccaacccatatctatatccttaccaaaagctcaacgaccccatactcgtatggtaggaaatcaatcctcaacctcccaaaaattc

SEQ ID NO: 45942 - DNA, 259 bp, Glycine max
  Clone ID: PAT_MRT3847_141487C.1
cggcatagtcactcactcacatattgaaaccgaaaccaaaaacctcgccgtcgacgacaacacgatgccgagcttcaggatgagaaacttgttatccagtgttaaaaagaaaaccatcgaaaacagaaacaaaacttcacaaactgcatttccattacaaaagaattagcacgtttagtggaagaagaagaagaagaagaagaagttaacgaggaaggcttcaacatcaaaagctctgccccgtcacacactcacggtg

SEQ ID NO: 45943 - DNA, 132 bp, Glycine max
  Clone ID: PAT_MRT3847_141488C.1
cccacgcgtccgttacgagggtgaagagtgtacaagaatgtgtcaaagggaaccgtacagatttttaagtcagtacggattacatacatcacatgctttaacatatgctcgaatctggtcaggaattgcctt

SEQ ID NO: 45944 - DNA, 413 bp, Glycine max
  Clone ID: PAT_MRT3847_141489C.1
agaccaattgaaccaagcggaggcgctttttatgtaatggacagtcttcccgaatatcatactatatttatgctaaaacaattgtaccagttctagcctcaaagccaacccctcatcggttataaggggcaaagttaaaaacggggaactattatattaatttgcactttgtaccaaagggtcaacataaaaaatactttgatcaaagtgccttgagttcgcctaacacctgcgactgtaagagctcttcccaggcaaacaaaggcgcaccttcctgtttaatgcaaaacggtgagaacctatttgtcccaaatgcatggataaatgagaatcgccagtgctgactttaccacgcaatgtactggcggttatatcttaaactccgaactgcgaatactcgcgcacatgtttcc

SEQ ID NO: 45945 - DNA, 1140 bp, Glycine max
  Clone ID: PAT_MRT3847_14148C.1
gcgataagtgataactgcaaacttattgaatccttaaacaatatgaactctagaaataagagttagttgtttagttgcacattttctgacatggtgtttcaattggaccctttgtggcttattacagaagatacttagtgtccagtactcggtccccgattatgtacgagtttccatggaatgtagacatcttctatcacaaatatttgtggcaagtcctgaaaaggtaattgatttgatttctaaaatctaattgttttctacatctataaattcctactagatagaagatttaattgcttaaattctggagcacactgtttctataaaaataatcttcatatttattctcaagtaacttaaaagttctgttattctctcaccagtgcatgttttggcttcaagtatgtgtagtttgtgtgttttgggcacacttctagcgatgcttattattctttacaccatctttggcatcttgttgtgaatcttctattgaaatgtatgtagcttcctttcccattgtattgaaccatttatggcattttgcagagaataaaaataccagaaatcaaaaaccatccatggtttttaaggaacttgcccatagaacagatggaaggtggaagctggcaaatgaatgatgtaaataatccatcacaaagtgttgaggaagtcctgtctattatacaagaggcaagaaaatctcttaatgttcccaaggttggaggccttcttattgggggcagcatggacctagatgacttggatgctgatgaagatcttgaagatctacaaacaagtggtgaatttgtgtgtcctatttaagtgtgtacatgaacaagctgagttagctgtgaaaatgtaaatagatttttctgtaggggctaaaattccttgatggttaacttaattttcaattaagatcagtagccccatttgtatggcttgttatttattagttttgacatttgaaggttttgtttccttatgttcattttgccctctcccccatcacacatgtggatgtcctcagatttaggaacttccaaaaccatgtgccgttttcctagagaagtaacaccacatgttccaaagatgagaatattaaataaagcaagttgtggcaggttccacttttgc

SEQ ID NO: 45946 - DNA, 431 bp, Glycine max
  Clone ID: PAT_MRT3847_141490C.1
acgagaaaagctcttaaggaattgaattaagttttttctttaaattttgttgttttgcaatgataaaaattgtgggtctgatggtaaataaataagtgtaaaggcttggattcatcattcttcaattttcattggacaaattgtagaatctaggacttttgtttgcttaatttttttaaaatctttttcttatttttttttaaaaaaggtttctcatttatcctagtgtttgtttgttaaacaactggaggcttttgaactttgaagttattgaataaatacatagtatataagcacttatatataagttatttgtataatctaagttgatttcaaaaactaactggagagttttaaaataagttgaaaattttcataagctcttaaaaacccgtacacaagtgcttatgtcactactcatatgataaatc

SEQ ID NO: 45947 - DNA, 221 bp, Glycine max
  Clone ID: PAT_MRT3847_141491C.1
aattcggctcgaggcttcttcgtggtcttgatcattgtcacagccgtggtgttatgctccgtgacatcaatggctcaaatcttccgggtgacacttatggcaatctggagagggttgatcgcgggcttacacctttgtttcaaccatcttattggcagactttatctattcttgtcgtaaccttcgaataccgacacacctgatcttttgctatgctctac

SEQ ID NO: 45948 - DNA, 371 bp, Glycine max
  Clone ID: PAT_MRT3847_141492C.1
tcctacgcgtccggtttttgacacactgtggttggaactcaagtttggaagctgcatgtgctggtgtgcctatgatgacctggcctgtattaggagaccagtttttcaatgagaaacttgttgcgcacatactgagagtaggagtgaaggttggggtggaagtttctgtggcgcgcagtgaggaagataagaaagctcttttggcgaacaatgaagatgatgagagagctattaacgggtcaatggacgaaagtatatcttgctgcaaaatgagggcttagtcataatggaccagctctaaaggatggtactgctgtagaggaaagtgaaccttctgaaaacaatgttatagtaattatgctagcaacgac

SEQ ID NO: 45949 - DNA, 818 bp, Glycine max
  Clone ID: PAT_MRT3847_141493C.1
cttacttcatatgttccactcaaactccctctcctttcccctgctttgtctctctcacacattcacaactccatgcactttttctctgtagctatctaacaacttggcctagaataaaatgggcaattgtcttgatctttgtaaacccagttcagggtcttgcatagcaaaaaaggttaaacttgtgagggtagccaaaccagatggtaagatactagagttcagcaccccgatccatgtcaaagatatcttgacaagttatccagcttatggtgttggtgtttcaaagaaagtcacagaacatctctccccagatcatgaattgaaggcagggagattgtactacttgcttccctctttgcattcccctccaaatcttaaatctttaaagacaggtggagggataaagaggatcaaagttataataacgaagcagcagctgcagcagttagtgaccaaacagatctcagtagaggatatactatcggaggttcaaacggttggtgttaagttttcaagcaatcagaagacaaaattggactctatacccgaagaagatgagtaacatataaaaatactggtctctctctctcaattttctagctgtttaagctttccttccttctctttgttattgttccttctttatcttgtagtcatggaacacttgcccgttgttgtaatgctttactttttttttaaggaagtttggttgtaagtaccgaaagaaatgaaatatgtaaaagcagacatagaacctatagtatagataaatagtttaaggtagtttctaaattttgcattccctttgcattggt

SEQ ID NO: 45950 - DNA, 192 bp, Glycine max
  Clone ID: PAT_MRT3847_141494C.1
atgaggaaggaagattagtttgagggcatacaatatagctaataatgttaatctgttacctcacccataaagtgagttttacatatagacatttgatgaccatttcctgcagctttatacctctcatctaaccttcgaatacaatacgtatcgccctgaatcgacctatatctatgttctttgatccttcat

SEQ ID NO: 45951 - DNA, 499 bp, Glycine max
  Clone ID: PAT_MRT3847_141495C.1
tgttgatcaagacctttgacaattcccacaaacaaaagcaattgcctagcttttgtttctgcattagcagagaatttcattgaacctgtacttgttagatttctgaccaatgcatatgatctgcatgatgttaaagccctgagaactagaactcagcttctgttggaaattgtgaacaactgcacgcatggtttcttttcctctttctcaattttgttcttttgatgttagtaccaattgttttggtttgcttacatttttctggtgtgtttttgtctaaattaatgggcttctatcctttgaagcaatattgtagctgtaatctttctaatgtctgatatatgtatgttttagttacatctggaattaaaacagaggaagtggatctgttctccatcctatgttaaatgtgcatgcgttgagtggccttgacgacaaagaaatttaccacacctttgtcaaagtcataagccaatgccatatgttggcatatctggag

SEQ ID NO: 45952 - DNA, 241 bp, Glycine max
  Clone ID: PAT_MRT3847_141496C.1
ctccggaggatggcacagccatatgacaaggcgggaagcggtgacaagaaaacgctgttaaccgaggaggatctggagaatttggcgcaggatggcatggcgatgtaaaaaaatgagggtattgttgtcatttctttttgtagccattttatggcggtagataacttgtttgaagcatcggcattaccttgtggggccaaatcattcttaaaaaaagacaaataaaaaggggggggccccc

SEQ ID NO: 45953 - DNA, 393 bp, Glycine max
  unsure (1)..(393): unsure at all n locations
  Clone ID: PAT_MRT3847_141497C.1
tttttgatccaattgataaaattatttttgtcggaaacgtggttttgcaatgaatttccaaacttgctctttgagacccaagtccattttcaaccttattttgccggtgttgatgatgatataccattaaggttacattacatggacatggttccttcattcaactttccaagcatagagaaacaagcaaaattctgatgacccaccaacactaaacccctccactgatccagaactccttgtctgatgaacagtagatagaggaggtgatgaggatgataatgaaggtgatgaagatgacatanaagtaatagtagtagtactagatgacaaaattggcttaaaaatgaacaaagcatgctttaaccaggactaanaagccaatcatgaaca

SEQ ID NO: 45954 - DNA, 470 bp, Glycine max
  Clone ID: PAT_MRT3847_141498C.1
aaaatacttggtgagcttatgcattgtaatttgaagcatggcaggttgctcaaataatgcgaccactattttgagtgtgaactggatatgaaccttgccttaggtttttaaaacactcaaacctagacgaaatcccttgattcccaaaatatagaaactttggatacatgtattactgtctcttgcagggtagctaataacattctagaatctctaaccttggatatcttcatcataacaccaatgataccacttgttactaatgggtccagaatatgtatgagaagtgactcaaatgttggttggattgacacttattattagtaagttctatattcactttctagaattgaataacatattgctaatgcaagtcatgaccaacagatgaatttctttttggttttaataaatccatcttatgcaaatccaaacttctcacgttagttaactaggaattcagcaacagc

SEQ ID NO: 45955 - DNA, 415 bp, Glycine max
  Clone ID: PAT_MRT3847_141499C.1
aatggtcactttaaacagggtcatcctgtactaaaggctgtcaatcaaaggctcaaattgctgttctgatcagcaaaatgggctttttacataatatgagatggagcttacaattgcacatacttgactacttacactgtgcacacaccaacatgtgctcataagctaaaaggatgttcataatgaggatgctcgatggaagaatcaagcccacagttggcggatacatattaaccagagacttgacaatataatcacactgagaactgcactggctgccaatctccaagtatgcttgtacatttacctcagtcgcatcaatatgttcaatatgctcgcccttgtgattgaagtcacacaaaccatttacatgagtcttatcaccatagatgggtgccttaaatgtgtgatgctt

SEQ ID NO: 45956 - DNA, 653 bp, Glycine max
  Clone ID: PAT_MRT3847_14149C.1
atgacttgatctcagacaattcaaggtaagaattaccctagttaaaggtctcataaacctctgtacattataatttataaacataaacaacctgcagctttgaacttggtgtgaacagatttaaaagtgctaccgaaaaagctaaaccttactaagcagtttctccttcagttgttggaacacattcgataggatcagaaactttacattcaatggaatcagaaaccttgcattcaatgggatcagattcaatgtgatcagaaaccttgcattcaatgggatcagattcaatgtgatcagaaaccttgcattcaatgggatcagaaaccctgcattcaatgggatcagaaaccttgtgattagcattcacttcattcaaatgttttacttggtcctccaaaaccagcaacctctcacttagggattcaactgcactcctatgagcttcaaatttatcaaaccaagtggactcaaaatctgtagtcttcttttcaaaatctatcatgaaatctctcaactttgccctttcttctgcttccttcttcagacgttccctttccacctccaccgcagtcaaaacaaggcccccagacccaggaagatctttataaagtggttcattatcaccttgaggacattgtgctctatattca

SEQ ID NO: 45957 - DNA, 402 bp, Glycine max
  Clone ID: PAT_MRT3847_1414C.1
cccacgcgtccgattttaacatatgagtaacatagcgggttcacaggccaccgacgaggatgttctccaccttcacttcaccgtcgctggcgtcaagatttccgcactagcgctccggcggcaccatcgacgtcactggcctgatgcagggcaagactgatgccaacgccatcatacgccttcgcccttcccgtcgaaggcaccaagattcgtgtcaatgcccatttttttttcatatttctgaattccattcatgtgcttcaagtcctctcttgattcacacctgttggattttctgtggaacaagtattggatgaatatgttgttgttcctctgttgggtaatagagattatgttactggacaaatctctgatttaggtactctttttgttgcagtatat

SEQ ID NO: 45958 - DNA, 599 bp, Glycine max
  unsure (1)..(599): unsure at all n locations
  Clone ID: PAT_MRT3847_141500C.1
tacggctgcgagacgacagaagggcctctacctattctctgcctctctcttctctccatcccctggcttattggcatacaagtcaaatttccctcttgatagcctttcatgtgattaggtacattaagcatttgattctctttgttcttccctaatataaataaactttagtaatatgtgattgcttaataaagacccactaattaaaagggtctaacttaggaaataagaggaatactaggggatttggacccaattctgttaatgacagaaaatctattcatcagtcagtaattaaagggaataagggaagttggttagagtcagttgagggttgcgagaaggaagttggccttggaaggtcaggtcaatgtaaagcggttgcttgtatgacgcacaaataaaattaaaccaaatnatantnagatttagaacaaaaaatggcgcccaatcttatntnaaanaataaggggacccttcatttttttttccccnnntttttttnnnnnnnnnnnnnnnnnnnnnnnnnnnnnnnnnnnnnnnnnnnnnnnnnnnnnnnnnnnnnnnnnnnnnnnnnnnnnnnnnnnnnnnnnnnnnnn

SEQ ID NO: 45959 - DNA, 411 bp, Glycine max
  Clone ID: PAT_MRT3847_141501C.1
gggggggtttttttttgtttttttttttttggggaaaaaaatcaaaggccagaattttttttttttttgctacccaaaaattgggaaatatttttgtggcttcccccctttggaaattaattcaaaaatttccccctttaataaaattgcccaatggagtggggaccccccttaataggctttaacccccccttccttccttttggggggccctttggattaaaatttaaggggggaacttcccctccttgggaatcacccatatttgggaaatctaaaaagggggtcggggggagcctcatcaattctccttggaagggatttgggggggtgaagccatggcccccccaccgaagggctgctttgcgctatactatcttctgggaatgcaaaaaaaacttgagtttgact

SEQ ID NO: 45960 - DNA, 411 bp, Glycine max
  Clone ID: PAT_MRT3847_141502C.1
tggcttggaacctttgggctgatttatgtgcttgtcgtgagaagatgatagaagggggagcgagataacactatatacaacacaaccttaaaacgagcttcaccatcacagtaacacgacgggcgatatcgagactaaattactagccgaagcagctacacgcgtccttacgaataacaataacagtgtaaataattatatttctttaattgatactattaagctactataactatatccattaactccgattaagtcttacgtcggccatccccctacacgttcccttcccggcgtataagtcccgtctcggaagagcccgagcaaatataataaggatctataaatctctcggtacggacctaacccgacgttccttacggtgccctcatcatctcggcgtgcggtatc

SEQ ID NO: 45961 - DNA, 454 bp, Glycine max
  Clone ID: PAT_MRT3847_141503C.1
ggctcgaggggggctatctgtgcccgtcagatgacgatgacggaggctacgctgacgctctacacgcatacgcatcacctacccttgcaagcgtcagccacgctgtttaactaagtctggaaacgaacccacgagtcctaatctaacggagagagcgcacagaagggcgcccatagacgggctgagcgatgagttgaacgctatagctcgatgagaccttgactttgcttacactagaggaagggcgcgcgctggtttcgctgagatgccgccgcggctggatcattgcttgggaagaatgctcctgctgggatcagaactgaggacaggtgcggaaggagatataagggatgggagagtgtctgcgtaagctggaggccggagcctggcattgcaatcaaggcctatgtgtgttgatgtgatggatatggtgagacacgcaccttcttttttg

SEQ ID NO: 45962 - DNA, 462 bp, Glycine max
  Clone ID: PAT_MRT3847_141504C.1
atgaacaagagcacaacataatgataaaagagaataaagaaaatgtcacggtaaaattgcacactcgatcaaatggcttaactctctaacaagtccccagtggagtcgccatctgtcgcaatgtgggccacaatgggacgacgaataaaatatttagataaataaataaattgttttccaaaaaatgaaaaacttgggaagtcgccaccaacatttatttaaggatgttaccatttttagaaaagactttagttttatgataaactgtgtgaactcaagcaagttggagacccagaatgtcgttcacaaaatttactcacatgttattgaaacaccaccaagcaagttggagacccaacatggagtgcacatagtataagcgtgtactaaagaatgctaatgcagatttgaaaaaataaaataaatagttggcatattgctacgaaatcagataaatagaat

SEQ ID NO: 45963 - DNA, 202 bp, Glycine max
  Clone ID: PAT_MRT3847_141505C.1
cttaatgcctcacccacttccaccttattttattttctacaaccaattccctcatctctgagcttgtctccaaaacgatggggggaggaaaactccactttttatacttaaaaagaataccatcaatatacctataacacactaacactcaaacatataaattactacagcatcataatattccccaccattccaattcttt

SEQ ID NO: 45964 - DNA, 381 bp, Glycine max
  Clone ID: PAT_MRT3847_141506C.1
tcttttttttttttttttttctttttgcttttttttttttgtttcttgcctcaaacagtactttttttttgtgctcaatgcttatgttctccctcgggaaaagaggggggggtcctcctttattgaataatactctctccctgcagctttctgaaaattgctttttttaacatgaccttgtcccatacggaaaatgactgcttcttctgctttccctaaagcgagaagtttcaacggggacctgagtcctcccactgtggttttttttgacccaacggccaatacacctttttatggaaacccttttcagggatggtggggagactgcgcacttttttttcatggccgaccccccactaaccaaaaaaaaaaaactgttaa

SEQ ID NO: 45965 - DNA, 324 bp, Glycine max
  unsure (1)..(324): unsure at all n locations
  Clone ID: PAT_MRT3847_141507C.1
cacacactcactctcctnctctnntctatcgncngcnacntgngcnntgcantcattncaacctctcnantnngtcaaaccgactcnnccctnggatctcngcatggagacngntcggtttnaagtagaatgggnnagtngcnggccttgtgtttggaaagtacggtgtcgttntggagttgggaaaacaaataatnctgagagatggcaaccacgaacccttttganntgntnggtgacgacgcgangacgctnctcagctcatcgccgccgagcaactcaaggcggnggctgctgntgctgntgctaccgcgctcccaagaa

SEQ ID NO: 45966 - DNA, 230 bp, Glycine max
  Clone ID: PAT_MRT3847_141508C.1
ttttctgcagaattgctctctgttgaaattggatactgttactggcgcaatattatcctgagtgggctccaattaattgtcgagttcatcgacaaccaattcacattactgtagggaattatgtcagaaagcgagatgtcagcattggatatgatgcatgtacaaatcccaatggttgggggtcattgggtggtggccaaggtgggaattacaaacccaaatgtgggttt

SEQ ID NO: 45967 - DNA, 695 bp, Glycine max
  unsure (1)..(695): unsure at all n locations
  Clone ID: PAT_MRT3847_141509C.1
ggaattcccggngtcgacccacgcgtccgcaggctactaccatttgttatttgtgtttccaattccaaagccagttttccattttagaaatggagatagaacaagccactaccaatgaaaagggtgttaccgactatggtgatgctgaaatgatttcagataataataagagagggatgtatcttgtgtgggaagatttaactgttgtagttccaaattttgggaatgggcacacaagaagattgcttgatgggttgagtggatttgctgaacctaacagaatcatggctatcatgggtccttctggctctggaaaatctactcttcttgatgctctagcaggtagactctctagaaacgttatcatgtctggaaatgtgcttttaaatggaaagaagaggagattagactatggagtcgtagcatatgtgacccaagaagacatagtgttgggaacactaacagtgagagagacaatatcttactcagctaatctaaggcttgaatctagcatgacaaaagaagaggtgaatggcatcatagaggggacaatgttggtgatgggtcttaagactgtgggtgatcggctaatagggaattggcacttgagaggtataagcggtggagaaaaagaaaggcttagcatagcacttgaaatcctcacaaggccaagccctcttgttccttgatgaacc

SEQ ID NO: 45968 - DNA, 608 bp, Glycine max
  Clone ID: PAT_MRT3847_14150C.1
aggggggggggaaagggaacgtctgaagaaggaagcagaagaaagggcaaagttgagagatttcatgatagattttgaaaggaagactacagattttgagtccacttggtttgataaatttgaagctcataggagtgcagttgaatccctaagtgagaggttgctggttttggaggaccaagtaaaacatttgaatgaagtgaatgctaatcacaaggtttctgatcccattgaatgcagggtttctgatcccattgaatgcaaggtttctgatcacattgaatctgatcccattgaatgcaaggtttctgattccattgaatgtaaagtttctgatcctatcgaatgtgttccaacaactgaaggagaaactgcttagtaaggtttagctttttcggtagcacttttaaatctgttcacaccaagttcaaagctgcaggttgtttatgtttataaattataatgtacagaggtttatgagacctttaactagggtaattcttaccttgaattgtctgagatcaagtcataaattatggaaacttattttctgtgtttcgcaaaaaaaaaaaaaaaaaaaaaaaaaaaaaagcggccgctctagagga

SEQ ID NO: 45969 - DNA, 900 bp, Glycine max
  unsure (1)..(900): unsure at all n locations
  Clone ID: PAT_MRT3847_141510C.1
cccacgcgtccgacggctgcgagaagacgacagaaggggtactctcatatcttaaccttttgtctttctccactctcatattttcttctcttctcttcaacatgaccggtgttgctgatgaagcccccgttaccctcgacacgctgaagcaattaatggctcagttcgccaaagagagagactgggaccgttttcacagcccaagaaaccttcttttggctctggtgggtgaagtaggagaattgtctgagatatttcagtggaaaggtgaggttccaaagggtcttccagattggaaagaggaggaaaaggttcatcttggggaagagctttctgatgtgttgctttaccttgtcaggctctctgacatttgtggcgttgatcttggtaaagctgctttacgaaaggttcaactcaatgccatcaaatatcctgcaaaagtttgcaaagaggaggaggtggtggtttcaatttcaagcaaccaagaggaagaaaaaaacccttccaccaataataatggcactgccactgaatctgatgctgactgatattattattattattattattatattatgtggtgaattcatcattttccatggcttaattaggggtgtgaagtggtgaaagggactttggctagtggttttgtacaatggtttaagcaattgcattgaaactactaatgtttagtgtttggtaattggtaagatttattctcacagatttttttactgttttggtagaatcaaatcccgtgacagatatgaaatatggtgaaaatctatttcttccatttttggttatcttacctttttgtatgttggggacatttcggatgcattattagaatcccggattctctgtttgggggnggtaggaaaattattaaaggataga

SEQ ID NO: 45970 - DNA, 655 bp, Glycine max
  Clone ID: PAT_MRT3847_141511C.1
cattgaaaattcggctcgagctacgatctagggcttatgtgcttgggaaattggtgaagcctaagtactacaaaaccattaaatgttccatcacattggatcccaaaaagctcaatgctgctatttccctcaagaaatcttgcacatatgattaatatgcatatgatggagaacaagtggaatgcacatgtaaaagaattatttgaagaaaaaaaattaataaaaatattattttatgattaatgtgttcttttgatgtgaggaaagaaatggtacagctcagagggaagtgtgacaaggacgcgtttttggaaatgttttgctgcccaagttgcctcaaattgcggaaagacaaagacatgcatgttgggttcggtagagaaatgtaatcttctgattgatcatttcatgaagactttttttgtgttgatttaattatttgtgcgattttaatttattaattgtaaaagtgacaggtaatttgaattcattcagtttcaaagttgtaattgcaacaaaatttctccatgtaattatggtgtaattacagccatataaatttcgcattttgtaatttagttccatggtgagggtgcatgttcaggatcaagtcaacgggtcgggtcaggaattgatttctttcactatgcttttc

SEQ ID NO: 45971 - DNA, 393 bp, Glycine max
  Clone ID: PAT_MRT3847_141512C.1
ccacgcgtccggcagtggtttgaatttcagtcacgctcatatgcacaatttttaagtatcaagcctttttgataacttgaaattttcaattggttacagtccataaaaagccaacttatttatttattgattgcttccaatttgtgcatatgagcgtgactgaaattcaaaccactgcagagaatgtgttaacagacctgcttgtgggtgcgatttgttgattgcttctgtttattatctttttcaatcttgtatattcaaattcaagagagattgtagatagaacaatatatctatttttttccttctctgttgtaatagaaaatttccaatatgtgatcaagttgttgacttcgtcatggtttattattaccatattgagatgacttgtgc

SEQ ID NO: 45972 - DNA, 324 bp, Glycine max
  Clone ID: PAT_MRT3847_141513C.1
cgtcgtgagctcggatcgaggagagaaaaagaagttattctttcttctttatgctgacaccccataaagcgaaatcgtaaagggtgtccttgaagaaggagtgtttcattgatgagcaggggtctttcgggagaaagatattttacctggggaagggcttcgttttggggcactgggggatttggagaatcatgagagggtgggagagaatgataggcttttggagggtatgcctgccttagatttcgacatgcttcggtcctctgtggcgttgcaaagtgcacatgggatctggggaaagcttgagggtggcgatgaggaaca

SEQ ID NO: 45973 - DNA, 960 bp, Glycine max
  unsure (1)..(960): unsure at all n locations
  Clone ID: PAT_MRT3847_141514C.1
cgatcgcccaaccatgcggcatgtctccatccccaccaaaacggcattggagcgcgacccaactcctgaatcctccgactctgacgtatttgcctccttccgtttccgcggcaccgcaatgaagtgcaaccagcgcttcaagcgggtcgccaaacccagattaccggttcagacaaccgaaccagttcgtcgttccctcagaaccaaacccaatccctcaccgcaaccggacatatctcccggcaaaatgaaaaccttgaccctcgatttcttccaaatcgacgcgctggacctcgcccctcgcttgctcggaaagtttcttcgccgagacgacgtcgttcttcggatcaccgaggttgaagcgtatagaccaaacgactccgcttgtcacggtcgctttggcgttacttcaagaactgcccctgtttttgggccaggtgggcatgcgtatgtttacctttgctatggtctccacatgatgctgaatgttgttgctgacaaggaaggagctggagctgctgttttgatacgctcttgttctcccgttagtggattggatgtcattcaacagcgccgaggtctaaaaactgagaaacctatacttcttactggtcctgggaaggttggtcaggcactgggtctttcgacagaatggtccaaccatccactctatacacctggtggtttggaactcttagatggtccagagccagaaaacatattggtaggtccacgtgttggtatccaatacgcttcgccagagcatatcaacgcattgtggagatttgccattgcaggtaccccttggatcagtgctccaaaaaacactctcaggccggcctagtagtgtacttgtaggaaacttaagggagaaaaatggtttggtgatgattaacagatccaatttatattccccttagagaaaagattagaaatgtgtcccgttctnnnncaccttag

SEQ ID NO: 45974 - DNA, 182 bp, Glycine max
  Clone ID: PAT_MRT3847_141515C.1
gtttttgattgaatgactgtataaaatttcattacactgtcagggtgtatattactagttactcaaatcataatgcttgtaaaagacaagtcctaataattttaaaccagattctttgaaatggagccaatgtcacaaattcataagcactaatatataaaaaaaaaagctcgccaagccca

SEQ ID NO: 45975 - DNA, 507 bp, Glycine max
  Clone ID: PAT_MRT3847_141516C.1
gcgtccgcccgtttctccccccaaaccctcgcacatgatcctcttcaccgtcctcttcatccagatcctcctcctctgcaacctccgtagcttcccctccccctcaatcccccctcccctccccgccgccgccgacaccaccaccaccaccaccaccaccgtgcaccactcctcccgcaccggagaccattgcggctccggcaaggtcttcgtctacaacctccccgataccttcaaccaacaaattattctcaattgcgacaacctcaacccctggagctcccgttgcgacgccctctccaacgacggctttgggcgcgccgccacctccctcgctggaatcctcccggaggatcttctcccggcgtggcactggactgaccagttcgtaaccgaaatcattttccacaacagattaatgaaccacaaatgtcacgttatggagcccgaatccgctacggcggtctacataccattctacgctggactcgggggaggggaagaacc

SEQ ID NO: 45976 - DNA, 691 bp, Glycine max
  Clone ID: PAT_MRT3847_141517C.1
aagaaagaaaaaggaaaagacatacaaggaatgaatggatgatcagtttttcatcattttcttttctcaaaaatggaaaagtgtttgcaaaagagggtcttgaactgtggtgtctatatattaatagcattttaaatttacatctgttgctgttgctgttttttttttaagatggacacttacatctttaaaaaagagctttctttcctttttctttctctttcttcttcacatcattagcattttattacgtataattaagaagggtatgaagaggggagtgtaaaaaataaagaagtaaagacgtacgtaaactaaaaaaaattttgtatccaatattatataattagtgcatgggaaacaagattgacaaaacaatgaacaacacattaaagtaaacaaacaacattcatgtatctatgaattcctcacatcatgtaataacatgaaatatttatcattttggggtctgactcaggatcgatgggaaagatagagaggaacacaacaggggaaagaagacttggttgtgcatcaagtcttcagccctatctgttaattcccaatattccatggtccttgttcactcctcaaatcaaatttaattctaatttatatataagaagaaagaggcataaaatgtatatatgaatatatgtggcaaaggcaggaacggcataccttgatgttg

SEQ ID NO: 45977 - DNA, 468 bp, Glycine max
  Clone ID: PAT_MRT3847_141518C.1
ggccgcccttctttctgagtttgatttttttgtttggtgatgatgaatatgagcttttgtcatatactaataatgatttttttttatgattcctgatttttttttccattgaattttgattttttatttggcaacagcaaacccctttaactctctaccacaaagagaacaggcgcgcaaacaaaaaagaggtgaatctttcttgcaaaaaaatccaacatttatgggacagcacacagccgagaccgaatttgagacggttgaatgactcttactgcaaagagggaagcgaggtgcccaagaggggggaggccctacctctttattgagaaaaaaaaagaaagatgtgaacgaggggaagcggatccatccatggctttggggtcacctagaaagcctacctatcctgaaaacaagagactgcttcgggcctagtcgagataccacatttagaacaggccctaaagc

SEQ ID NO: 45978 - DNA, 313 bp, Glycine max
  unsure (1)..(313): unsure at all n locations
  Clone ID: PAT_MRT3847_141519C.1
agcacgcgnacgaaagnnnnaatgcggcgcgagcacggaccgccgaagaaggccccacaagaatgacatctaacgacaaaccaggggggaaatacaacagcggggggggaaccccaaagacacgcccccaaggagcggccgcaacaagacagcacaaagccacacacccaacacggagcacggatgcgacaagaacaggccagacgacgacaggcaagacaacaagacaacacaggacaagcagcgaccgacgaaacacgaaaaaacggcgacgcccatacgcaaagggggcagggcaccacaaccccaaaag

SEQ ID NO: 45979 - DNA, 628 bp, Glycine max
  Clone ID: PAT_MRT3847_14151C.1
gaagatgggcgaggtagatgatgggcaggttcaggagttggaggaacaccgtattgagttgagtctcgggcaagataataatgttgagagggttgaaatggagaaggagcaaggtggagaggagcagatgatggatgtgagttttgagcagtctaaggaggaggagatgcctgggatgtggcttttggatcagaagaactgtgtgggggagccgtttttgcggccttgtcatggtggtgatgttaagggtgtggagtttgaacaattgagagaggatgagggagaagacatgcaggaacatgaggaggtggaggaggtggaggaggaggaggaagaagaggaggatggtgatgaggatgaacatgagggtgggttccatctctcgcctaagtgtattcctatggaggggatgtcttctgggaatgggggtctcattcaagtgatggatgctggacagatgccttttggttctgggattgatcttcgtgataatccggtgggagattttctgtcgtctagggatgagccccagatgatttctggttcatcactttttgggaatggtcacaagagagacaaccttggcctggataatcatcattctctgaatgggagtaacaagcggctg

SEQ ID NO: 45980 - DNA, 220 bp, Glycine max
  Clone ID: PAT_MRT3847_141520C.1
ttcatccttggcactctcaggcttttttgcgcctttcgtccggtgatcactcctcattggtctttcccctcgcagcaatctcgttccaatacagttcatcgtcaagtcaaccatggggaagatccgttctagaaatgtgaatgatcagttggcattatgggtggcgatgtgcagtaattccaagtgctgttaaagttctcggaagattgactgcctttag

SEQ ID NO: 45981 - DNA, 735 bp, Glycine max
  Clone ID: PAT_MRT3847_141521C.1
aaaacatttcatccggagaattcaaagagattgtcttcctactagagctcgattagttcaaaaaggtgtaatttgcccttcaactttcacttattgtatgtctgaatttgagaacgcatgacacctgtttgtgaattgtccaaaagctcgagaaatatggcaccaagcctacctttgggagctagtatctgagagattcgcaaaggttgatggaataagggagttggtgtttgaattactgcagcaacaaaattcttgaatagccatgatcctttgcagcatctggatttgtcgaaatgagaaggcatgggatgacaccgagaagcctacaactttatcactgaccaacacaagtcaattcttccaagaatggctgcatgcttgttcaacaaatgctccaacaccgaactccattcttgaaggtcaactcagcaatcggcaacctccacaaccaggcacgttaaaatgcaatttggatgcagccctcttcaatgaaaacaacacttttaatagcaatacgcatgctctatctgattttcaaataatcatatcaaactgtacagctaagttccaatttttaacaaacccaagggtgagttttgccaagaggcaagttaatctgtagatcacaagctagctacagcttcaacacttgcaaccaagtgatgattgattatattcccacttgtattcatgctttgattatgaatgacatatcttagccttgttctcttt

SEQ ID NO: 45982 - DNA, 484 bp, Glycine max
  Clone ID: PAT_MRT3847_141522C.1
gtggttgccttccttgtttgtgttttcttttgttgtttttttttgtttttttttttgtttgttttttgtctggggggcgctatccttcattaggattctattttttgccctccacaccatgggagctctatgtggaatcccttggcttctcttgtcagttctgtaattaacgcactgttgccggtggtgaagagggcgtcttgctatgggtgttgtttcctggactaagcttgctgattatgccttccactgatggcttggccatcccgttccatctgcctcccttaacattttcttctatacggaacttttgggaggttccttcttttttgcaaccgggagagcagaagttgtcggggccccggaggctgcgttcccagacttggggggcctgggtgaccccgtgggcaggactagggcgccgccttccatttaggatcacaaccttggggcgtgtggaggggggtcgcccgcacccctgtta

SEQ ID NO: 45983 - DNA, 568 bp, Glycine max
  Clone ID: PAT_MRT3847_141523C.1
gggggggcccccggttttttttaataaaccaggtaaaaattttttcgggggcccggtaacaaaagtaaaactaattctttattctcggcctaaaaaaccataaaccccttggaaaagcatttgccttcccaaaaggggttttctgggaaactcccaaaaaattttttttttaacaaaaatttggttaaacaacccccacccccttaaaatttggccacttgcttaggggggctcccaagttttcccaaaagtttatacaaggggggggggaaacccccaaggggggcccaacccccctgggtgttaaacattcctttggggacaaaaacaaaaaggggggctaaaatacctctggctttttcagcgtttgggggggtcaacccctttgggagccaaaaaccccggagggaaatattcttaaatatgaaagaggatggtgcaccaaaaacagggtttttaaaacttcccccccagggacccttacttccccccccaaaaatgtggggcccaagaaagaacactgggcccccacccagttaaaacccaaaacaggggcgggggtcccccc

SEQ ID NO: 45984 - DNA, 161 bp, Glycine max
  Clone ID: PAT_MRT3847_141524C.1
ggacgcgtgggcgaatcgggcaagtgttgccgattttctttgtggatcatgtggattttgcgttctcagatttgcttctgatgccagtgtgttttgaaattgtgaggagcaacagaccacttgagatagtttaactcagctgcagggatggatctgtgggg

SEQ ID NO: 45985 - DNA, 351 bp, Glycine max
  Clone ID: PAT_MRT3847_141525C.1
tggtccaacaccaagggaatgcccaaagagtccagttggctgacaagaccttgaacaaggctgcccttggaaatcctcacgaggttgattttaacaggggaattttctaacaatctggaatcggaggcaaagcatacttggcaagtgaatatttatgcacctgaaggtagtgctgatccaggtgctagaagttgtgatcggacttgcgtgtgacattcttagaatactaaatgtcataggtgcaaagagaagatgccacgtcagagatgattgtactatatctaccatattgcactggcatcctctataattttgagttaaagtgtgcactttgattgacgtgctttacaa

SEQ ID NO: 45986 - DNA, 356 bp, Glycine max
  Clone ID: PAT_MRT3847_141526C.1
attcaatcaaagaagatttatatttaccttagtttctttaatcaatacataaatttcctccatcaacataaaacataatgcttggaaattaccaataaaacaatcttaatataaattaaacttccctccggggacttttcaaaattgaatgtttcagcttatattctgttttaatttatatttttactaacaataaaacaatcctttatcaattaaaacagccttctctgaaacattgtattttaatcaatactccgatattggacatgtataaactagcacgagtacatgtcatacttgctaggtttaactcaatcttcagccacaaagagaggacccgttgaagcaatatacaa

SEQ ID NO: 45987 - DNA, 408 bp, Glycine max
  Clone ID: PAT_MRT3847_141527C.1
taatcttcttactgatgggaagttgtatgagggtaagcatattcctgtatctgatattagagcacgggagaatcatgtatttcaaatacccttcatggcacatgcagaaattctgtcttctagggcaagcgatttcagaactgcaatggaatgtctatataggatgcctcacgctactgcaatgcatgttggagctctagaaattatcattgatagatcaacatgtcctgactgtaacatatttggggcaatgctgaaggttgattcttatcataccaatcctgaaattgcagtacagaccatctttgttgagcttttcagaggcggtaggcctattctagtggttacatttccaaatgccattgcgcaaattgcactagacatgaattcaaggttgtagcttttgag

SEQ ID NO: 45988 - DNA, 532 bp, Glycine max
  unsure (1)..(532): unsure at all n locations
  Clone ID: PAT_MRT3847_141528C.1
attgatttaggtgaccttanaaacttgacgtcctgccgcntcntagctcngnttcgctcngcttnnccnnnnnttgnnntgncnctnnngcnntgctctgntgnttcaagtgttggtcattcggggaaacccaggtttaggttcagaatcagaagtgttgctgccacagttagaaacatggccttcagtgcaacctccaaggctggcagattcccttattctcttggacaanaacctactttaccannaaatgccgagtttttgctccagtgtatggaggaggcaggagtagatggtgcactcattgtgcagccaattaatcataaatttgatcatagttatgtcacaagcgttttgaataaatacccaacgaaatttgttggttgttgccttgctaatccagcagatgatggaagtgggcttnnncnnnttnnnnatnttgttttgaaggacggttatcgtgctgttcgattcaaaccatatttgtggcctcctggagaaaagatgacaaataaagttgggaaggaaattt

SEQ ID NO: 45989 - DNA, 162 bp, Glycine max
  unsure (1)..(162): unsure at all n locations
  Clone ID: PAT_MRT3847_141529C.1
ccactcgtacggactgcaaaaaaccaccanaaggggccgttcaagggtttcgtttcggttttaacggggtgcacattcattttttgcgcttgactcactcccttcgngcggtttactttctttgtcgaactcgagcgaaaatgcgtgagattcttcacatac

SEQ ID NO: 45990 - DNA, 1751 bp, Glycine max
  Clone ID: PAT_MRT3847_14152C.1
tgatgtgaaggaggagggagaggaggaggaggatgaagaagaggaggaggggttgaaggaagaggtggatgcaaatggggacgtgaagatgggtgagattgatgaggggcaggttcaggagttggaggagcaccgcattgagttgagtctcgggcaagataataatgttgagagggttgaagttgagaaggagcagggtggagaggagcagatgatggatgtgggttttgagcagtctaaggaggaggatatgcctggaatgtggcttttggatcagaagaactgtgtgggggagccatttttgcggccttgtcatggtggtgatgtgaagggtgtggagtttgaacaagtgagagaggacgatggagaagatgtgcaggaacaagaggaggtggaggaggaggaagaagaggaggatggtgaagaggatgagcatgagggcgggttccatctctcgcccaagtgtattcctatggaggggatgtcttctgggaatgggggtctcattcaagttatggaagctgggcaaatgccttttggttctgggattgatctccgtgacaatccggtgggagattttctgtcgtctagggatgagccccagatgatttctggttcatcactttttggtaatggtcacaagagagacaaccttggcctggataatcatcattctctgaatggcagtaacaagcggctgagaggtgatagtccgtggaactccaagccaatggactttgaagcatgcatcgaacagatggagcattggatggggaaagctagaatgatgtatgcaacaaaagatcaggcttgcgaagaatctacaatgaatcagcaactcttgattaatgagctccagaaacgagataacatgattgagcatttgcataaggcaaagttagaagagactcagaaaagacagattgaggtatataggtttgagaaggaactttatatgatgcaaagccttgttgatggctacagaaaagccttgaaagaaacacggaaggcttttgctgactatagagcaagttgtcctcaaggtgatgatgaaccactttacaaggatcttcctgggtctgggggccttgttttgactgcggtggaggtggaaagggaacagctgaagaaggaagctgaagaaagggcaaagatgagagattttatgatagattttgaaaagaagactacagattttgaatccacttggtttggtaaatttgaagctcatatgagtacagttgaatccctaagtcagaggttgctggttttggaggaccaagtaaaacatttgaatgaagtgagtgctactcgcaaggtttctgatcccattgaatctgatcccgttgaattcaaggtttctgatcctattgagtccgatcccattgaaagtaaggtttctgatcccattgaatgcaacgtttctgatcccattgaatgtaaggtttctgatcctattgaatgtgctccaacacctgaaggagaaactgcttagtaaggtttagctttttcagtagctcagtagcacttgattaaaatctgttcacaccaagttcaaagctgcaggttgtttatatttataaattataatgtacagagctttatcttgaaaccgagacctttaactagggtaattcttaccttgaattgtctgagatcaagtcacaaattatggaaacttattttctgtgtttcacatttctatgatgttcttatttattctttgccaccaatcttaattctgttgtttc

SEQ ID NO: 45991 - DNA, 1375 bp, Glycine max
  Clone ID: PAT_MRT3847_141530C.1
cggctcgagctcgaacccttttgtctctaggcaatttatccttgacacgaaaattgaaatggcgctgaggctgactactgttgtttcaagtgttggtcattcggggaaacccaggtttaggttcagaatcagaagtgttgctgccacagttagaaacatggccttcagtgcaacctccaaggtaattgattcccatctccacgtgtgggcttcacctcaagaggctggcagattcccttattctcttggacaagaacctactttaccaggaaatgccgagtttttgctccagtgtatggaggaggcaggagtagatggtgcactcattgtgcagccaattaatcataaatttgatcatagttatgtcacaagcgttttgaataaatacccaacgaaatttgttggttgttgccttgcaaatccagcatatgatggtagtgggcgtaggcattgttaagatcttgatttgaaggacggttatcgtgctgttccaattaacgtagggaagtggctttcccaaagggctggagaactgaatgtaccagtgggattcttgtgcatgaaggggattggtctatatatgtctgagattgagcagttgtgcgcagaatttccataaacagtttgtattgattgatcacttgggcttcatcaaaccaccattgaatgaagaagaaggtcttgtcttttctcagcttttgaatctatctagattcccaaaagtatatgtgaaatttagttctctttttcaagtgtcaagagagaagtatccttagtgggatttggctactgtcttgtcccaagttgtcgcttctagatttgtctcctctcttttcccaagttgtctctcactttggtgctaaccgtgtaatgtggggcagcgattttccatttgttgttgctgaatgtggttacaaaggagccaaagaagcagtgcatcttattgccagtgagatctctttgcctttatcagatttagagtggatcatggggaggacagctacacaactcttccaaaaccaattgactccagtcaatagttgagagtggggatgctgtttgagttgtataaaaagtttttagctgttatagtggaaattagatgttgaatacttgaatataaatttacaattctgacagcattgaagacgttttttagttgtctgactgagctcttcttgtttttggtaacgctgtgacataaaagaacatctttacaacttttttctttttaaaaaagatcttagtgaaaagtaaacaaaaatgaataagaatgtggagtagaatcataatacacgatgtaaatattgttgtcttctcttgaattagaggttaatttggttcttttgtgcgaaataaatcatttgttgctgat

SEQ ID NO: 45992 - DNA, 175 bp, Glycine max
  Clone ID: PAT_MRT3847_141531C.1
gttcaccatgtatttttttttctcttaggacagactaattctgaaaataccgacagaaaagtagctctatgttctcacccggtttactgcgtgtgagcccttgggtccgatgcctcccccagcgctctgtggtcaccggtgtcagggccccctctggtctggcaaggcctggctg

SEQ ID NO: 45993 - DNA, 431 bp, Glycine max
  unsure (1)..(431): unsure at all n locations
  Clone ID: PAT_MRT3847_141532C.1
aannnnnnnantnnnaannannntnnaanaannananannacccaancaaattnnnnnntnnaaatnantttacattattaaaaaantatanaatnnnaaannannattnaanantnatanacttcannaaaaacnnaacannttanantnnnnnnananatanacanaanaaanatcattanaaannnataatanncaananntnannaattnantntancaagnagaannatcacannnnagnaatcttnnaaatntgncnttatatgaatcnatcatttttttgntcntaatttgaaacaacaaatnctatttaancnttgataanacaannantnntntaacaaannanagnaannananangtaacataanaaanaaaaaatttatganaaagnnannaanataatnanttagaagacaaataant

SEQ ID NO: 45994 - DNA, 226 bp, Glycine max
  Clone ID: PAT_MRT3847_141533C.1
cgatttgactctatgcgtgttacttaattctacatatgaggaagggtcaaaagagaagaagatggcttgcgatgactaaacttctcatgatccggtttttctaatgacggccggtgccatggggcactccaactatgaatccagtaagtcttttaagacctcttcttgattatgggcattgccgcctcctgattccaacagtaatacgatcacaattgacacacac

SEQ ID NO: 45995 - DNA, 242 bp, Glycine max
  Clone ID: PAT_MRT3847_141534C.1
acgttatgcagcaggggagtatcttatgcagtctagatgcgtcaagtgcagggacggcgcccacaaggccgagaccctatcagatacggcggcgttgttgggcgtctaccgtgatcttgcagatatctggattgctccgggagcatgagtcgatcatcgtcagcgcggtcagtcgactagtcggccagagcctatgaggcggtgctagcttccggcatgcaagccgttgcgacgaggaatgc

SEQ ID NO: 45996 - DNA, 512 bp, Glycine max
  Clone ID: PAT_MRT3847_141535C.1
gccactttctttttttaagatcttacgtgtggtgatcactgattaaaatttccaaattgaatgttcttttctttgtatttctcttccccaaataaaagaaattcatttattcgattgaataattattacattcatatagtattataatttatatcttattggtgagtgggattgtcacaccgatcgaatttccgaatcgggtgctctttattttctttgtatttctcttacctaaagaaattcattcatttgacttagtggttaccataatcatacaacattataatatgtgattgcctttgacagaaacctcaagatatatatgtactttccccattttgcttaattaattgtaccttagttgcttcattttgcatgttgtgactgggatgaaattttgtcaattttgggcagttatattgtcatattttttcctaggaaattaatagaatagctgtaatgtgaaagataatcttacatcatgtattggactatggggcagcttatgtata

SEQ ID NO: 45997 - DNA, 736 bp, Glycine max
  Clone ID: PAT_MRT3847_141536C.1
atatcgcaaaattgtaatcttatagctataacaaataatgaatagtcttaaatgtggatttagacttaactcaaccctacaaaaccaacttataaagtagggattgctccccacttatatacattatctttagccaatgtgggacatcaacaccactttgccaacaattatctagggcctgggggtgaccacgattaaggtggcttctcaacactcctccttccactcaaggctcccgctgccgcttggagagtgacaaacatgggaggcccactaatggatgataggctgtgataccatctagagttttagggaataatgaactgattttttatattgcacaatactgagaacacacgcacacacatctatagctttataagctaatttaggaaataaagttacagcctcttgaaatcagatgccagaaattatgggatatttcctaatttaaaatccctgtaattatgagatgtttcctaatttactaaacctatattaataggaaacaaatacaatagctcacaaaccagaataaatcaataatgtacgcaatagtgaagtgtacttgatacaagatactaatatactattccctaatcagggaagtgacatgcatttgattatttaccttctcagttcacttcatggcagagggggggctttcagtctcgtgaaattgaaattaaaagactcatttatagtatatttctcagctttgagtcagcacacttgc

SEQ ID NO: 45998 - DNA, 1115 bp, Glycine max
  Clone ID: PAT_MRT3847_141537C.1
gttcgcagcccctaataaacaatagttttattctaaaatcacaatttggttcacttgactagtgggaataacagtgatcacatctcactgccactttctagctcattcaaattgtagtcacggttttatcacaatcttcgatactgtaaacaaatttagctaatgcaaccacaattacggtcatgatgtggtcacacatacctcaaaatccttcaagttgcgactacaattgcagttacgaaccgttttttaaaaccttgatcccatatatcccctctctaaatagccataagcaccaaggctctgctgaatttctcacacccttattgaactggtcttacaggagtccatagatagaagactacatctgcaattatgcttgatgcaccacaacaaattctttagtcatagtaacttaaaaagaaaaggacaattcaatatggtacaaaaaattcaaatatgctagcgcattgcttaaatcttgatcatgaagctggaagaccaggcataaaaattggcactcccagaaatgtgtttttaacactctcccattggaatcaattgatgctaagcttctacttttagaagaatgtctaagtagatagcacaggctgttgtgatggctcttctgcctgcaaactttcataatatttgacaagaaccttccacccacttgggcacatgaaaccttctggcggattctccccactttttgcaaaagcccgcatcttggttccagatataaagaggaaatctttagcacgggttgggtcgaaaaatgccatcttgtttaccttagtgtcataagctgccaccctgaatggcaaaatgttaagcttctccagaccgggagccatgctaagcaccttctttccatgatcagggtcatacaaatcccttttctcagttgggtggcccataccagccggatcacgaccaacaatatagaaatttgcacctgcatttatccgtgcctttgcatgccactgtacttcagttggaccagcagaatgcataggtgatggaaatatggcaactatggtagtctcaggatcaagaactccatcttctaggaccttgctatgttgctccatcctgacatccaagggaacgtc

SEQ ID NO: 45999 - DNA, 282 bp, Glycine max
  Clone ID: PAT_MRT3847_141538C.1
ggtgtgagtgccatagacaccactagaggtgcttgggtagtaacacttagagcgcgttttgagtctccaaaacttcgtttacgctggtctttccccttctgcttttgggaacgctacctagtctactggctatgaaattgatagctgcttctttacgctgttcaccttacgaacactctcctggtgctatttgttgatcagtagcaggtcacattggccatgggctttttgggtaggctggtcctgacactgcagggaacgcacgagctctttggccatggg

SEQ ID NO: 46000 - DNA, 579 bp, Glycine max
  unsure (1)..(579): unsure at all n locations
  Clone ID: PAT_MRT3847_141539C.1
cagaatcaacacctcttcttccacctccatcaggccaaactattcttcaagttcaagcccaaaaggtgctgaagcagagtccaacatcaagagcaagagaaagagaagctttggatcaaaacctagcaggagaaaaatgtggttcatgtatgtgtttgatgaggaaaagaaggaactgggtaggcaacaagcaccaggatcatgcccttattgccaaggcaaggttgaggccatggatgttgagatccagtggagactttgcttcttgcccatgtgcttcaagatcaagaggaagtttttttgtacttcatgtgctagacgtttagaattgtattattaaacaacaactacttctaattattattattattattattatacatattaatgatactattattggtctcttcattttaattatattctacatataacccccctctggctagatnttgacattgagacagaaatataccactaaatcatgctttctggntccctctctctctctctctttctaaatctttattcttcatcaacatctttgattaccaagttttgttccttgttgaatttgag

SEQ ID NO: 46001 - DNA, 925 bp, Glycine max
  Clone ID: PAT_MRT3847_14153C.1
cggcaaatgaaaagctgattttattagaaatattaaatgtatgtacaagaggtcttgttctctgatttgtaagagctacaaccaggaagtgtttgctaagatataattaccaggaatgctaacttgtaccttgaacaaaaagatctttacagtggaagtcatgaactttaacacgagcaaaatccgaaacagctggaaaggtcactcaaaaacaacttggagggaatagtctaccaaagaatctatataacctaattgtggacgggattagccataagaccatcctatgtaactagtcatttcttcaacgtactttgtttgctttgttattggtatactgaacaggactatacaaaaaaagcagcttcaaaccatcatattcaagtccgatagatcatccattgggatttcaaggccgcccataaagtcatcatgatcttgtaatccatcatcatcaatattcaaccacgaaccaagatcctgaccttggtcatcaccaacaccaagtacatccattccaggtagctgcaggttggacaagtcaataggctcgtggtcatccaatccacccaagccaaactcatccttttcctttgcattgctatttgtaggcatttcattagactttggaacagaaggcaatgctggttttggttgctctgttagcttcccaaggaggccattcacagaaacagaattctgagttgctttctgcttaggctctgtgttttagattttctatctcccttagcactggatgatgctggcctaccaactttaggagctccatttcgggattgtacctccctgctgtgcccctttccgtctctctcacttccctttccttccgctcgccctgcttgttacagaacttccgatgcctggagcactagaaatacctggagtaccgccaacatcgtcaagc

SEQ ID NO: 46002 - DNA, 266 bp, Glycine max
  unsure (1)..(266): unsure at all n locations
  Clone ID: PAT_MRT3847_141540C.1
aacggataacacagttattgtcacagttacttccaacacacatggcctccattcccctcctctcaccagccaccaccgncacaaactccgccgtcagccacctaccctcctccataacctccacctccagctccttaaaacccaacgccctccaccgccgccgcctaacgcggttacacgggtcctttccaacctcctccaccctttcccccaccaccacaaccacctccgggaagaccatatttttggacgggggggcccactac

SEQ ID NO: 46003 - DNA, 276 bp, Glycine max
  Clone ID: PAT_MRT3847_141541C.1
aaaaaagaaaaactctgccctagttggctctgaagaaaaaagaataaacacgtgaaatgtgctgagtagttgagaattgagagtgttgacagtgatacacctcagtgttgtagtactagttattagtttggatcctacgttatatctctccaaaagtagtagagtgtttggattggaatatccactatccaaatcctaccctggaattaacaaaccgttgactcttgactcttcttcacttgctcgctctctgtccttccatctccgacaattcag

SEQ ID NO: 46004 - DNA, 251 bp, Glycine max
  Clone ID: PAT_MRT3847_141542C.1
gttaaactcactcatcagatacggttaggtggattgaagattatctcaataactattgtcaatgcttatggaacatgtccatgagcatgtttcaagttacgggacttcgccaaggtggacgtgaattcacaatgtcaacgttcctgattgaatccagctatagtgggattccaacttcagtgcaatgatggactgcacatgcgcacacgtcacgaagacctccaggatttctcggacagcacatcatcgta

SEQ ID NO: 46005 - DNA, 417 bp, Glycine max
  Clone ID: PAT_MRT3847_141543C.1
ggaggtttaaccaagaagtccaaattttgatattttattgtggtggaagttgaatggtgtcaagtatccaacacttcaagcaattgcaagagatgtgttggcgattcctgtttctactgtagcttctgaatctgcgttcagtaccagcggttatattgtaagccctcatcgaagccgacttcattggaccactttagaggctttgatgtgtgctagaagttggttatggagtgctgagaactcgggtaattttaattctaatgtgggaaatgaaaatgctattttactcactgaaatggagtctgatgatgaaggtgaaccgacagaaccattgataactgacgttacttctgttgcaatctcccgccttgaagatgatgatttttattaaacttggttcatttggaaactttttct

SEQ ID NO: 46006 - DNA, 402 bp, Glycine max
  Clone ID: PAT_MRT3847_141544C.1
gattcacgccgccgcggacggtaccgcgccgccgggattcgagtccgccgtcgaagagcacgagttcggcgacctccagggaatgcttttcatgttctctgtttgtcatgttataatatatattcaggatcggtcacattttggtactaggattttgaggaattttcgggtgctgcaagcagccaagcatgctatggctccctttgttagatcccagactatgccgcctttaccgtctaggtcgcatccttcgccgtcgtcccgacctgtttcgtcggcaaacaattcttcaccagttagaggtggtggtaacttgggtcgcaatgtgtcagccatatctctcatgtcaggtttaggttcttatgcttctttgtttccaggacagtgcatacctgtcacact

SEQ ID NO: 46007 - DNA, 171 bp, Glycine max
  Clone ID: PAT_MRT3847_141545C.1
agacgacagaaggggacatcacgaagtcacagtcataatgaacaaatggaaaaagaaaagtgtgtacaaatccatgttcttccgatactcatgatttatcaagtaattgccatgatgatcaaacaattaattggacgatgaaggtggattatatagttacgtttgtttgtt

SEQ ID NO: 46008 - DNA, 171 bp, Glycine max
  Clone ID: PAT_MRT3847_141546C.1
gtcgagcgatgcaagcacgtgtgccggatcgatcattggagatctcatacctgggcggcgttctcgcacccttagaggctatgcactctggctcaagctcagcgaacctcaacgtgtacgtactactcctctcagttaagatgcagaggatgcacctttacagagcgatca

SEQ ID NO: 46009 - DNA, 393 bp, Glycine max
  Clone ID: PAT_MRT3847_141547C.1
catactgtttttctgattttttttttctatctattcatgttattccatttgaggggcttttttttcattttttctattttttttaaccattttatggaagacaaaaaaagacccactttattcacactcaccttgtcaaatataacaccagaacccacataagaaactaaaacacaatacactggaaaaaaaaaacttccataagcagggatccgttaaaaaacaccattaaacacccccagaacaaacaactaacaaactccaacaattcatcttcaacccaataaaaacctccatactacttcttgggccccaccaaaaccaactctattcattcatttcttcccctaaaaggtggaccaaccatcaaaaaagttttaagtgcaaaaggtc

SEQ ID NO: 46010 - DNA, 298 bp, Glycine max
  Clone ID: PAT_MRT3847_141548C.1
caatttccagattcgacccacgcatcccacatacaaactcacttaccactaactagtctttcattatcccacatctaaaactgaaatgaggtcctgttatatttatcgtgttgagataccatacatctcgttatctatttttacacatttgctgaagtcactcacaatgaatacgaatattttaacaaaaaacatatcaagtattcttcacatgcgatatctaataacaaccctcattactatgactgctgtactcctggatatcaatcaatacaatgaacactactactctcccata

SEQ ID NO: 46011 - DNA, 414 bp, Glycine max
  Clone ID: PAT_MRT3847_141549C.1
attagttgtcatatatagaagtgagtgatcagtgtcgatcagcagatttttcaaagaatggtgagggacgtgaagaatggtagagctctccttgttgcatttctgatgtttctgttggcatcagaagtgttgattttggaggctgagggtgcaggagaatgtggaaagacccctatagggtctgcagctgctagcctgagcccatgtttgggtgcagttagcaatgtgagggcaaaggttccattggcttgttgtgccagagttggggctttgctcaagactgctccaaggtgcctctgtgctgttcttttgtcacctctggccaagcaagcaaaaatcaaccctgccactgctatcaccattcccaaaagatgcaacattaggaaccgacctgctgggaagaaatgtggaagg

SEQ ID NO: 46012 - DNA, 438 bp, Glycine max
  Clone ID: PAT_MRT3847_14154C.1
cattataaccctgaaactccatttcactcacagaaaagtagagatatagagagagaaagtgcggcagagtacacacatacacaccacttcttcaagagagagaggtgtgagaaggaaaataagaactgaaagaaaaattgtgctaatggcggaattaaactttgcaaagttaacaactgataaagaagatcagtgatgcgcctctctcttggtgatgatggtgctctttgcagagaaaatctcactgcagcactcacacgcacacccttcttcgagtctgaatctggatcagtgacaaattcttcacaaaagggtcgctgactcttcatagagacacagatcatgacgttggatgcaaaatcctagacacactttgggggttatggaaacagactatatgaaccatatagattgcaaggattccgagccagagttttt

SEQ ID NO: 46013 - DNA, 2077 bp, Glycine max
  Clone ID: PAT_MRT3847_141550C.1
cagcagatatatcaacccttttgtgtttttaatggacgcccgtcattggaaatgcaatttgtgctatcgcgcaaatgaaatgcctgaggatttcgcatgggaccctcaaacgaaaacttttggcgacccatctagaagacccgaactccaagaaaccactattgaatacattgcaccatctgaatacatgcttcgtcctcctcaacctccgatttatttgtttgtttttgacgtcggttccgcagcaatcgattgcggttacctcaacacttttgcagaacaactttcgctggacattgacaaattgcctggccaggaaagggctttcattggctttatcggtttcgattccgctttacattttttccaattcgatgaaaacgagagagagccgaggcatattattgaatttgatgttgaagaaagttttgcgcctgtgttctctggactttttgttgaacttaatgttttcaaagagatcatcaaaaaatttatatacaacataccatcaatttttgaacgttctatgtcatcctcaaattgtctcggttctgcacttacagttgcaaaaaatttaattaacgaaatcggtggacggataactgtttttaccgcatccatgccaaatctcggaattggtgctctgaaatgtttggaattcaacactgcaaaaaagatcgcatttacacctcaaattgacttttacaaaagtttggctctcgaatgtactggaaaacaaattgccattgaccttttcgttgtcggatgtcaaaacgtagatcttcgaacattatctgatatgtctcggttcagcagtggcaccgtgtaccatttccctgaatatcatttccttcgggaccaagtcgaagtcaaacggttccaaatgattttacgacgttactttattcgaaagcttggtcttgaggccgtgttgaggatacgttgctcgaggggactttctcttcacactttttatggaaatttcttcgtccgttccactgatttgctcgccttgcccaatgtgagtcccgattcggccatgggcgttcaaattaaacacgacgaagtgatcacagccagtcaagtgtgtttccaagcagctttgctgtacacctcgacgaaaggtgaccgtcgtattcgcgtccacacactttgtctccccgtgctcacacaagctgcacatgtattttcttcgctggacattaactcgtcaatatcgctactttcaaagatggcttctgatagagctttgcaaggcgctagtttatcagactgtcgtgaggcactaataaatgccattgtcgatccgaccgtctgttatcagcgatcacatggtcaagttggttccatgttgcgcatgcctcctgaaggtggtcttcaatacatgcccatttacatacttggattgttaaaaaatagggcgttttcggattctctgcaaagggtcaccatcgatgaacgtgtggcaacttttctgcttttcaaaaatgctccgttggaagttctcttacttgagttgtgcccagctctttacgcttttcaccaaattctttactgcgaaccgaatcaggatggacaggtcccttttcccgaccgtcttcctcctacttatgagcatatctcccaaaatggcatttatttgctcgacattggcacatttgtctatgtgtacgttggctctgccttaaatgtctgtattttgcgttctctttttggcaccgattcgttcgctaaattggattcggattcaacagtaattgaaattgacactccgcaaagcaaacatttgcatgcctttcttcgccatttacaagaacagagagggaatatgtatgctccagctaaaattataaaggatgacagtccaaggcgggaggcatttacgcgacggctcatccaagatcggtcggattcttcacattcttacaacgaatttatgcaattcctccaacgagaagtcagcaaagccagtaaatgaagaggatgaatgaaatttcttgtgatatcttcgttttattcgtcaggaaattagtctctgttaataccgttgttcactaattggtaaatacatgtaatg

SEQ ID NO: 46014 - DNA, 1117 bp, Glycine max
  Clone ID: PAT_MRT3847_141551C.1
aaaaaaagagacacatacaacaacaaatgtattagagatatagaagaaacaaattaaaggaattgaaattaacttttgaaagaagatgggaagcgaagaagtgaagctgttgagcttttgggtgagtccatttggtaaaaggattgagtgggctttgaaactgaagggtgtagagtatgagtatatagaagaagatatcttcaacaagagtagtctccttctggagttgaacccggttcacaagaaggttccggttcttgttcatgcagaaaaatccatcatcgctgaatcattcatcatccttgaatacatagatgaaaaatggaagcaatattcattgttacctcatcatccttatcaaagagcacttgctcgcttttgggctgctactgctgaagaaatgttcaggaaggtagtatggattgctttgcgcagccctaccagcggggatgaacgcgagaaggctcttaaggaatcgagagaagtaatggagagaatagaagaagagattagggggaagaaatatttcggaggggacaatattgggtaccttgacattgcacttggatggatctcttactggcttcctgttttggaggaagttggatcaatgcagataatagatccattgaaatttccagccaccactgcatggatgactaattttctcagcaatccagtgatcaaggacaacttgcccccaagagataagatgcttgtttacctcaaagatctaagaagcaaatatatagtcttataattaagatgcatgaattggtgaaggactagatttgttcctccaaatttttgtatgtgatactttcaagatatttggattggtgtaaagcatcgggtcaaatctctggctaagttagcattttctagatttactcttttgaagtggctttgatctttgatgtcaattatcctactcttatgtagcttaactaataaatatatttatattgatggcaaaaaatcataattcaattctttaaaaaaaaaaaaaaaaaaaaaaaaaaaaaaaaaaaaaaaaaaaaaaaaaaaaaaaaaaaaaaaaaaaaaaaaaaaaaaaaaaaaaaaaaaaaaaaaaaaaaaaaaaaaaaaaaaaaaaaaa

SEQ ID NO: 46015 - DNA, 475 bp, Glycine max
  unsure (1)..(475): unsure at all n locations
  Clone ID: PAT_MRT3847_141552C.1
taagaaagccagcttcttcttcttcagctgctgctgctgctgctgcttcaacttcccaacaaatatttcaacacactctctcatttcttcaatttccgttacgtaaagccactttctcaaacctcagtttcctgttgttgtggttgaagttggtgagagacgaatcttggggaattttggatctgtttgccgtgaaaccctaatttcttgcttgtgaggctttggaaattggggttctggttagatggaagctgaggatggaagtagcaacggtgataatggtgaaggggttgggttggatcggaggttgggttctgaagatggagataatggggggagaanttttaggtggaagtggtgttgcagaaagcgaagaagatcggggcttgaaggatagagctgtaagttatggggtggcaattggaggtgaagaagttcaggatctgaagaaggaagctgtagataatggggtggc

SEQ ID NO: 46016 - DNA, 364 bp, Glycine max
  unsure (1)..(364): unsure at all n locations
  Clone ID: PAT_MRT3847_141553C.1
gctaaggattcaactccaggagaagaagaaacttaatcgattatcacttcacttcaccaatacatcatgggacacttacaccaaaacaagtttgaaaactctgacgtttaaggccaaggatcgtggtgttttttgactttcccgcgggtaaaaaaacgatgaacaagacattcctcatcctcangaggatgtcatcaccaccgagttttataaagtcactgtctcagaccatggagagaactatcacacccgcttaaattagcctcaccgttttgacatcagctcaaactcttcaagtgaggatgaatgagaagatggagagaaaaggaagaacaacaagaaggaaaagaaatggctgaaagac

SEQ ID NO: 46017 - DNA, 555 bp, Glycine max
  Clone ID: PAT_MRT3847_141554C.1
ctcctaaaaaactacccattaacttatgttagtcacacaacacactaaaacttgagtttcttataacccattaactagttagctcatagccgaatttaaatattttcttctgcagaaaacaatgcagctttttgttttcaatttttatggaaccacctttcttgttatttacggtatggttattattatggggactgtattggagttaggagccacccctgctcctgctcctgcacctgcaccattgctgcctccatcggaagcaaatgctatactcaacagtggatggtggaatctatcacagttagattcacacaatatctgttcatggaatgatatagattgcaacgtcgctggaagtataactggcatcagatgtccattgggtacaccggggattcgattagcaacactaaacctctctgttttcaagaatttagaatggcttgaggtctcaggctgtggactacaagggactataccacctgatattggtaatctccctaaactcactcatctccgtttgtcctataattctcttcatggtgaaatacc

SEQ ID NO: 46018 - DNA, 428 bp, Glycine max
  Clone ID: PAT_MRT3847_141555C.1
agatacagtcgatgagggagctttagaatggatttttgttcttgcttggtctttctggaatttaggaaccatatggtgttcaagcaaaagaaaatgatagttgagcagattatgcagcaggcacattgcctcatcttactgcctgttgaagacaatcaaagtgttacaaggaggaatgaaagatggcagaagccattacctagccaaattaaagcaaactttgatgctgctgttagaaagggggttgcaactttggcagctgcaacaaagtttctgccaaatacttatattaagagaagagtatgatagtgcgtaggaagatagtatattgtatttttatttgcaaaggaaatttttgttccatataaataactgttccctactccctgtgtaggtattaaatattggctgaagttgagattaaaaaa

SEQ ID NO: 46019 - DNA, 401 bp, Glycine max
  Clone ID: PAT_MRT3847_141556C.1
ggaaagaaaaattccaaccggtgacccccctttttttaaaatggttttcatttttaaaaaaagggcaccaaggttaaattccggcctggtttattaccattggttttaatgggtgggggtttaaaggcaaagcttttaacgcgttgggttatttttttccctgggcaactattaaagcgactatttaacccctggtttttttaataattggggccccccgttgggttgggggccaaccccctccaaaaggatcgctgggatttcttaaagagccgctaaaatttttcctgggttaattaatccctttccaaaaaataacttttttaacaagaaatcctataagggatgggtttttttatagggacttttttaatatagggagctattttttaaataaccct

SEQ ID NO: 46020 - DNA, 277 bp, Glycine max
  Clone ID: PAT_MRT3847_141557C.1
gagtcacagtggccacttggcaagattttcttcccttttagatggagatccaccgatacatctccctcattcccctctgggactagggctatactacattctcgtttcttctgttccattttgctctccgtccctctagtttttcttttttcgctgtgttaaacgagttcacggatggagcagtggttccattttgattttttgttcccgaaggaaatttgacatttatcttaaaaaatagaggtctttatttaaaaaaaaaaaaaaaaaaaaaaaa

SEQ ID NO: 46021 - DNA, 252 bp, Glycine max
  unsure (1)..(252): unsure at all n locations
  Clone ID: PAT_MRT3847_141558C.1
attttcgcttcttctctttctcaaatcnctatcttcaaaatttcaagattatcactttaaagacagatttnnnttttttganaanaaaaatgnnncnggcnatggcngtttgnagtgcggncttcacttcagtgctgntngcagtancttgagnccttnggngaaaaccatttgnactgcccctttcttganggggtcatctgggtttncctgcgactaancnattcngcatcttaacacancangatngtc

SEQ ID NO: 46022 - DNA, 580 bp, Glycine max
  unsure (1)..(580): unsure at all n locations
  Clone ID: PAT_MRT3847_141559C.1
annnagnnngcaatacaaggcgaatagaatctctggcagctatggctaatatatcagcacaggacacaactccactacatgcacgctccactgaacttttgattgtatctataacttcaaatcctctagcataattcaaattaggagtagcaaatttctcgctatcttggcctccatccagcagaactgaaccatcacaaccctgagacccaaatatattaattagataaacaataaagtaaaagaagagaaaaaggttgacaattcctattacataaattaattagtactatattatatccatccaaatgttttctagcggaatggaccaagttttaaacaattcaatattgattatatcaatccactgatgagtgttattcacttcttccaagacactattattagttataagttattaaaaattacaaaattatgagtgagaataattacataagaagtgaaattcagaaaaaaaaaaatgtgatttctaatcattttcgtttaataaatcaaaagggtgtattcaaaagttcgttgctaatattctctggggccttaacaaaaaacggacgcgtgg

SEQ ID NO: 46023 - DNA, 414 bp, Glycine max
  Clone ID: PAT_MRT3847_14155C.1
agaactgagttctaatctcctaatgaatacaggtactagtactatttttgtattgctgtgatccagagagaaaatatactaaagacaaacctctcttcaatgtattcaaaagaccctgaccctctcccagtctgcctagtaaaccccatgaaatttctcatcttgttagaacgttatttgtttaacagagtaaagcatttcttgtcctttaatgaaggttgatccaagtatatctatctacaaactgtgcattctgtaattgatgacattattacagttaaaacttaaaagtgttatggaagaactcaatttgattctgtatgtcaaaagtcaaaactccaatggacctctaatatggttatctgatcttgaatgaagagacctaaaagttttagaattctacaatcttggtag

SEQ ID NO: 46024 - DNA, 389 bp, Glycine max
  Clone ID: PAT_MRT3847_141560C.1
cgcatcccgagacatctaaagcgaaattccactacttttatcgctattctacttatttcaccaatggataggcttaatcactatctctgtttgtacacccacggtcatcttctgccactcaatcctgtcgctacacattgtcacgtcacaacattttctggttcggcacatatgttaccagatcactacaggtgtcctacaatgacctcaaccagaacagaaatctcgtgtaccacaccaaggtataagctcgattcattatgacttccattactaatacaaaccatcaaatccttgcctatcgatcctttactacttcggaatttgaagctagaagtgtcagataagttaccacagaaattactagcttttggcagacaaactttcat

SEQ ID NO: 46025 - DNA, 211 bp, Glycine max
  Clone ID: PAT_MRT3847_141561C.1
ggctttagtgaatttgttgataaattcaattgatgaacagaggccaaattttctatcggggtggatggtttaataaataatgtccaatgcaattgccaacaatgctatctttaatgaaacatttgccatcatcatcttaaaccatgtatttgctgtgagtagtaaatctcacaacaattatgtataagcactcttatcttttgtcataaaa

SEQ ID NO: 46026 - DNA, 513 bp, Glycine max
  unsure (1)..(513): unsure at all n locations
  Clone ID: PAT_MRT3847_141562C.1
gcgcacgattgggcggaattctgctcgggtatagggccccttttcaactcagcgtgtgtgcaaatagtgttggtgtttgtgtgcatcaaatggataaatatctatctcatgcataccttaaaaacacactaaaagcatcatagagttatatacaagaaagtaagagaaataaaaggaaaaaggacaaaggagaagtcatggtaaggaatgcacactgattgattggcctaactctctaaaaacagtccccagtggagtcgccaattgtcgcaacctacccttcggcgggagggcaacgcggggctcgtgggtgcgccttccatgggaggaaaatgcatggagtcgccaccaacgtttattcgaggaaaatgtcagaaaaaccggaaaaggtgtggtcgacgaactttaagtgtgaaaggttcgggagttgtatttacgcacggngaaggtattagcacctcacgagtccgtcacanaggatgacagcctntaatcaagtgtgcaaatatgact

SEQ ID NO: 46027 - DNA, 1043 bp, Glycine max
  Clone ID: PAT_MRT3847_141563C.1
gcgagccttagccttggacttcccctcccctgcagaggtcgtcgccctccgcgcgttctcgtgcctctgccgccgccgtcctttggcggtcgtactcttagccgcacttgctggtgcccatgctgagcgtcgttctcgccctgtgtgcccttgtacctcctcaccatcacaatcctcagcctcctcctccctttgtctttcttactcttagccactctctccggtgcccaatactaccttcaagccctcacttattattcctcacctcccgggtcccttcacacttttctccgccctcccgtccaagtcctcgcgtatctcctcagcgtggattttactatgcgcggttcaagtttgcgttggtttgggcatagaggggagcattgcggctgggctgtacgccgatgatgtgtcaagttttggcaccgagcgtagcctgctgagcgccttgctagttcgcgtgggcctgcgcgtggcggcccgcgttgcggccgggctggtcgtcgggcccgtcgtggctggcacggtgttcggtggggcccggagggagaggtgggtcgagagggtgggccctggctgctggccccgcctcgggggggtggtggtggcgtggcccggggggggtgactcggggtccggtggcccccgtcaggagtgggcggtcgagggagggggccaggcggcgcgccggggcaccctgggggtattatctcattgtgactattggcatggtgaggatcgtgaagggtctcatttggattttcatgatttctctctgtagaagaaggccaacaacaacaacaatagaagtgggatcgattcagaacgatgacaaggtgtaattagagttgacccattttctattttccttcttttatgctgttctaattgagctacctttctccctcattttgttatttgattttctttggtcagagacgttaattacaatattttatacctttgcgaaattgtaacaaacccgcaaaacattattgaattgatggtattattgctcaacatgtcgataattagttctttac

SEQ ID NO: 46028 - DNA, 586 bp, Glycine max
  Clone ID: PAT_MRT3847_141564C.1
cggaattcccgggtcgacccacgcgtccgcttgtcttgcaacaccactgcaaacgaagcgagttgggccgacactggtctctcatgcatgaggttagcacgctcctgatggcgaaccatacacaaacatcacattgagaactcttgccctttgagctaaccaggtctgagaccaatgtgcaagggtgctcatgtcacatatagccgaatagcgctcccccaccaaaacggcaactacacagggctgacttggatgatgacggagctaaagccttggcttaagtgtcaaaaataaactcatgctcgtggggtctaggactgaacaactacatcatcgaatgtacagcattttcaagcatgggcctggcactaactgacaatcacactatagcggcttgtgcatcacaatggcaatgatgtgggagccttctgggctaatgcaccgttaaagctccaacatagcaacatgtcatgaatggaacttcctttgcatgtgaagtctattgcagatgaatgaacaccactctcgatgactgtgaccctgccacataaaggggaactaacactattatacagttggcacaact

SEQ ID NO: 46029 - DNA, 313 bp, Glycine max
  Clone ID: PAT_MRT3847_141565C.1
tcgaattgacagagagtcagaagaaaaagtggaacgggtgtgtgctcctcaaacagatgatattgccaaaaccgctagcggcgaagctggctcaaatgatactgcaaatggatgatacaagctgttcccgcatacaagtcatgctgctgaagatcttctgcacaattatggtataaccgtcctcgaattactcgtgaacgctctcgccaaagctctcggtcatactgaatgcaacctgataccactgctaacttccatggagaactatgttacattacactactgagactggcataccaatctacacccaatc

SEQ ID NO: 46030 - DNA, 339 bp, Glycine max
  Clone ID: PAT_MRT3847_141566C.1
tacggttgggataagactacagaagggggggggaggggacaggtcttaatttttgggatacaaaggggatccaagtagagggcttcttattcacaaaatttccaacagtttgtggaatttcccaacaacagaatcatatttttcaaaagttgggagattctaacgaccatcagtggggggggatctctttttggaggacgtccttttttgacaatgtaataataatgccttctaatctccttaaggacatcaagaggaacccattctatcaaacagaatgattgagtgggcgtggctggcatttcagccatacagtaaccttttaaatagttttttaat

SEQ ID NO: 46031 - DNA, 663 bp, Glycine max
  unsure (1)..(663): unsure at all n locations
  Clone ID: PAT_MRT3847_141567C.1
aaaagaagcggaatagaaagaaaagtgttnnntccagttcagcacatnnnaccacaaatgagatgctacgcatccctcactctcccttcgcatttggccctccgcctgtggggcagccatcagacattgttcctgaagtactatggaacaccatgaacaatattgatgcattaacattgcaatttagacagctaaacttaaacgcagaagccagagaccttgcatttcatgaggagaatgcacttgtcccttataaacagaaaaacagccttatccatggagatggggtcatcgttccctttcacattaagaaacagcatctacgaccaaaggtcaaccttgatgatgagactgatagagtgtggaagcttttgctgttagatataaacagtcatgggattgatggaacagatgaagataaggccaagtggtgggaagaagaacgaaatgtgttccgaggacgagccgactcttttattgcacgaatgcatcttgtacaaggagacagacgcttttctcgatggaaaggatcagttgtggattctgtgcttggagttttcctcactcaaaatgtcactgaccatctgtccaggtctgctgccaggcccctcgccgctcgatttcctcttcggtcgtgttgtctccccacttcccatatatatg

SEQ ID NO: 46032 - DNA, 789 bp, Glycine max
  Clone ID: PAT_MRT3847_141568C.1
cccacgcgtccgcccacgcgtccggacgccaatgcatccattcgggaaagtgaacggtgcagggtttgagtacatgacaccgcggaggtcaaacttggcgaacatggggcatgtggtgataacggagtcggagctggggccgtcgccatcggaggtggcggcggcgatcgcgaggaagccggtgatcgacgagggggagaattcaacggtgggagggtggagcttggacgcggagagcgtggaggggctgcagtcgaagctggagaggtggcggacggacttgccgccggtggtcgatcgcggcgaggtctcgagctacccaacgacgagcaccaccaagacgagccggcactcgcggaggcacaccgacggcgggagtactgggagtggcttgttctcatgctttagtaacatatgtggtgttgagtgctacgttggttgcggcggtgaccctaaaggaaagaagaaccgcatccgcagtcgccgcactccctcagcggatgacagttccagtcttctctaactacccacaccaatatgcattgtggagccaacatgggaatatttgtggcaatggactatgctgtaataattttattcattctttgttattccatcatctgtttttgctactccatcttttgtcaattgtaagacatgtcagtttaattcgttgggactccacaatacaacataaggctatacacatatttccttacttaaaaaaaaaaattttcattagttgccgatcatatgaatctgatcatgtgagcatataatgagggcttt

SEQ ID NO: 46033 - DNA, 276 bp, Glycine max
  Clone ID: PAT_MRT3847_141569C.1
cacgcgtacggctcgaggtcacgcgggtctgtctcttgcttcaacagtgtctggacggaacagatccggggactctcttccagcctccgaccgccctccgatttcctctacgcttgcaacctccgggacgatcttcacggcgatctcctgcttctgggacctgccagatcgggtttgtggatcgcaccatattgccaatcatccatgagcacgcagttacgtcagaattcattccatcgacgtggatgcagccgtcaacagcctggtcaatttgta

SEQ ID NO: 46034 - DNA, 1269 bp, Glycine max
  Clone ID: PAT_MRT3847_14156C.1
tactgctgcgagaagacgacagaaggggatccgaaatccaaataatgaatgatccggaaagaaaaccctagccccgaagtagcacgtgactgtgaaaataggagtagtagcgagcgccgcaaggcgaaatcacactatctctgctgaaacgcaaatgcttttacatcgaccgtccaatcaagtgccacgtcatcgatccgcgtgaaatcgattttgaacggccaggatcagcgctgcagaaaaactgggggaagcgaagggaagaggctggtaacttggctgttttctccattctcgcgtgctcggttttggatcgaatttttttttctccgtttgtttgcggaacaacgagtttcgaaatcccgtggagaacgtaacattctttggtttctggatttgaagatgaaggccacaaaggaattgagccagcatgtggaggaaaatgaggtcacggtcttggttgatgaggaggaggacgaagaatacgagtccgaggatgaagtagtagacgacggagaggacgatgaagacgacgacgacgacgatgacgatgacgacgacaatgaagacgaggaagacgacgatgaagatgatgctcccgacggcggtgacgacgacgacgatgaagacgaagaagaagaaagtgatgtccagcgcggtggagagcctgacgacgacgataacgatgacgacgacgaagatgaagacgaggaggatgaggaggagcaaggggaagaggcggatttgggaacagagtaccttatccgccctctagtcactgctgaggaggaggaagcatctagtgatttcgaaccagaggagaatggcgaggaggaggaagaagatgtcgatgatgaggatggtgagaagtctgaggctccaccaaaaagaaagaggtcagataaagatgattcagatgacgatgatggcggtgaagatgatgatgagagaccctctaagaggtagaactgggtccattctttgcttaagggctcagactagtcaacttatctccctttgccctttaaaaacatttcagggacttgtttcattctctcttgtatcattatggtgcgacattatttaggctgaataactttcatgtttggtgcgtagtcaatggattaaaacatttggtagaacaaattttgtaagacttgaatgttttcttaaaagggctttgcagcttggtagatcttatgttatgtattactgtatctgttggtagatttctacgtattgttttttatataacgatcgtattattat

SEQ ID NO: 46035 - DNA, 472 bp, Glycine max
  Clone ID: PAT_MRT3847_141570C.1
aaacgcgtacaacaatggcatgtttgtacactgacaaaaaatatttaacaatttatactgcatatgagcgctttatctttctctagcacattatgtacctacatgcccatactggggctgtgatttctctcttaattataaaactgggggagccaaaaacatttttggcacttgaatcacatcaccttgggattagcatctactctttctaggatatgcacactcttttgtggatcagaaggggttgacactaaggctatgcctattccaaggctctaggtcctaatgctattgatgttccctgtggcttgcgccccctccgcataataacccatttgatgtgatcgcctgcccatgatctaaaacccaccctacttcatttagacattcaccttccttgctttttataagacaaccccacaggtgcttaggaagcaatatattggcatctccatctctgacagagctctgc

SEQ ID NO: 46036 - DNA, 1703 bp, Glycine max
  Clone ID: PAT_MRT3847_141571C.1
ccacgcgtccgcttcagcactccggtgaacgacttccgccgctacagccgcggcgccgccggccacgaggaaagattttccctatggaacagcgactgcggggtccacgaacacgttttcagcacctagggcaccaacgccgccggcggctccggcgagttcaaaaactactcccgcaactccaacgtccccgacctacgcttcaccacctactccgacagcaccggcgggagaacgcaatcgttctccagctacagcgaagacggcaacgccggcggccagaccttccaatcctacggaaagaactccgccggcgcggcgaacgacttcgccgcctacggcacagactccaacgtcgcctcttcagatttcacgaactacggaaagggaggtgcgggccccaacgacacgttcacgaattacggcgttaacatgaacaaccctacggagacgtttcagagctacgcagacggaaccgttggtggaacgcagagtttttccaactacagagaccaagctaacgtaggtgctgactcgttccaatcctacgctaagaacacgttagggtccgaagcggattttaaaaactacgggaattcgttcaaccctggttcggacactttcaaaggctacgctaaaggcgcagaagataacaaggttggcttcacaacctacagcgctaacacaaacgctacctttaaagattacgccaaacacggcgtttcctttgctagttacaacgtctcttcggaatctaaaacagtcagtagcagtgtggtaaaaaggtgggttgaaccgggtaagttttttcgcgagaccatgcttaaggaagggactcttatgcccatgcccgatataagggataagatgccgaaaaggtcgtttttgccccgcgctattctaaccaaattgcccttctcgtctgccaaggttgacgagttgaagcgcctcttcaaggtttctgagaactcctccatggagaaaatgatcatggactctttgggggagtgcgagagggcacccagcgtgggtgagaccaaacgctgtgtggcttccgttgaggatatgattgacttttcaacctccgttttgggccggaatgtcgcagtttggaccacagagaatgtaaaagggtccaataagaatgtgatggtgggtcgggttaaagggatgaatggtgggaaggtgacaaaatcggtgtcgtgccaccagagcttgttcccttatttgctttactactgccactccgttcctaaggttcgggtctacgaagcggatcttttggaccccgaatctaaggccaagattaaccacggtgttgctatctgccacttggacacaactgcgtggagccccacccacggtgcattcttggcactcgggtcgggtccgggtaggattgaagtgtgtcactggatcttcgagaatgacttgacatggactattgctgactgatttaggaaattggagttggtttgcgactccggtggctaatggaaattgaaagcaggctcaacccagtgtcaatgggtttttcatttaagtcacttttttttttttttagaaataaatgttttcgacttttggaagtctttatttaataattactgataatgagcctgtgtttgaaagtgtgaattatgtatttatatggctttcccatttagtggaagcgaatgaatgaatgcatcttgccatatgtt

SEQ ID NO: 46037 - DNA, 2189 bp, Glycine max
  Clone ID: PAT_MRT3847_141572C.1
aattacagctctgatcacttctgatctttctaagttcgtatttggtactgcttgtttgattcaggcaacaacaatgtcaccaatataagcatatcgtcgattactagctcctaggattcgaatacacatcagttcgcgtgctccgctattatcagctacattcgaatgagtttgaggttgaatcatatcatttttttattctttcagtcaaaaaatggaagtaaaaatattttgtgttcaaaaaaaggaacctacatttgcattttttgttttcatcttaaagacctctttcctttggttctaatttattaccctgaaataatgaattgagttcgtataggcattttggatgatgctattgaaatagcctttcttgctatattttctggtaccccacccatttcataaagtattttcccaggtttaacgacagctacccaatattcgggagaaccttttcctgaacccatacgtgtttcagtaggtcttactgtaaccggtttgtctggaaatatgcgtacccatatttgtccacctcggcgaacatttcgtgacattgcccgccgtcccgcttctatttgtctagatgttatccaagctggctcaagtgcttgaagagcatatcttccgaagcaaatatgattccctcgataggatattcctttcattcttcctctatgttgtttacgaaatctggttctttggggactaagcatagcaatactatcaatatgaaatgattcatttcattttttagtcgattcaatcttataaaattgatcattttggagaaataaaaatcgagtaatttttcattttttgttttctaaaaaaaaatatagcacatttaagataaaatatagcacatttaagataaagaataatatatttttctttatttagaaaatatccaaactttgatccctaaaaccccataaatagttcgaactgtatagcaacaataatctattttcgctcgaatggtttgtagaggaactctaccttctctgatccattcaacacgtgcaatttcttttccgtcgatacgtcctgcaatttgtacttgaactccttttgtacccgcctgttcagttaattcaatagcttttttcattgctttacgaaacgaaactctattctttaattgtccagctataaattctgcaataatattagggtgtttataagcatttgcaacttttacaatagcaatgtttagttttcgattcacacaattcagttttttttgcatattcgtctgtaattcttcgattttttgagacttaccctctattaaaaactttggaaatcccatatatattataacttgaataagatcaattcttttttgaatctttatctgtccaatatcctctggtgttgagggaattcttatatttttttgtatataatttttgatacaatctcgtatttttttatcttcttgtatattctcggaataatttgttggttgagcaaaccaaaaagaaaataaacaaataagacgtatcattttttgtcccataattccccactactatacataaaatgatacgtcttatttgtttattttctttttttttttctaaagatatctatagataaatatatctatatatatctatagatatctttataacccattctagctcattgactaagttcggtgactagcattagctactgtaaaaaaaaaaccaattcaaaaaatcgaataaaacacgactaattttattaatttaaatatttaatttcattaaatatttaattaaagaattttttttttttttataaaagaaatgatttgaatttcattttaataagaattccattttgtaatatttagttataaattacgatttaaaaatttatgttaaaattaacgttaacgacgagatctattatcatttttcgcatgtcctcggaaatttagagtaggtgaaaattctcctaatttatggcctaccatacgatctgttatataaataggtaaatgctcttttccgttgtggatagcaatggtatggccaatcattgtaggtataataataacttggtccagagcatctaccattatacctacaatgatagatgctctggaccaagttattattatatctttttccagagcatctatcattgtaggtataatggtagatgctctggaaaaagatataataataacttgg

SEQ ID NO: 46038 - DNA, 273 bp, Glycine max
  Clone ID: PAT_MRT3847_141573C.1
tcacgcgccacttgggagtgtgtcggtcagaaaggggggcgcggggggaacgtgtcgttgcgtcagcatcgaaatcaccgccatgtggtcagtggataagcgcggaaggtgtggccggtgcgacctcacgtggcctctccggcagcgtgatgctgctcggcctgccggctccagaagtgctttcccagcagccgaatgtctggcttgagcagcaaagcgctgcttctccttgtccggttgtgcgatcttggatatgcaatgtagggaagaaga

SEQ ID NO: 46039 - DNA, 5895 bp, Glycine max
  Clone ID: PAT_MRT3847_141574C.1
ctttttttagggagatgtacatccattatgtggcataggagttacttctcgtataaaatttaatagtataccacttctacgaatagctcttaatgccgcatctcttccgagaccaggaccttttatcatgacttctgctcgttgcatgccttgatccgatactgttcgaatagcatttcctgctgcagtttgagcggcaaaaggtgtcccccttcgtgtacctttgaatccgcaagtaccggcggaggaccaagaaatcacccgacctcgtacatctgtaacagttacaatagtattgttgaaactagcttgaacatgaataactccctttggtattttacgagtatgcttacgcgaaccaatacgtacatttttacgcgaaccctttttagatataggttttgccatatttaattatttcataaaaataaatccaagatatatggtatggatatatccatttcgtgtcaaaaaagggggatcctttattaaattaattatatcctttattaaattaattattttataactagaattaatattctatttttctatattaattctattttagttcgattaatataaaataaaatttttgaaataaaatttcaaatttgaaatatcaatcaatcatttttcttataaaataaaaattggatatttgatagaataatatatatataataagataaaatataaattataaatttctatattagaattctattttttttagaaagcctctgtttgttaaaatattatccttgtctttgtttatgtcttggattggaacaaattactataattcgccctcgtcttcgaatcaatcgacatttttcacaaattttacgaacggaggctcttattttcatatttgccattccttaacttaataagttaatccaaaattgatttattggaagaaaataaggtttgcttacgttttgaacttctaattgtggtcttccccataaaaaaatgttgaggttgaaaaacacccaaattaaattgaatgacttatattttttttctttccttatcgtatacccataaaaagtacgttgaatctttttggaaacatatcctataatcaaaatccaatttgcattaattatataagggaacttgaaacataccccggggaaatgattcatgggtaagttattcatttagtaattaaatcttcgtgaatcccccctttttttaattccagttaaatcccttatcacattcacaaatatacataaagggggaagttctattagaaacttgcgttttctctttctttttttttttaccaaaaatggatcgaagtttctcatataattcgggtgttagaaagattaccatatataacataaaacttctccgccaattctttctaatcgagcctctcgatctgtcattatacctctagaagttgaaagaattacaatccccatgccccctaaaattcgagggattcgttgataattagaatatattcgtagaccgggtgtactgatccgttttaaatttaaaaaacttttatatgatccttttctatttcttctataccgtagagttaaaactaaaaaatatttgtcgttttctctatgttttctgacgttttcaacaaaaccctcgcgtaaaagtatttttacaatgttttctgttatgttagtaaatggtatttgaaccattccttttttttattcatgtcagcatttcttatataggttattatgtcagcgatggtgtccttacccatggtaaacaaaaatgattgttgccctttactttctatataatcaacatgctcctttttctatttattattcttttttttttttacgttctattatatatatatctatctatattctatatatagatatattgtttaggttatcaagtattaatctgaaataaataagaattgctgcttctaatacttataataattactacaaattctaataattactacaaaagggatatatgttagataaaatagattaattaatctatttcacaaaaaaataatgtatccatagcacagtttcgtcttataatacctcgggtgctaatgaaactattttagtgaaatttaactgtctcaattcccgggcgattgcacaaaagattcgagttccttttggatttccttcttgatcaatgacaactgcagcattatcatcatactgaattattataccgttgctacgtttgagttctttacaagtacgtacaattacagctctgatcacttctgatctttctaagttcgtatttggtactgcttgtttgattacagcaacaacaatgtcaccaatataagcatatcgtcgattactagctcctaggattcgaatacacatcagttcgcgtgctccgctattatcagctacattcaaatgagtttgaggttgaatcatatcatttttttattctttcagtcaaaaaatggaagtaaaaatattttgtgttcaaaaaaaggaacctacatttgcattttttgttttcatcttaaagacctctttcctttggttctaatttattaccctgaaataatgaattgagttcgtataggcattttggatgatgctattgaaatagcctttcttgctatattttctggtaccccacccatttcataaagtattttcccaggtttaacgacagctacccaatattcgggagaaccttttcctgaacccatacgtgtttcagtaggtcttactgtaaccggtttgtctggaaatatgcgtacccatatttgtccacctcggcgaacatttcgtgacattgcccgccgtcccgcttctatttgtctagatgttatccaagctggctcaagtgcttgaagagcatatcttccgaagcaaatatgattccctcgataggatattcctttcattcttcctctatgttgtttacgaaatctggttctttgggggttataattgatggttgtttctcaattccatctttattacagaaccgtacatgagattttcacctcatacggctcctcgcgaatgaagcaattcaaatagatatctatctatatatatagataatctatttaatctaatcgataaaataatatgcactaatattcatatgtttaatgaataattgaatagcgggattttttgagatttcatagaatctattccaaatttttatattttgttttgatatagaatggaatatgtattcttataaataaaccattttttttttacatatataactaaagaatcttgttttgttctattatttgttattttataatattctaatgaatctttattttcctttttattattagttattagaatattttttattattagaaagaataaatagaattggcaaaaataaaaaaaaaaaaaattcaataaaatcaaaattatcgcgggcgaatatttactcttttattatcaatcaaattcagatgtaatgtagggcacaactcctaaaaaaaaggattgctttttggtttcttccgccatcccacctaatgaatcattaagatttgtttttaataaaatcttaagtatttgcaggtttcgtcgttcccatcacttctcgattaatggttaggtctgaattcgacaatggagcctttctcatatcttaaaattaataatctttttttttttcgaatattgatttgttttttcgtgaatcaatattctcagtttttattgattcagagctcttaatttgtttacgttataaattaattcatatataaatagatatgaattgatttagattgatgctttattacactaccttttatgagataacccatagacctttacatattagaattctatatcattgattttttttctctctttctttcacctcttcatttatctgtatatttttattgctttacaactaaataagatttttgttcttttatgcttcacaatagttcagttgctataatatatctttttttatatttttttttgttttgactagttctttagatctagataatccgaagcgatgcgttggttattagttcttttttaattcatttatacgatgaaccggtttataaatttgttaaattggaaccgttctaaaaaactaacgagtcgcacactaagcatagcaatactatcaatatgaaatgattcatttcattttttagtcgattcaatcttataaaattgatcattttggagaaataaaaatcgagtaatttttcattttttgttttctaaaaaaaaatatagcacatttaagataaaatatagcacatttaagataaagaataatatatttttctttatttagaaaatatccaaactttgatccctaaaaccccataaatagttcgaactgtatagcaacaataatcgattttcgctcgaatggtttgtagaggaactctaccttctctgatccattcaacacgtgcaatttcttttccgtcgatacgtcctgcaatttgtacttgaactccttttgtacccgcctgttcagttaattcaatagcttttttcattgctttacgaaacgaaactctattctttaattgtccagctataaattctgcaataatattagggtgtttataagcatttgcaacttttacaatagcaatgtttagttttcgattcacacaattcagttttttttgcatattcgtctgtaattcttcgattttttgagacttaccctctattaaaaactttggaaatcccatatatattataacttgaataagatcaattcttttttgaatctttatctgtccaattccctcaacaccagaggatattcttatatttttttgtatataatttttgatacaatctcgtatttttttatcttcttgtatattctcggaataatttgttggttgagcaaaccaaatagaatcatgactttgagttgtaccaagtctgaaaccaagcggatttattttttgtcccataattccccactactatacataaaatgatacgtcttatttgtttattttcttttttttttttctaaagatatctatagataaatatatctatatatatctatagatatctttataacccattctagctcattgactaagttcggtgactagcattagctactgtaaaaaaaaaccaattcaaaaaatcgaataaaacacgactaattttattaatttaaatatttaatttcattaaatatttaattaaagaatttttttttttttttataaaagaaatgatttgaatttcattttaataagaattccattttgtaatatttagttataaattacgatttaaaaatttatgttaaaattaacgttaacgacgagatctattatcatttttcgcatgtcctcggaaatttagagtaggtgaaaattctcctaatttatggcctaccatacgatctgttatataaataggtaaatgctcttttccgttgtggatagcaatggtatggccaatcattgtaggtataatggtagatgctctggaccaagttattattatatctttttccgcttttgtgttaagtttatttatttttcttaataaatgattcgctacaaaaggatttttttttagtgaacgtgtcacagttaattactcctttttcttgtaaagacgaagaaacaatttctattttctctactatttagtacgacgacgaagaatcaaattatcactatatttcttcctttttctacttcttcttccaagtgcaggaaaaccccaaggagttgcgggtttttttctaccaattggggccctcccttcaccacccccatgcggatggtctacggggttcataactactcctcttactacaggacgcttacctagccaacatttagatccggctctacctaaatttttctggtttactccaacatttcccacttgt

SEQ ID NO: 46040 - DNA, 1394 bp, Glycine max
  Clone ID: PAT_MRT3847_141575C.1
caaacaaagggagataaattcttttttttttattccgtttttttttttcatattattttctctggggccctaaccctaactttattaccttggcacccacaatacatcactcaactggggctcccgcgtccggctgctcaggtggttaattccaaatctccatcacgtttctgtttcagttattctcttcgttcgcgacgccattttgtttcgctgaaaagattcccgacgcatctcataacttttgacaaaggatggcttcaagattctggacccagggtggaagtgattccgaggaggaggagagtgattatgatgaggaggttgataccacggtgggtgaatctggtagtcaagcagtgacaagcaggtacctgcaggataatgcaagtgacagtgatgactctgatggccaaaagcgcattgtgaggtcagcaaaggataaacgtttcgaggagatggcttccactgtcgaccagatgaagaatgccatgaagatcaatgactgggtgagcttgcaagagagttttgacaagattaacaaacagcttgagaaggtcatgcgtgtcactgagtctgagaaggtccccaatctttacatcaaggcactcgtgatgttggaagatttcttggctcaggctttggctaataaggatgccaagaagaaaatgagcagtagcaatgctaaagccttgaactcaatgaagcagaagctgaagaagaataataagcagtatgaggacttgattaataagtgcagggagaaccctgagagcgaggaggaaaaagaagaagaggagagcgatgaagagtatgacagtgatggtgagattattgatccggatcagcttcaaaaaccagaagcaaaatctgattcggaggcctctcaatatgaagatgaaaagccagatgctggtgaaggtccttgggaccaaaagcttagcaagaaggacaggcttttggatagacagttcatgaaaaaccctagtgagatcacgtgggacgcggttaacaagaagtttaaagaggttgtggctgccaggggaagaaagggaactggtaggttcgaacaggttgagcagctcactttcttaacaaaagttgctaagacacctgcacagaagttggaaattctgttcagtgtggtttctgctcagtttgatgccgggcctcgcatgtgcccaatgtatgatgccattttgtttcgctgaaaagggcggtatcctttgtagtcacgggtttcgttttctctgttcgatttttatatttgttttgttgggtttccaacttctgcctttcatttttctgcttctgaataggacgctatttcgtttcgtctagttaggggattgggaatttttctgataattgcttttgtttttgttgagaatttg

SEQ ID NO: 46041 - DNA, 684 bp, Glycine max
  unsure (1)..(684): unsure at all n locations
  Clone ID: PAT_MRT3847_141576C.1
tattgcggtgacgcagggcggagcggcatgggttctggagcggtttttcacgccgctacttcgaaccattggaatttccaaaaataccctcaatgagggtaagtgaaggtattttaggttttttgaaggtcactcttccagttcctcccacccaagcctcccccttttcctcctcctctgccaccctccgtcctcctccccctcacacatcgccgcggcggcttcatcccctcctgcctctccgacgacgccgtctccatgcgtaacttcgaccatggcttcaccgtgatcgccgccatcctccgccgcatcgagcccctcgacaactccgccatctcaaaaggcatgtcgcccgctgctagagactccatgaagtagaccatttccaccatgctcggattgctcccctccgaccacttcgctgtcatcgttaccgtctccaaacaccccctccattgcctcctcttctcctccattgtcacaggttaacgtagtttataaaggaactcttggtttgaaatttaattaaaaataaaagctagagatatgagtgcggttgttggcattgagtgacactagctgagtgatgagttcaatgcttgtctggactttctttccttttgatctttttctgattntcttatctctttcctttatctcctctttttgttcccatttaatcta

SEQ ID NO: 46042 - DNA, 124 bp, Glycine max
  unsure (1)..(124): unsure at all n locations
  Clone ID: PAT_MRT3847_141577C.1
gtggatgctcctttnatgtggaaatgcttcggatttggnangagtccgtnagantntcggtcatagctaggcgtcatggangtgaactccccttcacacttttcaggcctggctanaacantat

SEQ ID NO: 46043 - DNA, 411 bp, Glycine max
  unsure (1)..(411): unsure at all n locations
  Clone ID: PAT_MRT3847_141578C.1
gcgtacgtaagcttgaatcctctagagccgcccccccttttttttttttttttttttnnnttttttttttttttttnnnatatttcttttggtggcttttnattgggggaaacttttttttctcattnnnnngaaaaaaacaaaaatccctctttttccaatactaaaatccataccccaccctcaaaccaaagccatcctaaaacaaaagcacattcccaccccataactactacaccaacccatgcttgggtttcaaaaccatcccccctataactcccaacccaaaactaatactttgcgccatacaaaaaaccaacccccttttctcatccacctacttcaacaattgcctgaatgcttaaaaacaccaaaaccctactgtttatttaaaagcgcaccaatccccaa

SEQ ID NO: 46044 - DNA, 1043 bp, Glycine max
  Clone ID: PAT_MRT3847_141579C.1
gtcacagtgtctcaattgatgtcctctctcgtataacagttcattcatgtgattctatatttggtgatgctgagactagactcctgatgcacatcataggattactcccttggctctgtcttcaacttagcaaagacatagtgataggtccagcttctccactccaacatcaatatcaaaaggcttgctccgttgctgccaatgttgcaatctggtgtcgagcaaaatcttttgatgaattagctactgtatttatgatttactctcgtggtgagattaagagtgttgataattttctggcttgtgtttcaccacttttatgcaatgaatggtttccaaaacattcaactttggcttttggacacttattaaggcttctggaaaaaggaccggtggagtatcaacgtgtgattctacttatgctcaaagctctcctccagcacacaccaatggatgctacccagagtccacatatttatgcaattgtatcccaattggtagaaagcactttgtgttgggaggcactaagtgtcttagaagcccttctacaaagttgcagttcattgactggttctcatccatatgaacctggttcattggagaatggaattggtggaactgaagaaaagttgcttgctccacaaacctcattcaaggcccgcagtggccctctgcagtatggttttggatcaggactaggctcagtttctactcctggacacgttgggtcaactgagtctgggatgtcaccaagagaggttgctctgcagaatactcgcctgataattggtcgggtattggacagaagtgcgttaggtaagagaaaggaccagaaaaagctagtcccttttgtggccaatattggtaacccatgattgtataattcatttgctgtatatattctgtccaaagatgtagggtttgctacagggtagaggttgtacatactacataggctgggatgagagtttgtaacattctgtgtagttgtagacaaaaatcattttgatgtcaaatagcatgcacaatttaactttgttggt

SEQ ID NO: 46045 - DNA, 551 bp, Glycine max
  Clone ID: PAT_MRT3847_14157C.1
gccacaaattctatcggtttacctattataacaacatccactttcaaactgcaacctcccattggctttctttgccctcaaaaaaagaatcatatcactcatattttcttcattccatggcctcaacaaaatgtggttcgagaacaatgaagtcccaaccatcacgcacgtgcatgtgctcacccacgaatcaccctggctcgttccggtgtagcatgcacaagaagccacccctagcggcggcggtaccctccaaatgggaatcatcacctatggctgccaaagccaattcattgaaggccactctcttgcaaatgattaagccctctagccatgatcatcacaagagaaagactttccaaccaaagcctacccgcttttctttgatgaacaacggtaacgctgctgttgttgccgttaattaattaattcatcacaaattggtcttactttctatatatatatatatatatcatcatccctttttctttgctgtaatatatgtacatataccatggaatcccttgtttccctttattcttttttttttg

SEQ ID NO: 46046 - DNA, 590 bp, Glycine max
  Clone ID: PAT_MRT3847_141580C.1
attcatgccgagagcaagtccagcagatgaatatcatggctgcactccaatctcttttgttttccagagtctatatatatcccctcacttgactttgttgtgttaacaattcccctcgtttcgcaagtccaaggagaatggaagcttttgtgtttgtgtttgtggtccttgtgttgtgtggttgtgctgctggtaaggagtgcacaaacattcctacacaatcacacacgctaaggtaccagctattgacatccaagaatggaagattggaggaaaaggccatgtctcactttcatttgacgcctacagatgaatctgaatgggcagatttgctgccgaggaaattattgacagaacaacatcaacacgattgggcggttatgtataagaatattaagaacatgggtgtgttcaagtcacctgaaggctttctcaaagaagttcctcttcaggatgtgaggttgcatgaggattccatccatggtatagcacaacagacaaatttggagtatcttttgatgttggatgtggacagcttgatttgaagctttaggaagacggctggtctatccacacctgggactccttat

SEQ ID NO: 46047 - DNA, 455 bp, Glycine max
  Clone ID: PAT_MRT3847_141581C.1
tgtagtttgttccatcatttacacctaggcggccttgcctatgtaaaatgttgtttttcatatttaagacttgggtcagcatttttttatttgatttgtggtatgtatctagggttttctcatcccttctgtcttctatgtttctcttggtcattggcaatgtcaatttttggaaaagtacctagttattttattagattttatgaaaacttgtgtttaatgtagactacacactacgtatttatacttacatgagtgggatacaataataaatgctgataaagtcctaatgacatgttacgtgtgttgaaaactaattaaacatgacatacatgtattgcatgtactttatacgacactcttcctcagcatgttaggatattatctttacagagttaaagaaaatgaaaattgtattgaagtgtaaaagtgtacaagatataacattcaccgac

SEQ ID NO: 46048 - DNA, 226 bp, Glycine max
  Clone ID: PAT_MRT3847_141582C.1
ccctcccaacaccatttttttacatataaaaatagctgtttaagaggggacaagtcccaccaaccaaaaacggaaaaaataaaaccaacccaaaatatcctaaaagcaaataggcctttatccccctaccaacccatttttaaaaaaacacaatgctataaaacgggttggcgcttttcctacgtacggggcatgtatgctaaaagcataatcccccccctgctat

SEQ ID NO: 46049 - DNA, 230 bp, Glycine max
  Clone ID: PAT_MRT3847_141583C.1
gccaagacattctttgccggtaaacttcaaaaggatgcgatcgcctctttgattgcaagatcaattggtgggtattcctatttatgacgccgcagcggagacaaatgaaatgttgtattgttggagccaattgactgtattaatgtaaccattctattctttgaaggttaatttatgtaaccattcattagttggtagtgtttgtttcctttttttttagttggttaact

SEQ ID NO: 46050 - DNA, 307 bp, Glycine max
  unsure (1)..(307): unsure at all n locations
  Clone ID: PAT_MRT3847_141584C.1
aaacgcttttatcttgatggcctgccgaaaaatgataactctttgcttaattgattgcttaagcctcttttctcttaccaaaaactgaggtctanaagccaaagtgccatttttggacaaaaattttatcggagttgcaatgaacatggatcctgattataagatgattaaacaggaacactgtcgaattgcaaatgtgtgctgaagaggccctttgatgatgaagagcgtccttatctggcgaagacatgggatgcagcttatggaacaagtcagtgatgtgagtggctatggttggatgcatggg

SEQ ID NO: 46051 - DNA, 268 bp, Glycine max
  Clone ID: PAT_MRT3847_141585C.1
tcggcggaaacaaaggaggcggaaacttcttccttgacgaagttgctgcttgggactccctccatactccttcttgctgcatgtaaatctccatcagatgaaactatggagacagacagtatagcaataaagtcttatgtctccgtaataatgaataccttacatcatctgattatctccttccatcatatcctggacagtctttgaatatatacataaaaatgtatgtgtataagtatgtacaaaccatggggattgggggtgttaa

SEQ ID NO: 46052 - DNA, 340 bp, Glycine max
  Clone ID: PAT_MRT3847_141586C.1
accacacgtacgctaaatccttctactttctcaatccgaaaaacttgcaacagacttggattcaatcacgtacactttcatattcaaacaacccatctctcataacacaaagcatctccttaattctaaccgatattatctgtactttttcacggattgtaaaaccatatacacagcgaatgctacgacagatgctgacgatacgccacaatctgttcctcgagcactgaaactacagatcaagctgctgctagagagtccatcgagtccataaattgcaggatctcgagacgtcactccaattcgtaatgacagacttgtgtaggacgaatacgatgtc

SEQ ID NO: 46053 - DNA, 595 bp, Glycine max
  Clone ID: PAT_MRT3847_141587C.1
gctgtgctaattgtcatttctccttgaatttgataaaatagctcgccgacgcgcggccagactcgcgccggcgttgttttgaatactttcatcaaccaatccttagtctctactcttcttcctcccgcagccattgggagacgttgatcatctttaaattgttcctgattctgtccatagatagaaataccctactcagaactcatcctaaagaccaaacctcattcgcccttgaggatagttcaaccctacttcgtcgatactgtttggatatacatcgcatccatgcgcttcatattattgtaatttctatacgatcccatgattcgggcgcaagctgcaagtcatttctaccaacgtccaatgcaagtccaatccgggagtaggtactttcgcctcggcgaaccagcactaaaaagtttcctccgaggaacagcagtaaagcattgtgaggtagatacggtgttcgatatagagcatccggcaagaatccgatcatgtctttcacttctttcgcgtcctctaactgcttagccaaacctcgaactgttatacgcgcactttcaactgcgccgaaaggatcgttgctcgctgg

SEQ ID NO: 46054 - DNA, 973 bp, Glycine max
  Clone ID: PAT_MRT3847_141588C.1
ccacgcgtccgccaaaccctattctacatagttcagaaataaatatctaactcgagttttcactattcagcagagaagcctctccgattccggcacggtggtcggcattgcattttttcggcggctcatctccgcaccgactgacaggtatggcagataaagatgaagagctggctatgccaagggatgcaaagattgtgaagtctttgatgaaatcaatgggcgtggaggactatgaacctcgtgttgtacacaagtttcttgatttatggtatcgctatattgttgacgtgttaacggatgctcaagtgtattcagagcatgcagacaagtctgaaatcgactgtgatgatattaagcttgctattcaatccaagcttaacttcagtttctcgcaaccaccccctcgtgaggtgcttctggagttggctcataaccgcaacaagataccattgccaaagactatagctggacctgttatcccgcttccacctgatcaggacacattaatcagtcccaattacatgtttgcaattccaaaccaaaggcctgctgaacctcctatagaagaaacagaggatgaagaagatactaatactattcccaacccctcccaggaagagcagatagtcatgcaacagaattcacctcaaagagtatcatttcccctgcccaaacgccaaaacgattaatttcaagtcctgtctgccattaatgcttaatttagtctaagctcgcacgtaattgttttactatggtggtagtaacaaaaatctataaattttgtagcttgttcgatttatttattctttgtaaagttcactgggttctgacattgaaataaaatggtttccaaacggctccttgtggttagaagtcctagtgaacacaaatgttcaccacagctctctctatagttggtttggagccgtgctaattctgaaattaaattcaattgagtatttctgtagac

SEQ ID NO: 46055 - DNA, 284 bp, Glycine max
  unsure (1)..(284): unsure at all n locations
  Clone ID: PAT_MRT3847_141589C.1
ttaatcctatcctatcgtagcaaagaaaganaganagaaaaccctagcttaccttttcaactttcaagatgcaaatccttccgttaagacactcactggtaagacaatcacccttgaggtggagagttcagataccatagataatgtaaagtccaagattcaagacaaggaagggatcccaccagaccagggccgtctcatttttgctggcaagcagcttgaggatggacgtacacttgctgatacaacatccaaaaggagtccactcttcacttggtgctcgg

SEQ ID NO: 46056 - DNA, 494 bp, Glycine max
  Clone ID: PAT_MRT3847_14158C.1
attttagagacataagatggtagtaaaatgggggtcccttattctccttgttaatgtatggatgtattaaaagttttgtcccttgtaatttctttgtttggcttaatgaaaggtagtaaaatgatcaactagagtgaaaagaatgctgtactctgcctccgtatttgtgggcgactgttttatactttttaatttttagttaaggttaatgcttattctttttaaattagtaattctgtttacctttttagttgcaatatggttttatcagcgccatatatatgtgtgtgtataccggtgcagaaaataccactttttccaaattttggtatgtttgatgctaaatatttgtctttattaatcaggagctcatgttggaggcctacacaagcagctgtgaagtccaatttccatctcccaatgcgcagttttgagttaaaaaataggttggtttgaaatttactgttctaaattcattcattcttctactaaat

SEQ ID NO: 46057 - DNA, 345 bp, Glycine max
  unsure (1)..(345): unsure at all n locations
  Clone ID: PAT_MRT3847_141590C.1
cngntnagaacgctggnntttgaacatgctgatggaagaccactaatagagggcccacccacggtgnnngggttatcactcaatccttgggcccactacagtctacaaactgtgaactacaaactacggaacaccgattagacttctatgtttcgtatgatatctttttgaggatcactaattggggatccatgattagcaagccatgattatcatgtgatgnnggaggactgacctattatgagacttgacataggagatttgaggcttattctatcacagttaatgtataagcctacatctatcagcttaccctaacactgttctcctaannactgctattag

SEQ ID NO: 46058 - DNA, 550 bp, Glycine max
  unsure (1)..(550): unsure at all n locations
  Clone ID: PAT_MRT3847_141591C.1
ttcttctcttgcggctagggttttagcgcagcttcttctaaatttaaggaagatgggtaaggaaaaggttcacatcantattgtggtcattggccatgtcaactctgggaaatccactaccactggtcacctgatttacaagcttggaggcattgacaagcgtgttattgaaaggtttgaaaaggaagctgctgagatgaacaagaggtctttcaagtatgcctgggtgctggacaaacttaaagctaagcataaaagaagaatcaccattaatattgctttataaaagtttaaaacaacaaagtattattacacagttattaatacgcctaaacattaaaatttcattaagaatataattactaaaacatcccaagctaactatactattcttatcattaattcgaccactggtaattttgaagctaatatttccaagaataaacagactcgtgaacatactctactgtcattcaccctttatataaaacagataatttgctactataacaaaataaatactactacacccaagtattccaaaaccagg

SEQ ID NO: 46059 - DNA, 387 bp, Glycine max
  Clone ID: PAT_MRT3847_141592C.1
ggctcgagtattattcttcctcagtagtgtcatttacgcttctcttatctgcaacaactatgcgtggcggtaaggtcttatccgtcacgaccatctgcggtcaatctggtggccgcatcttgatggagctctacgtcgacgtaactaccatgaccgtcgagatcatgcgtgcgactagcaccacttagatgggcagctggcaggtcgtgaagcccctccactacaagggctcgagcttgcaccgaatgatccccagattgatgtgtcaaggtggcgacttgaccgaccgaaactgaaccctaggggtgctaatatatggctccctgttcgacgacgagatcttggtactgaagcacacctgtctctgcatcctgctcatggtgaacg

SEQ ID NO: 46060 - DNA, 462 bp, Glycine max
  Clone ID: PAT_MRT3847_141593C.1
aaacagcagggggggggggtttaaaaaaaaaacaaagttaccttctttttttttttggcacaggtttgaccaaaaccccgaattactaaaattgataggaaggaaccctaggaaaaacaaaaagcaaaattccaaacgattatttttcggggaagaggcgaagcacaatacttattaacaaaaaaattgggggggccccaaaaaaaaccgattcccacccccacttaaatggaccagaacttggagccccaaacaggggggctttttgaggcaccataaaaaagctttgagttacccttggaggtccccaaaggtgcctttgagttacccttggctttaaccaaaaggggttccggagcctttttaaaattctccttttttccactccatgccttaagggggctctggtgaagggcccttccaaagggaaaaagaaagggaccatggtttttttccattgac

SEQ ID NO: 46061 - DNA, 519 bp, Glycine max
  unsure (1)..(519): unsure at all n locations
  Clone ID: PAT_MRT3847_141594C.1
cttttttttatttttttgctttacgtcatttccactttaatttagttattattatatcttcttgatgaagtttttctacatggaccatttcctaaatcatagattgcagaaatcgatgcattagaaatatttaaacgtaattgattgttgattgattaagaaagcaaggttttttcacgtgacttcagtttagaattttgactaaatgaaacgctttgtgagaattgcttggacaatgaacaagaatgaatgatggtataattttccgaaaaaaaaaattgggggacttaattatagttagcgcgtaatgttttagtgaccatattatattttgtgaaaaaattgttttattaaattatacaaattttaatatgattcatctatttaatttctaagaaaagagagttagatacacaaaattcacttgttaataatcagactaaaattcaacatcaggaaacgcttccaatttatgaaacatacactccattgtgggatgtatgaaagtggaaggangag

SEQ ID NO: 46062 - DNA, 404 bp, Glycine max
  Clone ID: PAT_MRT3847_141595C.1
ccttctttctttctttttttttgtttttttttttttttttgtttttttgtttgtgtgtgttcattattttctttttgttttcgtcgaaaaaacccaaaacccgtttttttttgttcgaaaagggcgactgtgactggggagaaactgggaatcctttttgtggagaaaaaagtttcccccctacaatcccaattccaagggtgactccccgtggctttttaattacattggcccttgtggttaccttttaaagctttcatttaaaagtatatagcgctcccccccgcaaaaaggaaaattttacgtttgggtgacaaaacaggccctttcaaatttgggcaccttgaaaaggggcccccaaatttccttctcgtttacaaaaactggcgtaatcttttttttta

SEQ ID NO: 46063 - DNA, 456 bp, Glycine max
  unsure (1)..(456): unsure at all n locations
  Clone ID: PAT_MRT3847_141596C.1
gggncgggaatcccggggcggaccaagccgtccgaattttttgagcccaaatttttggagcggaatatttttaaggccaggccgggtaggcgggcgcaccacaaccccgaatgggtttttgtttttgttccaatggttttttggttgggttttgttttaaacaccaccaggctttaatccaaagcttttttaaggccattacccttacggaaccaaaagaggacctttttaacaacaaaggcagggtaaaactccagggttaaaataaatgcttttttgaaggaaaaggcagttgcaggattaacagaagtttttgggacagattttatgggggttccggagggggttaatgctgttggatttaagttttccctttccttaaagaactttttgttaagaatttttgttggtgggttggttttagtagccattttggaagccgttattggggtttcc

SEQ ID NO: 46064 - DNA, 383 bp, Glycine max
  Clone ID: PAT_MRT3847_141597C.1
cttttttttttttttttttttttttttttttttttttttttttttttttttttttttttttttttttttttttttttttaaaaagggggagagggttatcatatgacaagggggattaaggggttatagtttcacatgccttaccataagttgggaaagataacatttttttttataacaatgacaatcactagcgatcgagtagggagaggcgtcttattacacttttttccttcgatctggcacatttaaatggccccatgcaacacaaagcttgtaaaaaccaaaggatcaatgttcctgctagcggggggcaaattggaagcaaaaaaccaaaaaagccccttatgcgattccccaagtatttcgagtcccgtggcagc

SEQ ID NO: 46065 - DNA, 247 bp, Glycine max
  Clone ID: PAT_MRT3847_141598C.1
aatttatcaaaagcactacaatgatcatggttgtaaggttgacgattatggtaacgttgataagtaaatcgacaaatacggcaaccctgttcatgttgctattaaaatctatataaccactataactgttactgatgtttacagtgatgacattaataagctacataataccatctatgcctacgtcgtagacactgaattacaccattataatgatggttactatgatgatactattatacataat

SEQ ID NO: 46066 - DNA, 449 bp, Glycine max
  Clone ID: PAT_MRT3847_141599C.1
tacggctgcgagaagacgacagaagggtccccccacacacatacacaccctatctcacacactctgagtttgagtctgaggcacacacaaatactactacaacatcaacaaccactgtagtattctaattctaattctctttggtgcagttatgaccgaaaattcataaatgagattttctacagtagagttgatgggtgcagttgtcatggcggcgtatcagagactctaattccgtgccataattgcgccccagggaacaactactactcagggaaattcaattcaattaaccaaacatttatttatttacttttatgttggtttaatttaagaaacagttttcctcaaaagctgcgaaaaaaaacccaaccagatcagaagatcatacttgagacgcccccacacggtctcgccacagtgacagattgagagtcaacaagacccac

SEQ ID NO: 46067 - DNA, 229 bp, Glycine max
  Clone ID: PAT_MRT3847_14159C.1
tttttgctatgatgttaccgcctgtgaaaccacagggaatcctggggaatatgggttcgttgcccaccttaatgaggggcgtcaccttaagaagagaccaactgagtttcgagttgacaaggtgcttttaccctttggtgaaaacaaattctactttacccaagttgggccagaaaagggcctctttccatttgaagcttgcgaggatgggcaagtccacttctttccc

SEQ ID NO: 46068 - DNA, 371 bp, Glycine max
  Clone ID: PAT_MRT3847_1415C.1
aaaaaaaaactggctggtggtttttatataacctgggagggggaatttttcccccataccaatttcccgttgggggggggggggcgtcaaaaaaaaatcccccttttaaattacccaaaccatcccccttttaaattacccgatttttaaaaaaaaaaaaaatttaccgttggtaccacccgggcttgaagggcaatttttttttttatgcctggagattggccccttttaaggaagtaaaaccccttgtgggaaaccccttttttccccaaattttttagctggattttttttttttttttaccccttttctttggggttgggcattttactacccccaaaattctttttttccccccctaattttgggg

SEQ ID NO: 46069 - DNA, 1654 bp, Glycine max
  Clone ID: PAT_MRT3847_141600C.1
ggggctgcaatagtttccttgataattttcaaagccagcttaaaaaataaaatatcaagtatttttgtttttgagatatggatgacgacccaagttctgcaaagtatacatctattaactgcaggctgctttttggaaattgttttctaaaaactaaattggattcttttctttccttgcctgaaagataaattctgtgaaaattgttgatgaacttgttcaagtgtcatatatacggctgcgagaagacgacagaaggggaacacaatacattcatccttgtgtttccgttcccgccattgcaaagggaaaaaaatggcttctgcgccatcgagaaccctaacggactttttccaacccgcttcgaagcgcttggagcccactctccccgcatcatgcaaatccgacgacgccaatgcttccacgctctccgtcgatcagaagttgcgcatggaatacaacaagctcctcgccaagtccaagaggaatctcaaactctgcgtcgagagggtctccaaaagcaaagaatcaggtttaggtggcgtgaagctggaagagctgctggtggaagaaacgtggttggaagctctacctggtgaactccaaaaaccctatgccctcactctctccaaattcgttgaaagtgagatttcgggcggagacgcgtcattttccctccgacgcacttgattttcaacgctcttaacacgccttttcatacaaaagtggcctcatttcttatcatggtcctggtcaagcaatggggctttcattctcggttcccgagaatcaaagtcctcatatatatttaaacttcaccaggcttcatccaactcattcttcaaaaatgggctgtgcagggtttctcttgctgaatgctgttctcacagtcaggaagcatcaagcaaattctcatgccaaaaaaggctgggaacaatttactgatgttgttatcaaatctcacagaagaaggaaggagttgtgtttctgttgtggggaaactctgctcgggaaaaatctaggttaattgatgcaagaaagcatcatgttcttactgctgcacatccttctggtttgtctgcaaatagaggcttctttggctgcaggcacttctctcgcactaaccaacttctggagcaaatggggattgatccaatagattggcaactataattattacctatagtttcaagcttcctttttccctttgattaggattatctttgaagcctactgctgtaagtttgcggagcttctgaagtcaatttccttaatgtgtagatgattctgtcgatttcaaatctacctagaaaagatgctttttgtcgatagtttgctcctgcagtgttgctaccttggagattctgctgtaatgcgtaatgaccattactatataggattttggcttaactatattcttggacactaatttcgtgtattatctatgtgctgtcttattattaacgaccaacccatgttaagatggaaattctcaaaaggaccaactcgactacttttaatcctaggttgagatcgtagcaactaaacatgaggaaagttaactttttatttctttcagataaaggtcactcaatatgatacgtgtgtttgtttgggagacaagatttgaaaaaagtattggtttctttgtttt

SEQ ID NO: 46070 - DNA, 574 bp, Glycine max
  unsure (1)..(574): unsure at all n locations
  Clone ID: PAT_MRT3847_141601C.1
aatacattcatccttgtgtttccgttcccgccattgcaaagggaaaaaaatggcttctgcgccatcgagaaccctaacggactttttccaacccgcttcgaagcgcttgaagcccactctccccgcatcatgcaaatccgacgacgccaatgcttccacgctctccgtcgatcagaagttgcgcatggaatacaacaagctcctcgccaagtccaagaggaatctcaaactctgcgtcgagagggtctccaaaagcaaaggtaaaccctccctctgtcgtttcggaaattctaacgtcgtttctgatagttcaaaacgcagaatcaggtttaggtggcgtgaagctggaagagctgctggtggaagaaacgtggttggaagctctacctggtgaactccaaaaaccctatgccctcactctctccaaattcgttgaaagtgagatttcgggcggagacggcgtcattntccctccgacgcacttgattntcaacgctcttaactccacgccttttcatacagtgaaagctgntatccttggccaggacccttatcatggtcctggtcaaagcat

SEQ ID NO: 46071 - DNA, 339 bp, Glycine max
  Clone ID: PAT_MRT3847_141602C.1
acattttgatatcccgcgatcattggtcgccgcaccttacaaccggaaacacatgcaaccgatccttgcctccaagaatctatcaatatcttcctactttcttgtgtccgatttcttatggaaaagaaaatcactctgctgtgctggccacacacttcgcgaatcactctctttcccattcttagtgtattggctgaacactctcctatatgatatacgactttgggtcatcatttaaacgcagttgagtgttctttatcagatctctgttaaatgtgcaagttcaagctcggtgaaagtcctggatgagaagctcccacgtctcctatctatgtatag

SEQ ID NO: 46072 - DNA, 347 bp, Glycine max
  Clone ID: PAT_MRT3847_141603C.1
agcatgtcttctcagtagcgtgctttcttcgcttctctttctcttcgatattcgaagtccgcggctggctccaagcgatccatgcaatggcctcctccgagattaactgggacaggactcttcacgggtgttacagcggcactctacccggtttctgttgtgaaaactaggctgcaggttgcctcaaaggatactttggagagaagtgcgttttctgttgtgaaaggtttacttaaaacggatggcatccctggtttgtataaagggtttggtacagttatcattggagcgatttctaccagaatcatattcctcactgccttagaaacaaccaatgtggctttctt

SEQ ID NO: 46073 - DNA, 337 bp, Glycine max
  Clone ID: PAT_MRT3847_141604C.1
gtacacccgggcgatagtgcaatgcgtgctcaatccaatggtgaaacttatcaacaccatgactatcattataaatgtgtggaacctcataaatgtgctatagctatattacaacttctgcataagagatgttttctttccttatcaatacccaaattatggctaccataggcctgttgaacagctaacaccagtacaaaaacaacaaccactatttccacaggtgacacactgaattataaattatgcaaaaaaagcttcaagctattctagtctgatatcactcccatattaaactgatcagcgagaaatggccactcctcgaagctgaggatac

SEQ ID NO: 46074 - DNA, 338 bp, Glycine max
  Clone ID: PAT_MRT3847_141605C.1
attatatggatggattattaggtttaccacacatgctataggtgccttcttttgtatacgacggcaaaactggaaaaggcagcggggaaaaaaaggaggctcaaaacccgaaatggggggccgaagaataggtaacaaaaacaattgtgacaacctttccccttaagaaagggaaaaaaaaaaacataaatctttatccaaaaaacaactttgaaaaaaaaaactggcccccgcgccccaggtgtaaaaacaccgaaaaaaatatgggggggggacagggggaaaacccttaaaaaaagattcgggcccgccaccaaaggggggattctttttttttt

SEQ ID NO: 46075 - DNA, 378 bp, Glycine max
  Clone ID: PAT_MRT3847_141606C.1
gttttgaggattttctcacaccacacacagaggtgtctctagggatcatcgttcttacgtggagatctagttcttcaatttaacttttcttcttaattaggaacaagcttatcgcccatgaaagccctagctagctaccttccaccaattggtatcaccaaaggatagctctttatctaacgaaaaggttctgtctgctcttgaggccgactgatttctccaacactctcaccaggcgtgaccacgcagtagtgacacacaacgcaacaagaggaggagcgtgcttcatcagcagcaagatcgccaccaagtcaggggaagacaagataagaggaggtgttgaaaaggttatgtgggtcccacaccttgagattggtt

SEQ ID NO: 46076 - DNA, 537 bp, Glycine max
  Clone ID: PAT_MRT3847_141607C.1
gtacgatcatcctgaaccacaatttggtttacaagacacgcacgaagcccaagaacagcaagccatttttcaacgcgggatgtgagcgtttcattcgtgacgtgcgcaacaccgaagtgcacattgctgtccgcgatgcgcgcgttcacgaagatgaccctctgcttggcatcatttacttgccactcgaaaaggtgttccattcgcgcagccagatcaattccacgttcccgctggctggtggcgtaagctatggtcgtgcacgtgtgtctatggtattccgcagtgtgcaatgtcaacttcctaagacactgcttggctgggattgtggcacactcgacattcgtcccacaatcaaaggcattgatgttcctgaggatttgaagaatatgcgcttgaaggttcgcaaccgcacaacacgcggtaagatgaactctcgtggcaacaatgaatggtcgacaaagaataataagccaatttcgctacccgtgcgcatgcgctatgcagcacctcttatcgtcgaattccgacaggacg

SEQ ID NO: 46077 - DNA, 773 bp, Glycine max
  Clone ID: PAT_MRT3847_141608C.1
gttaaatgtcaccgcaaacctccaaagcataacccctctcagctcacctgtgtttccttccccagtttggttgaagacctcaacacctcggatttgaactcttccctaaattttccctaatcggattcgtgtgtttgcttctgcgttccttctcatcagacgcgcgttactgacacttggaggtgtcaattttggttgaaagacctcgatttcgctttcgacaccgttgatggtggctacgccgcaagcgcctaaaacacaacatctcttccctcacccatgtttccttcaccagtttggttgaagacctcgacacaaatccgtgtggctctggtttgttaatttacacaaaacctccgagaaaccgtggaagccgcttctacgaaaattgatggtgccgccgcctttgagatttcagattttaggtagttgagcagtcgtcatcctacatagtagaatatatggaagataacaaaggcacacatgagacttgtgatgtggaagaagggtctgatgaagaatctcaagaacatggtgaagaagagtgtgaaaaagagatggaagaacatattaatgaaagggatgaagagacttgggatgtggaagaagggtctgatgaaatatgaagaagagattaatgaagggggaattgaatgtaatgatgcatttcagtctaaggaaccattgataattgaggatataaatgatattttcagtttgggtgttgagggtctaaagtgttggtttgcaactttggaacttgcttatgattt

SEQ ID NO: 46078 - DNA, 384 bp, Glycine max
  Clone ID: PAT_MRT3847_141609C.1
gggcacaagtgagtttgttgatcgagataactagaaacagtgtgatgaaaatgaaagtccttggtttcctcgttgccacaattttggtagcaagggaatgccatgcctacgaaaagttccctcccccaatgaacaccgggtaatgggcccgtaatccggaagttaaatgcccaagttgtgaggcttgccgtggaaacacaaaacaacctttgcttttagaacattcctgaagagtgcgttgaagcaacaaaggaatacatccatggcgaacaatatagatcagactccaaaacagttaaccaacaagcttacttttatgccagagacctcgaagtccatcccaaggacacatttgtgttcagtatagatggcaccgtactctct

SEQ ID NO: 46079 - DNA, 365 bp, Glycine max
  Clone ID: PAT_MRT3847_14160C.1
ggaacactgagcaggaccggctcttcagcttactactgggtgggagacgccacccctccggtacgtaatactaagactactatgcttatgctgtacacaccgtcaacaaccacattcttcgtttctccaactgctacggttacgctgctctcttcatgataaccttcttccgcatgactgtgctgtcatatactgcgtgctactctgcgtgttggttctactactactgaatcagttgcaaaggtaaatccatacgatcacaacggctggtaccttgtcttccattgacattctcccgctaacacgtgcgatggagtgtcttcaagcaccttcctgaacgcgaagaacgagcctgagcttctaac

SEQ ID NO: 46080 - DNA, 327 bp, Glycine max
  Clone ID: PAT_MRT3847_141610C.1
gcgcgtggatcgagataactagaaacagcgcgatgaaaatgaaggacctcgctttcttccatggtacaattttggtagcatggcaatgccatgcatacgatatgttccctgtccgaatgaacactggctatggtgcccgcactccggaggagaaatgcgcaagtcggaagcttgctgaggaagcacacaacatctttggctttgagaccattcctgaagagcgcgttgatgcaacaaaggaatacatccatggcgaacaatatagatcagacttcaatacagttaaccaacaagcttacttatatgacagagaacttgaagtccatt

SEQ ID NO: 46081 - DNA, 281 bp, Glycine max
  Clone ID: PAT_MRT3847_141611C.1
cgctacagtttcactgcacatgattcggtgtctggcgttacatgaggcacatcggatgctggatatgggttttgagccacggatgaccaacattgtacaccaaatggacgtgcctccaccacgtgccacacagactatgttgttcggtgcgacgtttccaggagagatacagagattggcttctgatttcctttcaggttatattttccttgctgttggaacagtgggttcaagtactgatttgattgtccaaagagttgagtgtgttcaagagtctgaca

SEQ ID NO: 46082 - DNA, 445 bp, Glycine max
  Clone ID: PAT_MRT3847_141612C.1
agataactagaaacagtgtgatgaatatgaacgtccttgttttcttcgcagctacaatactgggagcatggcaatgccatgcgtacgatatggtccctcttctaatgaacactggctatggtgcccgtactcctgaagtgaaatgcgccagttggaggcttgctgtggaagcacacaacatctttggctttgagaccattactgaagagtgcgttgaagcaacaaaggaatacatacatggcgaacaatatagctccgactgcatagcagataaccaacatgcttacttttatgccagagaccttgaaatccataccaaggacacattcgtgttcagtatatatggcaaccgtactctctaatatgggatactacaaaaaacatggatatggggaggagaaaattaactagaccttgtatgatgaatgggttaacaagggcaatg

SEQ ID NO: 46083 - DNA, 515 bp, Glycine max
  Clone ID: PAT_MRT3847_141613C.1
aatttgtgtgtgtgatccaagaacattgtttttctcagaatccttggctgcacaaatatttttcaatgcaaggttcgaggtgtgcacaacataaggagtccaatagatggtaggaaattcgttctctatgatcatacctattgtcttacataaaactgcatctgtcacaatttgtaccacatttgatgacccaaccttcattattgcatctttcatgtgttgagcaatgaaatccttgtcctttatatcaccagagcaatttactgcctttaagaacattggttcactctcagtgacaaccatgaagttaatgagaggtcttctttgtggatcactccgcccatcactaacaatagtcacacctttctgattccatgaatttcttattggttgcatgaggttctccacatggcttctctctgttgtaagcaaggtagttctcaacttattgtaacttggaggcttatgtccactgagattagaagtattggtagcataagaaaatgcctccctat

SEQ ID NO: 46084 - DNA, 566 bp, Glycine max
  unsure (1)..(566): unsure at all n locations
  Clone ID: PAT_MRT3847_141614C.1
aaaangaaggncctggggggcttcgnggctacaannnngggagcagggcaaggccatgcgnacganangggccctctccgaaggaacactgggtatggtgcccgtactccggaggtgaaatgcgcaagttggaggcttggtggggaagcacacaacttttttggctttgagaccattcctgaagagtgcgttgaagcaacaaaggaatacatgcatggcgaacaatatagatcagactccaaaacaggtaaccaacaagcttacttttatgccagagacctggaagtccatcccaaggacacatttgtgttcaggatagatgggaccgtgctctgtaatattgcatactacagaaaacatggatatggggtggagaaattggactggaccttgggtgatgaatgggttaacaaggggaatgcaccggggctggccgagactgtgaggaattacaacaagctggggtgttttgggttnnagatgatagtggttgggggggaagaactctgggcttacggggcgtgggggagggtgactgtttgaagggtggggtctccgcttggggg

SEQ ID NO: 46085 - DNA, 739 bp, Glycine max
  unsure (1)..(739): unsure at all n locations
  Clone ID: PAT_MRT3847_141615C.1
gcacaagtgagtttgttgatcgagataactagaaacagtgtgatgaaaatgaagggggggggtttcttcgttgctacaattttggtagcatgggaatgccatgcgtacgatatgttccctctccgaatgaacactggctatggggcccgtactccggaggggaaatgcgcaagttggaggcttgctgtggaagcacacaacatctttggctttgagagcgtgcctgaagagtgcgttnaagcaacaaaggaatacatccatggggaacaatatagatcagactccaaaacagttaaccaacaagcttacttttatgccagagacccttcgaagtccatcccaagggcagcattgtgggtgtcagtatagatggcanccgtactctctaatattccatactacaaaaaacgtgggagtgggggtgggagggaaaattaaactcgacccttgtatgatgaaatggggttaacaaggggcaatgcagccggcacgtgcccgagaactcttaagaattacaacaagggctggggtgctcttgggcttcaagattatatttcnttggcaaggaagaacacctggacaaacaggggcggtaacagaagcaaacttaaaagaaggcgtggctaccacacatggggaaaaattaattctcaaggggccacaagaatccttccactccaaatggcagtttcatacaaaacagcagcgagagagaaactgataagggagggatacaaca

SEQ ID NO: 46086 - DNA, 277 bp, Glycine max
  Clone ID: PAT_MRT3847_141616C.1
ggtcgatctctagaagcattcgatagaagcttaactttattgccactctaccccatattcccaaagggtggatctatttacgggacgaggttcacattccacgggtatattttgcaccatcaagacaatgtgatctggaaaacaccccataccaccttctggggctcttcataacacgtgcatgacattgtgtaaacatacaacccaaagaaaacatgattaataaaaaaggattcgggggtgcagatacacttcaaacactaatgaacaacatgat

SEQ ID NO: 46087 - DNA, 367 bp, Glycine max
  Clone ID: PAT_MRT3847_141617C.1
gtttgattttctcgttgataaaacaatattttaaatttcaacaattttcttttcacggtaacaagaatcaaatctaataatatcttagtagatattactcaaatctcctcctcacttggaccacactagtgggtacaattttgtgacataggataaaaaaactagtactgggttcaattccgaaccaactaattccttgtgaaaaatgtttttgatctttcaacgagtattattttaatactcgggatagcatagaatataatataggcggcactagacgttgtcaagtctgtctctctctcacagtcaccttaatggtatctgtacactttcagaccaacacaacacaacatctcaaaactctgtc

SEQ ID NO: 46088 - DNA, 655 bp, Glycine max
  Clone ID: PAT_MRT3847_141618C.1
cggcacgagcagtgtgatgaaaatgaaggtccttgttttcttcgatgctacaattttggtagcatggcaatgccatgcgtacgatatgttccctctccgaatgaacactggctatggtgcccgtactccggacgtgaaatgcgcaagttggacgcttgctgtggaagcacacaacatctttgtctttgagaccattcctgaagagtgcgttgaagcaacaaaggaatacatccatggcgaacagtatagatcagactccacaacagtgaaccaacaagctaacttttatgccagagacctcgaagtgcatcccaaggacacattcgtgttcagtatagatggcaccgtactctctaatatttcatactacaaaaaacatggatatggcgtggagaaatttaacttgaccttgtatgatgatatggttaacaaggacaatgtaccagcactgctcgagactctgaagaattacaacacgctgatgtctcttgtcttatagattatattgttgtcacgaagcacactggacactctagctcgtactagagctcacttacagaatgtctgctaccacacatgtgatatattagttctcatggatccataagatccttccattcagaatgcagtccttacaaacacctacgacagagat

SEQ ID NO: 46089 - DNA, 401 bp, Glycine max
  Clone ID: PAT_MRT3847_141619C.1
agggggacaagtgaatttggtgatcgagataaccagaaacagtgtgatgaaaatgaaaggccctggtttcctcggtgccacaaatttgggaacaaggcaatgccatgcctacgaaaagttccctccccgaatgaacactgggcaaggtgcccgtactccggaagggaaatgcccaagttggaaggcttgccgttgaagcacacaacatctttggctttgagaacattcctgaagagtgcgttgaagcaacaaaggaatacatccatggcgaacaatatagatcagactccaaaacagttaaccaacaagcttacttttatgccagagacctcgaagtcgatcccaaggacacatttgtgttcagtatagatggcaccgtactctctaatattccatactac

SEQ ID NO: 46090 - DNA, 673 bp, Glycine max
  unsure (1)..(673): unsure at all n locations
  Clone ID: PAT_MRT3847_14161C.1
gtcagtatcgttacgtaaggcaaatgttctaattctgatttgaaacaaatcccaaaccctagaataaattaattttaattttcttagttagtgtttggtaaagagggatgtataacagtattttactttgtaatgttgtgtgttaatctagatgacacctcatactatttgtaggttatgtttgagaatgtcagctgagagttgaaaactgaaaaactaatttgttaaattaaaattgctttgtaaaattagctgaattagttagaaagtataaatgattgaaaaatgttaaaattatggtttatttaaaaagggtaaataagaaatttgataaatatactaaaaataaaaaagaaagaaattataaaaagctaaaaactagcgttttaaaaaacgatactttaaataatatttcaaaaaatactaaaagtcaatgagaagttactaaaaaagattgcaacatagccataatatgatgaaaataaagacagtttcagtcatgtggttatgccaaaagaaccttggcatcaaccaacgaaggctcgtagttgcaacaagtgattacaattaataaagcaaagcgcgcccttagacaaaaggagacgattccagtgtgacactcattngagatgtgtcacgcattgtgtgcgtgaacttctcttgctggaaaaag

SEQ ID NO: 46091 - DNA, 369 bp, Glycine max
  Clone ID: PAT_MRT3847_141620C.1
gctttgccatgcgtacagatatgttccctctccgaaggaacactggctatggtgcccgtactccggaggtgagatgcgcatgttggaggcttgatgtggaagcacacaacatctttagctttgagaccattcctgaagagtgcgttgaagcaacaaaggaatacattcatggcgaacaattttgatcagactccaaaacagttgaccaacaagctatacttatatggcatagaccttgaagtccatgccaaggacacatttgtgttaagtatagatggcaccgtactatctaattatccatactacctaaaacatggatatggtgaggagaaatttaacatcgaccttgtttgatgaatgggttaacaa

SEQ ID NO: 46092 - DNA, 256 bp, Glycine max
  unsure (1)..(256): unsure at all n locations
  Clone ID: PAT_MRT3847_141621C.1
gggcaactgcacagnagaattagaggaannagaagangnagnagaacgatagtaatggaaancaagcccggtttatcagcactcgntaccggtggngcctctngaancggcaaaggncttgcactanctctgcagagaagggtgtattnatcacgnttcgtggatttctctgaagaaaanggangacaagcngcnatcctcggcgagaaaantaactccaatttcattcnaagttaggatgnccgtctgccanatt

SEQ ID NO: 46093 - DNA, 698 bp, Glycine max
  Clone ID: PAT_MRT3847_141622C.1
ggtccggatttcccgggtcgaccacgcgtccggtttgttgatcgagataactagaaacagtgtgatgaaaatgagggtccttgttttcttagtcgctacaattttggtagcattggtattgccatgcgtactatatgttccctctacgaatgaacactggctatggtgcccgtactccggaggtgaaatgcgcatgtaggaggcttgctgtggaagcacacaacatctttggctttgagaccattcctgaagagtgcgtggaagcaacaaaggaatacatgcatggctaacaatatagatcagactccaaaacaggtaaccgacacacttacttttatgccaaagacctagaagtccatcccaaggacacagtttgagttcagcatagatggcaccgtactctctaatattccatactacaaaaaacatggatatggggtggagaaatttaactcgacgcttgtctgatgaatgggctaacaagggcaatgcaccgtctctgcccgagactattaagaattacaaccagctggcgtctcttggcttcaagattatattattgtcaggaagaacactggacaaacaggccgtaacagaagcaaacttaatgaaggctggctaccacacatgggaaacattaattctcatgtatccacacgatccttccactccgaaatgcagatgatacaaatcagcag

SEQ ID NO: 46094 - DNA, 251 bp, Glycine max
  Clone ID: PAT_MRT3847_141623C.1
ctcgagccgaatcggctcgagcggctcgagctagatttgtgtcaagagaaagatcagattgccaagaaagtgcacactataatagacaaatttgctgaaaggggattgcgatctcttgcagttgcttatcaggaaattcctgaaaaatccaaggatagccctggaggtccttggactttttgtggtttgttgcctttgtttgatcctccaagacatgatagtgctgagaccatccgaagagcacttaacct

SEQ ID NO: 46095 - DNA, 309 bp, Glycine max
  Clone ID: PAT_MRT3847_141624C.1
gttaaacttctctattattccaaggatcaatacttcacctccgccagcggttttattttatccaaatacataacaaacatccatttttgccatttccaattcacgcaccacccttaaaaaacgattcaaaaaccatttaaatctgttaatccaaacaagtttcacatcaacttatcaatcccctccacatgtaaaataatactcacatccttaatataaattcatcaactacttctcaattacaccccacctttttaactttattcaaatcatcctctaacaacaaatttctctatacactatcaaatc

SEQ ID NO: 46096 - DNA, 329 bp, Glycine max
  Clone ID: PAT_MRT3847_141625C.1
cggcggccgccctttttttttttttttttttttgccattctttttctactaaaaataatacgagttgacattgatattcaaccttactactggcatgaaaactaccgtcggaattgtgatccaaacgagaccagggaataaccgatccgccagggggccaatgaataaaaacacggataatattactatgggatgaactccatgccttgctatgcgtgaatattccaaataaataggccccttaatgccccctaaatccttatgccggaaatggctccatctactggacatagggacagcctagttcaaaattggtgactacaaaggga

SEQ ID NO: 46097 - DNA, 653 bp, Glycine max
  unsure (1)..(653): unsure at all n locations
  Clone ID: PAT_MRT3847_141626C.1
taggatgaccactatattaagnagctanntgacgtcgcatggcaccgcccgtacgtaagnncttggnnatcctctagagcggcccgccctttttttttttttttttttttttttttttttttttttttttttttttttttttttttttttttttttttttttttttttgaaagagggcccggtttaaaattgaatggggggggaaaacaaccccaatgagaagtttttccaaaaaagacccaaatggggcgggggcaaaaaaaaaagcaccttttttttcccttttttttttttcctttaacggaagggttaacccaaaaacaaaattcgcggcctttttttataaaactcaagggcaacaaaccccaaaggaaaaaaaaaaagccggtcccccaatttttttatccaactttttatcctcagttaacccagcaggggggggcccaaactaagccaattgggggaccttgagagcaaaaaacatctagagaaagggggggttttcacgggggtaaggggtaaacacgtgcttccaaaagccataacccccggggagggggaaaaccctttggaagtaaattcgcccgggggactttttttaaaccgcgggaaaccagcctttggaattttcgcccagggagtgggggaaagtt

SEQ ID NO: 46098 - DNA, 444 bp, Glycine max
  unsure (1)..(444): unsure at all n locations
  Clone ID: PAT_MRT3847_141627C.1
ggaacaggggccgaagatttattaaagccggggagagaccccaccgttggtacgggggggggcttaggggacttacccacatatcactagnttggccttaacaaacctagctaaggctcctatttgaatagggcatatcagcctcccttattacctatagatgggagcaaaccctacctagattggtgagagaggggaagggcctactcaatggagtccctgggattaggaagcttaaagggcctgctttcgcctctggggtctccaagccgatcgctccattgggctccaatgattccaacagttctggatccctgcctcaacagattctctctctttgctggtttggttgaaagggcttttgggggggtgagatgcgggcccttgagaattaactgctcccatggggggaagccggccttgtttaggttggcttctgtgacg

SEQ ID NO: 46099 - DNA, 184 bp, Glycine max
  unsure (1)..(184): unsure at all n locations
  Clone ID: PAT_MRT3847_141628C.1
atnctgtcngtcacgatggcntttcagtaaaagcagancaggtttaagatgcagccanagaagagtgcctctgcttcacaatatgganganctccagntcccatganattctctaacgatactgaanganttcagcatgttaatagcatacgcaangccccngttggggctgcagntaaagngt

SEQ ID NO: 46100 - DNA, 695 bp, Glycine max
  Clone ID: PAT_MRT3847_141629C.1
atagtgaacacaataacaaatcttgggcgaaagtgactcatttggtccaaggtaaaagccaaatgcaaaagaattaaattatttatgattaagcaaacaccaagcattagattttgtaaaggtggtaattgaacagtactagtgagagttattgggcacggcacgagtgtgcaatggaaagtggtggatctgaaaaggaaccattaagtattcgatttgcaatccagtgatttgcagcttctgtgtagtgcactccatcccaactaatgtacttggaaggatcatcacaagtatctgcgaaaatttctttaccattaattattgctttgttcccacagtacaagtggtaaccatcctgatgatacccacaacagattccagaagggtccacaaatccttctttattagcattactgattagctcatacttagctgagaacatgtccacataaattaatgaggcatctgggaactgtacccttagtttaaccacggtattcttgagctttttattaaactctcttgccatgtcgttttgataatttatacagccgttttgatcaaggtaacctgcccctggagtagtgttcatggcattgtgcacgggcatggcaactggcaagcaaccaatggggcctgtgttatgtatccaaaatgtccttgctcctagtccaagtaaagtttgaacttggttt

SEQ ID NO: 46101 - DNA, 436 bp, Glycine max
  Clone ID: PAT_MRT3847_14162C.1
ggaaaaatttttcaaacacacactgttcataggttgaatgaccgctcgcacacacgcacgcacagttgctcatcatcctgtaagagaacagttagggccgagtcgcattagtggtattattgtaaatggcagctagtcaactactataccgcgagattgatcgtgttcttaatatggatcaagaaggccataaattctatgatctcatgtgtaacaacgtttacgatacctataatgcgagccagaatgagaatttctaggccgtccttaagacggagattaagaagctgtagacgtacaagtaccaaattatgacatgtattaactccactttgatgaacaacacgatcgatagtgtctcatatgagcacgttctaggggatgctcgcgagcttattgagcgtgcaatgcaaaaatttaagatctgtgagaagga

SEQ ID NO: 46102 - DNA, 496 bp, Glycine max
  Clone ID: PAT_MRT3847_141630C.1
gttttaactctggtgttatcaaggcgaatgataaaacccaaatcaacgttatgctgcagccggttgaatcgcctgagactctcgagagtgagcggagccggcacaaatttatgattcagactgcatttgcgcctgatgacgagcagcttcctgtggaccaattctggaaaactgttgacccaacattagtcatggattcaaagctccgagtggtgttccagcgaccttttggatttggcgatgaaaacaatcgggacgaaaccaatgcgactggtccgtttttcaatttcaacaaaacgggcgaaccgaaaaacgaacagccaacgcaaactccaaaatcgaccgaagcaaattctggcgatattcaactcgctttgcaaagggaagttgaacttcggatgatgtatcacgacgagaaaaaaaacctcgaaaaggagaaatacgcactcatcgataagctcgaaaaattgactcacaatgctgctgcgggaggcgt

SEQ ID NO: 46103 - DNA, 280 bp, Glycine max
  unsure (1)..(280): unsure at all n locations
  Clone ID: PAT_MRT3847_141631C.1
aaaaattcacaatacacgtcatgacataaaanaaacacataaattcatacttttccatcccaaaataataccctcaattattannnnnnnnnnnnnnnnnnnnnnnnnnnntttataaaattaaccttatatcattattaattcatttaaattttttataattcatcatcgacatacaaggaatataactaaaaaanataattaatataaaataacaattatatttgatatttttttccntaccggacacttagggaaacatttgtnatagagaagtggg

SEQ ID NO: 46104 - DNA, 485 bp, Glycine max
  Clone ID: PAT_MRT3847_141632C.1
tttggcttcaaatgttgttgacagagtagccaaatgctcccatttgaagtgtgtatttggttctcatactgaattaatgcaatggtttcacttcaaaagattctcaagtggatattttcttttaatgaaaatctatatgtgaaaatttctcccattgaaagaaggaaatggccgcatactttaactgccatataataccaaatattttaccatgcaccttgattcgagcgtatatttggcgccatttatggagcagcttgcatcagacttcagccactttgtcattctcattaaaaactttagctgtgtatcggtggattgtgtcgttgtttttcatatatggtcaaaacttccgtgtgtttttacgttcaagctctagcttatttttcacatagtgacacgtaaatggatctgtgtcagactcagaagattacttgctagctcaggttcaacttacttgccagttgttcatttaggttgtatgc

SEQ ID NO: 46105 - DNA, 368 bp, Glycine max
  Clone ID: PAT_MRT3847_141633C.1
ctaaaaaagaattgtgcttgctttattctttggctttaccccggggattcgctttgtttgggccctttccctttcacacttttaaaaaaaggaaaactatctgattctgacctatagcccatcaaagggagtgtttttacccgtttaactggggggtccctcgaagaaatacctgaactagaagttgggaattttcggttaagggcttggacatacacgaaatttaaaaatttggaaccgggattttaaaaattgagggaaccataatcattgtaccctgagccttttttcccaactaaggttttttttttttttggggattttttgccaaaaataggggcccaatttgaaatcccggggggcttggg

SEQ ID NO: 46106 - DNA, 305 bp, Glycine max
  Clone ID: PAT_MRT3847_141634C.1
atattatactacctatgttcctacagtgattttgacgaacactatgaataatcctgcttcgtatacgtgaaattactcgagatgaagcatgtgattacacatggacgtatagaatcagtgcttaattatcacactttaatgacagatctgactggtctgcctaagcacaatgcttaatcgcttgattaaagaactgcatctgctgaatctctggcaatgtgtaataatatactaatggggaactagaaatctgttgttattttcaaataattgccacctgcaaactattgatatttcatgttact

SEQ ID NO: 46107 - DNA, 369 bp, Glycine max
  Clone ID: PAT_MRT3847_141635C.1
cccgcgtccgtggacgcgtgggcggacgcgtgggaacgggtacgctagcgctagcaactctccaaattcttttccgaagaagaagcctcgtctccgattagggttagggtttcagtgttctctcttccttccgtgtcactgttacgcttcccttcgtcggtcctcgcttgcgctccgagagctatggactctgctcttgtgatcaaggtgaaatatggagataccctcaggcgcttcagtgctcatgttgatgagaataataggctggatcttgacatggttggcttgagggcaaagatatgttctatcttcagtttcagtgctgatgaaaatttaattctgagatgtgctgttgaagttggcgtcctg

SEQ ID NO: 46108 - DNA, 916 bp, Glycine max
  Clone ID: PAT_MRT3847_141636C.1
cggctgcgagaagacgacagaaggggagtgaaggagatgttgcaactctcttcttcacacttcacttctcttcttcggcgcttcgcggcctctctcctcctctgcccttctcaattcaattgcgacgctcgcgggggcgccctgcaattcgatgtgcttcctcttcctcagactcagatgcttccaacaaagtctcgtctcgtctgtcgcaggttcagcatcttcttcagcaggccgaacaccgcgctctctccgccgaccagggcccacctcctaaaatcaccttagatcatgttacggtgagctttgccagaagtggaggacctgggggtcagaatgtcaataaagtgaacaccaaggtggacatgcgcttcaatgttaaaaatgcatattggttgagtgacaggatcagagacaagattttgcaaacggagaaaaaccgtattaacaaggatggggagcttgtgatttcttcaaccaagactagaacgcagaagggtaacattgaggatgctttggcaaagcttcaggaaatcattgatgcggcatcttatgttccgccgcctccctcagaagagcaaaagaagaaaattgcgaagatggctgccataggagaacagaaacgcctcaaaagcaagaaggtgctttcagataagaaggcgtttaggagaagtaaaaatagctgggactaatatggtgttgtccagaatcttgaaactgttttatcatttttgacgcagaagcacagtcctcttatcctaccatattggatacacacacattagatgaatggttgaatataaccgtgaattcaagtagcatagcccaacaagcaatcatcccgctggaaggacctcaatggtggtttgtgacaacctattgttagttagccaaaattgtgatgtagctaggatat

SEQ ID NO: 46109 - DNA, 901 bp, Glycine max
  Clone ID: PAT_MRT3847_141637C.1
aaccggtaccaatagtcgaataccataacgcaaattgaagacgaagcaggaaccacaatctgggttgatctatgagtaccggcaccactagaatgctagtgaaggagatgttgcaactctcttcttccacacttcacttctcttctgcgtttcgcgccctttctcctcctttgccattctcgattcaattgcgacgctcgcgccgccctgcaattcgatgcgcttcctcagactccgacaaagtatcgtctcggctgtcgcaggttcagcaccttcttcaacaggccgaacaccgtgctctctccgccgaccagggcccacctcctaaaatcaccttagatcatgttacggtgagctttgccagaagtggaggacctgggggtcagaatgtcaataaagtgaacactaaggtggacatgcgcttcaacgttaaaaatgcatattggttaagtgacagggtcagggagaagattttgcaaacggagaaaaaccgtattaacaaggatggggagcttgtgatttcttcaaccaaaactagaacgcagaaggataacattgaggatgctttggcaaagcttcaggaaaagcaatgccgtggaacatcgccgcccacgaccccaacccactggatggacctcaatggtggttagttagccaaaattgtgatgtagctaggatctaaacgaatacgagattttcaattagagatatcatatattggttgaatctgtagtgtttttctttgtcagctttttgcccttttaatgcgcccttggcacgtgtccagagtgatgggtctatataggcattgaatggcaacaaccctgggagtcgtgcttcacgtaaagacacgtcaatacataatgccgttggcaaggaaaacggctcgagctcgagggtg

SEQ ID NO: 46110 - DNA, 387 bp, Glycine max
  Clone ID: PAT_MRT3847_141638C.1
aaaatattcactatgctactgtttttctgagttccttttgatgattccttttttattctctgcatcgccctcgttgatcgttatgctccttcttttcccttttttttttcttttgtttctcgatctaatgcaacctgaaaaaaatgaagtaatcaccatttttcatatatgctagtactttttaaggtcccaaggtttctttttgcttgatgctgtgtttgtcaatttcggtctttattcttcaacagctacgttttaattgaatcattttttttcacttgtcttttggaatcagtacttctaagaaactgaggtggattcttctgattgttgttttgattgcaatgaatagtaatgattttgagagatataagattggttttgtag

SEQ ID NO: 46111 - DNA, 360 bp, Glycine max
  Clone ID: PAT_MRT3847_141639C.1
attcattggtgatctgggaggctcaatttggtgattttgctaatgcggctcaagttatatttgacaatttcttgagttctggtgagtctaagtggctccgtcagactgggcttgtagtgttacttcctcatggttatgatggccagggccctgagcattcaagtggaagattggaacgctttcttcagatggctgatgaccatccttatgttattcctgagatggatcctactcttcggaaacaaattcaggaatgtaactggcagattgtgaatgttacaactccagcaaatttttttcatgttttacggcggcagatacatagagaatttctgtaacctctcattgtgatgtcacctt

SEQ ID NO: 46112 - DNA, 563 bp, Glycine max
  Clone ID: PAT_MRT3847_14163C.1
ttttgtgtgtttttttttttttttttttttttcgaaaaaaaggggccggggccggaaaatttcttaatctttcttcacaaattttcatttaaatcccctgctaatcaattattggggctcaggctcactggccactgggtcgaactctttttgggcgagtccgctcagcccaatcgttccccagaccagaaccaaaacaatcgttttcaactaacctttatttgccacctgcttaaccgccgttgttcttataaacacaacacttaaattcacctttataaacatgtttagcacccttcattgattaaaatggaactcctatttgaacaatttatcataataaaaactttttgttacggaaattttcaaaacagaactccttttttaatcccgaatctgaactaaaatcacttacaaaactatgttttggcccgcctttgcttccccggcttttttaatgaaccctactgtgcccattagtgtgcgtgtgtttctattaaactaagttggttttatgataatagtttttattaccgaaaacccttgaaagcccaaacctgcgc

SEQ ID NO: 46113 - DNA, 530 bp, Glycine max
  Clone ID: PAT_MRT3847_141640C.1
cataaatccaaactctttctctctctaaaaaaaaaaacgctcaaaagctctcttctctctctaacacacaccgccggaaattgtttaccggcgcagtggctggctggccatgggtggcggcgccgccgcgtcggaaacagagtctcctcctttttttaaaaaaactacatgttttgaattccttttttcccctagttctcaaatccaccgttattttttgaaaaccaatactgataaagcctagatctagccttgaatcttagaaaaaaagtgaactacctttgtccttatgttatcgtttaagcttcagagtaaaaacggttacagcttgggttggtggggtggggtgtttgacgcagtgcttgtggttggtggtgtttggtgtgggcttggccgatagtggtggttctgatgtaggctttaggccgcgtgagtgagtgggttactgtgtttgcgtgggtttctgttctaacgtttcgatttctagggaaggaaatgaatagtatgagcaagatgaatttggttttttt

SEQ ID NO: 46114 - DNA, 495 bp, Glycine max
  Clone ID: PAT_MRT3847_141641C.1
tctgtagactctccaaacagaagtacgtactgcgcggtcgtggaagcatccgaatccgttgaataggaagcctttgatccactttctgagagcactgaatcatagcaccagcacctgaatggagtcatttgaatgggaactcgtagagttatgcattgaatcggagcatgtttaggatatcactacaaggcaagtgaatgctgagataaaaaaaaaaaaaacttcaacttcttatgttccaactgctagctagttctggacgaatatcataggatataacatgtgttggctttgatcacactataatgatgggcacctattgcaataacctactgtgcaacttttatcatccaaactactcaataaccaatgatgttaccaaattttgtcgagttctgaccagaggaaactcattatgccaaaaccccgtttattttggtttgcgtaaacaccgttttgattcagaattagtgagtgttggtttggaggaagttg

SEQ ID NO: 46115 - DNA, 1632 bp, Glycine max
  Clone ID: PAT_MRT3847_141642C.1
gttgaccaattcagcagtttggttttccagacagtgctgagggtcttggcaggcgatgatgaagagttgttacatgtgattcctatccttcttggctgcaaggataagaataatgcagaggacaattttataggcactagagtagtagcggagctcaagaatttgttaaaagaatctaaatttagccatctaatggaggttgttttggaagtatctcctgaggccttattcaatgaattattcactaaagtattcaggaattccttgtttgagttatcatctcatcaacatggaaactttgttgttcaagcattaatttcttatgcaagcaatcaagatctgatggagttgatttgggaagaacttgggccaaatttggagggtcttttcaaaatgggaaggtcaggagttgttgcttcacttgttgctgccagtgaaaggcttcatattaatgaacacaagtgctgtcaagtccttgctgaagcagtgtgtccagtggatgagtctccaaaatggattgttccaagactattgtttcttgatagctgtttcacaagtgaagataagtccaattggagctggcaaagtggttctaaaatgcatgtcatgggttctctgatcctacagacagtattccacgcgtgaggtgaatgtatacaaccttatatcatcagtataacttccatggaagcgactcatgtgcttgaagcagtggtagatgcaagagggtcacatgttattgaggcttttctatgttcgggagcttctgggaaacagaagcgcagattggttacaaaactacaagggcattttggagaggttgctctcacctcatctggtgcttttaccattgaaaagtgcttcactgccagtaatctgtcactaagagaggctatagtgtctgagatgttggctgtgcgaagtgatctttccaaggcaaagcagggctcttacctattgaggaaactagatattgacggatatgctgcgaatcctgatcattggaggtcaaaacaagcatccaaagaatctacttataaagatttttataccatgtttggttccagtgatacaaagttgacggaaaatgatgcctttcttgctgacacttcgaataataaatcaaataaaaaaactgtaaaggaaatgaggaaagaaattgaccaatccctaggttctggtgcaccatttctgagcacccaaaacttcaagaaaaacccaaaaaaagaaaagcacaaaagtaagaaaaatgctcaggttagtggagatgatgttaactctaataggaagaagaaaagatctaacaaggaaaaggttgaaagtgggtttgatattgctgctaagaagacattgaagaaacgacgaagagatgatgacctttctgaggcttctctgaagaaagtgaaggcaccaaatgcagagtgaaagacaagttttttccttaaagagaaggatggcgttaagcatgtcagcagggtccccaagatttaatgcatgaaggcttgaatgatttcctctttgctagtaattttgtatcattttaccatgtcgcatagactatgtaactggaaaattgcattaagaaaggtagttactctaaagattttttttcctctaacgaatttccttagc

SEQ ID NO: 46116 - DNA, 489 bp, Glycine max
  Clone ID: PAT_MRT3847_141643C.1
cagttcttgatttttgtgccataaatctaatgcatctatatatttcctttaggtttggacaacattggaatgtatcctaaattattcgtttccatggaaaatcttggttccactgtcatttaacatgtttttcattggtaaagtatttgttgaaaatcatgaacgaaattcatgtcttttgtaaacatagcaaataaaaaggaaacattctttttcattcatgtgatcatttctctactcagtgatgtgatttaatttcaaagttctagatcctacttttatttattgctttgaccttatggtaattgatttaattgaattaaatataaaagttaatcttcaggcagcaggcttcttttgtagccttcatacatacaattaatattggttatacagtatcatttccttttagctaatgaattggatttgcagctttgagatcatatgcacgtgatgcacgcaaaggctataatctctttggccggggaa

SEQ ID NO: 46117 - DNA, 1201 bp, Glycine max
  unsure (1)..(1201): unsure at all n locations
  Clone ID: PAT_MRT3847_141644C.1
gtgttttccgtgctcaatttgatgagggaaaggtattccttacctgttgtttgctgcaaatacacctctatatctaatgctggtagcagagatatataattccaaaatagaattgtcacattatataattttggtagaaggggtcaaatctgaatagtttcaatatgaaagcatgtgaatgcatgtgctgatgatgcatcttttaagtcttacggctatacaagtataaaatcaaagaagtcggagaagtcctgctgcatgtagatgccacacgtacagccaatagctcccaataaataccatggacttttctataatagaccgtgcctagaatctatgtatatgtttattaattgttttgatttggttttctcctgaaaatgttgtaggttcttgccgtgaagaagatagattcatctgtccttcccaatgatatgtctgatgattttgtagaactggtttcaaacatatcccaattgcatcatcccaatgtgaccgagcttgtaggttattgttcagagcatggacaacacctactagtctatgagtttcataaaaatggatcacttcatgacttccttcacctacctgatgagtatagtaaaccattgatatggaattctcgtgtgaagattgctttgnggattgctcgtgctttagagtacctacatgaagtttgttaccatctgttgttcataagaatataaagtcggccaacatattgcttgatacagattttaatcctcatctttccgacagtggattggcagctaaattccaatgccgaccagatattgaatcatattgttggatctggatatgatgcacctgaagttgccttgtctggtcagtatactttgaaaagtgatgtctacagctttggagtcgtcatgttggaacttctcagtggacggaacccttttgatagctcaaggccaagatctgagcagtctttggtgggagtgggcaacactcccctcgccatgatannnganngcattggctaaaatggnnngaggcggcggtgaaagggncatcctcccgctaagtctctttctcgatttgccgatgttattgctctttgcgttcaggtactgtcagacacgttttgattcacccaaaatttattgattttgtaaatatggatggatttgggaaaccacgggggtggatgggaaatatttgtgcatggcttggtcct

SEQ ID NO: 46118 - DNA, 224 bp, Glycine max
  Clone ID: PAT_MRT3847_141645C.1
tgatttcatactagaactatccatttcatacagtactggcactaattattgagtatgaacaatttaagcccagagcctacaaacgcagaaccacatataaaaatgaagacaaacaaaacaaggccagaaagaaggcaaattatagacaacacaggtctatcatataacgaaaaataactagaaatatgatatatccataatttattgcattatgggccaaaaag

SEQ ID NO: 46119 - DNA, 382 bp, Glycine max
  unsure (1)..(382): unsure at all n locations
  Clone ID: PAT_MRT3847_141646C.1
ctacacaaaatctatcaaagtttattcattaactagaagctttacattcactccgctctttatttaccagattccttaaacccttaccaatttaanncctttaaaactcttctaccaccaaaaccttcttcacaattnacacacatggaactccatcaatatttttaaacaacactccatnatatcaacatataacactatactattaacaatcaacaacaatctcattacacatataatgagtataatcacatcacctagtctccacatatgctacaattttcccaacaataattacttctttccaaactataatcacaatttttcaaaattatcatcatacttttgatttttacctaaccttattctttattcactaaac

SEQ ID NO: 46120 - DNA, 254 bp, Glycine max
  Clone ID: PAT_MRT3847_141647C.1
gtgttgtggtacatatcactaattttattgcgcataaataaatagggaatacaactccccgataccaaatgaagccatgcaccctaacaatgaaccgagaaaaaacctggactagctctacaaatggattacaccacaaggacggggcaagggaaaaatgagaggggaaagcgccccctgctgtaattttaaccaatcttttatggtagcatatgacataactgggcgttgcccaacaaaaaaaagcaatcact

SEQ ID NO: 46121 - DNA, 322 bp, Glycine max
  Clone ID: PAT_MRT3847_141648C.1
gactgcatcctcaggtcagaccagtggctatgatctatctttcaagatcttgttgatctgagattccggtgtgggaaaaagtcgcctactattcaactctatatcaaattatgctgaacatctttccccaaccataggtgttgattctaagatcaaaacgctcacaacgggtggacaaacattgaaattgactatttgcgatactgctggtcacgaaaggatcatgactctacacagctctcactatataaaatcacaatgaatcatgctcgattatgatgtcacaaggagagaaactcattacgcacatatcaaacatgtg

SEQ ID NO: 46122 - DNA, 350 bp, Glycine max
  Clone ID: PAT_MRT3847_141649C.1
gttgatcccgcgaaacttagtccctttgctgaaattgctcctttctctctctctctgtctgtctctctctctctctggctcgctctctctcttgccgtctgtctgctcatgcctaaatgcgattttcttctggaattttttacccactctcttcagatacgcgattgtttctgtcgtttcagtaatggtttataatttgtgccttttcaggaagatttggtccattttgaattatccatctgcaaattgtgttttaaagtctgaatttgcagttctagacttctcatggcaaggtgacatgaactttcttgtgaggtctaaaaaccctggtcctgggtcaaaagggccca

SEQ ID NO: 46123 - DNA, 169 bp, Glycine max
  unsure (1)..(169): unsure at all n locations
  Clone ID: PAT_MRT3847_14164C.1
gacaaaccagcgcatcactctctctttctttttcacaacataactctcaaccagcgctggagaanattgcataagggagcggccccaaaaaacccacaattnataaagctaaaaacgtaccaaagaatgcttgtattaataacattgtcacatccaaaataatttaaat

SEQ ID NO: 46124 - DNA, 331 bp, Glycine max
  Clone ID: PAT_MRT3847_141650C.1
aaaaaaaaaaccctaaaaactttttgcccagttgaacccgggtccttatgggcttgaggggagctttttttttttttgctgaccatgggagaaacattttccccacaacaacaaatgccggtgggatttttgggtggggaacaacttaacttttgttttttgacccctgcttaattttccccaaatggatgggacaggaaaaaaactttggttttggaggggaccgttatgaacattttgaaggttgggggacatcttatccttgtccccccttaaaaactatgaacgggtgttgtgtaaaaccggacaaaaggacgggtgttattttttt

SEQ ID NO: 46125 - DNA, 274 bp, Glycine max
  Clone ID: PAT_MRT3847_141651C.1
cacaacagtgggagggagatccaaaaagagagagtggaaaagatggcgcggttgatcacagtggtgtggtgcgcggcggctgtgctattatgcgcctcggacggtgcgtcgagggtggaggctgctgcgaaccctatacgcatggtgtctggcgtggacgcggaagtggttcaggtgatcggggcgtgccgacgagctgggacaagtgttaggttccttatcatgcctccgcagagtcacctatgctaggtcaacatgatgcttagggacgaga

SEQ ID NO: 46126 - DNA, 163 bp, Glycine max
  unsure (1)..(163): unsure at all n locations
  Clone ID: PAT_MRT3847_141652C.1
taatgagtagagtgagggagnaacgatgcnatctctganntctntntctctcnnanttnaaccctaactagccccngacncatnggcnntctnccgattcccctccctttcataattgatgcacctcgatntcctcactcactcgcnaaatttccacaattct

SEQ ID NO: 46127 - DNA, 254 bp, Glycine max
  Clone ID: PAT_MRT3847_141653C.1
cttgtttcttgttcttcttcttctctctgtcgtttgttctcttgatctttgatctctgtgttatatgttgtagcaaaagaagtaaacaacacacacatatataaatatttgtaagatatatatatatatatatatatgatcgtgggttctccacacgagctttgggacgacacgctggcgtgtccggcaccggacacgggtctggggaagctccgaatgtactatgcgctctccggcggaatctccgtcctgtc

SEQ ID NO: 46128 - DNA, 589 bp, Glycine max
  Clone ID: PAT_MRT3847_141654C.1
ccacgcgtccgccatttattacctttgtcttttgcatccattccttctccatccactcaagctatttgccttcccccctctactactatcaccttttaccacttaattatcagcttttcactcagtctcactctctctctctctctctctctctgtttgtcactctccccttatgactcactttcaattagggtttcctctttaggagtgctccatcctttaacaaatctgaggcttatacctctcgttggcttaggctactttgtcgagagagagaaaaagagaacagcttctcaaggacctccaacaagggaaaaaaggtacttcccttttagttcatcttataccaaagaaacctacatcaaaaacagtgcagggaaaaatggcatcatccagctcttacaactctccatgtgctgcctgcaagttcttgaggaggaaatgcatgccaggatgcatctttgcaccttactttccaccagaagagcctcaaaagttcgcaaacgtccacaaaatctttggagccagcaacgtgacgaagctcctcaacgagcttcttcctcaccagagggaggatgcagtgaactcc

SEQ ID NO: 46129 - DNA, 119 bp, Glycine max
  unsure (1)..(119): unsure at all n locations
  Clone ID: PAT_MRT3847_141655C.1
aaggaggctttgcggtttcaggattcctcgcactgtcaccaacgacaagcttgccaagattgttcaggagcatggtgctgttgagaaagctgaggtaanggatgacatatattctggaa

SEQ ID NO: 46130 - DNA, 450 bp, Glycine max
  Clone ID: PAT_MRT3847_141656C.1
cccacgcgtccgggctcgcacacagctacacggtgggcgaaacctatcactcttatttgtatcacatgctcaggtcttggaatctgagctgaaccatgtcgcattcaagatagaatacgtggagaatgaacttaccgatgaaaagagggctcctgaaagtgctctggccaggagcatggagctagaagagctgttacaaaggatggagttctaggacgttgatgatgaccacgacactgactgtgagggacatcggacagctgctgatgaaaagctagacaagtgtcaagagaccgtacttgttgtgggctagcacgtaaatcttgtactgacagacactgaggcccctgactgcttgcgcaggaagatcaataccatagatgaaggatgtccataagatgtacatgccactattcaaaatgttcaagaattaaggccggtggagatgga

SEQ ID NO: 46131 - DNA, 144 bp, Glycine max
  Clone ID: PAT_MRT3847_141657C.1
aaaaccaacaaaaaatggggtttttataatcccaaatttaggaaacccttgtttcagtatgaaatcaagggccacaagtttgaccccggaatcaccctcttgcaaatgcaagttaaggctgcctacatggacccccggccccgg

SEQ ID NO: 46132 - DNA, 319 bp, Glycine max
  Clone ID: PAT_MRT3847_141658C.1
ccggggaaaaaatttaaaatttccataaaaaaaaaaggtaaaaagattcggcttctttggctctctggcataaccccttaaggatttttattccccaaaaaaaaaaaaatcctccatgggaggggtttggatggccaaacccagggttcatgaaaaccatcggggcgggccttcttttcagtaaatccgagaaagttgttccccttggggggagattcatccggggttttcaccatgaaaaacctgaaccccccaagtaccaaactggatttccccatagttgtggcccatagcacctccaaaccccaaaactgaggaa

SEQ ID NO: 46133 - DNA, 446 bp, Glycine max
  unsure (1)..(446): unsure at all n locations
  Clone ID: PAT_MRT3847_141659C.1
atttaatgatgagtgtgtaatatgaaaatatctaaagaaaaatgaaaaaaaaagtgtaattcgaagacaagaaggactgttagttatagcatgtagggctggaaattgatgtattttatttgttaattgtcggtgaagagtgattgttctattatcaagtaagttttggtttttctaaaaaaaaaaaaaaaaaaaaaaaaaagaaaaaaaaaaaaaaaaaaaaaaaaaaaaaaagaggggngcaaaatgggaaaattttttacctttaaaatgagttaaatgacagctttggcctaaaaaagggctacatttcgttcttggttaaaattttatattgttaccaattcacaaaacattgagaccccgaaccaaaaataataaagctttgggggactaaataattaacataaattaaaattagttgcattggcttaatttcctttttt

SEQ ID NO: 46134 - DNA, 265 bp, Glycine max
  Clone ID: PAT_MRT3847_14165C.1
gttactgcgcggctcgagcggctcgagcggctgcgagaagagacagaagggactttctcaagaatattagttttttttattctcgaaaatactcttttaatgaaataacttcattagatattgcattcatttttatcttagataatttctcttcaattatttgtacggtgataaagtttttctaaaaccatgtacaatagaaaaaaaatggagcttgatccgtagggggcccccatttagggaacccttgacccggggatttatt

SEQ ID NO: 46135 - DNA, 554 bp, Glycine max
  Clone ID: PAT_MRT3847_141660C.1
aaaaaaaaaaaaaaaaaaaaaaaaaaaaaaaaaaaaaaaaaaaaaaaaaaaaaaaaaaaaaaaaaaaaaaaaaaaaaaaaaaaaaaaaaattccaaaaaaaaaaaagggcccaaaccctgaaaacagagaagggaaaaaaaaaaccccccccctaaaaagggaagggggaaccaaccacaaaaaaaaaagggaaaaagaaacaccaaaaaaaaaaaaagaaaaatccaaaataaaaaaaaaaaaaaaaaaaaaaaggccccaaaaaaaaaacagggaaatggccacaggcaaaaaggcccgggggggccgcttgaaaaaaaaaagggcacggggacccccgggaaaaaaaaaaccaaaaagggcagggaaaaggaaaagggaaaaaagggggggaggggggggaacattggaaaatgcccaaaaaaccgaggaccgaacaaggggcaaaactggaaaaggaaacacccctttaaaacggggggaaaaaccacccacctcggacctgaaaaaggaacaaaggtttaccccaaaaaccaaggtttggggaaatggg

SEQ ID NO: 46136 - DNA, 250 bp, Glycine max
  unsure (1)..(250): unsure at all n locations
  Clone ID: PAT_MRT3847_141661C.1
attganttctccanagagnagatganacttaatcgatcatcacttcacttnactaatacatcntggcagnagagacncngaacaantatgagagctctgangttgaggtccagnatcgtggtgtttttcactttctcggnaaganaaaggatgaagaagacaagcctcatcctcaggangangtcatcgccancgagttnnanaaagtnactgnntcagaccaaggngagcacaagcacagcctcttaga

SEQ ID NO: 46137 - DNA, 340 bp, Glycine max
  Clone ID: PAT_MRT3847_141662C.1
aaaaaatgtttattgcacaaattgcagaaaggaagagctgatatccggaagaagctctgaggtactactccttttgcttaagattgctgaaaaacaacgactgcataggattcttgtgctgcctgaacccccaccatgccccctacttgtaaatgggaaccatcgcgggggcaagctactacactcgaatgtgaaaggagagggggcggttttgtttctgaggcccaaaatgaataagcctccagatgggtgttcgggaacattgggatactgtggctcaagatcccattgatcaccactaccccccctgaggcttccgggtgcggggccacaggtacac

SEQ ID NO: 46138 - DNA, 950 bp, Glycine max
  Clone ID: PAT_MRT3847_141663C.1
aacgaggtgccttgggaattagaatggctctcctcggatcaaacataggcaatggtgccttgggaattagaatggctctccttggatcaaacataacaagcgaggttggactccgtttgctcctttgtcctcttggttccaacgttgtaattagaacagcatgctgtactgtgggagttgctttgcctgtgtactctacgttcaaggcaatagaaagtaaagatcaagatgctcagcataagtgtcttctctactgggcagcctatggttcattcagtctcgctgaagtgttcacggacaagcttatttcttggtgtcctatctactatcacctgaagtttgcatttcttgtttggcttcaacttccatctaccagtggtgcaaaacaaatatatgcaaaccacttgcgccccttcttgttgaggcatcaagcacgagttgatcaagtcttgggttttgcatattgtgaagtgataaaactcgtgagttcataccaagcagagatccagtttgtcaggagcatggtagtaaagataactggatcagcggatcaaatgttgagaggcaatgctgaatcagataatagatcgccgcaacatagttcacccgaagaccctgcctctgatgctgaaacggaccaaaaccacaatcactgatgagtgctagtgcccttggactgcgtggaataagagagactagacttctcttgtttttttttttaaaatgttattttttttttaattagcgtttttaaggtaatcaatattagcaatcttttaaaaaaaatgataacagtgtgatagtattgtttttcagtgtcttaaaggtacatgtttagcttaattcattgaacaagatacttgaattatggtaaacccttttgtacttgtaaactcttttgtacttatgtttgatcctaaagataaaaaaagtgttttaaagtaataatt

SEQ ID NO: 46139 - DNA, 1819 bp, Glycine max
  Clone ID: PAT_MRT3847_141664C.1
atacatatctattgttttcagtaatggtggtggtttcacttttagcataactttgagaatatgacacgctgattagcattgtgcacatatatatgagttgcgtcattgaaccacgactagctgcaaagctttttgtgttctgcaactgaaagtgaaggaaaagaagcagaaaccaaatcatgtgttctctactttggagttccattgcattgtgtgtagctttcctactccttgagcttggcgttgtgcacccttcaccctcacaccataggatcactcgcttgccgggtcaaccccatgttcagtttcatcagttttcaggttatgtaaccgttgatgacaaaaaccagcgtgcactttttttctactttgctgaagccgaaaaagatgcactttccaagccccttgttctgtggctcaatggagggcctggttgttcttctcttggagttggtgcattttcagagaatggaccatttaggcccaaaggtaagggcttggttagaaaccaattcagctggaacagagaagcgaatatgctctatttggaaacgccaattggagttggattctcttactcaactgatacttcctcttatgagggtgtgaatgacaaaattacggccagggataacttggtgttcttgcaaagctggtttataaagttcccagaatacagaaaccgaagtttgttcattgtaggagaaagctatgcaggtcattatgttcctcagctggctgaacttatgctccaattcaacaaaaaggagaagttattcaatttaaaaggcattgctcttggtaatccagttctagaatttgcaacagatttcaattcgagagctgagttcttctggtcacatggattaatttcagatacaacgtacaaaatgttcacttctgtttgtaactattcaacatatgtgagggaatactataatggtgctgtttctcctatctgttcaagtgttatgagccaagttactacggaaacaagtagatttgttgacaaatatgatgtgacccttgatgtttgtttatcttcagtgttctcacaaaccaaagtcctcaatccccagcaagtaactgaaaccatagatgtatgtgtggaagatgaaacagtcaattatctgaacaggaaagatgtgcagtcagctatgcatgcacatcttgttggagttcaaagatggtctgcttgcagcaatgtcctggattatgagctgcgtgacttggagataccaacaatcacggttgtggggaagctagtcaaggagggaataccagtattggtttacagtggtgatcaggattcagttatcccactgactggaagtagaacactagtacataaattggcaaaagaacttggattgaacaccactgtgccatacagggtgtggtttgagaagcagcaggtgggtgggtggactcaagtttatggtaacatcctttcatttgccaccatcagaggagcatcacatgaagctccattttcacagcctgagagatcacttgtgctgttcaagtccttcttagaaggaggaccactaccacaagagttttgatatgcatatatatgtcggttgtgtcgataaaatgtgatttttggattgtagtttaattcgtttcactgttaatcaatggtgcccaatttcaagtgtagaaaattttgtaaagttctcaagtaagaagggagggaatttgttgtattttttttttttgtcagtgccttgtttacttttactatttataaagctgcattatgtaactagacgtaactgtctgctcttaattatgttaatcggtaacttagtggaat

SEQ ID NO: 46140 - DNA, 427 bp, Glycine max
  Clone ID: PAT_MRT3847_141665C.1
cttctattttgttttctaggttgaggaataccgaaaaaattcagcgtattaaagtttgcaaagtcgttgagctgagtagaaaatactagagtaaacaggcatggaatacacaaaaattaaggaacggttctttcacacgagttgaggaaaaatttaaccataagaataaaagatttaatggattcaattaaacaactgacgtcgcaaatgattgttattgttaaatagggttgtgttacaataatactataagcatatttgcaacaaataaaattatgcttaaacacgtactggtatattagcatttcagattaaaaaaatgtatttatgaaattatgctgatataagtaactaaaacatgataatgacgggatgacgtgaatatataaaccccacgcgtccgcccacgcgtccgcccacgcgtccg

SEQ ID NO: 46141 - DNA, 148 bp, Glycine max
  Clone ID: PAT_MRT3847_141666C.1
gatctataattttttgcgtggtttttctcgggaatacaagaccggtacgtggttgcgtcgcaatttatcaaaagagaagcgtattatatttggacaaaaacggggcgataaggtgtaccaagtgagaaagaaataagcgcatacaaaa

SEQ ID NO: 46142 - DNA, 670 bp, Glycine max
  Clone ID: PAT_MRT3847_141667C.1
ggctcgaggtccacgaccctaatgggtattggttaccctaatagcttcttggtcagctttgttcgttctttcagcataatgttccaaggtttgtggcttatggtcatggggtttctgctttggactccagggtttcaagccaaaggttgtgtcactcaccttcgtgaatatatggtcacatgcaatgatgatgatgcccttcatcgtgctaaatccttggtgaacattctattcagctggctattgattttagtcaccattttcgtgatgtctttctacttggttcttgtcacaagatatggtattgaaaaagtggagtatgcttcactggtaaaggagcagcatcaccttgaaaatgcgctaaccatcgacgttgaatcccaaaaccataagcacgcaaacaatgtggcagatttgtcaacataaagctctcaatagcacatacacagattaattgatagtgcttgcccccaggctaaaatatttcccttgatttagtttcttggatttgttcttaatttattgtcatttttataatattttgggttgtagatctgatctaatttgatttaatataatgtgattttaatgcacaaaatggttgtcctcttgtagtttctggagcaagtttagcttttacaaatgaattcagatgaaataattaatttgg

SEQ ID NO: 46143 - DNA, 895 bp, Glycine max
  Clone ID: PAT_MRT3847_141668C.1
gaagaatgcaagttttgtgttcgcatgattgcgactttgttacaaaatttggcttgcatgcaggtgaagattcacaggaggggaacagtgttcataacattagtgttaatggaaatatgtctatgggtgtttctccatctttgatcgctggtgcaaatatcaagggcttcactacaatttcagttctacctcctcctcccccgagctattttctgggttacactcttccttctggtcatccctgtaatactttcacacttcctcctccaccggcagataaaaagcgaactgggccacgaccatgcccagtatgttaccttcccgtggatgaagccattgcacttatgccaaagtttccgtcaccttctccagtacttaagaacttagcatttatctatgaggaaactcttagcagggatggtgaatttggtggttcggactttggtggatatcctactttgaggcagagaaatgaatcttttgatatacgagagtcaatgagtgtgcactgtggatttgttagaggaactaaacctggccgcaacacaggatttgacatggatgaagatgacctccttgaaatggagcagtgtcacggcgtagttgttgcatcagccatatttggaaattttgacgagataaacgagccaacaaatataagtgattattcaaaggagacagtatgcttccttatgtttgtagatgaagaaacagagaaatatttgaggatttctggcaggctggggaccagaaagaagattggtttgtggagaattattgttgctcataatcttccttatacagatccaagacgcacaggggaagattccaaagcttctgttgcatagaatggttccaaatgcccactattctatatggcttgatggaaagcttg

SEQ ID NO: 46144 - DNA, 402 bp, Glycine max
  Clone ID: PAT_MRT3847_141669C.1
aaactaaattaattttttttttacttttatagggctggagggtttcggctccaacagaatctatctagaacgggggggtaacaaaaacaaaaagaaaagtaaatgctataacaccaactccggctaagggatcgggacccttgacattgccaccttaaaatttacttgaacataagaggagcggggttgaaggaaaaggaatttcttttgaggcaaaggggaaagggatagcgctcccactaaaaaaaagagattttgcttattccaaaaccgaacccaaacgaaaaagtggaaggggaaaaaaaaaaaaaaaacctaaattcccattgcctgggggagcaagaccaatttcagcaacacaaacactctcttttggaaaaataactgggggggggggggaaa

SEQ ID NO: 46145 - DNA, 379 bp, Glycine max
  Clone ID: PAT_MRT3847_14166C.1
ggaccggaaggaccctcgtacttaacacccttgtttaaggaaacagagttgccaaacttccaaataaccaaaccaccagtttttttttaaagtttttaatgcttccttttaatataaagcgcggcctcgctttcaaacttgagcttaacaatttccgaagttttccacttttaatgaattttgtccacaacagcctgagggaccccattcttcccaattttggtctggggctttttttaaaaagtaaacttgaaaagccttttcatttttgactcaggaagagtcaattccgccaaaaaggtctaactcctactcctaatggatttccttttttccaacttttaaaccaccggtttttcccagggaaacttaatttttc

SEQ ID NO: 46146 - DNA, 995 bp, Glycine max
  Clone ID: PAT_MRT3847_141670C.1
ggctcgagttcagaaaacgcagattttctctgctaaaaaccctactgggtcaattagaacaaagaaaaaaaaacttgattcatcccctgtttcgaagaaaggggggatttttctagggacccagttttcgtttcagtgccgcaacacaatcgagtttctgttggcttttctaaatgcatgagttcgatttgattttcccctgctcctgccactccgttttttgtttctgttcaaacactcactgatagaaaaaaagattcgagaattggttttgttttcattggtgagttggaagtgagagtggcattgctgaagtgtaattccattgaaatgagggaaattttaatgagagggcaatgaaaggggcgtctgagattttagagataataagatgagtggtggatcattgggtattcgttctgggagttatgggtctttggagaagcagcagcagcagctggctcgagatggtgtgtcgcttattcaatcagcacgcaaaccccccaagacgctgaaggagaaagacaggttcttccattggatcttcaagtttactggcagaaagaaggtcggaatgctctttctctttaccatctccgctgctgttttcatctgggttttgtacgttggaaaaggtgaagattcacaggagggaaacagtgtgcataacactagtgttaatggcaatatgtctataggtgattctccatctttgatcgctagagctaatatcatgggcttcactacaatttcagtactacctcctcctcccccgagctattttctgggttacactcttccttctggtcatccctgtaatagtttcacacttcctccttcaccagcagataaaaagcgaactgggccacggccatgcccggtatgttaccttcccatggatgaagccattgcacttgtgccaaagtttccgtcaccttctccagtacttaagaacttaacatttatctatgaagaaactcttatcagggatggtg

SEQ ID NO: 46147 - DNA, 514 bp, Glycine max
  Clone ID: PAT_MRT3847_141671C.1
gcttattcttcactccgtctccttctttttgctgcaacttacctctgtctcttcaatccatccagtttcacttttctgggcgcatggtagctatagaatacatgcgtggacctgttgcgcttgcattgctgcctgcaaaatgcaggtcctggcaaatctactcgatgaatcgatcacattcacagggtttattggcgactttaacacctaagaaactagagaaggaagctgacaaaagggggctagcaactaaagagacgattgacccaatagtggcctttagcaggcctccaccacttccaccttttttaggaccgttggttgctctctcgttgttagagacatggtggaaccgtggcactgatgaagatggcaagtgatgatgtgatgaaatagtgtgatccttacttgaagaaagttttggaaataaaaatcacaacagtgattacagagttgagcaatcgaacaaagaagccccatagctttatgtagccttctaggagtggatgtagcc

SEQ ID NO: 46148 - DNA, 374 bp, Glycine max
  unsure (1)..(374): unsure at all n locations
  Clone ID: PAT_MRT3847_141672C.1
gttacattgacaaccattggttttatcacgcttttttcgggtcatgttagtggcgcagcgcactgttcttcattaatggggttcaggagcaaatttagaggaaaatgtttttggctcctctccccctttttgatgttcaattggatccttagacaattacttcnaaacagctgatgcgagaccggttagctacagactctcggggaggtactcctacttttaaacatgtcactttctaatcacaatcacctctgtatggtttctcaatccttgtgaggatggtccttaccaagatggagccaagggaagttcaattggttgtttggatgatgtcttgggtgcaagacggtgttttaataaaaaaaatgttaaag

SEQ ID NO: 46149 - DNA, 139 bp, Glycine max
  Clone ID: PAT_MRT3847_141673C.1
gtcgacactgaccaagctattcatccggcttttcgccaagaaggaaatgcgaatcctgacggtgggtctcgatgcatctggtaagaccaccatcctgtacaatctcaaacttggagagatcgctaccacaatctccacc

SEQ ID NO: 46150 - DNA, 563 bp, Glycine max
  Clone ID: PAT_MRT3847_141674C.1
ccacgcgtccgggaatttgcaacaaaacaaacagatagaatctaaattataatctcaaaatggaaatgaattgaaaaattcgacccggatttcaagatttttttcattttaaggaatataaaaaaatgcatcccggttctatcattattatgatattccatattccaattcaattggataccagaaaaaatgaattcggattgtaaattgcagtcatatttgtttgggacaacacatacatgggtcgtgatagtatcggtattatatatatatggatggataagatacccgattagataatatctgtgtaactattcaaatttatgttctagggtttacatatattgacagttgctgttataattggaatggagaaagtttttttttcaataaaaaagcaatatggattggttatgtatcaattttcttttcttatctcattaagaaaaaaaccattttagattcaaatcttaaagaataattcataaatgaatagttaacggttgcgaattgtctcgatattttttttttttttcattagaaaaaaaggggggttcccatat

SEQ ID NO: 46151 - DNA, 525 bp, Glycine max
  unsure (1)..(525): unsure at all n locations
  Clone ID: PAT_MRT3847_141675C.1
catcctatccaattcatgagtgaggcacccaaacccgactcatatgaactgaactgaggtgcttgcattaatattatcatcgtccatgtggagccctcaaaacaacatcatggattctcctttgttgtcacaaaaccatgttttgcccaacaaacacacatggaaaatgatcctttgtgctatcgtggctatcacaattgttggactagtagtcagaggcaacactagctatggaatactgtccagagcagaaaaatataatgatggaatcgcaaccaatcagggagatattgttgaatcagaggtgggagttgttgcaactgatgattctcggtgttctacaattggtgtttcaatgcttaggcagggtggacatgctgttgatgctgcagtggcagctgcattatgcattggtgttgttttctcagcatcaagtggtataggaggtggcgctttcatgngtgttcgatcttctttcacccttcaaactgaagcttttgacatgagaagaactgctcctttagc

SEQ ID NO: 46152 - DNA, 221 bp, Glycine max
  unsure (1)..(221): unsure at all n locations
  Clone ID: PAT_MRT3847_141676C.1
gaaaaaattgtcctccananaaaaaaaaaaaaaaaaaaaaaaaaagcgggcgctccaaaagatataaacctaagtaagcctgcaagccaagtcaaaactcctccaaaatggcacctaaaatcaattcaatggccgtccttttaaaaactcctgaatgggaaaaacctggcgttaaccaacttaaaccccttggaacacaaccccctttccccaactggggt

SEQ ID NO: 46153 - DNA, 1693 bp, Glycine max
  Clone ID: PAT_MRT3847_141677C.1
gttgagcggttacgcgacaaatggcgaggttgaatcgttcgtgaagttgttcgaggaaatgcctgtgaggaatgtttattcttggaatgggttgattggagggtacgttcggaatggactatttaaggaggctttggagtgttttaaacggatgttggtgctggttgaaggtgaaggtaaagaaggtagtgatggtgtggttgttcctaatgattacaccgttgtggcggttttgacagcgtgttcgagattgggggaccttgagatgggtaagtgggtgcatgtttatgcggagagtattgggtataaggggaacttgtttgttggaaatgctttgattgacatgtatgcgaaatgtggggttatagagaaagctcttgatgtgtttgatggcttggatgtgaaggatataataacttggaacactataattaacggccttgccatgcatggcacgcggctgatgctttgagtttgtttgaagggatgaagagggcgggagagaggccggacggtgttacttttgttgggattttgtcggcctgcacacatatggggttggtgagaaacgggtttttgcatttccaatcaatggttgatgattacttgattgtgcctcagattgagcattatggatgcatggtggatttgttgggaagagctggtcttataaaccaggctgtggatatcgtgaggaagatgcctatggagccagatgtggttatttgggcagcactgcttggggcctgtagatgtacaagaatgtggaaatggcagagctggcacttcagcggctcattgaacttgaacccaataaccccggaaactttgtcatgctctcgaacatttacaaggatcttggaagatcacaagatgttgcccggttgaaggtcgcgatgagagataccgggttcaggaaagtgccgggatgtagtgttattgggtgcaatgatagtgtggtggagttctactccttggatgagagacatcctgagacagatagtatatatagggcattgcagggattgactattttgttaagatcccatggatacgttccaaatcttgtggatgttgctcatgcaaactgaatgaggtgggaggtattgtgagtatagtcatcaattctttgtgatctggctcaccatccgaaagacccaatcaattccacaggccaaaatcaaatctttaaattctgggtctgttttgaaaatcaattctaaggcctttgaaataatgaaatggaaaaatcaccaagtctttcatcctgcatcggctttcgatcagaatcggttatggtatatatcaaatgtcaattgcttagtagtcaaactggcaatatggcaacggttacttctccatgcccatgtctccgttattagcatttggcttcaccagttctcctgaacttgaacttgagactagggaaatgcatgtcattttcctatttaacagtcatgccatttgccatcgttggaaaaatgtattagttacacaatacttgttttgattcagaaaagaatacaaagctttgaattgatagattataccgaataagatgctgaactaactgctctgcaaataaacatttgcctttcacggcattatctttaagagtagtttcaaatgtcattttttgtttttctgccgctacgcaattgatgactaataaactcctgattccttgagtagc

SEQ ID NO: 46154 - DNA, 347 bp, Glycine max
  Clone ID: PAT_MRT3847_141678C.1
tcggctcgagcagtaggtggatttctgttagaattgtccaataaagacaaagtaacccttttatttcactgacccaaatccatctaatgattcaattgcactgaaaaataaaaatccttgcctttcccaattagcattttattcacctaacccatttcctattttatttccccacttaaaatgatatttttttcttcttccactaacctgttgaactgaagcaagccacgcagggtttacctggcgtgggttggattgaaagttgaaacatatcctacttgagatagtttgtggaatttaatattttgagtaaaccccatcactttgcggctatttgggggcttgtt

SEQ ID NO: 46155 - DNA, 1180 bp, Glycine max
  Clone ID: PAT_MRT3847_141679C.1
caaaatctgaaggcctgcagggattcctgtccggaggtcagcggctgccgccactacatcgcaacagcgtttgctccctgagcgtttgctgccatgtcctcaccaaaattgcacgcccttcgttggctactgtgatgatgataacaagatggcactcatttacgagtacatggccaatggcagcctgaaagattttctcttgctctcagatggaaattcacattgcttgagttgggaaaggagaatacagatagcaatcgatgctgcagaggggttggattacctacaccatggatgcaagccaccaataatacacagggatgtaaagtcagccaacattcttttaagtcaagactttgaagctaagatagcagattttggcctctccagggagtttaggaaagataaccaagatcaacaatttcaagtcattcacaaagatgctacatatgaaaaatctgcagtaatgggcacaacagggtaccttgatccagagtactacaaattagggagactgaatgagaaaagtgacatctatagttttggaattgttctactggaattactcacaggtcgccctgcaatattaaaaggcaaccgagtaatgcacatacttgagtggataagacctgagcttgaaagaggagatttgagtaaaattatagatccaaggctccaaggaaaatttgatgctagttctgggtggaaagctttaggaatagcaatgtcatgctctacatcaacctccattcagagacctacaatgagtattgtgatagcagagctgaaacagtgcttgaaattggaatcccctagtgatactaaaacatttgtggcccctccaagacaagtctacgacgaagtttatagttcatctgaagcattttcctatgatagtgaatctatcacctctccttttccaagatagtgcaagtatacattattcaacctttgggaagtatttaattgaaactgtaaaatatttttgaaaccataatttggttactacaaatgccactcttttgccttatttggtgtacaaaaaaacacatttattttgtcatattcagcttgtctgtgcataaagaactctgcccttgaggacatctaattatgtattatgtgataccttatttttaaaaaactgaataaattaaatacattttttttattttcatgt

SEQ ID NO: 46156 - DNA, 430 bp, Glycine max
  unsure (1)..(430): unsure at all n locations
  Clone ID: PAT_MRT3847_14167C.1
tcggaatgcggctcgagccttgactaagaaaatgaaaactcactacatacccctgtttttttactaattactcccccacntacggtgcttgaaccccacacaaggggggtacggttcaaactacaagacactactcactactaacaatgaccctcgaacccacagtcaactcgctatcatatctgacgcgtccaaaacgagacacgtgctctagtagcggacacagctcttcggcagagaaccctactcgctacgaaacaccacactcgacctcaaatctaacaacctaaatagtggattgactacttccatacgacgccttacggagctcatagaactctctatttccgacaaaccaactcgttaaccgaatacctccccaaatcgataactgcgctaaagctcgaaatcctcgacctccccaacaaca

SEQ ID NO: 46157 - DNA, 676 bp, Glycine max
  Clone ID: PAT_MRT3847_141680C.1
tttttaaatccacttagtttcttaatatttgaaaaccaaattctacaatatgaaaatacattaaccttagcaacgtcacataaagtataaagattaatagcacattcttctttcttcttacaaaagtaaagttgtaaaacctaagcatgggaagcagtgtctgtttcctccaactcaatgcctgcctcagcgagcctcttgtccttgtacacataccccttagcacaaaacaagtacgccaccaaattcacaccactcaacaaagccaatagccagtagaagtaatgtagtttcccatggttaagattatccgcgagccacggttcgcggtggcgcgtggctttgtgcaccaaagtcaccaacagtgagctaagaaaaaaccctaacgacaacgtgctgaggaacaagcccgtgctcatggtctccatccctttgggacattccctcaggaaaaaatctagttgccctatgtacgtaaatgccccccccgaccccacaaagaaaaactgtgggacaagccagaacacgcttatgggaaccactgcattgtgtttgtgcgccaaaccgttcgcacgagccattcttaggcgttttatttcgataagtgctgctgacaccatggctaagattgagaacactaaccctaccccaatgcgttgcaaaggggtgagccctt

SEQ ID NO: 46158 - DNA, 802 bp, Glycine max
  Clone ID: PAT_MRT3847_141681C.1
gataacatacaagaaaactatcataagtgaccaaaaaagacaacctttggggaatcataaaattcttcagaatggctcgcacaattacaattgcagcaatgtgtcttcttctctcattagtgtccctctgtgtcaccaccaacgcattaatgccatacacacgtagcaccctctgggacatgatgctccaatccgaggacccatttggaatcttggaacagaacccattcaacaacatacccaacatcagaggaggagccgagactctcgccctggcacgtgcggattggaaggaaacccccagcgcgcacgtgatagtgctggacctacccgggatgaaaaagaaggacgtgaagatcgaggtggaggagagtcgcgtgttacgtatcagcggcgagaggaagggagaggaagaagaagaagaagaagaggttgagggcgagaagtggcatagggctgaaaggactaacgggaagttcatgagacagttccggttgccggtgaatgcggacttggagaaggttacggcgaggcttgaaaatggggtgctgaggatcacggtgggcaagtttggtgaggacaagaagaggcagcctaaggttattgacattgctcagagggattctgctgctgagaatgtgaagcccaccaagcctcaaatgtaatgtcatatgtcatcatcagccaatccaattacatatgttcttgcttatgttttccttttttttttctttcagtttacaagttgtaagttgcatcttcactttgtttgggacatgggatttcagtgataatgtgatgt

SEQ ID NO: 46159 - DNA, 196 bp, Glycine max
  Clone ID: PAT_MRT3847_141682C.1
aagacagcgaaggggacacaaacaccttattagactttctgggagctgggctcggacacgacaaacaacaacatagttaggcttaagctttataaccttaacaacgttaacaatgggcggtgaccaccttggcggagaccaaacgccggaacttttgggcctgggccacgaaattgccggaatgtgctcggggggg

SEQ ID NO: 46160 - DNA, 358 bp, Glycine max
  Clone ID: PAT_MRT3847_141683C.1
ggggaaaagggacccaaagttgctaaaataggaataatggagatgaccaaatttgctcaaatcaacttactggccactgagctggaagttcttgttttatttgactcccgtaacataacaaacacagcctaaaggggcttagtccatttgagagagctatcagttcttctagccatctctggactcgcaaggtttgaagcaaaattcgttggtgtcaaaacaacaactctgcactcgatgagagcgtgtgcactactgatcttacaatctgaatggcatgaattcagcctattatcttcacagctgcattgctgaggcattaagcgtgcgcacatgcatatatcacagcatggatgtg

SEQ ID NO: 46161 - DNA, 213 bp, Glycine max
  Clone ID: PAT_MRT3847_141684C.1
gtgctggtataactacaactttttagtctatgctctagatctcacgacaagggatttgggcctgtcttagatggctacaactgttattgttggcagcgattagcctcttagaagatctgatggtaatgcaactaacttcaactttcgggataaatcatgggcaccaagttctaacttgtacttgaaggcaaacatctcaagtttaagaagtcg

SEQ ID NO: 46162 - DNA, 699 bp, Glycine max
  Clone ID: PAT_MRT3847_141686C.1
aaaaaaagcagcatgtggggaacaaaagtaaagagactcccaaaaagcatccaggccaacgtgataagtcagccaccaccaccataataaataaaaaaaccgttcatagcaaccaattccttgcctttgtctttctactctgatcatcttttgttcttgagataatggcagcagcactggtaggtggtgcctttctctctgctttccttgatgtggttttcgacaggctggcttcacctgattttgttcacttgatccttggaaagaagcttagcaagaagttgcttcaaaagttggagaccactctcagagtggttggagctgtgcttcatgatgccgagaagaaacagatcacaaacaccaatgtcaaacactggctcaatgatctcaaagatgctgtctatgaggacgatgacttactcgaccatgttttcaccaaagctgccacccaaaagaaggtaagaaactttttttctcgcttttccgataggaagatcgttagtaagttggaagacatagttgtcacacttgagtctcatttaaaactcaaggagagtcttgatttgaaagagagtgcagtggagaacttgtcatggaaagctccatcaacatctgtggaagatggatctcatatatatggtaggcagaaagataaggaggccataatcaagtttgttgttggaggataacagtgacggt

SEQ ID NO: 46163 - DNA, 364 bp, Glycine max
  unsure (1)..(364): unsure at all n locations
  Clone ID: PAT_MRT3847_141687C.1
aaacagannagagaggaagaacaacgaggaagncccancannaccnnccacancggcaacaccagggacncccggggcnccncncnnngggggccncaggnnngagaaaccnaagggnaggggggnnaggaaancgnccnnccggaggggggcaaangaaattttgttttagaanggacnnnagaagacggagccangccaagaggggggggcncnnnaccanccccncanancccncncgcaaaaaagaaaggagcngagnnnangggcacgnncannnnngaggggnngccgcaanaggcacggcnnanggggaaccaaaagacacanggancagaaacnnngancggaggggcngcagcca

SEQ ID NO: 46164 - DNA, 950 bp, Glycine max
  Clone ID: PAT_MRT3847_141688C.1
aagaaaactctttcaggatttacctaagatcagtagtgggttgtctcaactaagcttgtttgatagagacagtagacagagtagaatgtctctccaacaacttggggtgatccgaagccaacgccaagtttggagacccatcagagggttgcctgaaacctctgtggctattcttcgttcttggctcttcgagcactttctccacccttatcctaatgattctgaaaagttaatgctggcatctcagacaggtttaactaaaaaccaagtctcaaattggttcataaatgcacgagtacggctatggaaaccaatgatagaagaaatgtacaaagaggagtttggagagttttctgaagactccaacccggctggtaacaactacttgacgagggaagataccacggattgtgtagaggattgaatcaaaagctccagtgaacaaaaaacttattgtttgacaaacatgggcctttaaatgcttgcctttttcctccaaaatcgagagataaacattatgtaacatgacaagatgatgagccaatatgttcgggtgaaattcaagatttgtttttttgaatgctgaaaattcaagatttggaaaatcatgacttatgatgttccttagattaagtgaccagcttgtaacacatcgtgaggcttgttatgtcaggtttgctattaataccaatttacaggattaaaagcaaacctgacataacaagccttagattaagtgaccagcttgtaacacatcgtgaggcttgttatgtcaggtttgctattaataccaatttacaggattaaaaaaaaactgtgggctgtgaatgagatcatgagaagatcgcattatcagaaattcacaatttgttttacaaccctatcctgtaacacttgcgtatgagcatgacatttgttatcttgtaataaatgagatagccaatttcatg

SEQ ID NO: 46165 - DNA, 313 bp, Glycine max
  Clone ID: PAT_MRT3847_141689C.1
gacgatccaagattcatcacttactatgtgcctggcaaacgcccctatctttcctccaatggccgaccagctcaccgacgaccagatcgccgagttcaaggaggccttcagcctcttcgacaaagacggggatgggtgtattactactaaagaactttggactgtgatgcgggcactagggcaaaacccaactgaggcagaactgcaggatatgattaatgagggtgatgctgatggcaatggaaccatcgacttcccagaggtcctcaacctgatggctgggaagatgaaagacaccgtctccgacgaggag

SEQ ID NO: 46166 - DNA, 378 bp, Glycine max
  Clone ID: PAT_MRT3847_14168C.1
tttttgctaacaaaactaacattttccgtgtgtgtggatgtattcagtgaaaagtttatttttacaagagtgagaggagcaaatcttggtcgtaaagctatacatttttttatattttaaatttaatcattcatgataagatctaatggtcaatatttgtccctcatacaacaaaaaccttctcatttgatgggtctcattatatatatcttatcaagatcaatcgaccgtgtctcatacatgcataaggttctcacgccactatcacgaagctttttggtagacaaagaacgactttcttctaataatgcctctaaatgtgtggcacgctgaaaagagaaacagcaaaggttcaatatcttagacaattcaacttga

SEQ ID NO: 46167 - DNA, 269 bp, Glycine max
  Clone ID: PAT_MRT3847_141690C.1
gaaatgcagaaatatattctgtgtaattaactggatccctaattacaaattttgactttcattggcttcattagcttgtcaaatacactaaactactactctaacagttatagacttgtacaatttaacaatgtacactgactatatgtacactaaaaagtatttattgtctatgtcacagtagcaagatgtgcactaataagtctcattgcatcaaataatttccgtagatgcctatatgaacatgctgattgacacctggtgcttgt

SEQ ID NO: 46168 - DNA, 177 bp, Glycine max
  Clone ID: PAT_MRT3847_141691C.1
actttatcttcgctctctctagctctttctcttctcttgatttgcgatgttgcctcaattctcagtagacggagttcgttggtaggatacatacagacgaaacatccttctctttcttttggcttcgatttctctctcctcttccgcgtcatgtcgatggcaattcggctaggggat

SEQ ID NO: 46169 - DNA, 2790 bp, Glycine max
  Clone ID: PAT_MRT3847_141692C.1
aacgacgatcgagtttgagtcggaatgtgattgggaaacaaaaaaggcgagtgtttaaaatcaatcaaagactaagttgaagacttgaagccatgagatgaatcacttatctcttgacactgaagattctcttgcaagcttgctgctggagcttgcagccaacaacgatgtttcgggtttcaaaagattaatcgagtgtgaaccttcctccatagacgaggttgggttgtggtatggccgccacaaagagtcaaagaagatggtcaacgagcaaagaactcctttgatggttgctgccacctacggtagcattgatgtcatgacgttgattctttctctatcagaagctgatgtgaaccgatcatctagccaggacaaaagcacttgacttcactgtgcagcttcaggtgggtctgatatcgtggttgatgctgcgtaattgcgactaaccagatgccgttataggaatacttgcaatcacaatgttcaatgttccaggagcagcagctggatcctccagtggcggattaatgtggagcagagaatggaagtgcttctttgaacctgctattggaggcgcctggcggtgataaatgccacatgatcatcgtgtgccgcagcagaattgaaattggtttctgctgaacctgacgaaatgaaaaaaaaacctgtctcagtgaacataaataaaaaatcgatgatgaaattctctgatggaagatggctacaataaccaaagaacgtacgcagtactaagataaataaccctcacggaagattcatattcaggtttagtgttacaaaagtaacttagcagggtaagaaaaccagaaggtggcgttaacagaattaatgccatcgtaaatttcttaagcgggctttcacgagaggggatatgtgtgagtatgctcatggggtttttgagtgctggctgcaccctgcacaatatagaacccggctttgcaaggatgggactaattgtgcaagaagagtttgcttctttgcccacaccaatgaagagcttagaccgctctatgtttcaaccggttctgctgttccttctccccgttccagtgcctcctctgctatggattttgttgcagccatctctccttcctctatgtcggtcatgtctccctcgccgttcactccgcccatgtcgccttccagtgcttcaattgcttggcctcagcctaacatcccagcattgcatcttccaggaagtaattttcattccagtagattgagatcttcactcaatgctagagatttttctgtggatgattttgatttgttattacctgattatgatcatcatcatcatcagcagcagcagcaacagttccttaatgagttatcatgcctatctccacatgctatgaattgtaataccatgaaccgctctggtcgaatgaaacccttgactccttcaaatcttgatgatctgttttcagctgagagttcttctcctagatatgctgatccagcattggcttcagctgtattttctccaactcacaaatcagctgtcttcaatcaatttcagcaccagcaaagcatgttggcacccctgaatactaattttgcctctaaaaattttgagcatcctttattgcaggcctcgttgggaatgtctccgcgaaatgtggaacctatttctccaatgggttctaggatttctatgctagctcagcgcgagaagcaacaatttcgcagcttaagcttccgagaactcggctccaactctgctgctgcctctgccgattcttggtcaaaatggggatcacctaatgttaaattggattggccagttggtgctggtgaagttggtaagctaagaaggtcatcatcatttgagcttgggaacaatggtgaggagcctgatttatcttgggtgcagtcacttgttaaggaatcaccagctgaagttaaagataaattggcaaccactgtctcatatgttgcagcagcagctgctggatcctccagtgagggatcaaacattagcacgcaaatggagtctgttgttgatcatgctgtactgggagcatggcttgaacagatgcagcttgatcatcttgtggctcagcaaaactgaaatgagtttctgctgaccctgaggtagttaacaacagaaatgtttcagtaaataataatcatatatattcgtttatgaattttgttgatggaagaaggttacagtaactaagaaaggaagcagtactaagaaaaagaaccacatcactgagcaaaattcattttgaggtttagtgttgcaaaagtaacttagaagggtcaggaaaccactgggtggcgttcacagaattaatgccagtgaagggttttttggctgcctatctcttcaaattttaggtccacattcctgtcaatttttccttccttgaggagcaaatgttgtatcacaatgaagtcctattcctaagtttgatctatcttttgattttgtttctttatattttggggtagaaaccaaagttacagaagggtcattggagtaattccttgtgtctctattttgttccaattttggggatgaaaacacaggttgctggatagtatatggtatttcttttgtaatctggaatcaataattgtcgatgccagggagtgggtaaattaggaatatttgaacattgatcctttgggcatgtaacattcaattgaagtttattgctatattgtttttaaaacctttgtctctattctaaatatcgcagcgttagtagtttctatttgcattgataaataactaaattgtatcatcaaaaa

SEQ ID NO: 46170 - DNA, 101 bp, Glycine max
  Clone ID: PAT_MRT3847_141693C.1
gctcgtcgccactcctccatttaagcgttcattttcgaatctgtctgtctcggctatgccatcactcgggaaatggtctgtcaggacaaagcaggataatc

SEQ ID NO: 46171 - DNA, 1021 bp, Glycine max
  Clone ID: PAT_MRT3847_141694C.1
tacggctgcgagaagacgacagaagggtacggctgcgagaagaccacgcgacggtacggctgcgagaagacgacagaaggggacacatcacaacaacaacaacaacaaaaaaagacaaaaactacttccttctctcctttgctgtgttttctttctcaaaaatgggtcgtacctatgttcttatgatggttgctgcattgttgttgagctccaccatggctcaatctccagcttcgtcgccggctttgtcccccacccacacgccggtggccactccacctaggagggcgttgtcgccgtctccgtcgtctgtgtcaccagcggcttcacccgccaccggaaattctcctccggcaccacctacttcttctccttcggaatcgccacttccatcagctgctactcccaacatctctccctcgaccatctcgactccgccatctgaaggaccagctgcaaacggtgccgttttcaacagagtttccggatctgctctgcttctcattttcgctgcggctatactcatataaaacattttttcttacattatcatctttattcattctattgttttgaactccagtacttttttcttcctggttggtctggtgtcgttgaggaggattcatttatttgattattttgtatattcaattattattcatatgattgatgcatacacatatataataataatctcttgattcaattatcaattcattagcatttgttatttgattaattaattgctgattttggcctttcgttacaaagtcaaaaactaatatttaaaacatcctcacacacaatcaataaaaagttgacaactaataaataaaatcaaataaatccaacatgtaaaataaaaaactaatatttaaaacaaatattcaaatccccaattttctctctaatatttttcattaatcctatctctttccttttatttctctatatatcaaaacctctgtcatgtcatgtatttctttattttctaaagactaacaccgtaatattttac

SEQ ID NO: 46172 - DNA, 400 bp, Glycine max
  Clone ID: PAT_MRT3847_141695C.1
ttattttttttttttttttgttttttgttttttttttctatgcggccttaaaacttatgccgtaaatggcaccatcccttgaataattgtaattgctattttaaaaatcgaattattccgaggtgcattgcctatccctctgtcaagctgtaagctgaaacacccgttttctcaattctaaaaaggtccacattgactgtacacaggagggacaggatatgcatatacaagcgcatcctggtaacaaaatgttagcatgattgtgatcgggtcatttactaaggtacagtatacgtgagtaatatgcccaagaaatctcttttgctagaacttcacgtattggcctgaatactgccacaagccatgccctgaatacatatcctactagaaattctttatc

SEQ ID NO: 46173 - DNA, 307 bp, Glycine max
  Clone ID: PAT_MRT3847_141696C.1
aaaatacagttaagctatttaattgttttacactatatttactcccgttatgataaagtgcttagacataaatgtttaatatgttggacttaaagttttattattcatataatattcaagtggcatattgataatgaacaatatttcattagatctttctcacttttgactaaactttaaattatattaaatgtatgctggcaaggaaaatctcacttgttctttttgttgaacaagggtaaaagtaaggtaaggggacccctgccttaagggacataatttcacgtaccaatcttcgtaatatctc

SEQ ID NO: 46174 - DNA, 3352 bp, Glycine max
  Clone ID: PAT_MRT3847_141697C.1
ctgcaattcacattttgcggcgccgctctagagagcgctccttctttctcgttattttctatcttcagcaggaagacagataagagatgtcttccatagtgaaaggcataatcataaggagcacagcggatgtgtgcaagaatagcatggttttgaatcggaagcccaagcgaagcgaaattgtagggaggagaagcacaagagtgcagtggcagttgcatcttagatcaaaatcaaacacatggaagagaggtagtaggagatcatatcagcctccaatacgtggccaggccatccttaccccagcaacaccaccaaccaccaaaaagcgggtattcacttttggcaacgttagaagtgaaggaaacaatgccatgaagtccttggtgggaggaaatggagcgaatcttgcagaaatgacaaccatttgcttaactagccctcgtcgactaactatcgcatcgcaagtatgccaggagtatcgacaaaatggaaagaagctaccagatggcttgtgggaggaggtacttgaaggcttgcaatttgtagagaatgaaatgggagccattcttgggaatcctttaaaacctcttctcctctctgtgcgctctggtgctgcgatttccatgcctgggatgatggacacagttctcaacttaggattgaatgatgaagtggttgctgggttggcagcaaaaagtggagagcggtttgcttatgattcttatagacgtttcttagacatgtttggagatgttgttatggacattccacactcgttatttgaggagaagttagaaaagctaaagcatacaaaaggtgttaaacttgacactgatctaacaacttatgatctcaaagatctagttgagcagtacaagaatgtctaccttgacacgagatgagtaaattttttctcaaaatcagagaagcagttggaaatagatgttaaagcatcttaaaagctgattgaggtcacaagatctgtttatattgagatcataatggacataactggtttaatggtgtgtgcatacaatgagaggtcttgttgaattctttcgatggttagtccctccagtgctggatttttttgcacaagaaaaaatgcagatcagaggtttgctgctttcttagcccctttgacttctggtcgtggtactattcgctgttagtgctgtttacatatccaagattagcttggccattgctataggatgtgcattgacatggcaagcattctccattacaccaaacgggcctgaagtattcctgcttgattatgcttgtcataatcaccgtctgataacattacttgcggaggtatatgtgtcgaatctggaaacatattggtaaaggtgcatttaaaatagcagtagatatggttcatgaggggcttgttgatattcgttctgcaatcaagatggtagagccactgcatcttgatcaacttctccacccacagtttgaggatccatctacttacaaggataaagtgatcgccgttggtttgcgtgcatcccctggagccgcagtagggcaggttgtattcagtgctgatgatgctgaagtattgcatgcacaaggaaagggtgtcatcttggtgaggaatcatacgaggccatagaatgtaaggggtatgcatgtaaatactggaatcttgacagctagaggtggtctgacatctcatgctgctgttgtagcccgtggatggggaaagtgttgtgtgtctggttgctctgacatccttgtaaatgatgctgagaaggtgtttgtagttggggataaggtgataggagaaggagaatggatctccctgagtggatctacaagtgaggtgatactgggaaagcagccactttctgctccggctctaagtgatgatttggaaattttcatgtcttgggctgatgaaataaggcatctgaaggttatggcgaatgctgacacacctgaagatgcagtaacagctagacaaaatggtgcccaaggaattggactttgcaggacagaacatatgttttttgcttcagacgagaggataaaggccgttagaatgatgataatggcagttacaccagagcagaggaaggctgcactggacctgttgctaccttatcaaagatcagattttgaggggatcttccgtgcaatggatggtctcccagtaacaattcgattgttagaccctccacttcatgaatttcttccagagggtgacctggaacacattgtcagtgaactaacttctgagacaggaatgaaagaagaagaaatcttctcgaggatagaaaaattatcagaagtgaatcccatgcttggttttcgtggctgcaggctgggaatttcatacccagaactgactgagatgcaggcccgtgcaatctttcaggctgctgtttcagtgagtaaccatggtattacagttcttccggagataatggttccacttatcggtacacctcaggaattaaggcatcaagtgaatttaataaggaatgttgctgataaagtgttgtctgagatgggttcttctttaagctataaggttggaactatgattgaagttccaagggctgcactagttgcagatgagattgcaaaggaagcagagttcttttcgtttggaaccaatgaccttactcaaatgacatttggatatagtagagatgatgttggcaaatttcttcctatatacctatctggtgggattctgcagcatgatccattcgaggtacttgaccaaaaaggtgtgggtcaactcatcaagatatgcacagaaaagggtcgtgctgctaggccaaacttaaaggttggaatatgcggagagcatggcggggagccttcttcggttgcattttttgctgaaattggacttgactatgtttcatgttctccttttagggttccaatagctaggcttgcagcagctcaagttgcagtttaagaggcagttaccaatgaatggcatgtgagaggattattgactctcgacaaccgtaaataactctggttcatcataagcccgtatacatcagaaatggaactcataacatataattgtaaaagtgaaagcaaaggaaaattaatttgcaaatgtttgttaataaaaaagagaaaacatggtgtacatgcaaatgtttctcttataccgtgtctcgtcataaaataagacagattcttgtacatgttgtattttatcacaataaaatctttaaaagatagaagattcttgtaaaaaaaaaaaaaaggaacagctctaagaatacagcttacgtacgcgggcccctggctatgtgcttgggtcccattgaacgtagaaaagaatgaaacacgggaatatttctggact

SEQ ID NO: 46175 - DNA, 1047 bp, Glycine max
  Clone ID: PAT_MRT3847_141698C.1
aattcggcaccaggacggatgcgagatgaaactaggaggggagagtggcactccactgttactaaataaaggtttcaactttgaggataaacctcaccagttccctggttgaaacgaagcgaaatttccacctgcatcatcttcaaacctgcgcttcttttgaaccgatttgtgctgttttgttagtgaagcacatcgagtgcaaactgtcgaacaggcatggcaagcctgttgacaacatcagccatcacctattctcctctcaacaatggttccaaggatttcagaaagtcagggaattcttctaaaggaaggtgttgcataaaagcaatggggatagagaaatccttggaggaattgtacaatgtgaaggtggaaagaaaagtgtctcctgagaaactagctgagcttggagtttcaaaatggtcggtgtggaagactgggaaaagcaagttgccctgggactggcaggtagaccaactggtgtacattgaagaaggggaagtgagagttgtgcctgaagggagcaaccgtttcatgcaatttgtggctggggacttggtccgttacccaaagtggtttgaggctgacctctggttcaacggtccatatcaagaacgttatagtttcagagcatatggtgatgatcattgatgaggagagatgatgcttggtagccacttagagtaacatgcacatcttatctgggtgtttaaagtaatagatctgttttatagttttagttttccagttctaactgtactacctatatatttgaatgcttgtgatactttgccatcttatcatctgtttcaaatttaaatggttcatatcaagaacgttatagtttcagagcatatggtgatgatgattgatgaggagatgatgcttggtaaccacttaaagtaacatgcacatcttatctggatgttttatgtaattgatgttttttgaagttttagttttccagttctaaatgtatcaccaatatattgtgatactttgccatcatttaaaagaattggtcctaaaaaaaaaaaataaagg

SEQ ID NO: 46176 - DNA, 325 bp, Glycine max
  unsure (1)..(325): unsure at all n locations
  Clone ID: PAT_MRT3847_141699C.1
gtcgcangcacgcgtacgtaagctcggaattcggctcgagcggnggangcanctcnagccggnggtgacgangacaaaaggnttcatggagcatgatnatnntactgnngangtcctanacgatgnggatgangatnaanatnangantacaggttatcntctacgtaaatgcagtannnctantgacgtaggatcacagttgcccgttgagntgtacaantgccgtgtatganattaataacgngntanannggttngtcgccttccagtcttcctnannaaaaagangcaacncattncnacnnggtcancggntntngtggc

SEQ ID NO: 46177 - DNA, 258 bp, Glycine max
  Clone ID: PAT_MRT3847_14169C.1
cttatatttaaacacacttctctgcacatagggcccgcactttattgcagtgaatacggttctatatacgtagctacacctgcagagggacactgattcactcgaaatctgagactcttacagtggtctagaacaaacgtcaccatgaggactagtggcgctaaaactcacattaggattaacagacgccttgtgaacagaaactagagccactggcaaaggatcaactctaccacgaaaaacaatgttcttactttt

SEQ ID NO: 46178 - DNA, 471 bp, Glycine max
  Clone ID: PAT_MRT3847_1416C.1
ggactaaaatttataatttttaataaaattttagctaataatacaaaacattgacaattttcttctcatagggtaagaaggaacaagcaggagtagtctaggcaagagtgaatttaaagcggtgagatcgacttccgaaggaaccggtaatttagccatttagctaggtagaataattctgttgtaattactatgtagcatggaaaagaaaaactaagaagtgcgtgatgaagaaactgaatgctacgtaggagaaaactgaattaacacatgagtgccactgcatcactttttttcttttccttaaatactggcagacatatatagcaatgtcaaaaagggcatgcagatgcaggcatgcagcagggatatgtagctacatgtatattctattagagtcattaaaaaagaccatgaattaagctgttggcaaaggcagcgcaataattgggccaagggagtagggcaccc

SEQ ID NO: 46179 - DNA, 466 bp, Glycine max
  Clone ID: PAT_MRT3847_141700C.1
cggctcgagttcagatcccaatccaaagagttgctattgttatttccagcttttcatccattttcccaggtccgcgccatcaactgattgggcgtgaaaagggttccttctgatttcttttaccatattgtttctttgttttttctccctccgaagtttcttccaattttttcttattacaaataatcaaagatgtgtgtttagagggtgttgcacttcgatcacaatgagaacacacccgttactgacacttttgttgttttctcgggttatgtttgatgtttccaacgcttcctctgttcggaaattccaaaagttgattgcctctgatccaaaagataatcaaccaaatgatccaaaccatgctggtgaaacaaacaaggccacagggggttcaccttccaccaatgtgagtggtcctatttcatccccagttccacaaccacaacctctgcccaaagtgata

SEQ ID NO: 46180 - DNA, 924 bp, Glycine max
  Clone ID: PAT_MRT3847_141701C.1
cagttgatcttccagaactcctaaaaaaaagttgatcttccagaagtgctaatttgaatccacaagtgcgtagaatgaagcatattaaatttaacatattcacaaagtcccatgtgggattgtgattctcctagtatagacacatttttctgtatgcatttctagctgaaaatgttaattttttaaacaagatgtgtactgctactttatgcaacatgcatgaacactgctaactcctccacaccgtctcaaatctcaaacatgatatagctttatgacttggtctatcttagctcgacatacagggcaaccccatttctttgatttcacctcgttcaagcaagacatgcatccagcaacatggccacagggtatgcatgccccttctgctggagcatctaaacatatcacgcatgatgaaccacttccaccggcatttttttctcctttaggaagcttctcagcatctggagatgccatatcaacagggcttaaatcaattgatggatactgaatgggaccatctgccagaatctcattggcgattggtggagctgatggattcaagtccaaagcactagcattcacgtggctttggaggtgctgagtattgccatctgggttagcttcttgtaccaactcactatcacttgtattaggatttggtgtgccaagaaaaccatgattgcctgtattcactgcactgcttgaagagcttgcttcaaagcttggctgtgtatcagaaaagggtggcctctcctgcatggcagactgaagggatgcactgatggccatagccaactctgtgtcttctgcaactggtagtgctgtgggtggacctgtaggcacgttattttgcaagaatgctggacttacctgtggaattcctttgcaagcattagaaaaccatgtaagttgttgctt

SEQ ID NO: 46181 - DNA, 1433 bp, Glycine max
  Clone ID: PAT_MRT3847_141702C.1
gtaagcaaaccccaggaatcctgaaagctttattaatattttcatactatagtttcagagttgatcttccagaagtgctaatttgaatccacaagtacatatgaaatttaacttattcacaaagtcctatgtgggattatgattcttctagtatagacatttctctgtatgcatttctagctgaaaattttcattttttaaacaaacatgtgtactgctacttatgccacacgcgtgaacacgcctaactccttcacaccgtctcaaatctcaaacatgatatagctttatgacttgatctatcttagctcgacatacagggcaaccccatttctttgatttcacctcgttcaagcaagacatgcatccagcaacatggccacagggtatgcatgccccttctgctggagcatctaaacatatcacgcatgatgaactacttccaccggcacttttttgtccttctttaagaagcttctcagcatctggagatgccatatcaactgggcttaaatcaattgatggatactgaatggggccatctcctggaatctcattggtgattggcggagcggatggattcaaatccaaagcactaggattcacacagctttggaggtgctgagtattgccatccgggttagcttcttgtaccaactcactatcacttgtattgggatttggtgtgccaagaaaaccatgattgtctgtgttcactgcactgcttgaagagcttgcatcaaagcttggctgtgtatcaggaaagggtggtctctcctgcatggcagactgaagggatgcactgatggccatagccaactctgtgtcttctgcatctggtggtgctgtgggtggacctgtaggcacattgttttgcaagaatgcaggacttgcctgtggaattcctttgcaagcattagaaaaccatgtaagttgttgcttgtcattctcacttgcaggcccaagtttaatgcgtgttttagtagtgtgattaacaactgtcactgacggatcagactggtgaagctttggttcttgtaaatcggcgttccacagtccaataacagtatgtggttgtgcatcctgcaacctagaatatatggcaagctccaacttgtaaggtttggcaagagtacgggagccaactggtaaaacaaccacccaaactttctttgataccaactgaggagctactacttctagaaacccaggaccatgaaactcgcgcaaccaaccggagaacaagcatagatgactctcaattgtacgaacaacattgctgtgtcctttggccctggcaacctcaagagcagttagacaatcatcattcaagactaaaggattggctccatgcaaaagaagtaagttaacaatactatcaaagtcccttttagctgcatgatgcaatggagtcccaccatgacgaccaggac

SEQ ID NO: 46182 - DNA, 277 bp, Glycine max
  Clone ID: PAT_MRT3847_141703C.1
ggtcactgcatgcagtatgactggctaacgaactggttgcctctaccctgaccacagccttggatatgatactttaccctcttggaccacctagaatacaaacattaacaccatggacattgtgctgcggaaccttattggaattcatacttgaccaccacaggtcaactctcccataatgcccttactcactacattatatgatctcatgccaaccaagctatcatggaggaatacgcttcttagaacactttctacaccgtgtgtgctatggtcg

SEQ ID NO: 46183 - DNA, 219 bp, Glycine max
  Clone ID: PAT_MRT3847_141704C.1
cataaaaagaaaactttgttaatccttattaaaataagaaccttaagttgcctaaaaatgatgaatcaaaggccaagaattcacacctgaccagaattattccaattgatgaggggccaaagaaccaaatttaaagccccagctatctataaccgaccccttacttaagccagaagtttgggtatatttcttcacaaaactgaaacctttggctttttt

SEQ ID NO: 46184 - DNA, 468 bp, Glycine max
  Clone ID: PAT_MRT3847_141705C.1
cattaacaaatattaatggttaaatttatttgttttttttcctgtgagattaaactcaaccattttttttccttcttttttaactattcaactcaatcttatatctcaaattaagtttattttttggttttcctagaaattaaattattctgagaaattaactatatttaacgagcgagagccatttcattggcccatattagttcttgtgcttaggaaactttttgggtagaaaaaaaacagtactaagagtttgactttatggcctaatcttgtggaaactgaaagcgcaagtggaggtagtacgctgcctagagaatagagaatctgaagttgaaagttgaaactcctttgtttcccatcaattacttactttatatccaattaagcactgcacagtttactctcaacggttgtgtgtcattttctttgctcataacagaaacgtcaatttctggctagcatgtc

SEQ ID NO: 46185 - DNA, 286 bp, Glycine max
  Clone ID: PAT_MRT3847_141706C.1
gagcttaattatccgccgcccgcccttttttttttttttttaccacaaaaggttcagtttttgcaccactcacaacacgaaccaatctatctgacctcaaccaattacagaggggcctaatctattttaaaaaatgctgcgaagtgcaggtattctattttactcaaaacatagacagaaagaggacaagtgatgacatgaaagattctccaaacagcctgcaggtggtcttgcctctgaataaaccgttatctctgaccatcgagtcgcgccacacagtgtctag

SEQ ID NO: 46186 - DNA, 337 bp, Glycine max
  unsure (1)..(337): unsure at all n locations
  Clone ID: PAT_MRT3847_141707C.1
caaattctcagcgagttcttgacttctcgttcttatataataacttactacttagctttatttctcttcatccttattatttctaaagttccctttccaaatattcagtgactgtnctcttaactatgactattcttcctcaaaaatcacccacttctcttcatcacctcaatcatatactgcattattctgcaaacttataatatcgataacactatcataccccaaggaacctacttttatctttattacttgatactataaaattttcttacatatttcaatcgaaagttttcttccaaattatcatccccatctatttcatcatccctttttt

SEQ ID NO: 46187 - DNA, 346 bp, Glycine max
  Clone ID: PAT_MRT3847_141708C.1
cgggccgcctttttttttttttttggtttggaaattcctcaacttttacttcttaattttggacccctgcaaccaagttcattagaacctccaccggaaatggacctcttttttttggccaaaattaccttttaaattcttcaatttaccaaggcatttggcggggtttgggccggggggaaagtccatgggaaacctcaccagcctttaacggacccttcatggggtaataactatttaacctttactctgggggggggggtaaaaagctgatcctaagctgggttgggcaaatggttaaaaccacgtggaaggaaaaaccacatttcaagacaaacgccaaagc

SEQ ID NO: 46188 - DNA, 327 bp, Glycine max
  Clone ID: PAT_MRT3847_141709C.1
ctacaatgccttcaaaacttgtgtttctcctgcgtgtgtatggtgatgataactcaattagtgtcatgaatatgtaagccttactttagtggcagctaagttgaacagcttcctagcaggtcataatatcaccatctctgatggtattgacaaagctagcgcagctcttgcaatttagaatagtgagctgattcgccgatctcctcaagagagactttaagcagatgtctaatgttttattgggggctcctgaggacaaggcgagcctatggtcacaagcttaatatgtcgctctgcaataatctgcaaatgcaacaagcttatctt

SEQ ID NO: 46189 - DNA, 319 bp, Glycine max
  Clone ID: PAT_MRT3847_14170C.1
ctcaccgattgctagattggaacttcgattctcagtcatctcttttaccaatctgtggggtgttgctctagcaggagagagccatgttcatgcatcgctacctgaggtatgatcattgggaagctgtatgctcaaacgctcccatactcactgcactgcgagagcttttaaagtctctccctgtaggagttgtaattgatgaacttcctatgttatcgttgatacacagggcccaaaaacattctattataaagaagacctctattcaggcatatcattgaaagaacaatttacctagctgtgcctatgcacaacctta

SEQ ID NO: 46190 - DNA, 704 bp, Glycine max
  Clone ID: PAT_MRT3847_141710C.1
ccgggttaacggcggtgacggtgccgaggtgtcaggtagaggggtgccacttggcgctgctaaacgcgaaggattaccaccggaggcacaaggtgtgtgagatgcactcaaaggctcccaaagttgtggtcttaggcatggaacagaggttctgccagcagtgtagcaggtttcacgtggtgtcagagtttgataattcaaagaggagttgtaggaggagactagctggtcacaacgagagaagaagaaagagctcccatgattctgttgcaaggaattcttcaaaaggagggtgtgctctctctcttctgtcatcaagaagtgattcttggctttctccttctgatctctccataagatgcagtgccgcattgcgtgaattgatagccgaaaaccgggcagccatcatggccagacaatttgtttcagatagagattggcataatcatcaccatgcagtggaagacttcaaggagatccaacctgagtccaattacttcccacaacaaatgtttccccagacacaatgaaggatccatgtgtaaaagagcttgagatcttaatgctggttacttgacccaaaggtttagggaaacaagatttcaaagagagtagacatttatggggaatgcctaaagaaaggactttgtgtctgaagttttcaattctttaatttgctaaaaataaaagtttggacttcttta

SEQ ID NO: 46191 - DNA, 253 bp, Glycine max
  unsure (1)..(253): unsure at all n locations
  Clone ID: PAT_MRT3847_141711C.1
gagtactgtcgtaacatgaaatccttgctctatctatatatatagcgtatctcgcnnnnatctaagcatgcacacatgcattctcacaatacataacatccttccacatgatgccaaggaacatcacagccatgccataacacgaaaccctaccgtatatatgtaaagtgtatcgtatgtcatatctttacatgcgtccacacnnnncaaaaaaaccaaattcattgccgaactttcatctgctgnattaact

SEQ ID NO: 46192 - DNA, 476 bp, Glycine max
  Clone ID: PAT_MRT3847_141712C.1
tacggctgcgagaagcgacagaagggcaattacagtggtaaacttcatgactttttcttttaatttgtatatatttgattgatatctgttcttgaatttcagtttctgattgctctcttggtctgcatgttctgattgaatttatatataggctttgaggtttgtgatatgagtgaataggaaaatacccaaaacaaccaattagtattttttcaatggatatggttgtgtggtatgcttaggaaccattttcttagagcttgatttgatctactacttataagaatgactttattaccgaaaacatttttttcctctaaagaaaagatttttccttgttttgctttggtggaatgagcatgcgtgaggaagtcttattctgttgaaagtttaaatcttgcttgggtgatatgagatgaatgttgagttttagttctgggatatcctatcatgttaatgtgaaacactataattct

SEQ ID NO: 46193 - DNA, 447 bp, Glycine max
  Clone ID: PAT_MRT3847_141713C.1
cttaaggcgaagaagaacaatggttctaaacaaatttgtgggaaaataattctgagttcaaaagaagtggtgtgcaatgctgaaagttgtcacagtgcagatgagaaacaaatttcagacaatagtgagctgaagaaaactaatgatgagccacctaaagggaagagtgaggaggctgaaaataaaatgaaagaaagccaaaatatgagcactggtgacaaaagtcctaatgaagagtcagacggtaaccagctgaaggatactgatcctcctgaaggatcaagtaaaccagagctgagtgacaagaatactccacaatcattgaaggcaaaatctaaaattgttaagaaatctcaagctgttaaacttaaggccaagaaaaacaatggttctccacaatttcatgggaaaaaaagaattgtgacttcaaaaaaagtggtgggcaat

SEQ ID NO: 46194 - DNA, 559 bp, Glycine max
  Clone ID: PAT_MRT3847_141714C.1
taaaagctgattttacacataccacttattcggcagatatagcttttaattcccataagacaaaatgaataggaatataatggtgaaaaggattggagaacaatgcataccctaattcttctgttaatgttgggcatcttcccttgtttcattccgattggcacaggggagggacagtagactctcttgatacatagcaggattggcacagtacaacctttgaccttcagcactgatgtgatagtcaaacagctctccattgtcatcgtgtttcactaatccttcacaatttgatccaaaaattccaccatcttcagcggcgcatatcgggtagaagtcaaaagtagggataacagtggacttagtccaagatgattgcattttatattctttcatcacccatatctcagccgcttcgcggcctaggaccatgaggcagaggcatcctcccactaccctcaatctgcagacatgataattttccgtagtcaaatgattgaacagaggaatctctgaaaaactcctttgtatcaaatcaaaggcaataatcacgggaacc

SEQ ID NO: 46195 - DNA, 358 bp, Glycine max
  Clone ID: PAT_MRT3847_141715C.1
cacacaggcgatgcatataatgatactgttactgaacagagcattgctggatcatacaggagccgtgtatatagttcggccatttccagtaagaccatctcacgggctgggggaagttctaacaccctcatcgatttaggagctgacataccatgcttggaaacagatggcgctgatcacacatactatatcttggcacagaaagggttttgggaccaagcgtacccttttcagactacagaatcacacaaagagcatgcatttggatgcacatcttcgtgtccagacagaccttcactatcttaccgagccattcgatgtcaggtacctggacctcttcttaagaagatctcacgcc

SEQ ID NO: 46196 - DNA, 265 bp, Glycine max
  Clone ID: PAT_MRT3847_141716C.1
attcccgggccgacccacgcgtccggaaattggcaattgctgtgtgtgagatataatattagagtaatagcaccatcaataaataagattattttgcatctctatattctatacaacaaatgagaataaccttacaacctgtgttcaaagtctttctccaaatctcagcttgctttctaatgattttaattccccttttcacctcccattaaaaaaaaaaaataaaattattccctttaaaacctaactaaaaatcttcttttta

SEQ ID NO: 46197 - DNA, 570 bp, Glycine max
  Clone ID: PAT_MRT3847_141717C.1
agtacttcgactccgcgtccaacgtgaggctggactgatcatttgcgggtctaaaatcgattttttactgaagcgccgaggatgattatagccgcccggtcaatttacggaatagggagcgccatattttaaggggcgaaccaaggagcgcggactagccttgaccagcgccaaccgctgggctagaaaaagcatggaaccgaagaagccaacgatattgcgaggggactaaatcgacgatccaatgtccaacagaggatcttaaggaggtcggctttcggtatcagggttgggtctcttagctcgttcaggaagccacgcgcggcaacagcccgcgtaccatgagggtcagagaatattggatcctgagtggctcatagggcgggagcgacagctgttttccttgtgtgatagtggaggcgcgaggagagcaaaggaattggcttatgatcgagtgtttggccccaaagcgcgcgacatgcggagaattctgcttaagctttgtggacttgggccgtcagtgttctgggggtgattgacgagcggtataagacccttgcgaagagatag

SEQ ID NO: 46198 - DNA, 389 bp, Glycine max
  Clone ID: PAT_MRT3847_141718C.1
gagattcagaccacacacacccggttttaactacttacttgccactttacccttctcaactctcttactgttactattactgttactccacctaaatcaaaattcaaacatacctgtgagtttcttttagctctcaaacttgcaaatcagagaccctttatatttaaatgattgccttttttattatgttatggataagaactgtttcatatttcgggtcttattattattattattattatgtaacatggtttgggtgcaactacctgcaataatttactgttcatttcttcgaatttttggactttattttagttcgcaatatgtgtcataattcataataataatagttgcattcaaatgcattccaaaacctcaaaatcgagctc

SEQ ID NO: 46199 - DNA, 248 bp, Glycine max
  Clone ID: PAT_MRT3847_141719C.1
ttataattaggcttttaattataataacaatcaatcaacatgctgcagaagggttggcgaaggggttgaagaagcgaggcttatgagccatggccaatggcgtcttacgggaaccgtcgccgtcaccggtgatgccgtcgacgttcctgtcacaagaggggcacatggtgagtgttgccgaatgcataggcatgtccagaggctgcaccatactcagcgctttaatctcttgaagctccttgtgtgac

SEQ ID NO: 46200 - DNA, 441 bp, Glycine max
  Clone ID: PAT_MRT3847_14171C.1
cccacgcgtccgaaaaaaagtattgataatgtttctcagtgcttttccacgagagtcacaagtaacatacgtacaatgctcagaaaacgaaaatcctagagtaaactctcacttcaaacattcttatccaattttccactcaaattcccaaagagtttgtttcccaatttttccttaatcattgtctatctcagcaagtcactaaatctgtgtccccgtggcatgcattttataagccaccaccctcaactcagtttcactcacattttaattcaaaccacaccactccttcctttccaggtcctccaagtgaccttcttcattctctccatatgctttttccttgttttcattttttctcttttgatcatttcttgttgtggggttggaagaaggaggctatgtttttatttttattttaggctgtagaatacatacaaa

SEQ ID NO: 46201 - DNA, 460 bp, Glycine max
  Clone ID: PAT_MRT3847_141720C.1
ccgcaccaaggaggatttccatacaaaacaaagacaacccccagcaaaaataacggaaggttaaaattccatatccccaaaaaaaacctaagggcctataaaaaacatataaactcaaaactcgcaaaaactactttaaaacagaaactcaaaaggccacccccaaaaattctatcaaccaatatcaaaatagggggaccacttctgggatttctttggggctgggcctggctggaatgctgaaccagctggaccactggatgcggctgaaactttttctccaggacctggggctaatcgctcctccctccgagcaattttcctttctttgcgggccttgttcttggcacgttgggcctaaaacggggcggacaaggtcttctctctggccttctaagcttgggactaaggaaggctctccataaaaactctctggttcttgaaaacattacccttaacc

SEQ ID NO: 46202 - DNA, 1271 bp, Glycine max
  Clone ID: PAT_MRT3847_141721C.1
ctcgagctgaatcggctcgaggggctccagaagagggaaatgacatttcatgattcaaacgctgtcatgaattcgacagttgatgatgatcggacgtttcgtgttttagatttttatgaatcgtttgaggaccatttaacgttttccattgtatcacagatattcccgtggactcctggtactctctctatacggctgcgggaagacgacagagaagggagtgagtagtgagaatggagtttcaagggttaccggaaggttgcattgctagtatactctctcgcactacgccggcggacgtgtgtaggttttccgtcgtatcaaagattttccgttcggccgctgaatcggacgctgtgtggaaacgttttctcccttccgattaccattccatcatttcccagtctccttcgcctctcaactatccttccaagaaggagctctatctcgctctctcggatcgccctatcatcatcgatcagggtaaaaagagctttcaattggagaaaaagagtgggaagaagtgttacatgcttgctgctagagctctcagcattatttggggtgacactgagcaatactggaactggacaaccgataccaattccaggttcccggaagttgctgaacttagagatgtgtgttggcttgaaattcgtggggtgctaaacacccttgtcttgtccccaaatactcagtatgctgcttatcttgttttcaagatgattgatgcccgtggatttcataaccgtcctgtggagttatcggtcaatgtctttggtggccatggtagtaccaaaattgtctgtttggatccaaatgaagaacttccacacagaagagtcgagggactgcaacgtcccaatgcaagaagcgatgggtggttggagattgagatgggggagttcttcaatacaggcttagatgatgaagtgcagatgagtgtcgtggagactaagggtggtaattggaagagtggcctctttattgaaggaatagaagttaagcctaaggaagagaattaagcaaatatcttgtttagtttaattcacagaactatatgcataaagtcttgcgtcttagatggcaagaatgctgcttattttaaccttcaacctttgaactttgtgatgtatttttcttgccataactgttgcccttttctcttgaactactatatgcgtaagttatattgcttgtcgtaaaaaaaaaaaaaaaaaaatgatgaacgaggtaactatttacaaaaggaaagggaggagggcatgtca

SEQ ID NO: 46203 - DNA, 327 bp, Glycine max
  Clone ID: PAT_MRT3847_141722C.1
gaagcacaacgggatggcacattgattggtttcaatcacagatttaaacattgaatccaagcccaataaaaaacctgaaaagtgttagacatcccatgaaacaaattcctgctattattgtagccataaagatgtgctaaaccagagaacatgaacataaagccaatgcttgttaaaagagaaccaattgacatagccagataatatttacccgtgcatccacaaggcacccaaaaagcatcaagccttattggttatgtcgctggaaagccaggccaaaccctcatagagacccttcccagaggtagcacacgtgctctggatgta

SEQ ID NO: 46204 - DNA, 434 bp, Glycine max
  unsure (1)..(434): unsure at all n locations
  Clone ID: PAT_MRT3847_141723C.1
tggtagtaccgaaattgtctgtttggatccaaatgaagaacttccacacagaagagtcgagggactgcaacgtcccaatgcaagaagcgatgggtggttggagattgagatgggggagttcttcaatacaggcttagatgatgaagtgcagatgagtgtcgtggagactaagggtggtaattggaagagtggcctctttattgaaggaatagaagttaagcctaaggaagagaattaagcaaatatcttgtttagtttaattcacagaactatatgcataaagtcttgcgtcttagatggcaagaatgctgcttattttaaccttcaacctttgaactttgtgatgtatttttcttgccataactgttgcccttttctcttgnnnaaaaaaaaaaaaaaaaaaaaaaaaaaaaaaaaanggggggccnncaact

SEQ ID NO: 46205 - DNA, 339 bp, Glycine max
  unsure (1)..(339): unsure at all n locations
  Clone ID: PAT_MRT3847_141724C.1
atacattaatatttttttcaactaccatctcaatntcattattaggggttttttaaaaaatatctaccaccatataatcctttttctataaaaatatttatcctaaaatcacaacttaatcatccaaattcttcaccataccaacaaaacctaaacttcttattttcaaaaccacctacattataattcttccaaatatatcaatcccttttatttctcataacaacatcattattttaatcaacactaacatctttataacttaaaatttattatcatctcaccatcataaaaatacttccataacattattcttatacattatctatactatacctt

SEQ ID NO: 46206 - DNA, 783 bp, Glycine max
  Clone ID: PAT_MRT3847_141725C.1
ggagtgagtagtgagaatggagtttcaagggttaccggaaggttgcattgctagtatactctctcgcactacgccggcggacgtgtgtaggttttccgtcgtatcaaagattttccgttcggccgctgaatcggacgctgtgtggaaacgttttctcccttccgattaccattccatcatttcccagtctccttcgcctctcaactatccttccaagaaggagctctatctcgctctctcggatcgccctatcatcatcgatcagggtaaaaaggtaggtagcgtgttgtgtgtttcgcatcccttaaaaccttttctgttgatttaatttgatggttaattctctgatgtctggaacgcagagctttcaattggagaaaaagagtgggaagaagtgttacatgcttgctgctagagctctcagcattatttggggtgacactgagcaatactggaactggacaaccgataccaattccaggtcagacccttcagtttttctattgtaatttttggatcatggttagtgtatctgcctatcatgatttctgggatattctattttttctgcaacgagataattgcaattataactgtcatgttaccagtgatatctggctagtaatctaggaactattttatctgaatttaaattaaaaaaataaaaaaaaacgtcttactgtgtttggatggagtatttcaaaatttcaggaaatttaaaattcaggaaaattaaaatgcatcaattaaatccttgaatttttaaaattccttctttgaata

SEQ ID NO: 46207 - DNA, 565 bp, Glycine max
  unsure (1)..(565): unsure at all n locations
  Clone ID: PAT_MRT3847_141726C.1
ggaattcggcacgaggaaatgtgctattaattttctttgcataagagattgattattacttaaaagtttggagcttgttctatgaattatttgagaattccttgggctaattctttgtagggaggccagtgttctaaaatttcatctagttttgttgttatttttactttcattgtgcatcatacataaaatggtatgttggtactttgatgtcacaagtgttttattatttttatgatattggcgtagcttagttttctttggtgtctctccgccgccctcatttcttgtgtactattcagcggttcggtggcttgaagaggctcttcctctcttttttgtgctgcaggtgtaggttctggtatttttcttgctgctgacttgttatgctactcggtcctggtggtttacccccgtgggcgtggcccctgcttgcgcttttgatggcgctgcatttggatgcttctgtgtgtcccctgtcttgttttttcattattaaggaactcttgccctcatattccctagtagttntcttatcttcattttaatgaatttatatattgaa

SEQ ID NO: 46208 - DNA, 814 bp, Glycine max
  Clone ID: PAT_MRT3847_141727C.1
ccacgcgtccggcggcataaaggaccaaccatgtcgcctagtttcgtcttcgacccgcctagcgacgaagaaatcgaacactctgaacacgaagaagaagaagaatccgaagaagaaccagagtcaggatcaggaacaggatcagaatcagagtcagaaggagaaggagaagaagaagaagggcacgaagaagcgcgggttccgaagaagaagaagaagaaaacgcagtctccatgggactttgctaaatacacggaatcagtggcggaggaacacgctcgcaggagcacaacctcggtcgacgagaaaatctccaaagcactcaaacaacgttccacgccgctcgttgctgagcttgaccacagctccgagtccgaacctgatgaacaagaagattatagaccagaggaagaagatgaagaagagggtaatgatggtgatagcaaatccttttttgctccttctgatggaacctctttccatgccgattccttcttgcagctcaatctgtctcgccctttgctccgggcttgtgaggccttggggtattctaaaccaacgccaattcaggcagcttgtattccattggcattgagtggtcgtgatatatgtggtagtgccattactgggtcagggaagacagctgcatttgcactacctactttagagaggttgttgttccgtccaaagcgcatgcgtgcaataagggtcctcattcttactccaccagagagttggcagtcccagttcacagtatgatagagaagcttgctcagtttactgatataagggggttgcctggttgttggggggt

SEQ ID NO: 46209 - DNA, 301 bp, Glycine max
  Clone ID: PAT_MRT3847_141728C.1
tcatctgagaacaatcacacccgagtttgagacccttattgatctttcagggatagatatattggcaaggcatgctgctgatgagatatcccttggagagagggagactccaaatgggactactgataagaaggcgttagaagctttccaaagggttggaagcagactgactggagttgagggaaaagtcactgcaaggaacagcgatccaggtctgagaaacctgactgggccagtgcagctgccatacactgtgctccgtcgttcaagtgaggaagggtcgactttcataggaatctcc

SEQ ID NO: 46210 - DNA, 615 bp, Glycine max
  Clone ID: PAT_MRT3847_141729C.1
gatgttcgtcatgctaaatagcatcgagaatatatagggtaatatgtaaatcatgaaacattaaaggagtaattcatgatgatagtcagatggaatgaaaagagttagtagtttggtcatttatttttgtgcaattgctgcaaccaataacaaaatgagaacatgcacagctgaaatgttcaatcctgcacttctggcttctttgcagtgcctttaaggtaccaccccaaagccccaagaattgttacagtaccagctacaactgcataattccggtacttgtcagttgaaactctgtcggctgttgttccagcatgtcctgagctactaggtttggcatcagttactgaaccccccgagcctgcttcgggttgaggacccttgcgagcaagcttctccaacttctcttgctcagctttcttaaagtaagcattttctgcagccttttcctcctcgctcagtatttttccagaaccactgctaaatagccttctagatccgtaccttgcagccacacgtgcagccattgcagttagttaaatgttttcctcttcagactcagttcagtggagagcccagagagggttagcagaagcaatgcgccgtcgtccgaaa

SEQ ID NO: 46211 - DNA, 251 bp, Glycine max
  unsure (1)..(251): unsure at all n locations
  Clone ID: PAT_MRT3847_14172C.1
cggctgcgagaagacgacagaaggggatgttagatgtattcacaatgtccgtgtaattgtggcattatttatggcttgatcattatgccgtatctttaaaacattcttcatgcttagaatcaacccaactgtttgatctgtcaaaaaaaaaaaaaaaaaaaaaaagaaaaaaaaaaggctcgagaaagagacagaaatgagncaatcgctnctgaagaagattcgcctcgagcaggaggacgaaggcgtta

SEQ ID NO: 46212 - DNA, 1492 bp, Glycine max
  Clone ID: PAT_MRT3847_141730C.1
acgagcgccgggggatttctagacaactcgtccgcacaacgtctcagtcccttcgatttcccaaattctgtataattaatcatcaccaccaagaatcgaatcagaatttggaacaatcagtgaattgagttttcatccctctcatctccacctttctccgttgagtttagcaaaaagaaaaaaaaaaaggcaggcacaaaaagcaacacgagcattattacacagtacttgcttggttgctttacactttcacagttcctctacttttcttttggctatatattataaaaactatagcaccctcttccttcttctatttatatacaggtctttattctcagactcttctttgatctgaacacaaaaacaaaaaccaccaactttgtttaaccctgcagagttttttcggttccctttccctgctgctgcttttgcagtctctgggagattttggcttcatatttttttatgtgtcattttgtggtttcctgccagcggtggcggctgtcattactgtcttgcgctctcatcatcgaaatcctcttttctgcgaaaaaagttgatgaaaaaactcgaaaaattgtttccttcgaaccaagcatatgcagcaatagtcacaacaagccttaacgagacagagagtgaagttggtatgagggcaagaagaaaaggagttgcaacaacaaggatcactccatgttcaacatcaagagcttcctctggcatggaggctctgtatgggacgcatggttcagctgtgcttcccatctcgtggggcccataaattcagacattgcgatctctactcgcttagcttcactggctacatcatcccttccttagcccatatgctcacttacagaaaagcctctgccagacagaatgctgcagagaagcctcctttcttcatgccaagctggactgcaatgtatgtcttcaatgcattcattgtggtatgggtttttgtagttggatttgggcttggaggatgggccagcatgaccaacttcataaggcaaattgacacatttgggctttttgccaaatgctaccagtgccctccaccagcaccaaaagttgtggcagcaccaccccctcatgctcatcattagagccaagctgactcattattcaccacaacatagtagagttcagcaacaatcacatttccctcaatactttgtattatacatgggggagaatggtgaaaaaaaatatacacttcccccttcatatgatgtgtgtgctggcagggttttgcattatttttgtccttttttctttgttatgtagtatttccccctcttattgtaagattacttgattaaaaatagtgtgtcaaaaatgttatgattcctttgctatgaaatgcacaggctaattaaattaaattaaacactatgttttggtatcaatctttcgcaaccctctttcctttcctttatttgagcgatatgtaagattttgtttgccatttcctttcgtgctcaca

SEQ ID NO: 46213 - DNA, 1172 bp, Glycine max
  Clone ID: PAT_MRT3847_141731C.1
aacgagggactcacacattgcttctgctaaccctctctgggctctccactgaactgagtctgaagaggaaaacatttaactaactgcaatggctgcacgtgtggctgcaaggtacggatctagaaggctatttagcagtggttctggaaaaatactgagcgaggaggaaaaggctgcagaaaatgcttactttaagaaagctgagcaagagaagttggagaagcttgctcgcaagggtcctcaacccgaagcaggctcggggggttcagtaactgatgccaaacctagtagctcaggacatgctggaacaacagccgacagagtttcaactgacaagtaccgcagaaggggaacaaacacgactcacacattgcatctgctaactctctctctctgcgctctccactgaaccgagtctgaaagaggagaagatttaactaactccaatggctgcacgtgtggctgcaaggtacggatccagaaggctatttagcagtggttctgggaaaatacttagcgaggaggaaaaagctgcagagaatgcttactttaagaaagctgagcaagagaagttggagaagcttgctcgcaagggtcctcaatcagaagcagtctcggggggttcagtaactgatgccaaaccaagtagctcaggacatactggaacatcagttgacagagtttcaactgacaagtaccggaattatgcagttgtagctggtactgtaacaatgcttggggctttggggtggtaccttaaaggcactgcaaagaagccagaagtgcaggattgaacctttcaggggtgcatgttctccattttggtattggttgcagcggttgcacaaaaataaatgaccacactactaactctgttttcattccatgttactattatcatgaattactcctttaatgtttcatgatttacatattatcgatatattctcgatgctacttagcatgacgagcatcaaaatttgttttcagtagtcactagtcgttcaaatgaatcaaatgcatgtgatgattacttgcatttgcccatcattagcagggtgagatggtgatgaaaagaagtgagattgtatgttgccggaactggaattagcctatgaatgaaatgtcaagagagaaggatatatttggaatagaccatatcttgaccccgt

SEQ ID NO: 46214 - DNA, 417 bp, Glycine max
  unsure (1)..(417): unsure at all n locations
  Clone ID: PAT_MRT3847_141732C.1
ggaaaaaaaaaaaaaaaaaaaaaaaaaaagggaaaaaaaaaaaaaaaaaaaaaaaaaaaaaaaaaaaaaaaaaaaaaaaaaaaaaagaagggaaaaaaaaaagaaggaaagatggaaagaaaggaacggacaaaactgacacaacctgacggcaggaaccttctttcccaaaaaagttggacaaaaaaaaaaagggcaccaaaaaaaaaaacccccccaaaaaaaacggccgaaaaaatcaaaagggggaaccaaataaagcgggggaaccaacggaccggcgggncnaataaaaccaccaaaaaaaaaaccccctcccaaacaaagaaaggggtggataaaaaaagttggcaggcagtcccgggaagccggcacactcataccagggaaaaaaaaaacccccccgggagggggggg

SEQ ID NO: 46215 - DNA, 2098 bp, Glycine max
  Clone ID: PAT_MRT3847_141733C.1
ggctcgagacgagctttccacttacgttccgtccgaactcctgcgagaggacggcaacaggggacgaccttcccattgtttcctcaccgtgaacaacacaacaccacccactcacaattccttttttctaaagcctaacgaaccctaattcttgattattcctcaattctttcgttcccttcccatcttggcggacacgcaaattccccttcttcctcatttcgcaaacaaattcctcttccaagcatccccaattttcttttaatctattttttcgccttgttatttcacccatttaaacctgtggcttcttttcgacgccccccccccccatgtgtcagaatggattagtgtaaattattgaaagatacccatatataaaagcatgggtagtagtgacatggacaaaactccgaaagagaaggagtctaagacacctccagctacatcacaggagcagtcatcaacaactgccatgccaacaactaatcctgactggtctaactttcagacgtattctcctatacctccacaagggttcttggcatcaagtccccaagcccacccatatatgtaggggcgtccagcattatatgccttcctatggcactccaccacatccctatgttgcaatgtatccccatggtggcatatatgctcatccatctattcctccgggatcttatccttttcagtccttttgccatggcttctccaaatggtattgcagatgcttcgggaaatgccccaggccgcatcgaagttggtggtaaacctcctgaagtgaaggaaaaattacctatcaaaagatcaaaaggaagtgctagtggtggtaatttgaatatgtggattacagggaaaaataatgaacctggtaaaataccaggagaatctgctaatgggattcattccaaaagtggtgagagtgcaagtgacggaactagtgaaggaagtgatgagaactcccagaatgattctcaattgaaatcaagggagaggcaggactcttttgaagatgaaccatctcaaaatggaagttcagtacatgctcctcaaaatggggtacataatagacctcagacagttgttaatcaaactatgtctatcttacctatatctaccacaagtgctcctggagcagttcctggtcccacaactaatttaaatataggaatggattattggggcacaccaacttcgtccaccattcctgcattgcatggaaaggttccttctactgcagttgctggagggatgattgctgctggatcacgagatggtgttcagtcacaagtttggctgcaggacgaaagagagcttaaaagacaaaggcggaagcagtctaatcgggaatctgcacgcagatccaggttacggaagcaggctgaatgtgatgaactagctcagcgtgctgaagctttgaaagaagaaaatgccactctccgatcagaagtgagccagatcaggagtgagtatgagcagctacgttctgagaatgctgccctcaaggagagacttggggacatacctggtgtcgcgacgcctgggaaggaggatcttaggtctggtcagaatgatcagcatgtgagtaatgacactcaacagagtggtcagacagaggttgtgcagggtgttcattaggatcttgcttcctgctgcatgttgctttttaggtagataacctaaccaagtagcaacagcaagttctagtttttggttcaaattgtattaaaggtgatcatatgtagtattaggatctatttatgtcatatgatccctcattcctaatttgtcatgtttatgacggccaaaaacttgtattgtagttagtgtgtgaatacttggttataccttctctgctacttcaaaagttagtgttagcagtaagaaagtatgattagtgaaactagttattgtccattatatggattgccgtgcttctgcgcaaataatttaatcaggaagatatattaaggaaatggaaatgaagttcagccctgagaaagttatggtttgagtatagccagtcaaccatcgtggattttataagaattttgtattgcattatgaattatgaatacataatcacctatttatg

SEQ ID NO: 46216 - DNA, 912 bp, Glycine max
  Clone ID: PAT_MRT3847_141734C.1
gtgggcatagggagtaaacgagctttccactttgattctttccgaaatcgaagctgtaacgaaatctctgccacgggacagcgacaccgtacgaccttcccattgtttcctcaacgtgaacaatacaacaccacaccaccacccactaacaatacctaaagcctaacgaaccctaattcttgatcattgctcaattctttgttcccttcccatctcggagacacgaattcgccttcttcctcatttcccaaacaaatttcccctccgcactcccccaatttattctttttttcgcattttattttacccttttgaacctgtggcttcttttcgacgccccccatgtatcagaatggattagtgtaaattattggaaggtacctatataaaagcatgggcagtagtgacatggacaaaaccccgaaagaggagtctaagacacctccagctacgtcacaggagcagtcatcaacaactggcatgccaacaactaatcctgactggtctaactttcagacgtattctcctatacctccacatgggttcttggcatcaagcccccaagcccacccatatatgtggggcgtccagcatattatgcctccctatggcactccacctcatccctatgttgcaatgtatccccatggtggcatatatgctcatccatccattcctccgggatcttatcctttcagtccttttgccatggcttctccaaatggtattgcagatgcttcaggaaatgccccaggtagcatcgaagttggtggtaaacctcctgaaatgaaggaaaaattacctatcaaaagatcaaaaggaagtgttttggtggtaatttgagcatgtggattactgggaaaaataatgaacctggtaaaacaccaggagaatctgctaatgggattcatt

SEQ ID NO: 46217 - DNA, 312 bp, Glycine max
  Clone ID: PAT_MRT3847_141735C.1
gcacgagggtagcgtcagcttgtgacccaagtgggggcatgaaggtggtgggataagactctggcttagccaggttgggttggtggctgcaccatgctggcctgcccgttccaagttgagagttgaatcaggtgttctgagcgaaagcacagggctcttggttcctagacgagggggcaccgcgtgaggctggcttcacagagcagcgatcacccctggctcttgacagtggagggattacaggctgctcctcttccagctcatatagcctgatgagcctagctcctgaaccatcacttttaaaaaaaaaaa

SEQ ID NO: 46218 - DNA, 576 bp, Glycine max
  Clone ID: PAT_MRT3847_141736C.1
tttgccgtgctacactgttgtacgtccgcctgcttgggggggggggggggactaaagatagtccagctaggaggttaaacagtattcataaaggacctatggcgagagcgggcggaggatacaagagcaagttagaggcggatagcaatggcaaagcctaatggtgactgatgaagattattgaaagtgaccgaagtgtcttaactaaagccgttgacatggcttaaaaatgaacactgacgactggataacacagaaacacaataagcacggcaactagtagtgtagtggcaaattgcttgcctggtgagcgatgcaacgtgtaaccgaatgctgtctggcgccctggtaaccttggtaatggtacttagccggctgatagagcctttaacttggtggacattggttgtgcacacacatgctatacggagcgatggtaccaaccacgttaagcatatattattagataggtggctagaattcgaacgaccaaccatagccgggcgtttatggctagaagtattaatatgtgtaccacgttaacctttggaacaatatacaattgctaggtgtaag

SEQ ID NO: 46219 - DNA, 531 bp, Glycine max
  Clone ID: PAT_MRT3847_141737C.1
gtgcggcgctcaggcggcgggcggtaatcgagataagtacatgtttggaattgtttcacagtgagttggggaaaatgggttccaaggctttgctcgttcttgttatgttcttggcttctgccctcattctttctgctgaagttgcccccaaaaatttggatgagaattttgatgcaaagcatgagtgttgtggatacaaatgaggtagatgaaaaaaaagatggttatgttagttggcgaagtggtgttccattgcgttgtgctcatccttgctgttattggtaccatggaaggtgtttaaagtactgctgcggtcctcctcctccaaaacctcataactaagcaggaacttatgctaagacaagttgttgcaatcacagtcactatgtataaataaagagcagtgcaggaactggcccttgtgtatttgatgtttcatcacttcttgtgttttctaatgatatttttattgtagataaaaaaaaaaaaaaaaaaaaaaaaaaaaaaaaaaaaaaaaaaaaaaaaaaaaag

SEQ ID NO: 46220 - DNA, 453 bp, Glycine max
  Clone ID: PAT_MRT3847_141738C.1
aacaaacaccaaaaacgaaagaaattgccataacacaggaaaaaaaactacctgattagccgccaaaattttgctgaaaagattgtagaaactactccgtacgggcgggtggaccgaccaattaatgaccgacccctgccggcggaccacctatctctatatagagggggatgaaacataggcgtacgcaaggacaaagcatgtctcctgcgtgaaagagaaatgcgcttcctttaccacacgacatacaaaccggacgcataaatgaaaagcccgccggggctcacaagtgagccaactcaccttaatggggtgggggtcacctgcccggtttgtattaagaaaaaaaacctggccacgcccattaataaaaagaccaacgcccgcgcagaggcgggttgccttttgatcgcccgcgggggttttttttttttcagtgaaaaggaccccaac

SEQ ID NO: 46221 - DNA, 369 bp, Glycine max
  unsure (1)..(369): unsure at all n locations
  Clone ID: PAT_MRT3847_141739C.1
aggtaaggaactcanaaaacagaattctagttaagagattcttattacttggacgtttgtcgatttctcttcttccgtttttatttaaactgggtcttgagttcaactatcatcacagtacctggtgcccttgcctctagcaaatagcgtcatgtcatgacaagccaaatggctcagtcacttttatattcttatgtatcagaagccatttaccaattgttacctgactatgttaaatgtaacttatcattcctattcatatctcctcaccaatttagacacttttacaattattatcttgacaattccacttcatttcatttacacaccacaatattccttttcttttcattaattcaatatgacttc

SEQ ID NO: 46222 - DNA, 388 bp, Glycine max
  Clone ID: PAT_MRT3847_14173C.1
ataatgtcctcttggttgcaaaacctgacccccatttttttagccaaatcccagttgttagctgcctcttgtgaagccttgcagccgttaggatttgtagccgatcttgaggtggattcgaccacgttcatgtctacatattggtcctcccgagttgctaattgttttagtccactaccatcatccaaaataggagaagctgcacgaaaaatgctagatggaccagcgacacaagccctttagctgccactgccccttatatccccttcagtagcaccttctacataattgggccccttcttctttttacacctattccttgaataaatcttccacccagattgaggcccatattaattattttattgaaaatattaaaagtgctcta

SEQ ID NO: 46223 - DNA, 236 bp, Glycine max
  Clone ID: PAT_MRT3847_141740C.1
gggtggggggggttggaaaaaacaatcggatatcatttccattatttttttttttctgacacaaattcaatacatttgaaaccactttaagatgggttggcggggggctaaccctcatccacagattttttaaacccctccaagatgggtttggggggggctaaccctcctccatttaaattaaaccccttttagatttgtgtttgcggggggctaacacacattcacaaattttt

SEQ ID NO: 46224 - DNA, 382 bp, Glycine max
  Clone ID: PAT_MRT3847_141741C.1
cgacaagtgatgatagtttctgactactcgagaacacaggcctattgtttcaaagctagtaccatgctcactgcagccagggcgcccatcaagcctacagctagaatgactgcggcaaatggtatcagtggcgggcgaacacttttctgcatcatgccactgatctccgtctccagcctctcagccaacttctctttggagaattcggccacaactctatccctgccccacttgcccatctctttcagccgttcctcaccttcgccatcttcgagcgcaatgcgcatgacctcggtccaatcctgtaccttggtgacgtctcgcagccaacctgtctggccgcttatgactgtttcagtgggtccaccttcattagcagcta

SEQ ID NO: 46225 - DNA, 309 bp, Glycine max
  Clone ID: PAT_MRT3847_141742C.1
acgctctctgggtttcctgcttccttttttatttcattatgggcatacattcctccggtcttggttttgcaggaatactattaacaggggacaatgggatgcttccgggggttcattagttttttataagggagggggggggttccttaacgtggggggttatcatatttttttactgggtgggaggttaacaagggtagctccatttttttttttttttgggtgaggggataataaaaagaatctggttagggagaataggggggggtgggatggtgaaggggggaagggggggggggaaaagggggg

SEQ ID NO: 46226 - DNA, 481 bp, Glycine max
  Clone ID: PAT_MRT3847_141743C.1
cttgtttgcttccaacgctcatactacttttaatagcctgcgcaagctgtgtttacgatcgccgggacctcgaaggatactttctccggctgccctccgaaactgataacgacaactatctataggggcacccggcgggccgtactcctagccggttacaatggtgactggaattacagacatcaggctgatgttcgtcgcgcctatcaaatattgacgaaaggtggtctgaacgaagaaaatattattggttttatgtatgatgacattgcattcattggggaaaacacaaggcctgtattcatcattaacaaaccatatggacgagatgttaataaaggacgtacaaatgattacaccggcgaagatgatactggtgataacttacttgctggtttactgggagataggtcatcactgactgctggcaactgcaaagttgtggacatgaaaaccgatgatcatatatttgtatactata

SEQ ID NO: 46227 - DNA, 402 bp, Glycine max
  Clone ID: PAT_MRT3847_141744C.1
tggcttggaacctttgggctgatttatgtgcttgtgtccaagactatttaagagagaattcaagatatataatataatatatagagagagcccgaggaagaaactactacggtcctagtagtactcgggcccgcgtcgctctccaacgccgtagtccttattataaatctaagggcggctccgcctaatataaagaattatgtcctcaggtcctccgcgagggtcctagatgagttcgtagtggtggtatttgtaattattattttcttagtcgaagtcgaagtaaagttaaaattattattcaccggttttaagaaaagcgtcaaagcgaaaacctccaagaaggaacttcatcggcattaaagtatccgcctaacggccgtcggcgactaagattttaat

SEQ ID NO: 46228 - DNA, 382 bp, Glycine max
  Clone ID: PAT_MRT3847_141745C.1
tgagagtagcactgcacagcaaagtgagagccagatccaaaagctgagctgccctcaaaccagataaccgcatagagtcgggaggtgggttcatagagacctggcatcctaacaacaagccatctgcagtgcatcggcgttgacatatctatctgcacctcttagcctgattgctatttacagaccttgctacatcaacgggccctatgatatctacatacaagaaggtaatgggctctactagatcatattacaaggcttgtactatcagcttatcaagatgccgtaagattctcatcaactgacgatgaagccataggccccatgaccgggaccatcaggcacatgcactagagatagggtgagctcagatcgcagtgcc

SEQ ID NO: 46229 - DNA, 268 bp, Glycine max
  unsure (1)..(268): unsure at all n locations
  Clone ID: PAT_MRT3847_141746C.1
agcaacacaagatttttcacatccacacatttatagaacagaagganccngtgtcctcaaaggacttcatgactaatgcttcatttttagaaggacacatggactacgtttgagctctaaacaacgattgagcaacgttccttagcccaaaacacttcgcgtggaaacaaaaggcgcaccaccaggaagatgaccaggtagagtcacctgccaaatagccaagcctttcgtaccggcgccgtacaccttaaccgttggaaaccattcc

SEQ ID NO: 46230 - DNA, 237 bp, Glycine max
  unsure (1)..(237): unsure at all n locations
  Clone ID: PAT_MRT3847_141747C.1
ggaanaccctaagngatgaagagaactcctatcttgttcccttctcttnctttcttctttgtgccttcanctcanatctacctttcagccaccgctgatgatgatcatgtgtacgacactnacggcgataagcttcaatacngtgtcaatnatntgngngtnngnatcgatnanaggatanggngncggagtncannttgcanaannaggaagcgagnttnccttctgactgnggag

SEQ ID NO: 46231 - DNA, 117 bp, Glycine max
  Clone ID: PAT_MRT3847_141748C.1
gcgtagtcatggattttatttgtagatccgaacgcgagataacatccggctgcgagaacaccgtctacgaatgacggcgagacggcgtcatccgtagacgtagtgctcggagccgga

SEQ ID NO: 46232 - DNA, 738 bp, Glycine max
  Clone ID: PAT_MRT3847_141749C.1
tggaatcggctcgcctcgagcgaatcggctcagtcatatgcacaacaacacacactcaacaaaaattatgcctctaagctcatattctaccgttgttgccatagcgcttttattttcatttacatcttcagcacatactcaagaaaactttgttcaatgtcttaacaattatccccataatatcaacgccacctcaatctccaaggttctttacaaccaaaccaactcctcatactcctctatactagatttttccattaaaaatcttaggttctccaacgtaagctcaaaaccccttgtcattgtgacacctcttgttgtctcccacattcaagccaccataatctgttcccaacgccatggcatgcagattcgaacccgaagtggaggccacgattatgaggctctctcctacgttgccaaggctccatttgtggtcattgacctcataaaccttggagaaatcaaagtggaaatggaaaacaacactgcatgggttccagctggggcatctattggtgaactttactacagaattagcgagaaaagcacaacacttgggttcccagcaggtgtgtgtcccactgtgggcactggtggccacttcagtggaggtggctatggattcttgatgcataagtttggtcttgctgctgataatgtaattgatgctcacatagttgatgtgaatggtaatcttcttgatagagaagcaatgggtgaggatctgttttgggc

SEQ ID NO: 46233 - DNA, 262 bp, Glycine max
  Clone ID: PAT_MRT3847_14174C.1
cagaacgggaccgcactccttttccttctcgttctggtttatggatctttcccaacgatgtttacagcgctcaaccacatattcgggaccacgggggacaggtcacttaactttacattcctacgcagtgctccctcacatacacattgactatcgctaatgaacatgcttcggttcacattaacattgcgcatgtcgatcacaatggcgtctacaactggtcatttctccatttttgccccctgcggattcatccgtgctc

SEQ ID NO: 46234 - DNA, 350 bp, Glycine max
  Clone ID: PAT_MRT3847_141750C.1
ggatgggtatttggagattaacgataggtcaaaggatgtgataataagtggtggcgagaatttgagtagcgtggaggtggaggcggatatacacaatcaccccacatttaacaacacctgcatgtaaatgcaatcaaaatcttgactcatccttttttaactcgtgtgaacaaccaaaccaaaaccggacaattgaactcttttttagacaaagtgacaacaattccattctacatgcgactaggtattgttggttgtggagccccccaggaccccataccctgtgcgtccatcctcagcacgtgcttttgaatcttccccgccgacgacttcggccacgcctccttaaa

SEQ ID NO: 46235 - DNA, 921 bp, Glycine max
  Clone ID: PAT_MRT3847_141751C.1
gaacctccgtaacatcctaatccattactttttaagaacctaatatcagggcaaacacctaatactagaccacccctttttacatttcatcccaatggtacattatttacagagccaagagaagcctcagatgatttaacctcctactagtttctacatgaaaatgtcttgaaattgtccagaagattcaaccttcatggcaaaatatgtgggagcagcaaactgggcatatagttccggggatcctctagagatggcctgcagaactaaaccaaaatctcttacattaccaaagaagcaattatccacaccaccatccattcatttaactcctcacaagtcaagggttggatgatgttggtaatgcacggtatgtggaccgtgcctgaccactcactgcttcatttatcctactgaatactactttgaggggaatacaagctataacaggacccttgagcttatctaccactggttttctttcctcttctaactgcttgtgacctgtcaatgatgacaatttccgaatctttttattcaagagcccagttttcttcatcttggaggatttactaggcgaaaatcgcgttaaattcttggaatgtattcttctggtcaccgagtttggcttggctgcacaatagacatcaccaacttccaagtcacatccaatgtcactcaacattttatcacaatgaccttcaaccaagacctcaaccgccaaagggtgtccaataaaggctttgccattcagtttactcacaagagaaaccaaagggacgtgttgtggccggtagctggatttaacttctagcttaacgtcatataatgaagcatcagaataaataattcttccagggaaatctgccgtttgatatctggagttaacagtgaagcgtgaatggcgataaggaagcaatc

SEQ ID NO: 46236 - DNA, 464 bp, Glycine max
  unsure (1)..(464): unsure at all n locations
  Clone ID: PAT_MRT3847_141752C.1
tacggctgcgagaagacgacagaagggaaccacataacacgtgtagttagtagttagtagaataaaacgcacgtgcaagatattagtgttgtcagggagtagttattctgttaagaaacagtcagcacagttacgaccgttatacatgtaataactttgtgtatataagcctgcttgagtacgaataatacaagaaggaaaaagcttactcccgtaactagtccctaggaggtaccttatcctcgaaactaaggcaatcatccctctcttttactctctctctctctcgcgtcctcctctcccccactctcaaagcctaacaacccctcgtgcgccgaggagattgtgaacactgtcatggcgctcttnctcggnctnctacgccacacacacacacctnnctaacccctctctcccccccccattcgcggtgacctcactttcgtcatcttgtcagacgacga

SEQ ID NO: 46237 - DNA, 515 bp, Glycine max
  Clone ID: PAT_MRT3847_141753C.1
gtggtaatttggttgggatggaatcccgtgttgaagaattagaaaagtgtttagcattggagtcggtcactgacgttcaagttgtcggaattagtggaatggggggaataggaaaaacgactcttgcccttgctttatacgaaaagattgcttatcaatatgatgttcattgttttgttgatgatgtaaacaaaatttatcaacattatggttcattaggtgtacaaaaacaattacttgatcagtgtctaaatgatgaaaatctagagatttgtaatgtttctaggggaacatatttgatagggactaggctacgcaataaacgaggacttatagttcttgatgatgttaatcaggttgaactactacacatgtttacagggagtagagagactctattacgtgagtgcctaagtggagggagcaggatcatcataatttctagggatgaacacatattaaggacacatggagttaatatgtttcagagtcaggccattgaataagacaatgct

SEQ ID NO: 46238 - DNA, 474 bp, Glycine max
  Clone ID: PAT_MRT3847_141754C.1
ggctcgagctcgtgcctcttcttcctccagtccgccgtatcctacatctgctcccacagcctccacctgcaccgaccgaactgctctcgctgcatccgacgatgaagatgatgatgatctcttggaagacggggaggccagtcggtccagtcagcagcatcatagggttgctctgaagccacttgatgcgcctattgctgataaagagctcaaaaagcgcgatctgaaggatcttcatgccgctcatgctgctgagcaggcggcgattgaggctgtccaggatgaccacgatgctgtcactgtgggcattgctagcctgcctgttgggcttgatggtggtgatgatgctgacgctgatgtcacagatgtaacagtatacaagttctccctgtgtgcacagcgtctagaacttgcgacagatgcgacatcgaacagttctaactgtaagaggtatgggtcggatgggcccagtgg

SEQ ID NO: 46239 - DNA, 147 bp, Glycine max
  Clone ID: PAT_MRT3847_141755C.1
caaagaaaaatggatttttttcttcttcttatactggagactagagaaatttccagacaatcacaaattacgatcacacctcaggttaacaaaaacggagggtaccccctcaaacaggggtttaagcgaacacaaagcggaccaaaa

SEQ ID NO: 46240 - DNA, 407 bp, Glycine max
  Clone ID: PAT_MRT3847_141756C.1
ctcaagaaaaagtttataacttaattagaatgcatcgagaatatggaagaaaaaaaatagtatatcatctactcacaaattttcaaatataataagtttgtcgatgttaaaaataatttaaatcatatctgatataaatcttgttgagttgaaatgataaaaatctctatgcaaacaatggatatatggaattggatactaaactcaaacttttgaaataaaagaattggatactctaaacacaggctttagcttctgtaacttgaatttaaatttgcagatttcaagtagttcaaaacttcattgaaacatgcatgtgggagataagaattaatgaagtaccaataaaattaattgattgattaatttcctttgcatgtattaacattgatctattgaccaaatca

SEQ ID NO: 46241 - DNA, 281 bp, Glycine max
  Clone ID: PAT_MRT3847_141757C.1
cgcacgcgtgcgtcatcctggaactaacccttttatgcaactactagttagcaaggccatagggtgggttcccaattggatctgtggacactgcctatcagaccaacatcgctgctcaattacaccatgcatctcgagcaccattagaatgagaccgtatataaactaaatcatcatgtgctgtgagcagtgcaagttctaccttctctagctagatagatacagctagaatgtcaacctacctatgtgaactgatcacatctgcctacctacataaagag

SEQ ID NO: 46242 - DNA, 278 bp, Glycine max
  Clone ID: PAT_MRT3847_141758C.1
aacacgcgtccggcataactctgccgataactacaacgcggcctacccaagcacctatactcgtgggtcgtcgagcgtcgacctctactacctgggcttgggcttctactggaacctagcacttgctcgcgcgcatgctacttggctacgcctccatgctgctatatagacctaaatgcgggatcctcaccttacaactcggatacggctaaatcattggctgtcacgtgtataacatgagcggagatgcatggaatgaaggcggcatccatgccact

SEQ ID NO: 46243 - DNA, 1544 bp, Glycine max
  Clone ID: PAT_MRT3847_141759C.1
ccgagaagacgacagaaggggagaactgataatgttataaagaaacaataattatgtatcaacaagaattacccattaaaacaaagaaaagaaaatttacttggttgagttggtctcaatgattatattagcattgaaatttcgcagcgaccaaatctgttatgaaccaattatatctctaaaagatttgattttttttggagaatcgattgtcttgggtgttatatatactccaacggtagcattaagaaacaaccacagcttctttcctcgatcactttctttcatgcttcttaggctttgatcgatctcctttttaccttctcatcttctctctttctccttccttctgccagttcgtcttgggacagggatttgactacaggataaaatgggtcgtgcaagaatcagcttgaaacatatctcaaatgagagatctcgcaagaaaactttcatggagagaaggaaagtacttataaaaaaaatctctgaattttccaccttgtgtggagttgaagcatgcttgattgtgtatgatgatgggaatggtgacattgaaccagtgacttgtcccaaagaccctgtattggcacactccatacttcaaaactatgagtttcaaaagaatcagagacctcccaagaagtttgggtattcaggactttgttgaggataggaagaacatcattgaagctgagatttccaaagtgcataaagagatcaccaacatcaagtatccaacttcggatccaagtttcataaacatggaagaggatcaattgagggccttcattgctctggtggatgctaagattaggacctgtgatcattctttgaaaaacatgcatcaaagtgaagccaacttcatgcaaaacatggcttggggaagtgcttcctcctcccatcctactcctatggagccacttaataataatgggagggtggatgttacaaactcaatagatcaggtttatgaagctatgcaactagttgatgctccctttagttacattccagacatggttcagaaaagttttaattgcttgcaaaacatctctcaaagccaacccatacttgatgttgaggatgagatggtaggttttagtaatagagttgatgtgtcactggatacaactaatcaaattgctgacttgttggactggtttgatggacctattattggttggtctgatcttgtggattggactagtcaacctgatgaatctcagaatgagcaacaaggtggaggagatttggatggatttcaaacagaatgctataatctgaatttctgaatggctaactatgagttaactttgattttgatgctcttagtatttagtttaatgtgtaacttttagccatttatgtgcttgaaagtgctttcagctggaaatgtaggttttatgttgctagaaagtgtaggtttgggtatcatatatattgtttcagagtattgtctattttgcatataatatttatttcgaattcattgttcaaagtttgaatttacacatatatgataattaatgttttgataaaaa

SEQ ID NO: 46244 - DNA, 531 bp, Glycine max
  Clone ID: PAT_MRT3847_14175C.1
gtctccaatgtcagacacagaaactaaaattgtataagaaccaaaccccatacacttcacttttccaaattttcaatatcttcccttagtttcctccttcctctcaagcatgtctaccccttcatcatcatcatcatcatcttcttctatttgggtgttgtctaacataaagcttcagttctttgcccgcatcagaaggtttctccaatccaaagcaaccagaaagcgttgtgacccctctgatcggtttgacacagctaagagcacagttgaacacaacaacaaggttgaaaatcttgaaacagttcacgttatggagaagcataaggaggaggaagagtctgtgatcatgttgcagagaactgtgaagatgcttcactttggaagctgggaagagaagatagtggcagcaaaggagattgaaaagttagccaaggaagatgttaaggttagtaagttgataacagaacttggcgtggtgccggtgttggtatctatggtggcgtcgccggtggctagccgccggcgagt

SEQ ID NO: 46245 - DNA, 227 bp, Glycine max
  Clone ID: PAT_MRT3847_141760C.1
caaacacggaaaatgcatgtatgcattgaaacaacaccaagagtcagagaaagaagcatagaagcaatttcctcaattggtgctactactactactactaccttcatatccaagaacaagaaatttgagaagataatcaacagtgaaccaagctcttaaaaggggtttctcactttctcttcattatggttttggcttttctcagagaagaaatgaacctcttagat

SEQ ID NO: 46246 - DNA, 364 bp, Glycine max
  Clone ID: PAT_MRT3847_141761C.1
gcatttttggatggggcagctccaaatggtctgtttggactaggaatgagcaatgaatctgtcccaagtatcctagccaaagaagggctcacttcgaattccttttcaatgtgttttggatctgatggtcttggaagaatcacatttggggataatagtagcttggtccaaggaaagacaccattcaacctcacggcattgcatcctacttataacatcaccgttacccaaattattgtgggagaaaaagttgatgatctcgagtttcatgcaatatttgactctggtacctcgttcacatacctaaacgacccagcttataagcagattactaacagttttaattcagaaattaaactacaac

SEQ ID NO: 46247 - DNA, 2070 bp, Glycine max
  Clone ID: PAT_MRT3847_141762C.1
gagcgtgcttcttactgtaaccattattgggaggaacaatttagaaagatacatgttttggagttttctcgagatcggaaaatgatgagtgtcctttacagccggaaccagatgcatgttttgttctcaaagggtgccccagaaagtataatatctagatgtacaagcattctgtgcaatgatgatggttccattgtgtcacttaccgctgatattcgagcagagctggactcaaggttccacagttttgcgggaaaagaaacattaagatgccttgctttggccctgaaatggatgccctcaactcaacagtcgctgtcctttgatgatgagaaagatcttacatttattgggttggttgggatgctggatcctccaagagatgaagtaagaaatgcaatgctttcgtgtatgactgctggcatacgtgttatagtccgcactggggacaacaagtccactgctgagtcactttgccgcaagataggtgcttttgatcaattgatagattttgctgaacattcttacactgcttctgagtttgaagaacttccagcactgcaacaaactatagcattgcaacgtatggcactttttaccagggttgagccttctcataaaaggatgctggttgaagcattacagcaccagaatgaagtggttgcaatgacgggtgatggagttaatgatgcacctgcactaaagaaggcagatataggaattgctatgggttcagggacagctgttgctaagagtgcttcagacatggtgctggctgatgacaactttgcctcaattgttgcggctgtggcagagggaagggctatatacaataatacaaaacagtttattcgatacatgatttcttccaatattggtgaagtagtctgtatatttgtggctgcggtgcttggaataccggatactctggcccctgtccagttgctttgggtcaatttggttactgacggattgcctgccactgctattggcttcaataaacaagactctgatgtgatgagggcgaagcctcgaaaggtgaatgaagcagttgtcacaggttggctcttctttcgctatttggtaataggagcctatgttggccttgccactgttgctggttttatttggtggtttgtttattctgatagtggccctaaacttccatacacagaattgatgaattttgatacttgcccgaccagggagacaacttatccatgcagtatatttgatgatcgacatccatctactgtatcaatgactgtgcttgtcgtagttgagatgttcaatgctttgaacaatcttagtgaaaatcaatctcttctggtcattcctccctggagtaacttgtggcttgttgcttctataatcctaactatgcttcttcacatgctaatcttatatgttcacccactgtcagttcttttctctgtaacaccattatcttggactgactggacagttgttctctatctttcattacctgttatagtcattgatgaggtgttgaagttcttctccagaaatcccattggtttgagattcagattatggttcaggaggtcggatttactaccgaaaaaagagttacgtgacaagtaagatgtgagtactagttagcaaattctgcacttgtgaaatcatatagctttagtggtatccttgattgaatctaaatcatcaacctccatatgcatggcaatcaaggagttaaacaaggtaactcatagatattgtataatatttgtgttatctgtaacatttatattgtccttaagatttcagtgatgtaaaacagcaaatgtaggagcctgtagggctgttattatcttcaattattcatttttcttcagtttgtatttcatcaattttgctagcataaataccaaaaaggcacgcattttagcttgttatgagaaagttgtagtttgtcatttgtgtatctttaaacaagagatgtagagatttatgtcaacatgttgcggagaagcaaaagaaaaaaggaaaaaaaaaaaaaaaaaaaaaaaaaaaaaaaataaaaaaaaaaaaaaaaaaaaaaaaaaaaaa

SEQ ID NO: 46248 - DNA, 519 bp, Glycine max
  Clone ID: PAT_MRT3847_141763C.1
gactgatgaaaacatccttggtaaatgcaactgaagtacttagtatgctgtactaacaagaattctaccttgcactatgaacaacaaatgccctagactgcccctgcagatacttactccaatacccacggtcctcacattaagatccctttacactgcagacattccatgctcctgacctcaattcgaaagctcgctcataacacattaattcctttattgcctcagtaccgagggcccaccgcttgcatataaggccacgaccagcatcacacgggcacactgaccatccaaacggggctccctggaggcaaacccctcgtccccaccctcggttcatctacgatcttattaactgtgacaccttatacacacaccttcggagacgacacaaccttgatttacgaaagctgacccgacctcaaacggctcccccattacggacagaaactgaacccgttgcaggactccctcatcctggccccggcacagatagttattgccactacctccccaaac

SEQ ID NO: 46249 - DNA, 460 bp, Glycine max
  Clone ID: PAT_MRT3847_141764C.1
tggcatggaacctttgggctgatttatgtgcttgcatggtcgtgagaagatgatagaaagggaacttagaatgtccctacatatactgaaagaagaaagaaataacaataatcaagtaagtattacaaaccccccaaaattctctcctccctcctcttactgtcgttggagaacggataccttggtgatttcaatccttttgctgacgaacaacgtctgctctcttgattattgctgttatgctccttatgaaaatatctgttcctaaaaaattcctatctttccagttcagaagaaaaatcaaaattgcatacaatcatgcacaacttttctcccaacctcccccctcccccttccccccctcaattcccttctctccaagaatatgttgaacttgccacctccgatcggcgcaggaagcaagaatgacgaccacgcgccgatcaaggcccctttgccc

SEQ ID NO: 46250 - DNA, 298 bp, Glycine max
  unsure (1)..(298): unsure at all n locations
  Clone ID: PAT_MRT3847_141765C.1
caaacgcagccaaaacaacaactaacgacaaagattcttccccaacacaagggaaaaccggagcaacaaaaaaagtaacacacacgcacacacgnatcatcgtatnncatttgtnttattngttttaaagancgagtgtngtaangaatggtgnagtngaagnncgtggagaaanctgngggngtacgacgacgaggtggtgtttgcagcgtacagaggagtncggnncncgantggggggagtacgtgtcggaggtaggctgccnagcngccgtnanagatttngttgggttcntnc

SEQ ID NO: 46251 - DNA, 441 bp, Glycine max
  unsure (1)..(441): unsure at all n locations
  Clone ID: PAT_MRT3847_141766C.1
gcctagaacgagacagcaacatatcatctccggccgaattctgttcattcaggcagtgttcatttctctgcccctcacttacttattcactcccaactccaaaaccatcatggtcaatatggcacaagcacacgctctattttctcctttcaatcctcgccttcttccttcttactcccccattctccgacgccgaatcttttcccttccaatttctccgttaactcaccggaccgtgattgccttcgaaaacgtcggcgtttcgcctgatgccgactcgtctactcactctctaccccaggncttcaattccttattcttttttatttccattcattgaaactgaaattgaaaacgccgtgcgtagcaggtgattgaaaccctgatttccggagtggatttatcggaagaggaagcccgagcgtgtctcaacttgctgct

SEQ ID NO: 46252 - DNA, 411 bp, Glycine max
  Clone ID: PAT_MRT3847_141767C.1
ggggctcaagctttatttcacgtagcttacttgaccgtctgctcaattggaatagttttttgctatgttcgcatgcaagtgtgacgatccattaatgcccttatctgcttagaaagaaccggcgtcatccaaacatggtgaagaggtggcaactggatcaataatagctgaaacttatacttcacagtaatgggcttgcccatctgctcaagcttgtaatgtattctagaagatgcttaactccacttactgctattaaacgatcgatttcatgaaaggagggagggaatacttcatgcgcaccaccaaattctagtgcgcaggatacattctttattgacacgctcaaacttggtgcctgtgtgtatcttcttgaagggtttggttacattgtttttgggtgaccctttt

SEQ ID NO: 46253 - DNA, 340 bp, Glycine max
  Clone ID: PAT_MRT3847_141768C.1
aatattactttttacacgaaaatgctgacttaaacccaatgtacacttaaacatcattaaacacacaaccgggacaagttttacgtgggagcatgaaaccatgatctttataaaattaaaaaacagaatcaggaactggatctcaaacttctttaaacctggatcccaaggcccatcaatgccaccaacattaacaaaaatgatagataaattgggcatacttacaaaaattgaatggcctaccatcctccccgtgaaatgaattgtgacttcaccaacaaagctcaacgcttccagcgtaattgccttcacaatgccccatgatcttgcctaagatgcg

SEQ ID NO: 46254 - DNA, 196 bp, Glycine max
  unsure (1)..(196): unsure at all n locations
  Clone ID: PAT_MRT3847_141769C.1
ttnttttctccccatacaatgttacggggtaacccccncagcccccatggtcccttcatccattctacaaaattttttaacatccccttacttttaaattttcattacgcccgaacacttacactccccttctttcacccctaatatcaaaagcttcatctttcctacccaactctaataccttctttcccaaata

SEQ ID NO: 46255 - DNA, 269 bp, Glycine max
  Clone ID: PAT_MRT3847_14176C.1
acggtgccttgacaccatcgacttctgctacaaaccttgcaagtccagtgcatgaggatgatggactcggatttagtcatcagaaactctctgacttgcttcaagccctagaggcctccatgacttttgtgtgggggcgacgactagaacgtggtgtagaaagctcgcaatggccagctgtttgcttgtggcttatcttgggcggtactgtcgaaagtgaagaaagaggttaagaagaaaggctcttcatcttctaaggatggcactaa

SEQ ID NO: 46256 - DNA, 243 bp, Glycine max
  Clone ID: PAT_MRT3847_141770C.1
acggctgcgagaagacgacagaaggggagatctctgtaataaaacatgtttgtgtgtatttcaataacatttagtattgtgtcgtataccattcaacacttcagctctctccccacaacctaaagaccccttttttatggttttatcgagatgtaaaatgttaatccgatttcttctataacgattttcaacattatggatcgtttcttacccatgagcgacttaatatggcgtgcaagtaat

SEQ ID NO: 46257 - DNA, 924 bp, Glycine max
  Clone ID: PAT_MRT3847_141771C.1
gtggattggaaggctcatagggtcccccctgcggggaggccctcccctggagttcgtgcacctggagagccccgggtgcagatcccagtcggcggttgccgagcaggcgctgccgcgcgggctgcaggtcatgtaccaaaggagttagacagcacaaagagactaatagaagaattaaaacttaacctagagagagcacaaacagaagagcgtcaagcaagacaggactcagaacttgcaaagctcagagtggaagagatggagcagggtattgcagacgaatcaagtgttgcagccaaggcccaacttgaggttgccaaagccagatatacagccgctgtttcagatttaatagctgtgaaagaggagctagcagcattgcacaaagaatacgcttccttagtgactgatagagatgtagctattaagaaagctgaagaggctgttgctgcatcaaaggaagtagagaagtctgtggaagatttaactgttgaactaattgctgcaaaagagtcattggagactacacacgctgcacatttggaagcagaggaacaaagaataggaacagtcatggcaagagatcaagattctctcaattgggagaaggaacttaaacaggcagaagaagagctccagagactcaaccagcaaatttcatctgcgaaggaactcaaatctaaactggaaacagcctctgctttgctgattgatttgaaagctgaattaactgcttatatggaatcaaagttaaagcaagaaggaggcccagaagaatcagagaaaaagacacacactgacatacaagaagcagttgcatcagccagaaaggacttgaggaagtaaatcttaacatcgagaaagcaactgctgaggttactatcttgaaggtagctgctacatcattaaaatcggaacttgaac

SEQ ID NO: 46258 - DNA, 433 bp, Glycine max
  unsure (1)..(433): unsure at all n locations
  Clone ID: PAT_MRT3847_141772C.1
cccgnccggaatnccgggcggaccacagccgtccgccaacgcgtccgccaaaccaaaccaaaaagtgtgggggggaaaggggaaccaaaaaccggagcaccattggcaccatttagggttcctaagccttttccccccgtggcagatgatggggggcagttccgaaaggccttttaaggtgggggaactaacggggggctgatggtttcgacctgggttaataggaatgctgttcaggggaggctaataagagaaactaatgcccagccctatggggaaaatctcttaagggcctgggccaaagaactaacaagggattttggggggttggttcattttgggccactggattctgctgaacgtgatgcatttttggcaaacgaggcgactaaaaaatggccttcaagcaatcaggtcctgggggaaatagcct

SEQ ID NO: 46259 - DNA, 193 bp, Glycine max
  Clone ID: PAT_MRT3847_141773C.1
gtgcaacttaaccagggatacaaaaccctacttgcttactaaactgccagttcaaaagatccctttggttttgtagtcctggattttgacgtgtctaggttgtaatgatatcccttaaatcctacgtgtatgtgttgtattgatagtgattgacattttactgagccgtaattacaagcacagcgatttcatg

SEQ ID NO: 46260 - DNA, 471 bp, Glycine max
  unsure (1)..(471): unsure at all n locations
  Clone ID: PAT_MRT3847_141774C.1
aggaaaacaaaacaaaaataaaagtgaagccggtgcgcgctgcctgataccatgtgcatgcccatacgtgatcacacatgcagcttttcaaacagtaataacggacacagttgccagatgcattccagcaacccaaagaagagaaagcgtccttgcgacgacgactgctacaccaagcccgccgcatcacacggtttcatatccgtgatagggaggcgacgcgcgatggaggacgcggtcaaggtggttccaggtttggtggcggcggaacaacgctgtggcagttacgatttcttcgctgtttacgacggccacggagggaccttggtggcaaacgcttgccgcgacaggctgcacttgttgctggcggaggaagttagggagagcgcangaggcagaggcttggattggtgccaggtcatgtgttcgtgtttcatgaagatggacaaggaaattggagttgtgaggagc

SEQ ID NO: 46261 - DNA, 229 bp, Glycine max
  Clone ID: PAT_MRT3847_141775C.1
attaagcaaccgtcattgtctaataaaacgtacatcatcactgttgcaaactgctcaggtactttcactgcacaagcgcatcctattaatgagggcggtgtatgcttgcttatattgaaactagcaaccagagcgtcgactgaaatccagtttgggcacaaatgcttaggtaataagatacacataccatgcgtttaaattacgaggaacaatatatattggcataatt

SEQ ID NO: 46262 - DNA, 508 bp, Glycine max
  Clone ID: PAT_MRT3847_141776C.1
gttgcagagtaattcatttactggatattatggttgcaaaaaaaaaaaaaaaaaaaaaaaaaaaaaaaaaaaaaaaaaaaaaaaaaaaaaaaaaaaaaaaaaaaaaaaaaaaaaaaaaaaaaaaaaaaaaaaaaaaaaaaaaaaaaaaaaaaaaaaaaaaaaaaaaaaaaaaagggggggccgtttaaaagaatccaacttaaaaaacccgggcatgcaaaaaaaaacttttttaaaaggggccccaaaaaaaaaaaaaaaggccggattttaaaaaagcccaaacgggaaaaaccctggaggtccccaaataaaaggccttgaaaaaaatccccttttgtcaattggggaaaaaagcaaaaaggcccaaacaaaacccctttccaaaaaatagcccaccctaaaagggaaagggaacccccccttaaacaaccaataaaaccgggggggggggggggatcccccaaaggtaaccgttaaatttgcaaggccctaaaaaccggttcat

SEQ ID NO: 46263 - DNA, 200 bp, Glycine max
  Clone ID: PAT_MRT3847_141777C.1
ctatctcctgacggtccattttactataataatccacaagggaacacatgagcatcggagaacttaaccaaaccgtcgccactcagcataaactaatatgtctgattaaaaaatgaaatctaataaaaatactatggccagccaatatgacattggatcctatgagtgacgacagagtttttacatccttgaacctgaca

SEQ ID NO: 46264 - DNA, 665 bp, Glycine max
  Clone ID: PAT_MRT3847_141778C.1
tttaaaataatcgtcatttaatattaatgagtcatgagcattttattttctgaggttgctactgatatgctaagttttttgtttgtcagggatattccacaggatagttagaagcttttctattcatgcattgctcttgaatattggcgtttcacaaatgaggttcctttactgaaggaatatctgcttaccaaattctgatattatacatttatatatttataataataataataataataattttaaagtaaatatacatgatggctattaatcttctcaagctgattaccccttcctcctataaaattatgatcttatgttcaaatcaattgcaataagtgtcatggggagttggagacagttgaagctaatgttgattttggttgactttgtctgagaaaccaaagaaaatgataatcaagggactaattgtgaggacctttcattggacgaagggatgtaaaatttgtgggaattggacttttatggaaatagattgtgtgctgctctgcttctataaaggcatgagtgctgtgggcttgctgttgtattatgttttcagcaaaatcacaacaatctggatgccctgagccatccgacgataggtggaaaaatatttgatcacatttagcaacttgttgaagtagctggaaaaatgaaaa

SEQ ID NO: 46265 - DNA, 388 bp, Glycine max
  Clone ID: PAT_MRT3847_141779C.1
aaaaaaaaaaaaaaaaaaaaaaaaaaaaaaaaaaaaaaaaaaaaaaaaaaaaaaaaaaaaaaaaaaaaggaaaaaaaaaaaaaaaaaaaaaaaaaaaaaaaaaaaaaaaaaaaaaaaaaaaaaaaaaaaaaaaaaagggccgccctttttaaaggtccaaagtttacttccccttctttccaatttaaaactttttttaaagggccccctaattaaatttaattgccctatttttaaaaacgtggtacttggaaaaaccttggctttaccaatttaaatccttttaaacaatatccccttttccccatttgccttattaccaaaaagccccgaacaattcgcctttcaaaaaatttcccaaccctaaatggcaaatggaacccccctt

SEQ ID NO: 46266 - DNA, 699 bp, Glycine max
  unsure (1)..(699): unsure at all n locations
  Clone ID: PAT_MRT3847_14177C.1
ccggaaaaaccgtcgacctacgcgtncgctctttttttctntncgtgtttttccgttgtctctatgggtgaccaaatttcctatctttattcatattnggnanttgggttcttttncaatttttatttngactttgacaagccttcctttcttccatcttctgcaaattagggtttaatttccaatttggttattttttttatttgggaatcttgtgggatgtttggggtaataaatcggaacatgcctcggaatagtgaaaaggctggggaaagggatgaggggatcctaaggctggtntgagaataacctgagcctgaaactgcggaagtggtcgtgaaaaataatgaagaaaatcctgttgttgatgctgtggtggaagaaaagnncgttgatgtggagcaagaacatgaggaagtgccaaatgggtcggctaaggtggaaaacaatgaagaggagattaaggagtgtatagatgaatttgaaaaagatgaacacttaggattttgaggataattatnctgagtataaagcanaggaaaatggtggtgtttgctatgatgagaagggaaattgacaagatgaaggtaaggaggaggggagatgaagtggaggaagatcccgaanagatgggggggaagaagagggtgatgcaggtggggaaagaaccgggatttgggttatgaaagaagttggggg

SEQ ID NO: 46267 - DNA, 202 bp, Glycine max
  Clone ID: PAT_MRT3847_141780C.1
acctaaccctaaagtcttcttcgacatgaccatcaacaatcaatctactaaccacatcataataaatctctacaccgacatcactccccacaccaccaataacttccactcactttacaccagcaagaaaatcattaaacaaagcaacaagcccctccactacaaaatctcatccttgcaccacgtaatcccaattttcata

SEQ ID NO: 46268 - DNA, 199 bp, Glycine max
  unsure (1)..(199): unsure at all n locations
  Clone ID: PAT_MRT3847_141781C.1
cgcatgcacgcgtacgtaagctcggaattcggctcgagctgccctcccaacgcatcagccctgagccctccctggctggggantgtgtgggactcagagaaaaggcttcacccgggagccagncacttgggtactgggttctcagtatctgccctctgtgtttacatgttcgtccatccatggatggatactgtagtct

SEQ ID NO: 46269 - DNA, 469 bp, Glycine max
  Clone ID: PAT_MRT3847_141782C.1
tctcatgctcccggtcgacatggccgctggatttcgagcggccgcccgtgcaggtgctccccttcccccacatacactggctcttgggggtttatgttctcttttccccctctaattttggtaaaaatctcactagctttttgcaaagattgttccccaacataatctccaaaatagaaagccttgcgcaccactcaacagaaattaggtcaaccccattttcttacacatccatctctttatattttggcttattctgtgaagtgggtaattcttgaaaatattgatgagtatatatattcaaaatggttaaagagaaaattcacatcaagaaaattgataatgcttcagcaaggcacgtcactttattatagagaagaagagggcttttcaagatatctgaagaaccttcatttctatgtgatgctgatgatgctctcaacattttctttactactggaaaactctt

SEQ ID NO: 46270 - DNA, 1858 bp, Glycine max
  Clone ID: PAT_MRT3847_141783C.1
atcccaaacccgagtaaaattctggtaaaaattgatgtggcaaaaatacagctctatttttgtgtcatcaatcaaatattagggatatgtttgaaggataaaggtaaaagagtattgataatatagggaaattatgacagctttgattgtgaatagtataaatggaatgatgacccggaaacactgatttttactgccatgttgggtcccttggggatgattattattactgtgtatgaccattttatatggtatatgaagaccttaaactatactttctatattagctgcccagtacactttcacctgccagtttctattattgacttaaaatgctagttgaaatggaaatttagcccttcatctggaaattttatggagtctatatatgcactctaaataaattggcgtcttttttgtttaacaaaaatctaataagaaacgaagaaaccaaagaaaaaaagaaaaactatatcagcgattctcgtgatcttcggcctcgaatcgagaggtaaaagacccaactccgcctctgtttttgtgatcgaaaaccataaaaaagttgtttccgatcactgccttaatcggattcagctgttgttcctcctcctcaatttcgaatattgaaaggctttagttgttgattttggtcaagtctctagtcaacctgtgaattttttattcaagtttaaaaatatatagagcaatgagttttgtttttcgaggaacaagagcagatattgaaaatgggtttccaggatttatacctgagaggcgagcattgcgcgttcatgcaacacgtcctagtaattccaattcactcacttttctcgtgacagttcttctgttattcatgatactgaactctcaccagatgtccccaaactttctgctctggctggtgcttggtgttttcttgatggcaacaatgttgaggatgtatgcaacatgtcaacagcttcaagcacaggcccaagctcatgcagctgcagccagtggcattcttggccacacagaattgaggttgcatatgccaccatcaatagctcttgcaagccgagggcgtctgcagggtctcagacttcaacttgcacttcttgatcgggagtttgatgatctagattatgaaactttaagagctctggattctgataatgtttctactgcaccctctatgacggaggaagagattaatgctcttcctgtccacaaatacaaggtttctggtcctcaatgtggtggttcctcaatgcaacaagcatcatcttccactcctgctgagaagaagcaagataattcaaatgctgttgggagcatgaaagcctctgatgatgacctcacttgcagtgtatgcttggagcaagttaatgttggtgacgtactgcgaagcttaccttgcttgcatcagtttcacgcaaattgcatcgatccctggctgcgccaacaagggacatgccctgtatgtaaatttcgagctggatctggttggagtgacaatggacataatgatatcatcgcggacatggtctgaatacctcgtctaattttatttatggacgtgtgattataaccttgtacaactgtaacttactctcttcatgtatcaagattagtatctcatgactagcattcgtgtaattaccccgacgtgtatgtagggaacagaagaacggcctagtgccgtgtaacaaccatacaaattatacaatttgttgaccattaaacttacatttcttgggtcgctgtgcttaacccaacagcatgtacaaaaattttcttttctgctatggtgttctctgtgtcaaaatgcttgtatatctgacgggattggatagttagcgcatgtttattaatgttt

SEQ ID NO: 46271 - DNA, 526 bp, Glycine max
  Clone ID: PAT_MRT3847_141784C.1
tcggctcgagaaaagacccaactccgcctctgtttttgttatcgaaaaccataaaaaagttgtttccgatcactgccttaatcggattcagctgttgttcctcctcctcaatttcgtattggatgattttaaagatgatcccggtaggctttgaatgtgaatattgaaaggctttagttgttgattttggtcaagtctctagtcaacctgtgaattttttattcaagtttaaaaatatatagagcaatgagttttgtttttcgaggaacaagagcagatattgaaaatgggtttccaggatttatacctgagaggcgagcattgcgcgttcatgcaacacgtcctagtaattccaattcactcacttttctcgtgacagttcttctgttattcatgatactgaactctcaccagatgtccccaaactttctgctctggctggtgcttggtgttttcttgatggcaacaatgttgaggatgtatgcaacatgtcaacagcttcagcacaggcccaagctcatgcagc

SEQ ID NO: 46272 - DNA, 706 bp, Glycine max
  Clone ID: PAT_MRT3847_141785C.1
cagcagaaaagaaaaattttgtagatgctgtcggattaagcacagcgacccaagaaatgtaagtttaatggtcaacaaattgtataatttgtatggttgttacacggcactaggccgttcttctgttccctacatacacgtcggggtaattacacgaatgctagtcatgagctactaatcttgatacatgacgagagtaagttacagttgtacaaggttataatcacacgtccataaataaaattagacgaggtattcagaccatgtccgcgatgatatcattatgtccattgtcactccaaccagatccagctcgaaatttacatacagggcatgtcccttgttggcgcagccagggatcgatgcaatttgcgtgaaactgatgcaagcaaggtaagcttcgcagtacgtcaccaacattaacttgctccaagcatacactgcaagagaggtcatcatcagaggctttcatgctcccaacagcatttgaattatcttgcttcttctcagcaggagcggaagatgatgcttgttgcattgaggaaccaccacattgaggaccagaaaccttgtatttgtggacaggaagagcatttatctcttcctcccgcatagagggtgcagtagaaacattatcagaatccagagctcttaaaggttcataatctagatcatcaaacttccgaacaagaagtgcacagttgaa

SEQ ID NO: 46273 - DNA, 467 bp, Glycine max
  Clone ID: PAT_MRT3847_141786C.1
aaaaaaaataacatagagcacatatcaatcatatgcccacaacaactgcaataccgcacctagttgccaacaggttaacatcacagaagaaagttacacccatcatacatggcactccttactgtcaccatataagcagtcacggccttatttactctctcaaaggggcgggagatgacacctatgacataagacctagtagcatcatgacctactcatcatgaactgtcgacctcacaatcaccaggtggggaccctggagcagatccgaaactctttgtcgctcgaaagagtcagagaaacccaccgagccaaggcactcattcgaactggtcattatgggaccaacatgagtctacgtgggctcgtggggcaacgaactgaccagaggggccaatctggactagaaggccgtgaaccaagacatggatgctggggttacgcgcaggcttaaagcctaagcctcc

SEQ ID NO: 46274 - DNA, 382 bp, Glycine max
  Clone ID: PAT_MRT3847_141787C.1
ttatgattttttatcagtgatcaaactgacctcggtatactaatcctgcacacggagcagatatccaattacatgcccatgagcgaccggcgccatgaagacccacgcctatgagaaagcctaacgcaatcgttactaggagggatgccattgaccgggatacaaattaacctctgcaaattctggaacgggaccttttacaaaaatatgcacatttggacccggaataacccctaggatgaattttatcccgggggcattctaaaacctcaaattgagcagaccaaccctatttccagaaaattcgaaatgaaaaggcctatctggctaaaattggggagaacggatggaaacattatgcgctgcctggagatcccaacca

SEQ ID NO: 46275 - DNA, 511 bp, Glycine max
  Clone ID: PAT_MRT3847_141788C.1
ttataatttttaaaaaaattaaattaaaaaaagggaaaaggaaaaaaagagaaaacaaacaaaactctcagagattttaccctgcggtcttcctctttctctcttcttagtggttttgtacaattgggggggggccgcttttggggccccatgctttgccccggggtttggcggggtttttccttttctttggggtcccccattttctttcctggggcggggttttaccccttggggcggggtaaaccccggggtgtccccctttttttggtctgggcacccatccctttttcccccggggggcgataataaaagggccctcgtcggtgggctttccccccattggcgttggccttttgggggtggggccccccccttttgcgggcgttttagcggcgggggggggggggttctccgccggcgttcccctctcttttcccgccccttaccccgcttctttagttttttccctctttttccgccccccggcggcgttttccccggggtgctt

SEQ ID NO: 46276 - DNA, 187 bp, Glycine max
  Clone ID: PAT_MRT3847_141789C.1
cgtagcttggattccggttggggggccaagggtttttttccaccagtggttccttaaaattcaccctcacctttcctccaccctcgattggtgggggagaaccatattgggccggcccaaggggttaaccaacctttccaccgttccaaaaacctcaagaccttattgcttttcttgggttgggcca

SEQ ID NO: 46277 - DNA, 440 bp, Glycine max
  Clone ID: PAT_MRT3847_14178C.1
ttaggtgtttttttttttttttttttttttttttttttttttaaagaagtggaaataacacgcgggctctaaaacttttcaaactttttatgagggtagacatcatcttgctaatttggggctaaatccgcaaatttatatttaaacccacccccaaaatcatccttgcgggaggagagggaaactttcccaaattctcctggaaaattttcaaaggggggctcaaaaggaaaaaattccttgaatttctcaaaagaaccaatagggggaaaaaagtcagggccctttaatgcattatcagttataaccccttgcagggaatcaccccccttgtcgaaaaaaagggcaagggaaaatgaatcatccttgggaaaatttcccttctccccatcatggtccacatcaggttgggaaggagaaactccatccacatccttttt

SEQ ID NO: 46278 - DNA, 345 bp, Glycine max
  Clone ID: PAT_MRT3847_141790C.1
tcgtacacgcgtgcgaacagttccgagaggacgggagaatttgagtgtcagtggcgttgtatccggagagagtcgaaaatatggattacaaagattcatgggggggaccggcggagataaacgcgaccgactcttagacggaggacgagcggcgccggaacctgccggacgctgacagagcagcgctcgcccatccctgggaggagacgcatcaaagctgactacttggacccggcgagcagaaaaagaacaatttgcggaatctcggctgtataatgcgaagccgcaagatgcttaagtggaccctcggcacaatcgtattcgacgcctgcctggccggactca

SEQ ID NO: 46279 - DNA, 607 bp, Glycine max
  unsure (1)..(607): unsure at all n locations
  Clone ID: PAT_MRT3847_141791C.1
cngtggggaggggggggtttgttttttttcttttctccctttggggcctttttatttattcttgccagttcacgctcttctttttgcggncttgtcaatgccctgggccctcgtccaccaaaaaaagttaaaacattttttttgtcgnngggannnnntttttggaggggggggtagtcttttttttatccactctcggacaatcctacagaaaaagaggaacggcctggcccgaggggtccaaaaaaaaaaccttcgggatagaacaagagccggcgcaatacgagggcccggtgcggggctaccaaggggggacctccaaaacaccggtgaatggcaccccaaaaggctggcgttgggggggaggggaaatccccaaggactcagcccaaaccttgtgtttcgcgtacaaatatttattgggggccaggggcccctcccccccgagccaggcgccctcgttggggcccccggtcaacctgccttggggggcaagaaaagggcccgggggcccctggnaaaatccccccgatggggcccttgtggggcaaagatggcccactcccttgggaacgggccgggggaaaccagggcccccgtcccccat

SEQ ID NO: 46280 - DNA, 253 bp, Glycine max
  Clone ID: PAT_MRT3847_141792C.1
cgagaacaaaaaaaaaaaaaaaaaaaaacccgcgatccgccctcccctgggaaaagggaaacccagaagtccgaccgaaagaaaagagcgttttaaaagtgaaaaaaaatggggtttccgtccacgaagctgttcaccgggttttttccgaaaaaggaaatggggtttccaatggaaggccccgatccggcgggaaaaacacccatctggaaaaagctcaaccttggagaaatcgtcccccttttccccccaa

SEQ ID NO: 46281 - DNA, 354 bp, Glycine max
  Clone ID: PAT_MRT3847_141793C.1
actctctggtaatcgattaccaatggcaagttttgttttcaaaaagctttcaactgaatttacaacattccaatgaatttcaaaatggtgtgtaatcgattacaatgatttggtaatcgattaccagtgtgtttgaacgttgaaattcaaattcaattgtgaagagtcacatcctttcacaaaaaagttttgtgtaatcgattacaatgatttggtaatcgattaccagtgataagttctgaacaaaaatcaaaagatgtaactcttccaatgattttcaagtttttctaaaagttataacttttccaatggttttcaagtttttctaaaggttataactcttctaattggttt

SEQ ID NO: 46282 - DNA, 279 bp, Glycine max
  unsure (1)..(279): unsure at all n locations
  Clone ID: PAT_MRT3847_141794C.1
tgacaacanaacactgattatatttatggtttnntgttctgtttatggtttcatttattgctagttactgaatatttatgaattatatatgggtatctcattnaacctgttaatgtctggtaaacagtgctaatgactcttgngtatatggannngggcaccctttgngccctatatatnactacatattttngncngattcaaccaacagnaannaacacttcttaatntaccattntgnatttgtnaggttatangggagancaangaacacatngc

SEQ ID NO: 46283 - DNA, 367 bp, Glycine max
  Clone ID: PAT_MRT3847_141795C.1
gaaaggaggaaaagtccagaacgaatctaaaagagcgatggccaaatttgtgtggaataagaaggccgcgccacccagaactaggaacccccccgaaagggaaaggagcggaaaattcttcacaggcaaaagggccccccaggggtttcttctttttttgggggaatccgggaaggggtcacaaagggcattcccccaacaaaaaaaagtcttgttggggggaaaatttttggggaaaaaatggaagaaatttttgtttgtttaaaaaaacctttttttgcgaaaacttgtaaaaagaaaaggggggccccaaaaaaactttaaaatttttttcaaaaacaagggggggggggcccctcgtgggggg

SEQ ID NO: 46284 - DNA, 279 bp, Glycine max
  Clone ID: PAT_MRT3847_141796C.1
aagacattttcctgatcttctggtgggccaagaaagccgtaatctccatgagcctctattggattgattccttggtcaagatggatgggaaaaactctcttcaaattacttgaaatggtattggtgcttatgatgattattgacattccaaaaggacctggaatttgcagaatggcggatcttatattattaccggtggtaatgggtccggtggtccttctcttggcttgaacaatttccaatttggattgaatggaaggccatttttcctggcttggt

SEQ ID NO: 46285 - DNA, 1236 bp, Glycine max
  Clone ID: PAT_MRT3847_141797C.1
catggaacgtggagaagaaagaaaacgacaaagtggaaaaagaagtaaacgtcaactttaaagtaactatagtggctgagtgatagcatcaaaatctaggtatttacaccgcacaatattatgagattgcagtagcagtgtttgctttgctcaagtctcagcgatatgatggcagacccagcaagtttcatagcaagctggttaactccttcttacctcttcatcttggtcaacctcgtcataggcaccatagccatcacttctcgcttcagttccacgcccaaaaaccaacaagcccaccacccccaaccactcagctccttcaatacccatcatcaccaacccaactgcactcagccccaactccttccaataccctcactgttgcagcgagtcacgtccttcaacctctccctccacaaacaccaacccacacctccagaaacacaacatctgcatcccgaaccccaaccccaacctgaaaagccgccggaactgcttcggactccctcactcttggagcgactcaggtccttccataatctttctctccacaaacatgtccaacccgagccagagccagagccagaacctgaacctgaaaagccggaactggttcggagtccctcgctcttgcagcggattcagtccataaacttctcccatctctacagatccgacttcagtcaccgagatgatgaggatcccgattcgggttcggatccgggtcgcggttcgggaaaggcggcggagatgaggaaatcggcgagcgtgagagggggtttgacggatagcgagtgggaggaggtcgagaagcggaggccgcagacggcgaggccggttgaaacgacgacgtcgtggagagaagacgaagaagtagacgccaaagctgacgatttcatcaacaggttcaagaaacagttgaggttgcagaggattgattcccttctccgttacagaggaggtaactcatcatgagtaaagaaaaacccgccctaatcttccttgcgcctgcgtcgttgcctcaagttgttctgacgttaaagtttgttggttttcaaatgtttgtatagtactgcgtgctactaggttggtgtggcaaagttcttgtcttagtaatcatgtcatgtttgtctaatattaataatagacttgtgtaggcatacacaaattgataataaatttgatattattatatgaattattaataaatttaatatttattaaaaaaaaaaa

SEQ ID NO: 46286 - DNA, 422 bp, Glycine max
  unsure (1)..(422): unsure at all n locations
  Clone ID: PAT_MRT3847_141798C.1
aatnaaaacagaccagagggctaattaaattaacagacttgggttcaaacaaaaattgtttggggggggttttaaaactcatgatctccataaaggtgggggggcagacctttttttttaannncccacaaccanaananggaaaacaaaggggggggggggganccccccccccccnnnnttnnngggnnnagnagnnnnnntnaggggggnnccngggggaaaaaaagaaaagggnnnaaaaagaagnnnaaaggagggnnggaagggnnnnattttatntgggaccttaaaaagggaaaaagttggttttttccttacaatgggcaagaatggaccctggacttgggggggatttgccagcttttcaagggtagaataaccagccttgaccttgggggccctttttgggaacacaacca

SEQ ID NO: 46287 - DNA, 381 bp, Glycine max
  Clone ID: PAT_MRT3847_141799C.1
ggggggccaaaaaaaggggaataaaagtttgtggaataaccaaattcgccaaagggcccatgtcctcctccctaaacagggggcccctgtatttcctaaaccccgaaaaacccccgtcctaatttggattttcccccccccccgaccgggggaaatccaaaggggattaccggcgcccccggcggaaggtgaaaaaatatccttgacggccctgccccaaaccccggccccaattaaccgggttaacggcttccccctaaaacaacccacaaaaggcccggtttttttttcttttttccccccccttttttttttttacccccccctttttttttttgggggggggctttcctcttaactttaacgggggggagggaaacg

SEQ ID NO: 46288 - DNA, 773 bp, Glycine max
  unsure (1)..(773): unsure at all n locations
  Clone ID: PAT_MRT3847_14179C.1
tgatggatacctgaaagaattttgactttaatagtcctgaagtgaagcagcaatttgatcaaattgggctttctcccgaagaagtcatttcaaagattatggccaatcctgaagttgcaatggcatttcaaaatcctagagttcaagcagctatcatggattgttcgcagaatccaatgaatattactaaataccaaaacgataaggaggtaatggatgtcttcaacaaaatatcagaactcttccctggagtaggttcaccttgatgcatttgtgtgttgttgctgttttctgggtcaagttatgcatccttttcctgatgacctaagacattattagctccggcctaaccacacggaacaatgcaaaactcttgtgtgctcatatactgcaggctcgcagttacagctccggatagtaactgtcttccctgggctaaaataatgccaaagttggattttttgtttcactaaaaatagttgagattgtgtatattgatgttttatgttttcattaaatattttgtttgaggcattgtatttgcagtttggtttttgagtattcaggtgccataaaaatgtgaatgcttcacataattgtaatactgcatgagattaaactaaacatgtaagcgaccaaataggtggcaacggtcaaatagtcatagtgaaccgtgtaatcaaagggatattcgttgtagtagttaatgtcagtgtttttgatgattttagtaatttgaagtttgactgttnnaaantaaaaaaatttgtgct

SEQ ID NO: 46289 - DNA, 1129 bp, Glycine max
  Clone ID: PAT_MRT3847_1417C.1
taactcatcaacaaaatgagactattttgtcttaataacatagatcgctgcaatgatgcctaccaaggttattagtaacgcaagagttgaataatctttgaaaatataagatagaaccaataaatcaaacatacataaacaaagaaattggcacataaacaataaagattattaaacactcttgaccaaaggagcataatttaaaatgacataaaatttgactcactaaggtagtttcccagatcgaaagatggcgaacttggaagcagtggagtaagaataattgatttcattctccttcaagaattcctcgaggaggcgtttagctccttcaggatcagaactttcacattcaatctcatagagggttccaaagtcaaacttggtctcatccacctccaatttcaaccccttccaatcatacacactcctcaaattcccaaacccccccagccccactagccccttttcagttccgaattcctctttcaccctccccaaaaccctagactccaccgaccctaacttcgccggctccgccacgcatgcgcgcccgatcctcgggtccagatcctcctcgtcctcctccacgcggctcacgccgtccactagcaccgcccgcgccttcagcgaagcgacgcaccgctcgtcgtcaccgtagaagcggaggcggaggacggcgcggcgcgcggagagctcggaggcggcgccgtcgaagaagaggttctgctggcggtgggtgactacgtgaaagggggagagcagggtggtgacgtgtcggtgggcgttggagtcggcgaggcacagcttgacttcgacctccattagggaagaaagtatggagagggttttacgaggagaggccgatgcgatgcgcctggaaagagggatcttcgccgccgcgatccagctgacggagaagagcggcggtgccagcgggggcggtggtggtggctgaagcgttgcggcggcgagcttcctcgagttcttctttgtcttcgatcttggcttcgattttggttggctttcttctcagcattttgtaaccctgatgttcattcctctttctacgccgatttcgtttatgttaaccctaccccctaaccctacgttccgctcgagccgaatt

SEQ ID NO: 46290 - DNA, 276 bp, Glycine max
  Clone ID: PAT_MRT3847_141800C.1
cgacaggtccgtgtaacttttcttatttttagaggcctttttaattgatttttttactgttttttggttaaccccccccaaaaacaataatatgttgttggtttatttttacaacggattaaacacaaagaatccccgggaaacaaaatgtgtcctggggtttaccccctatcacacctttcaaaatttgatctaccctgaacaaaattaaaagatggtaaacactctcccgcgtgaaatttcacacaaacctttgggaccccgggggggccccgg

SEQ ID NO: 46291 - DNA, 276 bp, Glycine max
  Clone ID: PAT_MRT3847_141801C.1
tccacgctttatctatctattattctatctattataatgactatccatctaacaactacaataggatatttctgaaaatttttactagaatctaacaccaaaactctacaatcttataataataacaaaaataacattaatgacttaaattttttatttcatttcatcaatcacattatatctattgaattcttaaacatttatactgactttactatatacacacatcaatttatactttatttttcaatttcttaaaatttttttcatattaaa

SEQ ID NO: 46292 - DNA, 190 bp, Glycine max
  Clone ID: PAT_MRT3847_141802C.1
ccgtccgtacaaggtgtgagaaagaccaccgaaaggacgtttcaaggggacctcaaggaatccggatctgggatttattttaaaatgccttatcccaaaattccctccaaagcccccttttttttagggacccacattttatcgtgtgttaaaaaatattttcgtgtcaaacaaaaactatataaaattt

SEQ ID NO: 46293 - DNA, 415 bp, Glycine max
  unsure (1)..(415): unsure at all n locations
  Clone ID: PAT_MRT3847_141803C.1
agaaactaaatttcatattttatttacttgatacctgagtaggcgcacaccttacattaaatgatcaccatacacgcgtgtaacatctaatgttttagggaatataacttaatactatattacatggttaatggcttatatcttcaatatgccgaacgacacaccaaaggcaacgggcagctaacacttattgcttacggctaccgaatcattgatgagtggatgatggatcattcacccttgtccacagaagacggcatgcagaatgctggatcttggatctctggattataaaacttaccttggccctccgccaccccattggactcaggatacaaattatatattggaagttnaaaggtcactgctggaccctccgaagagcaaatcctgaatcccctctccccacttgcat

SEQ ID NO: 46294 - DNA, 501 bp, Glycine max
  Clone ID: PAT_MRT3847_141804C.1
gtcgccccgcccggggtgacgatggaggaagcggtggacccggcgcggctggtggtagaggcagtggaggagtttctgaagagcaaggtggcgaagtccggggtgacggataagaggtgggcgtgcgggcttgtgatacaggcgctgatggtttcgtcagagtcaagggaacattctagaaagatcttggagagagccgttgcggttgtggaaatgtggaaggagcatttggatggggaatcagagagtggtgctgccgaagtcgtcatgtttctgcagatggtcgtgtgtttcggattgaggtctaggtttgatgatgactatttgaggaacttcgttatgcaatttgcttctagaagggacatggcaaagcttgctgctttcttacaattcggcgacaagatcatagatattatagatgaactaattaaaaatggcaaagagatagaagctgtttatttttcttcagaatctggtttgactgaaagatttcctccaatc

SEQ ID NO: 46295 - DNA, 300 bp, Glycine max
  Clone ID: PAT_MRT3847_141805C.1
cattgctactatctcatctactttatagctattatctatcatacgttctcgctttctatcatttaattgggtttaccattaaccttttctgctttaaaacccttctacttatccacctatccattgagacaatttttttgtttactcttttacacctcttattcctgtaaaaattctaaaattttcatatcatttttatcctaccatacttcatatgcttcttatttgttcacccttctattactttacttaaataactcttattctatcattatatactgcatagtctatcttcttctc

SEQ ID NO: 46296 - DNA, 409 bp, Glycine max
  Clone ID: PAT_MRT3847_141806C.1
tttttaatgaataatcctaaaaataatcatattaaatacttacatacgtccatgagcacatttctcaccaaaatatacatatataatgtaatttgttcatctacacatttacattcaagatacagcatgagagccctcgaagataacaaaaaatgagtttccaggatatctatgtacattaacatattatatctttcccgacaaaatatagttgcatttcctagaatacctataaacacatcctaccacgtattgcctttaaaaggatgtcacgtatcgcctactattttgatgccaaatattttgaagtttctactgccccatacatcagttttggagacataatatgacttgagacaaacactaacccatggtggatctcttggagcatcctttatcccagttactc

SEQ ID NO: 46297 - DNA, 371 bp, Glycine max
  Clone ID: PAT_MRT3847_141807C.1
tgccgcgccgggagctcggatcgagaatgaaccgggtctggtacctttaatttctgtcgagacttcattaattgatactggtgctggtggtgcgtgtataattgaaggcgcgccacaatacgacccggcatacgatgacttggtagccttctgcaaccgaatggtgtagcgggagcaacctctacatgccatatgggtgtaccgcgtagcagagcgtacattcctggggtttggtgtgcattttggacaccagtgcttccacagtattccctaacaaacggtggacagagtactaccggtgcattattggatcatatagttgaggaccatgctgtttctgcatgcctgagacatcaagctggcttgccaaa

SEQ ID NO: 46298 - DNA, 997 bp, Glycine max
  Clone ID: PAT_MRT3847_141808C.1
ataggccaagtgatcataggagggtgagaaaaagctggagaacaaaagtggaggagatagtggattcccacatgaggaagatcatacagactcaagatgcttggatggagagaatgttgagtgttgttgagcaaagagagcaagagatggcatctagggaggaagaaaggaagagaaaagagtcaatgtggtttgaccaacaggtgcatgaactgtgggccaaagagaaagcatgggttgaggcaagagatgctgcattgatagaggttgtgaggaaacacattgggatagggataggacttgaagcattgccattggtcgaagaagaatcaccgaataagaataagagccagggaagtattgatgccaatgagtttccctctgagggtgttgatcctggtagaagtagtagtagtaggtggacagaaatggagatttcaaatttgatgcagctaaggactagttttgagcaaagattcagagaaaataataatgggtacatggagaatggggtttgggatgaaatagcagcaaaaatggcttgtttggggtttgataggagtgcaagtgagtgcaagcaaatatgggaagagatcagcatctctctcagaaggacagtggatgagtgtgatgatggtgcaaaagaaggccttggtatttgggacttaagctgacggatgatgatctttgacacattcttgttctaaccgaaggcatcgatcagagagattaagtatatatgacactttgcttttgatgagttctgagcgtggaaggaaacttgtgggagaaacaagctagggcttgagagggttattaactaggatgtaacaagtttggatcattagcgaatcacaaggtattctaggccacgtgtttaactatatatttaattaatataacgtatgaggactcattcttgagtgtaagcattgactttgttgtttattattaattttatccatgcatgcatcagatgctagagtcatcagttatt

SEQ ID NO: 46299 - DNA, 294 bp, Glycine max
  unsure (1)..(294): unsure at all n locations
  Clone ID: PAT_MRT3847_141809C.1
ccaagggcgngtttttagagcgccaagcgctacaacccaccaancccaagaccngggggnaccncgccacacaaaaaaanacacaaaaaggcaaaagaaaaanaaaaaaaagagaaggccnggagccaagaaaacaaacacaaagcacaagacaaggaaagaacaacggacggaagcgcaacaaaggacgcnaacaaccacaaggacacaancgccacagacaanccangccccgaggcaggcacagccgagnaggacgacanncacaaagcccaagcngacgaagcacaaaaa

SEQ ID NO: 46300 - DNA, 631 bp, Glycine max
  Clone ID: PAT_MRT3847_14180C.1
ttttgactttaatagtcctgaagttaagcagcattttgatcaaattgggctttctccagaagaagtcatttcaaagattatggccaatcctgaggttgcaatggcatttcaaaatcctagagttcaagcagctatcatggattgttcgcagaatccaatgaatattactaaataccaaaatgataaggaggttatggatgtcttcaataaaatatcagaactcttccctggagtaggttcaccttgatgcatttgtgtgttgttgctgtttgctgggtcaagttatgcatccctttcctgatgaccaatgaagattagctcggcctaaccacacggaaccatgcaaaactcttatgctcatggctgtatactgcaggctcgcggttacagctccattgtgacatgcggatagtaactgtgtcttcttcgctgggctaaaataatgccacagttggatttttttgtttcactaaaatagttgagattgtgtagattgatgttttatgttttcattaaatattttgtttgaggcattgtatttgcagtgtggtttttggttgagtattcaggtgcagtaaaaatgtgaatgcttcgtataataatttcataaagtataatctgagattagggg

SEQ ID NO: 46301 - DNA, 443 bp, Glycine max
  Clone ID: PAT_MRT3847_141810C.1
caatagttatggaagagagaagtggagtgcttgaaacttcgagatcttgcaagcaactcataggacctgaagggtccgataaggaatttgaaggctatattgatagcaacctacgtgttgtggagaccttcttgcgtttgttccccattggtctttgtgtcacagctcttgtaattatgctcaagaactctcaggaaaataagtatggctctgttagctacaccgaccttggtgctttcaggtatttggtgcatgccaatggcatttgtgcaggatattcattattttcagccatttttgttgctttgcctcgtctgtcgagcatgcatatagcttggactttctttgtgcttgaccaggttttaacgtacataatcctgtctgctggagctgcatcagcagaagtgttatacctggccgaaaaagggaacatggcaacagca

SEQ ID NO: 46302 - DNA, 568 bp, Glycine max
  Clone ID: PAT_MRT3847_141811C.1
gttggggggtgtatttgtcatttttttttgcatagcctataaagcaaaccaaactcaaactcttttattttgtaccatatactttacaaattttttttttctttttataataaaaaaaggggccacctcaaagggagcaattaccgacgccccggcggacgcgaggaacgacaaaattttaacccggccagggggggaaaaaaataatctataaaaaaaccggggccccttgttgggaaggaaaaattttttaaaaaaaaaaaaacgggggaaacttttggggggtttgaccaaaaaagggggggaaaaaaaaacccaaaataggggggcacccccccttttttggggaaaggggcggggggcccaaaaaattttgggggtccccggaccacccccaaaaggggttttttgtccccaaaattgggggaaaatattaaaaatgggggggttttttttttttatcaaaaagcttaagggggggggaaacccttattatcccgggccgggggggccccccgggaaattcggcccgcgccccggggggcaaacaatttttcttttagggggg

SEQ ID NO: 46303 - DNA, 1043 bp, Glycine max
  Clone ID: PAT_MRT3847_141812C.1
cccacgcgtccgcccacgcgtccgcccacgcgtccgtacggctgcgagaagacgacagaaggggaaacaattcaagcaaaaaaagcaacctctcttttcttcacaagctcaaatcaaatagtgagtagaacttcaaaaaaaaaattaaacatgtctactacacatttttcccttctagccatttttctccttctttcactagattctcttggcacaactatgggtggacgactcatccccccaagtgctccaagtacagttacaaggccactagtttcatcagaagttgaaaactacgtgaagccacagctgaatcacaagctgaaagccttacaaggaagagaagttaaggggtgcttgccaaaaggttcaaggcataactcggctcctagcagattcgtcaactacaagacactaggctctggtggctgctctagaattcattcagggaaaccttgaagatgtttttgtcgaatggaattgaagaacttttttgcatatgggttttcatggtcaagtgtggtagaaacttgaaggatgagaaagtcacttatgtttttactttgcttattattagcatatttggcttcacgtttcggatgtgattttccacgtttagttgtgattttgaaaagctaatagctttagcttccacatcccaaaggtgattcctctgttccggactggtttccaaacatactatatgatggatatattttgcgggttacaattttgaacgatgtgcatgggaaggtgaagatgttagtgacttttcctgctattagatatacatatgtagagctaatgcttgagacattagccaaacgttggagaaagaaatatgatatttatttatttattttgaaatgcttaggatgtaatactgagtaagtaatttgctagaactccgaactaccgagtaatatggctatggtagtgtgtatatcatcgtttagtgtaatatgtagttcaattttgtattatgggtggatatataaccttttgatttgctaccaaaaaaaaaaaaaaaaaaaaaacccaaa

SEQ ID NO: 46304 - DNA, 224 bp, Glycine max
  Clone ID: PAT_MRT3847_141813C.1
ccggtcgcgaagacaacacagggggaggcatcagtcattttgttgctcgaaactgctacgaacagtatcacgactctgcaagtcattcttatcatcgctgcaacacgtttagtcccatgtccttcccatgctttgaatgtgtgcacacgccgatgtcagactcaacatggtccacgttgaccagatgcaatgtccttctcttgacagcatgtctatcatccaca

SEQ ID NO: 46305 - DNA, 1896 bp, Glycine max
  Clone ID: PAT_MRT3847_141814C.1
tatcgctgtagattctgaggcctgtgcggtgctctgagaggaggggccatagtttgggaccctttgaaccctaatctccacccaaacccatttttctgaggcctgtgctgtgctctgaggggccatagtttgggaccctttgaaccctaatctccacccaaacccattttcccgggaaattgccttggaaaagaaagagcgaagaggaaaatgcagaatcacaggctgaagcagcagcagcagcagcaacaacaagctcttatgcagcaagctcttctccaacaacagtctctctaccaccctggcctccttgctcctcctcagattgaaccatatccaagtggaaatttgcctcctggttttgatccaagtacttgccgcagtgtgtatgttgggaacatccatacacaggtaactgagccgcttttgcaagaagttttctcgggtactggcccagttgaaggttgtaagcttatcagaaaggataagtcatcctatggattcattcattactttgatcgcagatctgctgctcttgccatattatctctcaatggaaggcatctatttgggcagcctatcaaagttaattgggcatatgctagtggtcagagagaggatacgtcaggtcactacaatatatttgttggcgatctaagtcctgaggttactgatgctacgttgtttgcatgcttttctgtctatcccagttgttcagatgcaagggttatgtgggatcagaagactgggcgttcaaggggatttggatttgtttcattccgtaaccaacaggatgcacaaagctctataaatgatttgactggtaagtggcttggaagtagacagatacgttgtaactgggcaacaaaaggtgctggtggtaatgaagagaagcaaaactcagatgcaaaaagtgtggtggaacttacaaatggctcatctgaagatggtaaagagacatctaacagtgatgctcctgagaacaatcctcagtatactactgtttatgtgggtaaccttgctccagaggtaactcaacttgatctccatcgccacttccatgctcttggggctggagtgatggaggaggttcgggtccagcgtgataaagggtttggttttgtgaggtacagtactcatgctgaagcagctctggctattcagatggggaacgcccagtctcttctatgtggaaaaccaattaagtgctcttgggggagcaagcccactccacctggaactgcttcaaatccccttcccccacctgctgctgcatctctgcctggcctgtctgcaactgatcttttggcgtatgagcgacagctagcaattagcaagatgggtggcgtccacgccttgatgcatcctcaaggacaacatcatcttaaacaagcagcagctattggagccagccaggcaatatatgatggtgggttccagaatgttgcagctgcacagcaaatgatgtactaccagtaacacacttcggttctcttgatgtattggggtttaatgctagctatatattctgccctgtgcacattgattcgtgttaaactctagggagccttttctttttacttttttacccgacggtagtgttgtagttacacctaccatattagacaattatgagtaaacatttgtatgggtttgtatcatgtatgcggttttctacttaatagtggtgagtgtttatgattttaagaggggattgtctgttcagacatgtttcttctcatcacccatttgggtgttactatgcgatagttgtcatcaatatcatcctgtctaaaaaaaaaaaaatatatatatttgactaaaaaaaaaaaaattaaaaaaaaaaaaaaaaaaaaaaaaaaaaaaaaaaaaaaaagcggccgttttaaaggatcc

SEQ ID NO: 46306 - DNA, 325 bp, Glycine max
  Clone ID: PAT_MRT3847_141815C.1
tttttaggtcaatattattattataataatataggaaaggagggcgacaaataacagaaagggcccatgccacatttacagaaccggcacccagcattcccttttgttttacgatacacattcattattattattccttatcaccatatggaggggattacaatttcttaactgacttaaacctagaaaaagaagaaaaaatcctcatcaaatttaaaactcagagaccatgaatctcaaaactggagtatatgcgtagaagccatactagggtggttcaaataccccatatttaacgggttgaagaagctatgtttattaattg

SEQ ID NO: 46307 - DNA, 515 bp, Glycine max
  unsure (1)..(515): unsure at all n locations
  Clone ID: PAT_MRT3847_141816C.1
ccggggcggaatttcaggggagacggaagagcccgcnaaaangaaaacaaggcacccgcaccggacaccagcaaaaccataaagcgggagcggaacaacagcgaccgccgcagattcaacatatccggcaaaatcctcttcctcctcctagacctactactacaataccccctgcccanaaaggggganaannnnaanngagaatncgngagggagaaaaaggcncgncaggggggccgggcgagccgccccaacgggaaggcggagccaggcaccggcgccgcgggccncggcgggggccacagcccccccgcccgcaagaagcgcggagacggcggccncggccgcgacaacgggaaccccgacgacgaccccgcccgaaaacgcgcccgccaacaccgccaggcgaaacaccgaagccgcaagagcgaagccgacccaaacgacgcgccggggcgcgccaagcggggggacggcgggggcggccgccacgggcgccaccgggcagcacaagc

SEQ ID NO: 46308 - DNA, 503 bp, Glycine max
  Clone ID: PAT_MRT3847_141817C.1
gcatgacaaccccatatccattcctcccaaaattattaaatgatattattcaatcaaattaaatcaaatatgttctgatttttttttttatcactatgatattggtgtcgtgtatccaccagtattattgaaaattaatctctatcaagaaattcactaactacttttagtggaatctctccttccatcacattttcttcatccacaaaattcaaacttgagacttaggatcactcatattaactatgttggtcaatatgttctaattggagttaagacaattaggattcatatatattaatccttaattaatacaattttatataaggtaacttaattaatttcatcaattaattaggatgatgaattgatcatagttttgatattttcttttttttcttttttctaatatttgttattgatgattcgataacattattttacagcttcaatattattatttattttatctatactctatttttttttaaaatattttatct

SEQ ID NO: 46309 - DNA, 216 bp, Glycine max
  Clone ID: PAT_MRT3847_141818C.1
gtgtgaggacaacaatggctaacttgtctgttcttatgatcactgaaccaatcgccgatttccatgctataaacagtgtgctaaagctgctaatgaccactgctgacacatctatgacaacgagagcccatatggaagaggaagtgacaatagataccaatgcccatcacaatgatcgacgaaatgtcaccagacctaataccacatcccctttat

SEQ ID NO: 46310 - DNA, 150 bp, Glycine max
  unsure (1)..(150): unsure at all n locations
  Clone ID: PAT_MRT3847_141819C.1
aaagttgcnancncgcgatacgnnagcncggnattcngctcgcgnacntgntgnggnatgannnngtncaagtccantnatgctactgccanncatgcnnncgagaanatgcatgnagnagtgagtngaancgncagtngngctcnaatt

SEQ ID NO: 46311 - DNA, 219 bp, Glycine max
  Clone ID: PAT_MRT3847_14181C.1
tgctgctggtgctggagtttagggatgagggtttattttattggcagggttacatgagtttgtgatgatgtgttattgtgtttctttaggtttgaataaatgatatttactttaaaaaaaaaaaaaaaaaagggcgccccccgactatgaacccctccgccccgggatttaatcccggcccggaccctgagggctaccattcttcccctagagttatct

SEQ ID NO: 46312 - DNA, 395 bp, Glycine max
  Clone ID: PAT_MRT3847_141820C.1
aacacgcgtacgcatccaatgtgttgcctggtgagaggacttcgtctatggaacgacagcgcaggactggtaatatcaaccaatgtcaatgcactagcgagttatctagatatatattgaacacacaggccatataagaagcgtgcaaaattttcaccgaagggttgctagccccacgatagtgctgctccaaagataggtttgggtgaagaatctcaagagacggactccacatgatgtctacgtggcgatactcatgttcataacatctgcaccattctagctaacattgtcacgctgatatgcactaatggcagaatatatgagttcacttataagctaacttgtacatatcatctttcatacatgctctaaactggagcaactaactataa

SEQ ID NO: 46313 - DNA, 167 bp, Glycine max
  Clone ID: PAT_MRT3847_141821C.1
attcccgtgtctacccactcatcctatcactcccaaaccctctactacttatcactattttcaacttatacaatttttaagaaatctcttataacataattacctcatcaccatttatatacaaattataaaactatcattaacttacacctttacatttaccttat

SEQ ID NO: 46314 - DNA, 272 bp, Glycine max
  unsure (1)..(272): unsure at all n locations
  Clone ID: PAT_MRT3847_141822C.1
ttttggttgggggaggcccaagaaggtggatgtgacttctataggcccaaccggaggatttttcatttctgaaagtaggaatgacagtggaggaattgagattactttggtgttatacaaacaagaaatggaatcattcatgactcattttgctgaaggacttgaatctctttgatcaatgttgttaaactttagtgtttcaaagggatggtaaaatttgagggaaaanaaaaaaanaanaaanaanggggnnnccccngnttnttgacctc

SEQ ID NO: 46315 - DNA, 690 bp, Glycine max
  Clone ID: PAT_MRT3847_141823C.1
gcatgaatgatgaggcttctgcgttgactctttattcagacatgctacaagaagttgcagacagcaatgctgagcccaagttagtacagcaccacttcaagcgtagtttcagtggctttgttgctatgctaacagaggaggaagccaatagaatggctagacatgatagagttgtagcagtctttcctaataaaaagaagcaactccatacaacaaggtcatgggattttattggctttccactacaagcaaatagagcaccagctgaaagtgatgtcatcattgcagtatttgactctggaatctggccagaatctgagagcttcaatgacaaaggtttcggtccaccacctagtaaatggaagggcacctgccaaacttctaaaaatttcacatgcaataataaaatcattggggctaagatttacaaagtagatggatttttttagcaaggatgatccaaaatctgtgagggatatagatggtcatggcactcatgtagcatcaacagcggctgggaatccagttagcacagctagcatgttaggccttggtcagggaacatcaagaggtggcgtgacaaaagcacgcattgctgtgtacaaagtgtgttggtttgatggttgtactgatgcagacatacttgctgcatttgatgatgcaattgcagatggggttgacataataaca

SEQ ID NO: 46316 - DNA, 2951 bp, Glycine max
  Clone ID: PAT_MRT3847_141824C.1
atgcagagctacattgtctacactggcaatagcatgaatgatgaggcttctgcgttgactctttattcaagcatgctacaagaagttgcagacagcattagcactctgtctcacttattgactgctattaatggaactgataggctacaatgtaactgcattacaccatcctcagtgggcaagcctattttttgcttgcaaagctttgttagcaatgctgagcccaagttagtacaacaccacttcaagcgtagtttcagtggctttgttgctatgctaacggaggaggaggccgatagaatggctagacatgatagagttgtagctgtctttcctaataaaaagaagcaactccatacaacaaggtcatgggattttattggctttccactacaagcaaatagagcaccagctgaaagtgatgtcatcattgcagtacttgactctggaatctggcccgaatctgagagcttcaatgacaaaggtttcggtccaccacctagtaaatggaagggcacctgccaaacttctaaaaatttcacatgcaataataaaatcattggggctaagatttacaaagtagatggattttttagcaaggatgatccaaaatctgtgagggatatagatggtcatggcactcatgtagcatcaacagcggctgggaatccagttagcacagctagcatgttaggccttggtcagggaacatcaagaggtggcgtgacaaaagcacgcattgctgtgtacaaagtgtgttggtttgatggttgtactgatgcagacatacttgctgcatttgatgatgcaattgcagatggggttgacataataacagtttctcttggagggttcagtgatgaaaactactttagagatggaatagccattggagcatttcatgctgtgagaaatggagtattgacagtaacttcagctggaaacagtggtccaagaccttcctccctgtccaacttttcaccttggtcaattagtgtggctgctagtaccatagacaggaagtttgttaccaaggttgaattaggtaacaaaatcacctatgagggtacctcaataaatacatttgatctcaagggagaattgtatcctataatttatggtggagatgcaccaaacaaaggcgaaggcatagatggatcatcatcaaggtattgctccagcggttcgttggacaaaaaattagttaagggtaaaattgttctctgtgagagcagaagcaaagcactaggccctttcgatgctggtgctgttggggcattgatacaaggacaaggttttagagatcttcctccctctcttccattgcctggatcttaccttgccttgcaggatggtgcctctgtatatgactacataaactctacaaggactccaattgcaaccatatttaagactgatgagacaaaagatacaatagctcctgttgtggcttctttctcttcaaggggtccaaacattgttacacctgaaattctcaagccggatttagtggctcccggagtttccattctagctagttggtctccagcttcccctccttctgacattgaaggtgacaacagaacattgaatttcaatattatctcaggaacttcaatggcttgtccacatgtttctggggccgcagcgtatgttaaatcatttcatccaacatggtctcctgctgctattcgttcagctctaatgacaacagctaaacaacttagtcccaagacccatcttctggcagaatttgcatacggcgcaggccaaattgatccttccaaggctgtcagccctggtttagtatatgatgctggtgaaatagactatgtaagatttttatgtggacaagggtatagtacaaggactttacaactcatcacaggagataacagtagctgccctgaaacaaagaatggttcagcaagggatctaaactatgcttcatttgcactctttgtcccaccctccaactccaatagtgtaagtggcagttttaacaggactgttacaaatgttgggtcaccaaagtcaacatataaagctactgtgacttctcccaagggactgaaaattgaggtgaaccccagtgttctaccattcacttctcttaaccaaaagcaaacatttgtgctcacaattacgggaaaactagaaggacctatagtttcaggctctttggtttgggatgatggtaagtaccaagtgaggagccccattgttgtgttcaatacagcataatggctaaggttaatccattaaataacttgaagcaaaaatggctgctctcattttattgataatgtaatattgaaatttgaaagtattctaagtggcaagagttgagtgaggcattaaagttgatacctgatagacaagttatcttaacacttcacaagttctaataactcatataaacgttcattaagaaaaattctcctgagggactgaaaattaaggtgaaccccagtgttctaccatttacttctcttaaccaaaagcaaacatttgtgcaaaaaattgagggacaactaaaaggacctatagtgtcaggctctttggtttggggtgatggtaattaccaagtgaggagccccattgttgtgttcaatacagcatgatggccaaggttaatgcattaaataacttgaagcaaaagcattaaacatttgcgggtttttcatatatattagtattaaacagccaaaaatggctgctctcatttttattgatgataaaatattgaaagtactctaaatggcacgagttgattcaggcattaaatacctgatagtcaagttatcttaagtcttgacacttcacaagttctaataactctcatctacacattcattaaggttagcaggtatgtatcacccacgataagataaactgatttggcggttaaaacaggatttaatgaaacctgtccaactttatattatttc

SEQ ID NO: 46317 - DNA, 292 bp, Glycine max
  Clone ID: PAT_MRT3847_141825C.1
agaagcgcagggggcgactactaactgtgagcgctaaagagacatacaggaaactggtgtctccttaggctcaaagtatggctaaccttgctgagccttgcttcggttcatggagatgagcagacaaacttttacatcgtttttttgggagctctacatagagcaggggcgctgcacttcccacttctttaaaagttctatctgctgtgaatgaaagcttgcttgcagcaaaccatggctgggatatagctccactaagaccttacaatgcattggatgcaaaactgttcca

SEQ ID NO: 46318 - DNA, 247 bp, Glycine max
  Clone ID: PAT_MRT3847_141826C.1
ggcatctcaggaacagtcaccttctattaaggcatgtgcctcatacacgactcgtggcatatcttttattttattagatgttaaacctttgaatgattatactgacattaacaagcttagagagtcagttatatctattcatattgatagcgttctgttaagtgcatccaaacttgttcctgttggatacagaattcacaatctgcaacttatgcatactattgtatatgacctagcttctgttgat

SEQ ID NO: 46319 - DNA, 305 bp, Glycine max
  Clone ID: PAT_MRT3847_141827C.1
tattgctgggttgacgagctttctttacggcggacgacccggagattttaatgtgggttgtgtatccaaaacctggccggattcgggggaccaatgatattactataaacatgactgttcatgacacttcaaggaagacaaatgtctaagggaaggtgctcaaatacaaccataacaaaagttaaaatagcatcatcattcgcataaacaaaaatggacatttaggaaccaacatcagggcgaatatatttatagacctaacttagaccatctcaagccaagaggataacctgaccaggggaaca

SEQ ID NO: 46320 - DNA, 165 bp, Glycine max
  Clone ID: PAT_MRT3847_141828C.1
tcccgggacgcgtcagaactgcgaacagctgccaacagcggggggataggggtgatgtcaaagaactacgacactcggggtcgctcaccagactctcgaagtgatcgccgtgatctcccgtgccttcgttttgaggccagatggcgtagcagacacggatgggaa

SEQ ID NO: 46321 - DNA, 265 bp, Glycine max
  unsure (1)..(265): unsure at all n locations
  Clone ID: PAT_MRT3847_141829C.1
ctcgaattccctgntcgactaactngtttataattaaacccatcatcaattcccttgggtcaggtttaaaactatgactgcctaagactcttgtacctcgcatacttcattctcattagacatattttcaattacttcaatactttcaacatccttactgtctctatctgccactcctactattactcttgttactatcactacacttattactactaacatattaatgtattctatatttatacttacacctgcaaatatagta

SEQ ID NO: 46322 - DNA, 465 bp, Glycine max
  Clone ID: PAT_MRT3847_14182C.1
aggagctagctgagactcagaaagaattagccaagcttcaactttctcttaaagaatcatcttcctccagccattcagggtccaatgaggagagggggtggcctaccacagatcctaaaaaaactgacaatgcatctgatgcaaacaaccagcagttggctcttgctctgcctcatcaaatagcccctcagccgcagcctccagcaccccaggttcaagctcaggctcatgctcccgcaccaaatgtgactcatgtacatcaacagactccttattacatgccacccacccctttagccaatgcagctgtgccccagcacccaaagaatctgtttttaccattcgatcaacaatttcgaacaccccaacacgtggctccacaaccaacaccatctcatgtaaccccatcttctgtgcaacaattttctcactattagcagcaacagcaacagccacatcaacagc

SEQ ID NO: 46323 - DNA, 340 bp, Glycine max
  Clone ID: PAT_MRT3847_141830C.1
aaaacaaataataaaatactctcgtagctaccttcaacaactctggctcatggcgtgtcaccgtgggctctgtactatcactgctgctgctcgctgctgctgaatttagcttggcacagctgccacgctcttcattcgcttgggttcaacattcaccaccgcttctacgaccccgagaaagagactctcggcgttcatgatttacccgaccagggaactatgacaatgctataaagctatggcccacagagaccaaatatggcggcgccggagactcgccgccggttaccactcgcctatgacttctatgccctccaacgagacttatcagattgaagcc

SEQ ID NO: 46324 - DNA, 316 bp, Glycine max
  Clone ID: PAT_MRT3847_141831C.1
aattcggctcgagagaaaatgaaggttctgagcaaagtttacaatgagaaaatggatactgggactaacctgtttgctcagtactacaagcaatggcttaaagttggagctagtgagcctccccttcctaatgtctctttgccatcaaggccaagttacagatcatcaagaaggtcttcagattcctttgtttcaaattcctcaatcaacccaaacttatacaagacagtgtttggctccaaactagagcagcaacctactggtcttggtgaccaaaatggagtgttggcaattactacaggcttagagattgatg

SEQ ID NO: 46325 - DNA, 374 bp, Glycine max
  Clone ID: PAT_MRT3847_141832C.1
ggggggcgaaaacaattcacttaaccacgagctgacaactggggcattggattcacagtttttggtttttgggggcttgttactcctacgttgcttatggtgtttatgtctaatttaaacatagaattggatgaaatgttgctaagcagctaggtttaaaggataaaatgtaatggacgatatagtgagaaatccgactctacgggatgttcttaacttatcgatagcaacagaggttgagtgtagtgctcaagaagcatattatatctatgatagctctaaagcatgtttaatggtaattcatataatccaggaagcagacgaatatcacgattgatactcttgatagtttcttgttggttataatgtgttaa

SEQ ID NO: 46326 - DNA, 383 bp, Glycine max
  Clone ID: PAT_MRT3847_141833C.1
ggaattcccatctctaccctcgccccaccccctgtgtcttttttacgacactaactgacaaacacggggggtttttatttataaatgcgggggccataaatccttattttcttcgaacggagcttgggtttgggtgttatactaaaaaagcacatggttctctgcatggctcaaaagagaagccctatctactatctggcggccatgaccgtcaagaaggcaattttcacaacttaacatacgcactgctctcacctgttgctagattgcccagatcgacaatacctattgaatatgccacttcccaacggctgactataccatcaaagatatcctatactgtttccaagcgtgagttacttctataccactccaccaggggg

SEQ ID NO: 46327 - DNA, 276 bp, Glycine max
  Clone ID: PAT_MRT3847_141834C.1
gggaggaaagtggtaaaggaacatggaagcacgctgctttccatgttgcccccactattgccacccctgctgcttatgcccctttgcccttcgctcttgcttctctcggttggcctcttggtgtgactagtctggtgagtgcaacactagtcacctggtactctagctttttgatcgcttcgcttgggaaatggaacggggagaagcaccttacctatagacatcttgcacataatattttcggattctgggggtactggtctattgccttttttc

SEQ ID NO: 46328 - DNA, 714 bp, Glycine max
  Clone ID: PAT_MRT3847_141835C.1
gaattcgagctcgttacccggggatcctctagagtcgacctgcagatgaagagattgaacggggcgtagattgtcgacatgcatatatacattactcccaactttgatgtatctatttcttgtcatggcatcttcgtgaggttgtaagacatgccctgctgaatggggtttgcatgttgcggcctggaacaacagatggacctggagcttttgattttcagcaaggtgatgataaggtaatcatagttttataccttatgcttgcccattatcctagacttgcagtctctaaatattaaccatggcgtatgcttattattcgttctgatacacatcaaggctatcctttctggaagctggtccgcgacatgcttaagactccaagcaaggaacaaacagattgtcaacgcccaaagcctattttgctagatactggtgaaatgaagaaaccatatgattgggctgtaggttactcacacatcctgaatggaatgattttgtattcccttagctcaggtcaattatcttttatatgcaagatcgaatagggactccctttagcattcaacatatatgacactgtctcatattggactagtcttttactctgggatagacttattttaggaaaacaaccttgattgacatcaccctctaatcgataaccgttggacttgatggggactgttggaaaactaccttaatagcactcac

SEQ ID NO: 46329 - DNA, 248 bp, Glycine max
  unsure (1)..(248): unsure at all n locations
  Clone ID: PAT_MRT3847_141836C.1
gnagagaatcgnnnntcaagnagcaagaacnggaggacacagaaagcaagaatgcgacaacaagacacntcaacaagtanacntcagcnnagtncttgnttcatcttcttgcagcacntctaccaaaggaccncntaacanaagcagcaggagnagtggtacacaaanatgggccatgtcccaactacatgatcntgatggcaaagcgaagtccacaacaccacacagtnncattctgaaccaagacc

SEQ ID NO: 46330 - DNA, 413 bp, Glycine max
  Clone ID: PAT_MRT3847_141837C.1
gaggcgtaccaggtttccctaaacggacccttataaaagcccgaccttttcttggccatagttttttccggcgtggaattggagtgggatcaatttttacttaagttaaaatctttaacctttaggtttaaacccggggtgtgccttttgagggagaaaatttaaattaattgcgttttacaaaatgaccattttcaataaataaaacttggcaacccgggggctttaataaatggaacaccccccggtaaaaggggttttgcattttgccccctttggggggagaaatttttccccctaagacggaaaaaaaatttttcccttcccccggggggacctgttataatttttgcacccgggccgttttttttttttccagggggaaaaagtcttttttgttgtttttttccccc

SEQ ID NO: 46331 - DNA, 298 bp, Glycine max
  Clone ID: PAT_MRT3847_141838C.1
gggtcgccacgcgtccggccaggcgtcaattatcaatactattttgttacattataacaaggtattctcccaatttgagagagaaatacaataggctgggctgcttatacactaacatgcaggcctaaaacgtacactatgcaaaccttatctttaaaaactcgcgctgagcttgctcaactatttcgttcaactaccatttcatggcttatttcaaaattgaagttcaaatactgaaacattcatcgtactaactttcatgcccatgataatgcttgatgctatgcttgcactatat

SEQ ID NO: 46332 - DNA, 448 bp, Glycine max
  unsure (1)..(448): unsure at all n locations
  Clone ID: PAT_MRT3847_141839C.1
ctggactcccgcttgacccacgcgtncgaacttattgaaaatgatctcattttaattggtagcacagccattgaagacaagcttcaagagggagtaccagcttgcatagagactctgcaaagagctggtattaaaatttgggttcttacaggggacaagattgaaacagcgataaacatagcctatgcatgcaacttgataaacaatgagatgaagcaatttgttattagttcagaaactgatgaaattagagaagttgaagacaggggtgaccaagtataaattgcacggtttattaaagaagaagtgaaaagagagctgaagaaatgcctcgaggaagcacagagctcttttcagtccctatctggaccaaaattagcacttgtaattgatggaaaatgtctgatgtatgcgttggatccaagtttaagagtgatgctgctgaatc

SEQ ID NO: 46333 - DNA, 349 bp, Glycine max
  unsure (1)..(349): unsure at all n locations
  Clone ID: PAT_MRT3847_14183C.1
gtttcaaggccacagaaaaaccaacctttgccctttttttgatggccccagtttccacctcaccaacaagcgaaaattgagtttttggagtccagtcgggctggatcaaaacacttgcccaaccatagttgttcacccgagctttcaacagcgttagggggtccaaagcatgctgtgtcccaaaggtgagtttattttctttgccagaaaagctttgtgaaagctccgcaccaacagccgaattantcagcgggtttacaatgtgggaatttgaggcaaaaagggttgcacctttgtcttttagtgttaaagatgccaggagggcccctagagtaatggccaccctgca

SEQ ID NO: 46334 - DNA, 277 bp, Glycine max
  unsure (1)..(277): unsure at all n locations
  Clone ID: PAT_MRT3847_141840C.1
tttnttttaatgtattaagganaccactggcatggctaaaggaagcttagagtttacattcacacaataataagtacccacccacaaggaaacaagcccacaataaaagccaaacattacagcgaggtcccaaaaatcaaaaagactcccaggaacctgcacccccaccaattcaataactctaacctaaaaccgccaagaagaccacaatttattcataaggaagactccagtcatacatagcatgacacatgcatccaacaactatagcgaggcc

SEQ ID NO: 46335 - DNA, 1388 bp, Glycine max
  Clone ID: PAT_MRT3847_141841C.1
cagattattaagaacttgcagtgagcaagagaagtcaatagccggattacaagatgggtttagcgaggagcttcataagaaccatcccatggagagtgttgacaagcacattgcaaaccatcacatggagaatgttgacaagcacattgcaaaaatgcgaatggagcaaatgagattaacgggtgtagaactagccttgagaaaggagttagagtcttgcaggtttcaggcagattctcttcgccatgagaatataatactcttgaaccggttgaaaggtgatggaaaagaaagtgttgctgctacttatagactagataaagaactatgggcccgcatctactgccttcagaatcaaggactaacaatgctaaatgaaagcacatacttgtgttcaaagttactggaatttgttaaacgaaaaggaagccaccttcgtcaaaatgttcagctggatcgagaagtgattggaaatggtttagatgggcaatttattgttgaatctgaaactaaaattcagggactcaaaagtggcactgagggtttaacaaggagtttgcagttgatgtcttctttgttgaaagataagtcaaatccattgacttctaaatttcaatcagagattatagacgctggtaaattggctccactgaatgatcaatcatccgaggatattttaagaactgaacttaaagcagaatgtttggtgacaagtttattaagagagaagctgtactctaaagagctccaagttgagcagatggaagctgaacttgctacagcagtaagaggaaacgacatacttagatctgaggtgcaaaatgcgttagataacctttcaagtgtaacccacaagttgaaggaccatgaacttcagatgttgaagaaagatgagagtagaaactgccttcaaaatgatctgcaagagtctaacagggaattgacaatcatgaggggaaaactgcccaaagtgacagaggagagagattatatgtgggagcaagtgaagcaatatagcgagcagaatatgctgttgaatgcagaggtcaatgtattgaagaagaagatagagacacttgaagaaaacaacctcgagaaggaaggtcaaatatccatattgcaagactcccttgccaaaagatcctatgatgatctccttgggagtcctgcgcatgattttttcagtacaaaattgctttaatagcttgttttcttgtaggcctatttcattgttcatagtttacctacatctgtgaatgagttttctttttaattgttgctcttcttttataatctatttcactgcgtttttctttacatatgtgaagtgtaagatcggacaaacaagttaaagaatacaaagttgcattttcccccattgctcgagg

SEQ ID NO: 46336 - DNA, 714 bp, Glycine max
  Clone ID: PAT_MRT3847_141842C.1
ccacgcgtccgcggacgcgtgggctggaaggaagattgtggtatcaacaaacatagcagaaacgtccttgacaattgatggtatagtctatgttattgaccctggatttgctaagcagaaggtttataaccctcgagtccgtgttgagtctttgttggtgtctccaatatcaaaggctagtgcacaccagagatctggacgtgctggaagaactcaaccagggaaatgttttagactctatactgaaaaaaagtttcaataacgatcttcagccgcagacctatcctgaaattttgagatctaatcttgccaacactgttcttaccttaaagaaacttggtatagatgacttagtgcattttgatttcatggaccctcctgccccggagaccttaatgcgtgcattggaagtgttgaattacttgggtgcactggatgacgatggtaacttaacaaagctgggccagattatgagtgaatttccactggaccctcagatgtcaaagatgctcgttgttagtcctgaattcaactgttcaaatgagattctttccgtttctgccatgctatcagatagttgcagtttctcagtattctctcaatctcttgaagaaaatgggtgtggtctcgcctctatgcatctgctgaccttccgtgggcctcctctgtgataataatttctttctttagtacccaattgctttgtccggccta

SEQ ID NO: 46337 - DNA, 322 bp, Glycine max
  unsure (1)..(322): unsure at all n locations
  Clone ID: PAT_MRT3847_141843C.1
aaaccagggttgactattcatacaaancccgccttcaaaatttctttaaagcccaacccaacttttaaaacttgaactagaacaccttcactattcaagggggcaaaaaaaccgaataatccaccctaaactgtctaacaagcaataccctaaactatttatcttagtgtttccgcactctttcccatccctatgcaccaaggcaacctattgcaattctccccttatataaaaacaaattgtatccacaacaaacgccatcacatatggtagccaccccctccccataccaaagaagacccctggccctttaaccaatttt

SEQ ID NO: 46338 - DNA, 252 bp, Glycine max
  Clone ID: PAT_MRT3847_141844C.1
gggaatcttttttttttatggattttggtttcttgaacaaaaaactaacaggtttttgcacaaatattattaattgaaccacgggggttattagttgacagcataacaaaaatttgaatgaagacaggccaacatggagaggttcccctcagaaaaagggtttaaaagcaagcaagcctttgcgaattaaggaaaaaaccaacatggtggggggccgaagaactccgtctagttagaccttggtattatgag

SEQ ID NO: 46339 - DNA, 1063 bp, Glycine max
  Clone ID: PAT_MRT3847_141845C.1
cccacgcgttcgcccacgcgtccgcattgtcatgagaagaggcaaaaaataagtggttgtgatgacgtaaatgtaacagtgctgtcagaaccatcagatgttgcatttagccattcagaaaatgacttaaatgaggatcaggaatttgatagtttatcagccatcaattctctgatagcagaatgtgaagattcaaaacagaaatacttatctgtcttcagttcgaagctatctacatcccaacaggagtttcaaaattcttacacgcaggtctgtaatgcatatcatgacagcagaacagatcaagatacattttggtggttagaagcactccatcatgctgagcagaacaaagatttctccactgagttgattaggaagattgaagaagccatctcaggaacttcaaacaattcaaagtcatcaagagtaactgctcggtcagtgagcataagcttgtgtaacacaattgtcaagtactgcaattttgtcataatccatatccgaaaatttccaagttatcgacgatcaaatattgatcagacaatggaaaaaccaaaagaagaagatattgaacgtgtgggtaaatgtcggaattgtcagcctaattgtgatggtcccccttgcattttgtgtgaactagatgaattgtttcaggattatgaagcaagactctttgttcttaagaatgaacgtggagggataatttcatctgctgaggaggctgtagattttcacaagaaaaactttgcattgaatcatttcctctcaaagctatcacaatctaatcacagatctacagtatctgatattggtcatgaagaatcaaagaaaaggaatgttggacaaagagttgtggttagttactttatttgattgacttttgctttaggtcatagacaagtgcaaattgtttatacctcctgtctctcttggttttctgtaaggataatacttctcttttgttgatataaaagattcagtgtctatttaaacagagtctggaattgtaatatgccaaaaaatgaaatgaccatggaaaaaaaagactcctgaatttctc

SEQ ID NO: 46340 - DNA, 438 bp, Glycine max
  Clone ID: PAT_MRT3847_141846C.1
caactgtcaaagtgtacaactgcactaggacaccaaatataaaaataaatggctgatcctttggattgccttgaggatatttataattgagcacgggcttctacagttctaattttggccctcaaactcaacgagactttcacatcctcacaagtcacaagccatgtgttatacaacaaggctgtgaccttgtgtacttgtgctgattattcatcaatctgtgtttatgtcttattttccacttgccaatgtagcatttgggttgattaacagtgtgtgtgtatatatatatatttatatatatgacctatgttctttggctttggaaattttcttagattatggttctagcgttcatagataatgtgttgaaatgcataaatttacatctatataaaggaaattatgaagtatattttccattcgttgaaactgacc

SEQ ID NO: 46341 - DNA, 295 bp, Glycine max
  Clone ID: PAT_MRT3847_141847C.1
ctctagccacttcattccatcagcaataataagcttgccttgctttcattcagtgaacgcaatcatcggttggactcttcaccatgtccgcgcggcttgcaaattacattctaatgacccccctgctctttcaccaacacgtgtgattgatgctccttatcctactaagatggtactaatcttttaatagttcaagatctacagaagccataattgcattggtagtggcgtaggatatattagctttaccgaaaggatgcttttcttgtctactatgattaactactccctcata

SEQ ID NO: 46342 - DNA, 556 bp, Glycine max
  Clone ID: PAT_MRT3847_141848C.1
cccactcgtccggcgagaaatacaagtgttaagggtggggccaattaaagtcctagctggaggcctttgacaaataattttacttattaataatatctccacgcgtccgcggtcgcgtgggcggacgcgtacattttaatctaaatataatagacttttttatacatatattaaataagttaagtgatttagtggttcttgtgcatagtgttaaggtataggatgtgagtttaaatcccacctttaagtacccttttttaaaaaaaaaattaaacctatatatatataacttcatttgtacgtattctcttccaatcaattatgttgttgtcgtttataacatgaaaattttttttctatttttttctcttcatttcttctattattaagtttttgagaaaataaatgttactatccataaagtgtgtatcatctctatttgatttatttctccaaaagctcataaaataaaagaaatggacaaaaatgaaaatgaagaagatctattctcatttatgacatgtggatttcatggtaggtcggggattatcatttt

SEQ ID NO: 46343 - DNA, 1632 bp, Glycine max
  unsure (1)..(1632): unsure at all n locations
  Clone ID: PAT_MRT3847_141849C.1
ccacgcgtccgaagaattgccatagcaagggcaattctgaaagatccaagagttctgctccttgatgaagctacaagtgcccttgacgctgagtctgagagagtggtgcaagagacactagacaaagttatgataaaccgaacaacgatcattgtagcacaccgcctaaacacaataaggaatgctgataccatatctgttattcatcaaggaagagtagtagaaaatggtacacatgcggagctcattaaagatccagatggagcttatagccagctcattagattgcaagaaattaacaagcagttagatggtacagatgactccggcagggtagaaaactctgtagattctgaacgacaatcaagccagtggtttcctttccctcaatctttaagcttgggatcatctggaacaggaaacagcagtcatgactcattcagaatatcaaatgctatgcctactacacttgatctcttgaaaacatcagaagaaggacctgaagttcttcctccagtagtatcacattcacctcccgaagtctcattccttcaccttgtttatcttaacaagcctgaaatcccagagttagtcctagggactctagctgccatagtaactggggcaatactaccccttatggggtttcttatctccaacatgataaatactttccttgagcctgcagatgaactccgtaaaggctcaaaggtttgggcattaatgtgtattggccttggggtagctggcaccatatttcatccaataaggtgatacttttttgctggagctggttctaaggtgataaaaaggatcgggctgaggtggttcaagaaaattattcacatggaagtaggctggtttgacaaagctgggaattcaagtggaatacttggagcaaggctgtcacttgatgtggcttctattcgaacttttggtggggatgcactcggtttgatgggtcaagatggtgctacagtaatcatagccttggtaatcgcctttgaggcaaactggcagctttctctcatcattcttgttttgctacctctattattagtaaatggacaagtgcaaatgggatccatgcaaggatttgtcactgatgcaaagaaactatatgaggaagcaagtcaagtagcgaatgacgcagtagggaatatcagaacaattgccgctttttgtgctgaagagaaggtaatgaacttataccagaagaaatgtttaggacccatcaagacaggtatatggcaaggtatagtcagcggaacaagttttgggttatcactcttcttggtgttctcggttaattcatgcagtttttatgctggagcccgacttgttgagaatggcaaaacatcaatctcagatgttttccgtgtgtttttcactctcacaatggcagctatagcaatttcacaatctggcttcatggccccaggtgcaagcaaagcaaaaagttctgttacttctatatttgctattcttgaccagaaatcaagaatagatcccagtgatgagtgcggaatgacattgncagaagtgaagggagaaattgagttccaccatgtcacttttcagtatccaaccangcctaatggtcttctattcagagatctttccttgaccatt

SEQ ID NO: 46344 - DNA, 465 bp, Glycine max
  unsure (1)..(465): unsure at all n locations
  Clone ID: PAT_MRT3847_14184C.1
ttctttcttacccttcaactcttttgatatccaccgagttgccttagatccccaaggtattttttcttcatactgttaacttattgattggtgctactacgattggattattcttttccgttgcagttttgtatgaggttgatatcttaggctagaaagcctagttatattagaggggatgtgtcgttagtgtgccattctttttttttgtgatatatgatcatttttgttagtggtttgaggtagtgagtatttgatttgttggccctgcaaaagcaataaagaaacaaaaaaaatcagcgtgaaggttgttagctggggtttgatgattatttctagttgtgtaacattatacgagtgttgtatagtacattatgcatttttttaatctcattctctcgagtgtcgtatatcttttcccaattcatgtttgaataacaagtgttctcatgtgtgtccccnana

SEQ ID NO: 46345 - DNA, 255 bp, Glycine max
  Clone ID: PAT_MRT3847_141850C.1
agcaacaacaagccctaatccttttttcttcttcttgcacttcccaaagcaatagcttccattgtactattcatccactgattgcaattagaaacgtcctcttcacactctcaattcaaattcaaggtttcgcattctcaccgctcacttcgttttccttttcttttctttttttcccgctttagtgttattgggtgctctgagagagttttcgattcttgatcaacaatttcgcgcattcagctgaaataactt

SEQ ID NO: 46346 - DNA, 297 bp, Glycine max
  Clone ID: PAT_MRT3847_141851C.1
cgatttttcccacttttgttttcgaaatttccacaaggcccgaaccgtgaaagcgggggccgctaggggaaaaagtaacaacgtaccccaaaaagaacaccaaggacacagcggcctaccgagggaaaaagcaaaccccagacaaatcccgcaacagacaacaccgaagcacaacgggaaaccccagagaagccaacggaaagaccgaactgccaaaaaaggcagcgaacgcacagcaacgcgagcaagacacaaaaccagaaaaacccgcagaaaaaccgaaaagccacacgagac

SEQ ID NO: 46347 - DNA, 126 bp, Glycine max
  Clone ID: PAT_MRT3847_141852C.1
atccattgcagccactgacacgggataatgctaagatctgcactagcagtgagggcaagaactattggtgggatgagccaaattaggctcatccaccaatacttcttgcctcactgctagtgcact

SEQ ID NO: 46348 - DNA, 862 bp, Glycine max
  Clone ID: PAT_MRT3847_141853C.1
cccacgcgtttttccacgtgttcgcccacgcgtccgcccacgcgtccgcccacgcgtccggttcagtctttcttggaactttgttactctaacacatgacttgatatgtgcctttgttttcaaccacaaatgccttgctacatgactaaggtgttcagagatatcctttgcgaggtgggcccaagcctcggggactttgagtctcacggagacaacctacgacaacgccgacatccaggtagggttcgacaacttcactaactctaggattgaagtgtatgctggcagccttttatttttgcatccggattttattattaaaggggtggtccttttgaacggtaacattggcttggtaccttcaagtgaaaaacgccacagcctgtcgaaagagtatggagtttttgacttggagactgtggcgatgcaccagatagggcatctacttggacttgatcactctcccaaagaggactctattatgtatccttacatattgtcatcacaccccgacgactctgcaagccacggtgggcgtttggatgtgcttttagttaccactttctgtcttggatttgcttgcgtttggatgtgcttttagttaccactttctgtcttggatttgcttgcgtttggatgtacttttagtaatattggattaataatctattgttacgaggtgtttagttatatgcttagcagtatctttagcgtgtgatcttgtataaatcttacaataaaagtattataaagatctctaaggtagaggatgaattattgtagaaacattcggaagacctttgcataagctttaaaaaaacaaaagaattacttaaaaaaaatcaacagacaaactcatgag

SEQ ID NO: 46349 - DNA, 226 bp, Glycine max
  Clone ID: PAT_MRT3847_141854C.1
ggcgtacagtacatctaacttttggttagttggtacgaagcaagggagctatcacattctaaatcggacctgtgccagaaataccagctccataacccaggttcttcttggtgcctagggaaaaaggggaaacttggaggccgaataaggtacattccacacggggaggtgatctcaaaagaggaattcgagatgcgaatacctcacggggaaacatagctcttca

SEQ ID NO: 46350 - DNA, 1013 bp, Glycine max
  Clone ID: PAT_MRT3847_141855C.1
gggcgcgaacgagttccagacggagatcaagatggtctcgcgcttccgccacgcgcacttggtctcactcatcgggtactgcaacgatggcggagaaatgatcctcgtctacgatttcatggcgcgtgggaccctacgcgaccacttgtacggttcggagctgtcgtgggagaggaggctgaacatatgtcttgaggcggcgcgtgggcttcacttcctccacgcgggcgtggacaagcagagcgtgatacaccgcgacgtgaagagcacgaacatcctgctggacaaggattgggtggcaaaagtgtcggattttgggttgtcgaaggtggggcccaacgcgtcccacgtgacgacggacgtgaagggtagtttcgggtatttggacccggagtactacatgagtctttggttgactcagaaatccgacgtgtattcgttcggcgtcgttttgctggaggtattgtgtgggaggtcccccatcgagactaaggtggacaagcacaagcagttcttggtgacatggttcaggaattgctatcatgatgggaatgttgatcagacggtggatccggctctgaagggtaccatagacccaaagtgtttgaagaagtttctggagattgcgttgagttgtttgaatgatcaggggaagcaacggcccatgatgagcgatgttgtggaagggttggagtatgcattaaatttacaacaacgttataaaaaaaataaaggggaaatagggttgaccaaaattgaggatcaccatggtgactttaacgacaaatttgggaaagtgttatcgatgaacgcgtctagcagcaccagcatggctacgacaacatgcagtgaagaggaacaagcattggtgcatgggatgttccctgagcttcgaaatcaaagaccacgttaattacttctgttctcattatgtcacaataattgaaatgtctactgctgctatagatgcttgtgtctaggtcacggagaaataaaaaagacttctgggttaa

SEQ ID NO: 46351 - DNA, 585 bp, Glycine max
  Clone ID: PAT_MRT3847_141856C.1
aagagaagagaatggaatcgagtcgaagagcggtggaatcatactggagatggcgcttgatcgactcagctacctccgatgaagacaaagtcacacctgtctacaaactcgaagaaatctgccaactcctactctcttcccacgctactatcgtcaaggagctctcagaattcatccttaaacgcctcgaccataaaaaccccatcgtcaaacacaaggctttaagattgatcaaatacgcggttggaaagtgtggtgtggagtttagaagggaaatgcagagacattcggtggcaatacgtcaattgttacactacaagggtccttcggatcctctcaaaggcgatgcactcaacaaggctgtgagagacactgctcaagaggccatctctgctattttttctgcagatgataacaaaaacccacctccttcagctcctcctgctgcttctgatctcaatagacggatagaagggtttgggaacacgaacttccaagcgccttctcatgataagaaatcgtttctcagtgaggtggttgatattggaagtgcaaccattaagcaagggctcagtgccttcacac

SEQ ID NO: 46352 - DNA, 487 bp, Glycine max
  Clone ID: PAT_MRT3847_141857C.1
aaaaaatctttttttgacacaaaagttaaaaaaaaaaaaatgcttcaagagaaaaccaataataatatcaacaggcagaaatacgatccgttacatgatatggaacaacatgctacggaaattttcgatagtgtcccgagaaaacgtcgtaacagtgaactaataccaaatgacccgtatcgggacatcgaacttcactgcaatgaaatctttgaacctcgtcaaaggaagagaagtaatagcgaattgatccctaatgatcctttaagaattattgaaattcacgccccggaaatttttcaagacgataaatttcatgggggaataggagaaagggacgaccctttcaaaaaaattgaactatacgccgaggaaatttttcattaatcataatcaattaattaatctatctatctatcttatttctttatttattggaaatatgtaatatttttttctttgtaatattttaaaataagtattttcc

SEQ ID NO: 46353 - DNA, 410 bp, Glycine max
  Clone ID: PAT_MRT3847_141858C.1
cgactcgagtacagaacgacagacgcggatgatgctacatttactactctgattaggaagactttagtgtctggagtctactcatactctaagtaatctcattcagagaataatctctagttactgaaggaatgcggcacccatttacgctgatatgacaaccgcatagatctcgctcgcttggctagtgcccagacattatcttggattctaatctaccgttcttgcttagccatcactgggcaaggtgataagagtgagaacctccatgctggagatgtctatgtctgtgacagatagcagataggcatgctgggaatggtggcatgcttgatgggaagcttcagagccagattcatgtcagggccatccttgggcttggcggatgagagacttagcagtgaacgaac

SEQ ID NO: 46354 - DNA, 179 bp, Glycine max
  Clone ID: PAT_MRT3847_141859C.1
aggtgctcctttactgggatgacagatataaaaaggatgatgggctcaacactatgggttcaaaccttgctcacatgaacaacgataataatttgtatctcaagtccagctgctacgatcgcgacatttacctacttgcgacgaaaatttgtagccatatagcgctgatctattccata

SEQ ID NO: 46355 - DNA, 312 bp, Glycine max
  Clone ID: PAT_MRT3847_14185C.1
cctattgggagggtgggagatgaatcaataccagtgggggttttcttattgtgaagaactaattgtgttatgcaaagaagggagttctagagaaagaccaattttattgaacgagtagggctaatagtatgagattttacgagaacgaccaggagtttcttgaccaaaatctgtgcattaggggcattagccacgcatattttttttacaataatcgacgaagttgactagttcacgattgctatacaggctcatataagtaattattaactcgctcagacatgattatatattttaagttaattgctttga

SEQ ID NO: 46356 - DNA, 704 bp, Glycine max
  unsure (1)..(704): unsure at all n locations
  Clone ID: PAT_MRT3847_141860C.1
tacgccctcggcaggtacccgggtnccggnaacttcccggngtcgacccacgcgtccggtagggaagaggaaacaggcaagaggcgacttaacttttatagtggagggcgctacaatgagagcactcgtctacacttttcacttaaaaacaaagccaaacctttcgtggtcgaacgaaaacttaaaaaccatgaacactcaccactttatctgtatccctcttattgccatctatccttcattgatactctggtgcgctctccaccaaactgctaccctctaggcccgagtttagacgcaaccgcattggctattgcttttgttctgctaccttttgtcacgagggagcgttaaggatgaaaacaacaacctcaatgaaagcgacgacggcaatgtttagagaggcattggattgaagtggactaaagaggccgcgtgctaaataaggaccatgacccgaacgcttgatgtaccgttgcagatataatgcaactgttcctgctaagaggccatggctcgcggtactggctcttatggtgatgcgtggacagcagtgctatcagaacaggcaaactggtaatattggcgcatctgcaacagtgcgttttttaggatacactgtgaaatatgctgtcgcatgagactaccaattgataagaagtccaatcacactgtctattagatgcatacgagatgtattttac

SEQ ID NO: 46357 - DNA, 339 bp, Glycine max
  Clone ID: PAT_MRT3847_141861C.1
tttttgttttttttttttttttttttttttttttttttttttttttttttttttaaacagggaaaaacacagagtgttttttttaatcagggtttgggattgtttgataaagttttacacaatagtccacacccaattgacgaaggatgattttttaaactgtccaggtaacaatttgtttttatttgaccccatttttttgttaaaaaacgccttttttttgggccccaacttaaatacttggttaataaaagggcaggtgtttaaagtcttttttaaatttttgaaaaagagctggagaccaacccctttagttttttttcgagccgaattccgggt

SEQ ID NO: 46358 - DNA, 382 bp, Glycine max
  unsure (1)..(382): unsure at all n locations
  Clone ID: PAT_MRT3847_141862C.1
tttttggcctgtgaatgcgggatctgagggggggtggagtaacgggacaacggtttaaattggcataaaanncacaaaagnnnnnnnnggggctaaacttgaagttggacacggttcctcaaaggggggccctctctgtgggactcccggggaggaggggggccagggggccggaatnanaagaaaatatggcgggggggggggggngggttcacagaaccgcggggggagagggagcaagggggccccggggggggaaatgtccccccgcccaccattgggggtgaggggaaaatcgtaaccctggggagacacctgggtggtggggggggtgaggggggggggataacagggggggggggccccagaaacggggggggga

SEQ ID NO: 46359 - DNA, 223 bp, Glycine max
  Clone ID: PAT_MRT3847_141863C.1
gcaaggggtgtgtgtgcagtgtgtgtgtgttgtatgttttaatgtattcatacactaatcatgggcctttttcttagtattcttacattcccgtgcatgtgactttccagttatgtaacttgctgttagaaaactttagattccctttgttcctgaagtacacagaagtggtgttcattttcagagtaggaactgatgtgcttttcagaatggctgaaaattt

SEQ ID NO: 46360 - DNA, 346 bp, Glycine max
  unsure (1)..(346): unsure at all n locations
  Clone ID: PAT_MRT3847_141864C.1
gtangaaaaaatttttttttggttttttttttttatttttttttgggaaggaaaagggccacccctgggtttaaccgggaatttttaaaccgtacctggagggggacaatctttcccttatgggagaaaaataaaaacctggggaataaatggcaaaaactgttccccgggggaaaaaggaaaaccctcaaaattccaaaaaaaaaaaaaaccggaagaaaaaaggggaaaaccccgggggcctaaaagggggggaaacctacaataatggggggggaaacaaaggcccatttccaggggggaaaacagggggccccccgggattaaagaaacggccaaccccccc

SEQ ID NO: 46361 - DNA, 418 bp, Glycine max
  Clone ID: PAT_MRT3847_141865C.1
ggctcgagggaaatggggggagcaacgtttgatctctttttatacgaaatggggctgattgacatcgcctccattgccgctgccccacagggtaggccccgcgccatccaccttgcatgggctaacctcattggtcaagccggacatcccgagaaacagataatggaaccggcgataaaaggaacgggtaatgtggggaacgcagccaacgaagcaggggtggagcccgagcaggccacctaatctgatcccacgctgacgccaaggactaagtggcccgctgacaagatctacggagacgagggtgggacggaccttgaatactgcactcaaaaggggtagaatcatgccattgcagagactctagcagagcaagcgggccgggacattgcgaaggagacaggaattgatgctgtca

SEQ ID NO: 46362 - DNA, 453 bp, Glycine max
  unsure (1)..(453): unsure at all n locations
  Clone ID: PAT_MRT3847_141866C.1
aacgggnccggaatcccggggtggaccacacccgtccggccgtttttaattaaggatgggggtaagggggaagggcagggatgtttgcagttggggcttcttaacaaaccggtccaattggttgggttatttgggttgggactttattgggttttttggttgggggggcacttttggtttacaaaaaaggggtttgggcccattaaactttgcaaatggaggtttaaggttaaaacttagtcaatgtaactatttaaaaatgaaaaatatttaatgaagtccttgggggttccgggttctttcggtttaataaagggggggttgtgaaaaatttggggtggttaaaaaaaaaaaaaaaaaaaaaaaaaaaaataaaaaaaataaaaaataaaaaaaaaatatttaatataaaaagggggggcggttttaggggttcaaggtttccttccgcgg

SEQ ID NO: 46363 - DNA, 365 bp, Glycine max
  Clone ID: PAT_MRT3847_141867C.1
atgagcgatatttttagattcatattgcgagcatgcatacatcaatgatggaatttacatacaatcatttgcagagcattcttacatagcttcctttttttataataaaataagaaaaacctggattccaactcatactcccttttttcagttaagaaaagtgtgaaaacggggaggaaatatcgatctgaaaacaacaccatcctttccctggctccctacgcaaactaagcctcttcattgcaatctggtcagatgataataatgccatctgtatttttcttcagcatccaaaaacatctggaacaagtcctttcagcttcgggaccactaaacccgttggtttaaaaactttcccttgggaa

SEQ ID NO: 46364 - DNA, 1184 bp, Glycine max
  Clone ID: PAT_MRT3847_141868C.1
tttcggtccggattcccgggtccacccaatcgtccgcgaaataccaattctgtcccaaatattatactaacatattagaagctgtccaattccaatggttgttttctcttgtgttaaaacaatggttgtgcttgtccttgcgtttctaatctctgtgccttctatggttgcttctgctgtcagcttgtaccaagatgttgatgtcacgtggggagatggcagaggtaagattctgaacaatggtcagcttcttactctgtctctcgacagagcctctggctctggctttcagtccaagaatcagtatctatatggcaaaattgacatgcaaatcaaacttgtccctggaaattccgctggcacggtcaccgctttttacttacgttcagaagggtcatcttgggatgagatagactttgagttcctgggaaatctgagtggtgatccttacatagttcatactaatgtgtacacacaaggcaagggtaatagggagcaacaattctatctttggtttgacccaactgcagattttcacacctattcctttctctggaatcctacacatgttgtattctatgttgatggaagaccaattagggagttcaagaacttggagggagtgggtattgaatacccaaagaagcagcctatgaggttatatgccagtctatggaacgctgatgactgggcaacgagaggagggctagtgaagacagattggagtgaagcaccattcactgcttctttcaggaacttcaaagccaatggttgcgtttggtcccaatggggtttcttcatgcaactccacctcctcttctgaaaaagcttggctatattctcaacagcttgattccacaaaccagaagaagctaaaatgggtgcagaagaattacatgatttacgattattgcacagacctcaaacgattccctcagggtcttcctctggaatgcacggttcgcaccaagtcataagaaaaatatatgcaaactgcttttgtatttgtatatgtcaatatgtttgtgcattccattttcccattatactgcatcgcttgtcaatgtcattctttctgcaattattttggattcagagggcgtcgtaatgtaataattaaatgtttattaaagtaaaataaataaaaatgggatactatttctgagcaataaagtaagacttgc

SEQ ID NO: 46365 - DNA, 368 bp, Glycine max
  Clone ID: PAT_MRT3847_141869C.1
aaaagaggaaaactttaaaagaagggcgtcccaaatacaggctttaaggatcgaaacattagcgctagctttcttttaggatgtccactaatgatgaacgaagtatctagctagcttgaggtcatatacattaatcctacagaacaaggatctatcactgtttctttaccatcatccgggttgtaattactgtgcgttaataccaacatccgctttgttattgaaggcttttagatccatgctgaaaccagcaacgactatccttggaatttatcttacgtaacgcacatccatagagatcttgcccttgtcttataaaggccctgctaataccattggatgtagcttacacagacatgtcctcacta

SEQ ID NO: 46366 - DNA, 249 bp, Glycine max
  Clone ID: PAT_MRT3847_14186C.1
ccggaatttaagtactattcatatacccggagtattctccgacggctgttgcgacttctggactgaccatgtgtcgaatctggctcacatacaggagttcacgatggtatgagctagactacgctgcgtccatacggatgttcatgcagggcgacagcacatagcagattgccttcggtcccggattcacgtctagcagcgcagtctggaaggctctcaggaccatcatccctgctagagagagtagtc

SEQ ID NO: 46367 - DNA, 291 bp, Glycine max
  Clone ID: PAT_MRT3847_141870C.1
gtaagggaatcctctattagtctagccagaccgtgccgacaccgcgcttgcttgcgctgaaaatcctcttcatgaatagctcactccaaccctcgatcctaaccatctacctccccctccccctgcccctgcccaggctgaacccactggctgcacgcagtgcactgcccataccccttactcaccctccgcccctggttccgaaataccttcagcccgcccatcctactgcactaatccctttggcacgaacaccccgccctgaccctcaagctgatgacctcatcctcc

SEQ ID NO: 46368 - DNA, 747 bp, Glycine max
  Clone ID: PAT_MRT3847_141871C.1
ccacgcgtccggtttttttgaatctctgtggagggatggtgacatgaacaggcttaaccatgatccttctgatgatctgaatttgataattgtgtacatgggctggcatctcgtgttttccttatgaagtggttcaagtggacagtcgaacagtttgagcttctgaataattttgaaaatggtgagttccgcgtgatccagttggggagtggtggagagtacagcttagccgttcatcacacggacgaagaactacttgagtgggggctctctcctgatatggtagctgatcagaaacggcgagccagtgccagcaagggtgactggaatgatccatgttcctggtaccttgatgctttttttgatcatcttcctgactctgacgatgacaatgtggacaaacatgacgagacagattctttgagtgaatgttcatagtgtgcttagctagcttctgggtttggaattcatagttaacattttctagacagtagactgttctttcttttttgttccttcttttttttttttgttaaaagaaaaattcatttccaaaacagaggaaggttaagatggaaaacgatgtaaaaggttgttcctcgctagttggtgctttgtgtgatgcataatgcatgcatcttgtactatacatcatgacagaatttagaagagcctgaatatacagtgtttctcgagtttgtactcaatttgtgatgcttgatgtttgtgaatattggagttcattct

SEQ ID NO: 46369 - DNA, 192 bp, Glycine max
  Clone ID: PAT_MRT3847_141872C.1
ctttggaccccgagatatgtcattgccagaactaataccatcgaatccattgctaccgggaacaactgaggtacatcaacgcaggaaatgtgttactgtgttggggaacatgaatcacgagacctggcctgtatgatctacgcttccgtagtagggatcaagctcaatggggcccgtggcatctcgaactgg

SEQ ID NO: 46370 - DNA, 632 bp, Glycine max
  Clone ID: PAT_MRT3847_141873C.1
tcgcggactaaggtacgtgtacaatgaatttgtagctgctctttgtttaccatgtccattcttttgaagtgttgacctagtggatagtatgtgataggtttgcacatttttttaaagaatgaagtatgtttgaccaaatttgagggtggctaaagaaatgccagtgcctttattatataaaaaaaaaaaaaaaaaagggccccaaggcccccgcccctccaaaaataatggatccccccggcttgaagaattccaaatccaacttattcatacccgccacctccaaggggggccccggaacccattccccccaaaaggaagccgaataaccccgctcactggcccgccgtttaccaccgcctgactgggaaaaacctggcggtaccccacttaatccccttggaacacattcccccttcccccagtggcggaataaccaaaaaggccccacccaatcccccttcccacaagtggccaacccgaatggccaaaggaaaatggaaacggtaataatttggtaaaaatcccggtaaaattttggtaaatccactcctttttttaacccataaggccaaatccgcaaaattccctattaatccaaaaaataaaaccaaaaaaggttgaatggtggt

SEQ ID NO: 46371 - DNA, 321 bp, Glycine max
  Clone ID: PAT_MRT3847_141874C.1
cccacgcgtccgcccacgcgtgcgcgcgcacgcgtgcgcccactcgttcgtacggctgcgagaagacgacagaaggggaatcctctgttgtttctcacccgcctcggctagggttcggaaaccaaaaaggggtctgttttctttccgcgatgagggccaaggtgagttcactttttcactggtgtggcgctcatgtcctttgcctattgtgtttttattaagcgttgaggtctgtttgggattttatttatctctggcagaggaagaagaaccgtatcaggagtctgaagacgaatcgccttaagatgatacagagatcca

SEQ ID NO: 46372 - DNA, 378 bp, Glycine max
  Clone ID: PAT_MRT3847_141875C.1
ccctctgtcggtaccctgcggctagggttttgtctttcactcactctctctctttctccggtcttgctttttctctcatttcccttctctttcgatctgaataataatcaaccatggaaagacgtggctatggtggacctcgtgggccctaccgtggtggtggaggaggtcgcggtcctcgtggatgttttaccaacggtgaagttggtgaagaaagacgcccaagaagagcatttgaacaccacagtgggactggacgaggaaatgaattcaaacgggatggctctggacgtgggaactggggtacacagaatgatgacattgctgtggttactgaggaagcggtgtatgaaactgaaaagaattctgctgatgaga

SEQ ID NO: 46373 - DNA, 402 bp, Glycine max
  Clone ID: PAT_MRT3847_141876C.1
tacggctgcgaagacgacagaaggggctgctgaattgctccatgtcccatcaatcaaaataaaatgctaggttgcacctacttttaactgattcataataaaaagaaaattattaccttatgaattgactgtagattctgtattaagttttcctagtcaatgatcaagtggtaaattcaaaaaaaaatttaaaatcatatgactttgtatcttctcaaaagaagttaacattgttatacaacctgctgcaagcaaaacacaagatgtaactacgatgccaacagccagaattcatttcttctcatgtgcatgagcttaatatcatacaacataggttaaagcccaatcattgtgggcaaattaatgtagctcccaaccaccaattacgaaggtttacaacat

SEQ ID NO: 46374 - DNA, 155 bp, Glycine max
  Clone ID: PAT_MRT3847_141877C.1
aagacgacagaagggggggatcagtaactgcaattcccaatgcaaattttcatcgggcgtcaaggatgcactagtgtgcgtctaggagttgactgtgcgttttgtgcgtaacagggttcaacaatgaagagcacatgacagtggaggtagttggc

SEQ ID NO: 46375 - DNA, 815 bp, Glycine max
  unsure (1)..(815): unsure at all n locations
  Clone ID: PAT_MRT3847_141878C.1
acatatttcctgtacttcatctcaattgcaaaccaagagcttgagtttctttcctctccctgaaatcgcccctagaattttctccattntaccctttctacatcataaaccattgtaatagtaatggcgcccagaaatcgttaaattcagcaaccactttaacctttgaataactgcaggaggattaggaggtggaaggtaaaagggtaatcggcagttgcagatggagatttttcaataggcaacaaaccatcatatattacataagaagccaggggtaaaaattcacatagtttgcacataaaatgtaagaataataaaacattgggggaaaaagtttggtctccaaaatcacccagaaaagtaaaaatacagagagagaaagatggtttacatgaaaagccttggaaataatatcatcatggagtgagacatggtttctacaattagagcagctgtacaagcgaggccctatcagttccgccatgaatttggtcaaacaaatttcagattaaacacctcactacagcaagctcaatgatgacccgaaagtctgcaacaataagataagaagaaatatatggcgttagttagcgtgcaagagtaggcttgatcacaaaaatatttacaaccaacaggcgatgactcaaatcaaacattcgcaacaataaattaaggtaaaagaaaaagaaatgttcggcgcacaagtgtatgcataatataataatattctgaataaagaagaataaaataaaaatacaaaaccaatttcattcatcaagttcactgtcgcatcccccttctgtcgtcttctc

SEQ ID NO: 46376 - DNA, 157 bp, Glycine max
  Clone ID: PAT_MRT3847_141879C.1
tctcgagccgctcgagccgctcgagccgttgttttttagtttttgactagctgttgaaggtatctttggaaccgagtgctatttggaatatgagttttgtgatatcagttgtggatggtatatatggtattggggctttgcgagtttcgtattacct

SEQ ID NO: 46377 - DNA, 237 bp, Glycine max
  Clone ID: PAT_MRT3847_14187C.1
ttatggtgctgggagaacggatggccctaatatgagttgaccattttgtattgaaagaggaaagagactttccaagcttcattttgacaacaaaggagttatgaatgagactgatacccttattgagacttgcacaacaggaaagtgtaatgcaatatcatgaggacacaacagatgaagtagtacacaatttttattataagctgcacaatggaaaacataagacagtctacgaga

SEQ ID NO: 46378 - DNA, 330 bp, Glycine max
  Clone ID: PAT_MRT3847_141880C.1
agcaagctttttcttgttccaaccacaccacagcatagcgcatgggggggggaccctaaaccccggattccatgacaacaatctccatgggcagcttcctaagggtatcacgtcacggaagaagctcagcgtctcaaaatggcgatcaccgtagacgccgccaggacatggcctcaaagagctgcataggccgagcagcaactactggataggagtagccaccgctcatcggataaagcacctcaggaatagcaaaacctgaagcgggatgctctcatgtcgtctcatatcgcggcaaggcagagaacacccctatgcgccggctgagga

SEQ ID NO: 46379 - DNA, 980 bp, Glycine max
  Clone ID: PAT_MRT3847_141881C.1
ccacgcgtccgcagaggttttctttttgttaatagatagcatttcttaactcattaggaccctctgcatatggttgattgatattgcagctagctggaattatcaactggctcagatgatactaaaggcaacccactcttcatatggggtataattgactttttccattccttctgtgtccttgtggtcaaaaacacagttgtgcaactgggtatatattgaacccgtgattcaccctccaacagtcatggaggagcatttgattctaaaagttgctgatgaccacataaaaattgatattttatgaccactgaccagtaattaacctcccaaccatccccattaaccaacaaatttaatacctcaaatatgatcactcacacactatagcacaacagattttgcaaagtgtctgtagcaaaatactctaatatcttcgtttttttatatcatataaacctatatatagtgggataatacaaatgagcaaagaaagaaaaccttaatgatatgatttaattataaagatggagctactagactataggccatttagttaactgtttctggttctggaataaattttcaagcatagacataacctgaaattaattatgatcacctattacgcaagttacatcaccagtttagtgacatagctttccctatatatagatccgaattcagaatccagaaaggtaaacagtgacaacaaagacactgttaccgtcaatgaagaaaagaaattagtaggcacacacaaactacatgccagaggaaaaattacatttacaaccgtaaagggcacgaaattgagaggacagggtttgtcaagtttaaggtaacgtaaggcttttccagtcgaacatgagttgacaaaagaagattcagacccccgcacaggaggtgtgtgggtggaaggtagggcgggcccgctctctaagaaggattccaaaggactttaacggtaacggcggtgg

SEQ ID NO: 46380 - DNA, 557 bp, Glycine max
  Clone ID: PAT_MRT3847_141882C.1
atccttttttttttttttttttttgttctttttttttttttttattttttttttggaagcaataaccctttgcgaggttagctacactaaacaccacacactaattttgggtaattgcccgaaaaggcctttgttaataaaaagtcccatcacggagaattctatcccgcccaaaagaaaaaaagaattggaccccggcccttttatttttaccgcactactgagcaacggatcccttttttgtgcaccactaactgtaccggaaactatatcaactccctccggatttttcaatgattgcgttgcccaaaattagccgccggtcttcccaatgtaggggagcttcttgtttactgtaatacactttcttaacaggacaccggaaggggaggaagggacatttgctctttttaaagggctcaatggggtggacactatgttaaatacgcccaggcgcaatatataaaaaacagctggtgaaatttattttggaagggggtgcttgcatgggtctccataaagtactgagaatgggctattaggagcaccctttgaaa

SEQ ID NO: 46381 - DNA, 563 bp, Glycine max
  Clone ID: PAT_MRT3847_141883C.1
cccacgcgtccgtaaaaatgcttcctgcccctttggtcggtttcattttgctgttagggcattttgtgtttgtttctgtcggttccaatttccacgtgctcaaaaaacggggatacgacgaaagcgaaagttacagcagtgaagaagagccaacgtacaagcgccacgggtatggcgggcgctttggtggcaaacgccaccgttacccaccggcgcatggcaagggacaccgcccgtcgacgtacgatggcttcccttacggcgattctccgcttcttccccaagtcatcgccgcccctccgatgcctttctcgcctttgcaattgccttccatttcgaaagcccaaagcgaccttggcgcattgcaagtcgcttctcctgttttggaaggctctccaccgaaagaatcgcctcctctcgacgcttcccaacctttgaacggcgccacggcaattcagtcgcctgctgcagcgcccgagacaaacataatgaattctttggcggcttcttctccattggcaacatcgcagcaattggcatccctttgggtgggcggaagaaag

SEQ ID NO: 46382 - DNA, 410 bp, Glycine max
  Clone ID: PAT_MRT3847_141884C.1
agtcggtgggcgccctttttgaggaatggtcggatttttcattcagggcatttcagacacattctactgatcgtcatggactagggacttatccttcataaacccatgtgctttagttacagtgaaagcaagaaagccttacttgattcttcgacaaggaaggaactcgggacttgtcactgtcacagatggggcagcctaaggttgataatgaggatggagctgatggggttggtgacattactatgtgcaacccacccgataatgcgttggccatctcacttatcatggggctgaagaacagattagatgaggcagctaggatgaatgatgtgaaagctatagttttgactggccaaggtgggagaaattctggtggaggtgatatcacagttaagcaaaaggttcac

SEQ ID NO: 46383 - DNA, 284 bp, Glycine max
  Clone ID: PAT_MRT3847_141885C.1
ttattttttttttttttttttaaaaaaggaccccaactaaaatgtgcatatataaattcctattaaaatcaatgtcggaacactatgctaaaattgacatccaaggcagcaaaatacactttggtgaacaatgcaccaaaattgaaaagaggggctgaaaaataaacaaaaaacgctctttaattgcttggggcaaggagaggataggagagcggacagatgctttaatgccttctcgctgagcgtccgcatccctgcagggctcaggcctgtcaacaattctg

SEQ ID NO: 46384 - DNA, 430 bp, Glycine max
  Clone ID: PAT_MRT3847_141886C.1
gataacaaacagaactaacattaacgggacaatagaggtcaacacaaacacagcttattttcaaaggtgattacagacccattacacatcacatttcttcttaaaaagtttgacaaaatgcaacatctaacatcacacagaaactatgtgcagcttaaaacccctgacgatgactcaacaccaagagcagagtcgactccttctggatgttgtgtccaccgaaggtccttccattctgtatgtgtcagccaacaaaagtaagcctgtgctggtacggtgggattccttgcttggcctggatcgttgccttcacattgacaatggtggctgcactctacacctcgagggtgataatcctacccgtaggggtcttgaccaagatctgcctaccactccgaagactcaacagcaagtggagagtggactcctt

SEQ ID NO: 46385 - DNA, 419 bp, Glycine max
  Clone ID: PAT_MRT3847_141887C.1
catttctatcatacatttctacaatatccttccatagaaaaaaagcataaccatgtcccatatcctaacatcaactacccccaccatgcaatttggcttggaaagcaacaaagacataagagtatgatttttcaaaagaagagtgactaatgtagatcctgcgccaaaaatctacagtgccaccattagatcaccaaagggagtggaaatcacagtgaagcctactagccttattttctctaaaaccctgcagaagatgagcttcaaaaagttcaaagtagttgtgattgtgaaagacacatttattgcaaagtaagaaaattgtatcatcaggtttcttatatggagaagcccacgtcacattataaagggccatattgttatcaacaatccttaaggttatggttagcacttagcag

SEQ ID NO: 46386 - DNA, 490 bp, Glycine max
  Clone ID: PAT_MRT3847_141888C.1
ggtcggaacctttgggctgatttatgtgcttgcatggtcgtgagaagatgatagaccgggacagtagtactacataaagtaccgaacgtaaagatccaagcctaccttccgcgccccgtccctccttctaaaattaaatacgctgaatatacgtggtaatcgtgatcgtgtcgataagatcagtcgtatgcaagcgtcctaccctcccctcgtacccgcgcgtaagataactcccatatacacgcagcctacgccataactattacacccgactgtcaaaggaccaactcgcacaggagcacaccacgtacatagcacatcgagactcgacgcacagtccgtacgacctacacaaaggtcgccccatccacacttccctacatcacgttacgtagtaagggaaatagtcacggcgccaccgcagagatcgagaagaggcaaaagcctatccccggcactgaccgcaccacgtcccgaacatcccagagtc

SEQ ID NO: 46387 - DNA, 516 bp, Glycine max
  Clone ID: PAT_MRT3847_141889C.1
atgatacactatggtgtcgggcttatggaaatgaactaaaaatcctgaggtggaaataccaaatggtttaggaggcattgagaaacaaatgattcggtgggagatttgcatttgaactctgaaaaactccgaggggaatgaaagctaatttgccatcagcccttacaatctacaattggggcatcggaacaaataaagtccctagcaatgcatctgaaatgaagacatgcgaaccaatttcaaaggctgcctaagagggggctccataaaccaacctcttagcttgtgagaggtggacagctccaaagcacatcgggcaaggatcacaaggagcatatctttcacagtctgaaagttctatctggataaggcgtccacaagccttgcttatgacagagacttttgcatgagcagaggggtctgtgttgctaataaccatgtcgtgacatctagcaccaatgtcatcagtacaagctataatagcgcccaagggacccccatcttcacagtctaccc

SEQ ID NO: 46388 - DNA, 347 bp, Glycine max
  Clone ID: PAT_MRT3847_141890C.1
gcctggttttttctattgtttgaaaaatttatcacatgaaggggcattcccgccatggagagatccatcgtgtttgaatttactgccacaacaattggaaggatagttgtttgcttttaattttctgtcatgatgcaactttttatttttgttttgagtgatgcaattgatttaaactttactgaacattgcttaggaggagtgctgccacatgtgatacctcgtgggatataaacaagtttgtctctttgatgtgtttcttttccttcattttatttcttttatattttcggcttacctcgccttagatcgaacatgatttatattattcccacggattattttgt

SEQ ID NO: 46389 - DNA, 254 bp, Glycine max
  unsure (1)..(254): unsure at all n locations
  Clone ID: PAT_MRT3847_141891C.1
ggtaaaataaaaagccttgagattgaatttgtaaattcaccttanaaccctaatcccctttttntcaatagactaaatcattccatgcattcggtgcaannnggactgacaatagaggcacgcggcaccagattatttccaaattgaagcgtccaagagtccaaattcctcattctctatgagcnntnaggnagtttgcagcaaaaaagattgaagcaagcactgcgagaggagatnaagtgagggtgaagaga

SEQ ID NO: 46390 - DNA, 832 bp, Glycine max
  Clone ID: PAT_MRT3847_141892C.1
cccacgcgtcctcaattaccactttccattatttttattcttaaaaaaatgaccaaaaaagaaaattgcgtaatcctagaaacgtaaaaccaacctcaacctaacctaggaaactccgtcaccactttccctctcccatttttatatcattcgccacacacatcatatgtcttccgcactgacaaaaaacgatatccaacggtcatgaatggcggcgctgaggcctccctcaatcacaggcgcaaacaccaaacagctcccgccgacggcgctaaaggcgttaaggtagcaaacggagccatggggaagccgtcctcttccaagcactcctgcggcgcgtcgttcatgaaatggaccgtggctgacgctgtccacgtggtgacgcaccattggatgccgtgcttgttcgcattggggcttctcttcttcatggccgtggagtacacgcttctcatggtgccgccgtcgtcgccgcccttcgaccttggcttcatcgccacacgctccctccacgcgctcctcgagtcgtcgccgaatctcaacacgctcttcgccgggctcaatacggtacgtcgtttacactctctccagatctgaatcttcagatctgaacgagtccgggtattttttttttcttatttcagatttcgttgtgggtaattgcggaatcgaatttgtttgaaggaaatgcaaatgggttggtctcaaaatctgatatttttactgcgttttttaggttttagcattattcactttgcattaatgggttttgacatgggtaggtgtttgtggggatgcaaacgagttatatcttatggacgtggctgattga

SEQ ID NO: 46391 - DNA, 239 bp, Glycine max
  Clone ID: PAT_MRT3847_141893C.1
aaaaagtgatagcagccggtggtggccaaaaaagttgccaagaaagggttgttggaataagtaccacgactggaaaggtccatcagggcggtgggggatggttttcgttattcctctataaagaataacttgtgctgtgataccatataagaattatttactggaagttgtgtgtcgatgtagaccacacctcatgctatttctaatatggaaaagggaatcaatattgattaaaaaaa

SEQ ID NO: 46392 - DNA, 441 bp, Glycine max
  Clone ID: PAT_MRT3847_141894C.1
gcctttcgtccgtttacgcgtccgcttaaaacttttgccagtttgcaaattaattaagacacagagagagaaaccacaaagaagttgcatattttgcttctttgcggactttgcctttctgggtgtaccgcacaaaaggctgaccgttttctttacttccattgaatatggatggctggcgggggatgtggagaccggccgtcgtggacggaggtggagtcgcctctacccatcatcactttgtcgccgcgggctgggtccatggagtcccttttcaatggaggattcagccctgggcccatgactctgctttctagcttttggggtgacggggatgatggaaagttcttctctcacctccttggtggagctatgacttctttcgagggcggagacgtcgcggacgctctaatggacttccctggcctctttttatttttc

SEQ ID NO: 46393 - DNA, 528 bp, Glycine max
  Clone ID: PAT_MRT3847_141895C.1
aaaaaaaaaatttttattttaaaaaaaaaaaaaaaaaaaaaaaaaaaaaaaaaaaaaaaaaaaaaaaaaaaaaaaaaaaaaaaaaaaaaaaaaaaaaaaaaaaaaaaaaagggggggcccttttaaaagaaccaaatttaactcccccttctttgcaagtaaaaatttttttttaagggcacctaaattaaaatccctggcccgctttttaaaacctcttaactggaaaaacccttggtttccccaaattaatccccttgcaaaaaaacccccttttcccaattggggtaaaaacaaaaaagcccccaccaatacccctttcaaaaaatttgccacccttaattgcaaaaggaaaccccccttttacgggccattaaaccccgggggtgggggggttacccccaaagggaccctttaattttccaaccccctaagcccccctttttttccttttttcccttttttttttgcccaatttcccggtttttcccctaaaaatttaaaatgggggccccctttaaggttccc

SEQ ID NO: 46394 - DNA, 248 bp, Glycine max
  Clone ID: PAT_MRT3847_141896C.1
gtctgagcttgagagagcgcaatggaaggtatctcagtgggttcgaagaactactggagaagaagcattaggggtataccaaacattacacgtctatgatcgatgaccgaaggaaaccgatcacctcgcatgcttccagacaaggcggagacgtctcataaagattgctcgtaagagcaggaattcccacatgctctgctccaaagaaattggctctgtgggccagacacgcctacatcaggctgatg

SEQ ID NO: 46395 - DNA, 567 bp, Glycine max
  Clone ID: PAT_MRT3847_141897C.1
caaccaaccctacggttcagttgatttacattgccagaggaagtggcaagattgaaattgtggactttagtggaaagagtgtattaaacactcaagttgaggctggtcatttgcttgtcgtgccacaattctttgtgcttgctgaaattgcgggtgaagaaggaattgagagttactccatcgtaataactacaaagccattgtttgaagaattggctggaaggagatcaatttggaacgccttttcgcctacactgcaacaagtgtctcttaacgtggattctgattttcaaaagtttttcatatccaagatcaaggaatctaccaatctcatccctcctactgtttagttcgatgcgtgtgatgtacgtactaccgtatttgtctatgtataattttcagatgatgatgatatcgatttaagaaaattctaaacttttatctttctaaaagttatgccgttgtattgcttttgttttaaagaaaatattttcgtcagaatacttctttaagttttatatatcgagcaataaatgaatggaaggatatgaatgtgttgacccaatt

SEQ ID NO: 46396 - DNA, 367 bp, Glycine max
  Clone ID: PAT_MRT3847_141899C.1
ctttgatctcttctaacttatggtctatgttaaggctcaaatgcgtcgaggtacatcttgtggaggtagtgcaaaatctgtgaagaatctacctattccataggatacttctaaatattttgttaatcttgctgtcatttctgctcactatgattcgaagaccagatccatgcgtgaggatccacttccagatccagatccggatgacatgatgtatttggagataaccaatatataaacattgagctagctgtagatatcatggaattaaacatacatgctttgaatgcatttcacatgggacaagatgtgcacatgcaagcatctccatcccatgctgaattactctataagaatttcaagggca

SEQ ID NO: 46397 - DNA, 263 bp, Glycine max
  Clone ID: PAT_MRT3847_14189C.1
tgagcacatctcagctcatctcggctataggcctgatatgggattctgccagtcgcccgctttcggttttactttcgaaggaaactgtgaatcaggatgataaaggattccagaaagagaaaattctggatagcgttgatgagagacaaaatgatttggtatatgcttcaaccgacattaagtactatcctgttactgagggaggtgcacagattgtgcagggaaaattggatttccctaaggtaatgcagaagatatcagta

SEQ ID NO: 46398 - DNA, 1055 bp, Glycine max
  Clone ID: PAT_MRT3847_1418C.1
aactcgtcaaaaaaatgagactattgatataaaatagttacccgagagtttaatatctttgaaaggccagtctattgatagaaacaacaaatcaaacatacataaacaaatgaaatagacacaacattatgaataacagcaatcaactaggttcatgacataagtttatctttattctcctaaggcagaaatttgactcactaaggcagtttcccagatcgaaagatggcgaatttggaggcagtggagtaagaataattgatttcattctccttcaagaactcctcaaggaggcgtttagctctttcaggatcagaactctcgcattcgatctcatagagtgttccaaaatcaaaactggtttcatccacctccaatttcaaacccttccaatcatacacactcctcaaattcccaaaccctcccaaccccaccaatcctttttcagttccaaattcctcttgcaccctcttcaaaaccctagactccaccgaccccaacttcgccggctccgccacgcattcgcgcccgatgcttgggtccagatcctcctcgtcctcctccacgcggctcacgccgtccaccagcaccgcccgcgccttcagcgaagcgacgcagcgctcgtcgtcgccgtagaagcggaggcggaggacggcgcggcgcgcggagagctcggaggcggcgccgtcgaagaagaggttctgctggcggtgggtgatgacgtgaaagggggagagtagagtggtgacgtggcggtgggcgttggcgtcggcgagacgcagcttgacttcgacctccattggggaagagaggagggagagtgcggttagggttttacgaggagaggccgatgcgatgggccttggaagagggatcttcgccgccgcgatccagctgacggaggagagcagcggtgccagcgggggcggtggtggtggtggcagtggtggaggcgttgcggcggcgagcctcctcgagttcttctttgtcttcgatcttgacttcgattttggttggctttcttcgcagcattttgtactcgagccgctcgagcc

SEQ ID NO: 46399 - DNA, 268 bp, Glycine max
  unsure (1)..(268): unsure at all n locations
  Clone ID: PAT_MRT3847_141900C.1
ttaacaacantactaaataatattaatanaattagtataaanaaatactaatatttacgtgttatcctaaaatcatattcttcttcttgaacgtcaatccgatcagattctcaagtcaatggttttcttgatttagggttnccttcaaagaacacaaantaagcttctttggaancctagttttcntngttctcncagcctangttgacnttctcgngaaaaggaattttctttgtgtgatgggtacattggnngctggatcaangga

SEQ ID NO: 46400 - DNA, 1462 bp, Glycine max
  Clone ID: PAT_MRT3847_141901C.1
attttcccccattctcttttaaagccactttgacctcactttactcccaagcagattcagatttccaacacaacttttttcacataaatgcccaaattcttgctcaaacaaaactgagagtactatatatctgcctttacttgagatctgatcatatccttcaataaagcagcaaagcagcaatgagatccaaaacaacccaattcacatgtaccttcaaggtagcccttctcagccttgcggttttctgcctcttcatcttggtattcaggtcatccatattctcattgtctcctcaactcacctcacaaaccaacatgtcaagctcagacacaatagtaccagtgtcaccacaagaaacagaaaatgcaggcacgccatcatcatcatcatgcccaaattcaccccccttgaaccccccatgcaccaaggcccctccatcattagccaatgccatcatccactatgcgaccgccaacgtcacgcctcagcagaccctccacgagatatcagtctcagcaagggtacttgagaagaagtctccatgcaacttccttgtgttcggccttggccatgacagcctcatgtggacatcgctaaattatggcggccggacggttttcctggaggaggacaagtcctggatcgaccaaatccaggagaaggtaccctctttggagtcctaccatgtcatgtacgacacacaggtccaccaggctgaagagctcatgaaaactggaatgaaggaggattgccagaaggttacggacccgagattctccaggtgccctcttgcacacaaggggctcccgagtgaggtttatgacattgattgggacgtgatcatggtggatgcacccaccggctacttcgatgaggcgccagggaggatgagtgcaatctacactgctggcttgattgcccggaacaaggaacgcggccaaaccgatgtttttgtgcatgatgtggataggaaagtggaggacatgttctctaaggcttttctctgtgaagggtatttcaaggagcaagaagggaggatcaggcacttcaacattccaagccacaggtctcgtttgtggaggcctttttgcccagagtagttgaagaacacaatttgctccctttatttcatctcacatgagccatttattattgttatcatcaaaacttatataattactatatgatatgatgtgttgtggacgtacttctattttttgcgattgatatttggaattcattctgatttacacaagtcattaatggctctggagatgtcatcaattcagggagttgctttgttggaacgaacaattgttgcttatacctgcccctgcttgaccatagtctgattcaaaagtctttatatactactattattccagaaataatgtagcaattgaaatcattctatacttacattttattaattcttgcgaaaaaaagagcgtcctttcct

SEQ ID NO: 46401 - DNA, 388 bp, Glycine max
  Clone ID: PAT_MRT3847_141902C.1
gagaaggtggggggagggccaggcttggctggcctgcggttgcctttaaggatcccctcgagcaattatcttggctggatggggtaccccgtacgcttacaggttttcacaacttaatatccaccaacaaattttttcgggttcttaaatttgatcgtatcgccggagtaagaaaacagaaaaacccctgagataaatctcaggggttttcgaaataaggtggcggtgcggacgggactcgaacccgcgacccccggcgtgacagggcggtattgtaaccaactgagctaccgcaccaccgaatttcttttatccatttgactggaacttcagtagacctctgctctatgagtcataccggttaaatagatggctggcagtgccctac

SEQ ID NO: 46402 - DNA, 861 bp, Glycine max
  Clone ID: PAT_MRT3847_141903C.1
cggccgttcaccaacgtaccaatcttaatccttgtttttctcatttgtcccaaacaaaattaatttttgtggaacaatttttccacacccccgacttcctacctgcagagtcacgccatcaaatttcagcaaagtgatggtggaagctggttttccttttgtggtaaaaacacataaataagctttcccagttgcaagctccattgtaataacagctaccaacgcaccaatcttaatccttgtttttctcatttgtcccaaacaaaattaatttttgaggaacactttttcgacacctcagaatcccacctgcagattctcttccatcaatttcagcatagtgattgtggaagctcaagaaagggattggtactgtagataggactaggagtccctgaaatgtatatgcctgtggctacctctgccattcagcgcggtggattgcctactgacagtggggactctgttgaggcgttagaccaagttccgcgatggaatgatgctgatcaggtcttggggtttgaaacttcattttctagttcacactttcccgatcctttagcatcgccctcaagggcagacagtggcgatggcagtgagtcggtgtcaaagtttcctgttgacgatgaagtcaattcgaagatatatttgtggagggggaatccctggaatcttgaggtggatgcggtggtaaattcaacaaatgaggatggtcaactgctcaatggtgcatataccttttatgaagattgatggagaagaccataggaagcaaaaagaattgcatgttgaattgcaagaggatgactagatgcccaaagaagttttctagaaggctctacagaaagaaggattttgtat

SEQ ID NO: 46403 - DNA, 201 bp, Glycine max
  Clone ID: PAT_MRT3847_141904C.1
agaactcggaagttgataacgtttttttataacacggttgaagttaaccaacgattctactctcctgatgtgtagagacactactccatgtgttaagttcagactggtgctagaggatataacgttacaaggattgtggcggagagctcatggactgtttttgaatcttggacggtcatggatggctgcagttgagggggc

SEQ ID NO: 46404 - DNA, 356 bp, Glycine max
  Clone ID: PAT_MRT3847_141905C.1
gactcacgtgcgctctaaagagaacttagaagcgaatgtggcagcgactggggcagaatcaccatgccagctacgatgccgacaaccaactccagattcgactctgaggcgttgactcaggcgttgattccggagactgggtcacagactgtatcacaatatatctagattaatgcaaggctgaatacagtgctgcaaatagtcctgtgattcatactgtctatctggataactatggtgatgatgatggctataaggatggcgtataataccatgtagattaccatcttatcaagcaatgcatcagctgatgcatctgctgatattacatttcatatatgatctgatgtcagtta

SEQ ID NO: 46405 - DNA, 457 bp, Glycine max
  Clone ID: PAT_MRT3847_141906C.1
tttgggctgattgtagtgcttggacgaagggcgaacaaccagtagtccccctcagccttggcgctggcgcggtcgcccaggctcgcccaaggacgctaagggccttaactaattagggcgacgttaatggtcttaattttcctgtcctgcggggctaacctgcggaccccttctctttcttccttactcttggtcctccttttggtccggaacctggacctggacctgtactacttgcgaatatatgcgcggatcggagggagatctttagagtgtatgcgcggaagtcggcgtcctttggtcctcttaatgaggatgcgtcggccgagtcttaagatgagaaggcgtcttaagctagtgcggagagtggtaatcctgctatgaggcccaaggcttttgataatggcaattcagaataatctaaagttaatacgtgctatggggcctctgccgctat

SEQ ID NO: 46406 - DNA, 489 bp, Glycine max
  Clone ID: PAT_MRT3847_141907C.1
tctcgatcgaactgtccaaggtcctgtcacctagtgtacaccttaaggtgggtcttctggtggtgtgtgggttaatcgtggtttttgcgccgcggtgtcgcggctgccgaataagagccggcggcatctgggcaagcaccagggcacaagtaatccactcggcaattcggcttgcaccatgggcagctaatactgcgaagtagacagtttcgcttgggcctacggcgacataagcctaggcgtaacgaccacgtctacagtaggaaaccaaaacacaaaacacaaagacgatgcccaacaaagaggtagattgtcgcgtgacaacgtatacagtttgacgtcagcagcaccgtatgccccattccaactgtagagcctacgcgcggccgttcagataaaacactgggcatgcaaaccataaactagtagggacgcgattttgagaagggccaagggcaggagccgctctgtatctaatggtactatggg

SEQ ID NO: 46407 - DNA, 2247 bp, Glycine max
  Clone ID: PAT_MRT3847_141908C.1
ggctggagaaagaaatgacctgaagtctctatatattccaggtaacgaagacccccacaacccaatgaaagcgtaaccatgaacggcacgtgtagcggagtactaggccgccgttacacgctactgctgtccgtcgtcaccgtttgaattacccaccgctactttgtcgtcattcttcttcttcttcccttttcattgaccttttccttccttcgtcctccaatggcgactgttccgcacccattatccctcgcaagtgtaggttttgctaaccgaacctcctccatctccagatccactctcaaatgctgcgctcaatctccttctccttcactagttgacaacgcccagaagtttctcgaagcttccaagaaggggaacgtcattcctctcttccgctgcatattttccgatcacctcactccggtgcttgcgtaccggtgcctggttaaggaggacgagagagatgctccgagttttctctttgaatcggtcgagccaggccaaatttctagcatcggacggtacagtgtggttggagcacagccgtgtatggaaattgtggcgaaagagaacgtggttactattatggaccacgtggaagggcgcaggagtgaggaaattgtagaggatcctctggtgattcctcgtaggatcatggagaagtggacgcctcaactcttagatgaacttcctgaagcgttttgtggtggttgggtagggtatttctcttatgatacaatgcgctatgtagaaaagaagaaacttccattttctaatgccccagtagatgacagaaaccttcctgatgttcatctgggcctttatgacagtgtgattgtgtttgatcatgttgaaaagaaagcatatgtgattcattgggttcgggtggatcgatattcttcagctgaggaggccttcaaagatggaaggaaccggctggaaactctagtatctcgggtgcatgatataattaccccaaggctggctacaggttcgataaagttatacactcgtctctttggtcctaaactggagatgtcaaacatgagaaatgaggagtataagagggcagtattgaaggctaaagagcacatacgggctggtgatatttttcaaattgtactaagtcaacgttttgaacagagaacttttgcagacccatttgaaatctacagagcattgaggattgttaatcctagtccatatatgacttatttacaggccagaggaagtattttggttgcttcaagtccagaaattcttacacgggtgaagaagagaaagatcaccaatcggccccttgctggtactgttagaagaggaaaaacaccaaaagaagatatcatgttggagaaacaacttttgaatgatgaaaagcaatgtgcagagcacgtaatgctagttgatttggggagaaatgatgttggaaaggtctccaaaccgggttctgttcaagttgaaaagcttatgaatattgagcgctattcccatgttatgcacatcagctcaacagtcacaggggagttattagatcacttaacaagctgggatgcattgcgtgctgctttacctgttggtacagttagcggagcaccgaaggtcaaagccatgcagttgattgatgagttggaagtcgcaagaagggggccctatagtgggggatttggaggtatatcattcaatggcgatatggacatagcccttgctctgaggaccatagttttccctacaaatgctcgttatgacacaatgtactcctacaaggataagaacaaacgcagagaatgggttgcccatctccaggctggagcgggaattgtggctgacagtgatcctgctgatgaacaaagagagtgcgagaacaaagctgcagctcttgctcgtgccattgatcttgcagaatcttcatttgttgataaataatttggattgatccatcatcagtgatgctccttgataactgaggtgtgcatcctttttaaatggtagagaggaagtttgtggtgtgggcagatgataggggatatgaattacggagaatctgaaactttgataatgttatgacagaagtgatgaacataataaggtatttaatgataatgacagctttgtgactttagttaagtcgtcgtttaagagacttcaatagccatttccgtcggtccatcttaaaccaaagaaaggtgcctttgacggagtttcttttgctatcataaaatctcaccctactgaacttgcaaaccc

SEQ ID NO: 46408 - DNA, 577 bp, Glycine max
  Clone ID: PAT_MRT3847_141909C.1
agaaggtagagagtagacccacgcgtccgtacggctgcgagaagacgacagaaggggtgtgatgatggtaacaagaaggagaacaagagtgttagtgagtggtgagagtgcgaagaacgtgagggctacatatcatttatataaccctgagcagattggttggaacttggtcactgccagtgcctactgcgctgcatgggatgccaacaagcccttggcttggcgtaaaaaatatgcatggactgctttctgcggacccgttgggcctcgtggcagagaatcttgcggcaagtgcttgagggtgacgaataccggaactgggactgaggctacggtgaggattgtagatcagtgtgctaatggaggcttggacttggacgtcaacgtgttccgacaattggacactaatggagtcgggaaccagcagggtcaccttactctcaactatcgtttcgtcaattgcgctgattgacgaaatatctcatctcagctatctctatgactacaccatcaataaaataaagcgctgttggaattaaattcaaattaattaaacaaacggtgctattcgaaactt

SEQ ID NO: 46409 - DNA, 187 bp, Glycine max
  Clone ID: PAT_MRT3847_14190C.1
aagaatatgatcttagcttggtgcactatgtgatttgactttagcccttcatgagttagtgtgcgctatgtaatttgagaacaaaagaaaccatacgtctagattctactaacttactaggaagcaaaacatgtttatacggctagacttccacctacttgattaaattaaggtgcaattattattg

SEQ ID NO: 46410 - DNA, 158 bp, Glycine max
  unsure (1)..(158): unsure at all n locations
  Clone ID: PAT_MRT3847_141910C.1
atgtctcanatggagaacgatgatttcaggtgattcacagtnagttcgtcacttcagangcgtgcttgtttnagtaacaacncgtgatcgagagantacgacgngctcgtcggttattngcacccgaagngnantcttnatcctgatgangtggtata

SEQ ID NO: 46411 - DNA, 305 bp, Glycine max
  Clone ID: PAT_MRT3847_141911C.1
aaacacattgaaccatgaaaattaaggaggaaaatataaaaaaaagggcagctgggatataattattttgcatataccagaaccagatccatatttcttgcctgaaacaaaatcttggggggggggggaacacagaggtaaacctatctaaaccatagggaggtgttttacaaaaactctttggagggggtcagacctttaaaagccaaggggtcaaaatcttaatattaccttacaccactttgtcctgtggttcccgaaataggcggcctaaaaaattgccaaaaatccttgggttgggacag

SEQ ID NO: 46412 - DNA, 157 bp, Glycine max
  Clone ID: PAT_MRT3847_141912C.1
tacggctgcgagtacgacagaagggggcagacaaccccttcaacatttctcaccctcggaattcatatcgatagagttttcatgatacatcaaacactggggcttggacttggtcttgacctatggacttgctagcattccataatccatcaaagaa

SEQ ID NO: 46413 - DNA, 783 bp, Glycine max
  Clone ID: PAT_MRT3847_141913C.1
cggtccggattcccgggtcgacccacgcgtccgtgcgtctcttcaacctctcgatttggtttcagctggccaatttttaagatttataatgcgttttttcttcattgcaaataaaaaataaaggattttgttagatgttatttgattgactgtttttattttcattttttaataaatttgtcgcgtctagggattttcttcttctgtgtgggttcctcaaaactttcgaaatgaaagagagatttctacgaaaaatcccaatttttgggattttcactttcagggttttatttatttgaaaatttttctttctgggttttgtttatttgaaattttcacttttaggggttttgctaatttatttgaatataccttgaaagattgtagaacgtgtccatgtggaagctggtggagatactgggagtagtgaaaaaatgatactaatacaacactagcgatcttcatggtctaattatttatactgggagtaaattgtcaaattagtatatgaaaaatatgttgtcaatcatattagtttatgaatgatggaaaccatcaattagttataaggtcctaaaatgtgcaattttaggtcaaattaattctcatataatgtagatccactagttgcggatccaagtgctattgatattgtctgacgtttgtagatccactagttggttgtgtatgtgttctatcatagggaaaaataaaatttgtaaattctaacagtcgtagctcatgttttattttgttggtgtttcctttagcttcttcccttga

SEQ ID NO: 46414 - DNA, 237 bp, Glycine max
  Clone ID: PAT_MRT3847_141914C.1
tcgctcaagcgtacgctcatagactataattatatctctctaatctgaaaccgacaatggcgggttcaatcgcacatgctatgatcgactatgggctgctagctatccttaagctgggcttgtaagctgcctccgatgactggatcattgacgctaacaaaaagggctccctcaacagagtcaagctcgactccggaagggactgctggaccatccatatctacgaccaatgaatct

SEQ ID NO: 46415 - DNA, 559 bp, Glycine max
  Clone ID: PAT_MRT3847_141915C.1
aaaaaaatttaaaaaaagatttgtgatatctctctctcagtgacacccaaactcaaaacacactcaaacaatctctgttcactttaacaatggcggttttgttgcctccaacattctccccacttctactaaacaccaagacagattttgggtcaccaccatttcctcttctcaccctctcctcctcctcacccacctcctcacccctcttcgtctcttacaccaaatccggaaatgggttggccagtgaggacaaaaaaatcttgcttgagaagtatggctacgatattgatgctgatgagtacttttcacagtcatcttctaagtccaagaggagaaaggagcaaccaaggagaagaggagggaagcaagtgcaggacccaccagaggaccctaagcctcctcgtgtaacccataaattgcttcaggttcttggaggaacagctcgaagagtgaagctactttcaccaaagggcatggatgtgcgccccatgatggaagtggtgaaaggtgcagcctttgatatattacaggcagctggtggctgtcctgcagcatt

SEQ ID NO: 46416 - DNA, 556 bp, Glycine max
  unsure (1)..(556): unsure at all n locations
  Clone ID: PAT_MRT3847_141916C.1
gacacttccaatttcaaaagaaaaccaaggttgggaccagtgagtgaaaattaggtcagaaccagattatggaaattgtgatttccttgatcatactctttgtggggatagcaattttggtggtcatccatgtctgcgtcgtggggagggccttcagagggaacaacaacgaagaagaagaagaaggtactcatcgcagcatcaatgccatgaagagaatgtttggcggcgacagcgttggtgacctgaaaaaccttccttgctttccttatgaagagccaaaagagagtactaanagggtgttgtggcctagtggattgtgctgtttgcttggagaatttcaaggttggtgatgtgtgcagattattgcccaattgcagccacagcttccatgtgcagtgtatagactcatggatactgcagacacccgtttgtcccatttgtagaacatgggttcattcaccagttgtgagggaacaaagtgttgtttctgaaagtttagaaattgtaacggaatagaacacatacatgtgtatgattagttgaatttcagcac

SEQ ID NO: 46417 - DNA, 199 bp, Glycine max
  Clone ID: PAT_MRT3847_141917C.1
taccccaattcataacacttttcacgtagtatggaccctgctcacttttctccttccaaacattttcaattcaattcacaatttcaaggactggtttaatgctcccttttaacacctactgtatctctctctaactgatgaacaacaacaattgatcattccgcaactgcatcatctaagctgcgcttttttcttacac

SEQ ID NO: 46418 - DNA, 577 bp, Glycine max
  unsure (1)..(577): unsure at all n locations
  Clone ID: PAT_MRT3847_141918C.1
tttcatatcnaaggtttaactgttaaaaaggaggatnggtgggtaaaattgcagactagttcaactacttatggatcagaaattgtgactgaatgcttttngtaagaaaaaggaaacatatattgacttattattgatgcgtaaatctcagaataatgagcaatgaagcacaaaggatgcagcacaatttaatgcttcagatatgagtttgtncactttgaaaaggggtgagttattcatgaattacagcaaagtgtaccgctccactaatgtgattgatagattatatgaatatcaanntaagnngatttgtttcctatatttccttcctccgagagtggacagagtacgtactttcattaagtatgcctcagttatttttgctcaagttggctgttatgttcttgcccacttctcaatttaggttggcacaaagcttggttattttactgctacctaatgttataccattatcaacatatcatgtgttctgagaaatatgaaagtgaaagtaaaagtaaattacgatttattcagttgttaatattcaatttttagtaaaaaaaaaaaaaaaaaa

SEQ ID NO: 46419 - DNA, 685 bp, Glycine max
  Clone ID: PAT_MRT3847_141919C.1
aattcggctcgaggcaaaggcgcacatagaatttcagaattctttgccagcaccatttccgtcgttctccgcccttcatcgtcgacaccgtgcgattcccgaagttccaatgacgtcttctaagaggcctaatgcggggccgaatgggagagggaaacgccggagatcttctggcggtttttcgtcgttgggtgtttctccggggagcgttgtgttccgtttgctctgtcatgcttctagaattggcggtgttattggcaaaggtggttccatcatatcgcaaattcgccaagaaactggcgtgaaacttaggatcgaggaagctgttcccgggtgtgatgaaagggttatcactatctcaggttctgaaaaagagactgaagaagataacactgaacagggaaaggaggttaatgataatgatgatggtggaagcgaggggaaggatcgggaggagaaggatgatggcgatggtaatgaagataaaagagaaaaagatgccgttcccgttgaagattcaaagagcgagaaggggaattcggctatttggaaggctatatcactagtttttgagaggatggttgagggagtagaggagacaactgaaggagatgaagaaagtaataaaccttcttccttttttttgaggctacttattcttactgctcaagttggttgtgtttta

SEQ ID NO: 46420 - DNA, 331 bp, Glycine max
  unsure (1)..(331): unsure at all n locations
  Clone ID: PAT_MRT3847_14191C.1
cnatctcactcagcntacgtnattctganttnggctcnagntcgctgtngtnttcatcgtcttccgtctcttatatttctnntntnttttgtncttcntngcacgccnaaacaatggnnggaaaattagagtgncttgngntnggantcgatntcgganncacctantcttntgtcggtttgtgnnaacntgaccganttgaaatcatngccantgnncangggnatagaangangccgncttacgtnggcttcantgatacngagcttctnatnggtgnggcggctaaganccaantcgccatgaaccncatcaacacngtcttctatnn

SEQ ID NO: 46421 - DNA, 316 bp, Glycine max
  Clone ID: PAT_MRT3847_141920C.1
gtgccctgcacgtgctcgactacgccaccactacattcgacgacgacaccgaaaatgaggaggaagagctggtgcacgagcaaaacgaatccttcggcggagggcggtggttttccgctgcgtgcgggggcagcacccggcggagccgaggaagcgccttagggctaattctttacccaagggcgaaatgggtccaagaatggaacaaggggttcctgctagtgtgcgccaagggggtggtcgctgaccctctctttttttaagcgctctcccttaacgactcgagcctgtgcgtcttcggtgaccggtgggttga

SEQ ID NO: 46422 - DNA, 466 bp, Glycine max
  Clone ID: PAT_MRT3847_141921C.1
ctatcttccgaaatttgcttcttccccgcttcctctccgaatcactccgacaaacaccaaaacgcgattgcatttcaaaccataatcccgttttcaccgtatcgttttccctatttcaattcctctcaatattgctatcgtctctggttctcgttcgcaactcctgagtcctgtgacgcattcgcgttggcgaacgaacgctcttggcattcccgaaatccctcaaacagcgtcagtaaccgcaattcaaaaccctaagccatggaccgtgacgacgacccttctgcacttgcatggctttgggtcattgaagccctgttaacttccaaagaaatcaccactcccactttgcagggtttcattgatgcggcacctgtgggacatcatagatttagtaaaaatacaaaggaattggtagccttgaggtgtttggagaaactgtccactctttgttgtgaccctgaag

SEQ ID NO: 46423 - DNA, 653 bp, Glycine max
  unsure (1)..(653): unsure at all n locations
  Clone ID: PAT_MRT3847_141922C.1
tcgcgatctagaactagtcatggaaagacatcagttacaaggtacaaacaacaaaatgatattagcaccaaataattactacatgggagatatgagaacacagtcagcactcacagaatcatctggatggagagaaagcgcactcatatggcttccattgcatgaatctactcttcctttaataagttgcttcttgttgtcatcaaccatcaccaatgaatttgactgactaaacctatacataggaagtgacaagatatcttcttctgatgcaccttctctgattctcatagcataagctagtgctattattgggatgatgcagaagagggcaaagaaaactatacatgccatcccaatgcaaaagataataaaaaatacgtcaaaggctagaaagaccactgttaacctgcacaaatgtgataatacattattgagcattccatacacccaatacataatttgaaaacataacactaaagaactacattagaagatgaagtaagcaaacaggtagtgaattagttatatatctactaataaactatattacttattctggctggagctgacgatttttgactaagtctgaagcaacagggctcatgagatgcctaatcccnataaacagagtcaagcatacaggttggaca

SEQ ID NO: 46424 - DNA, 401 bp, Glycine max
  Clone ID: PAT_MRT3847_141923C.1
gcatgcatgttccctttcaatactttcttagctgtgctgtgctctctcttcatttcactgtgcatcttttaattcactgttacacaagatgggttatgtctctcaacaccttcccccaaccttttctcctttacatttttcagttttcactttttccatatatactctactgcaccaccatgtggtttttgacattactgagtttagtttagttttttcctgtctagcccttagtttatgtccctttgtgtgtctatatttcttccagctattcatctctttgttttctgcattacaagtttggaatgaaaccaatcttgtcctttcaccctctcttgggttttccttcccctcctcttaattctcctccatagcttattttaactgcatggctcaaggtg

SEQ ID NO: 46425 - DNA, 308 bp, Glycine max
  Clone ID: PAT_MRT3847_141924C.1
tcgtacggctgcgagaagacgacagaagggggatgtgagcatgggaatgtgggtagagcaattcaacatttcaaggcctgttgagtatgtgcacagcttcaagttctgccaatttgtgtgcattgtagattacttcacctgtatatttccaaccttctaaacaaatgacctgtatgtgggataagttacaacaaaaggtgcaacccctattttgcatcatgaaataataacatatcctatgatcataatattcgtgttatatacatgtccataggcactgatgtcctgtattatctgtacatattcat

SEQ ID NO: 46426 - DNA, 457 bp, Glycine max
  Clone ID: PAT_MRT3847_141925C.1
gaaaaaagcaactaacattaactgggatggggatccacaacaaaattcacattatgtgaagagcattggaataacatatacttcaccaaacacaaatttaaaaactatgcaaaaggccacaagccatacttttctttcacgctcacttcccggggaccaagttgggggcctacccccatgccttgttgttaactgggtccgcaagggaaacagcagggttttccaatggacccttaccggtgacaagggcccgaacaaagaacccgatcctataaaacatggccaatctcccggtcctgaggcccttcaccttaagctcagcaaaaccctttgggtcataagcaaggcccaatggggcaaatctgcccccagggcaaaatggttcagggacctgacctgggggcccaccgcaaataagataaccctcaacaccaccccttacgaaaacttggggggc

SEQ ID NO: 46427 - DNA, 405 bp, Glycine max
  unsure (1)..(405): unsure at all n locations
  Clone ID: PAT_MRT3847_141926C.1
acgnttcttttttctttttttttttaaaacagttcaataaaagattaatcttggggatgaaagagcggtacatcagtgtcaaaacaactctatttaaactgtaacaaaaaataggaacaaaactaaaagctcagcgtttcccgcctccaccaccgagtttgggacctttgggcatagcacccttagaaatgcctttacctcctgctttttgtgacttggctggaacttctgctttcttagccttcttctcatcctttgatttcttgatcctctccttaatttcactgcaccacatcagagactgagataaacatatgttatccacattaaaaagtaaggctctgaaacagaaataatattttacatgattaaagtaaaacatacatgatcatgatagcaatgatg

SEQ ID NO: 46428 - DNA, 1143 bp, Glycine max
  Clone ID: PAT_MRT3847_141927C.1
ccacgcgtcccatattcctagttccagaattcagattgatcaattcaaaccccatagatcatacataccctctcccaatcctcattgaaccctctctctccatgcttatttagtgccctttttgttttgcatcacccaatcaatcactgacccctctttgctcccttgtcttcattgcccacatatctttttctctcaaagtttgcgactttgtgttgcgaagatgagcggtgcggggtttagggcttcaattccgagcagtgtgaggaggacgatccagaacatcaaggagatcacgggcaatcacagtgaagaagacgtctatgcaatgctcaaggaatgttccatggatcccaacgagactactcagaagcttctccttcaggacacatttcatgaggtcaagagaaagaaggacagaagaaaggagaatcttaacaacagggaatctgtggagccacgctggaggcctggtaccctagggcggggagctaggggtggtcggggaaatttttcacctcataatgcatcacatgatgctgctggtagcaagaattctggtacaggaaaagataatggaactccacaagcaactgagaaagttgtgccacctttgtcagcttctcaagggaaaatatctaaagaaaaaagttctggaacaagctctgtacccattaatgccaatggtccgacaagcgtaacttctggaactactagtggtactagtccttccccttcatctgctggaactggagacagattgggtccatcttcttgcgatattaataatttgaatagtgctttgccttctgatagttcaaataaagttgcaacagttgcttcaggaagtggatcaatgctttcctccagtaaccaccctgcatctggaccagcatcttcatcggctgcccatttctcttcttcagacccagtactggttccatctgatgatttatggtttcctggtgctgttggtgctgttggtgcaattagatgtgaagtgggaaacttacaccctcctggggaattacgtgctgttagctctgctgagacaaattaactgctgcttctgagactggtagctcttctgtgcaaggaaagattcaaggcaaatcccagggagcagcaaagaatcatgttact

SEQ ID NO: 46429 - DNA, 1681 bp, Glycine max
  Clone ID: PAT_MRT3847_141928C.1
atatttttttttttttttttttttttttttttgcagctgaaataacagtcacatataattttttaaaaccttggttacaaaaggtagatgtttataatatttgaacagaattgaaaacatcgccatatgtcattttccctttatgacgaggcaagtatttgtttcagcttcaagaatatagaatgctcttcatttacagtgtagggtgattgattcaatacagttatactgcctctgatggctgtttaacttacaagctgtatattgcacaagggtgtccagtctaattacattcacagaatgcacataatttaggttcggagctgcaaactttttttcagatatgaacatgcccctgtgcttgaaacatttggtagaagaaaactgctggaatcttaatgtattcccaatttgaatgtcatagcatagctctccttaaaactttggttctaggtctgctgcaacaaagagccttatgaatatatgaatctctatggccttcttctgcttgaggttgctcttcaattccacagtaatccagattgctactccttggcaatcaagttatgcaactttacaaaatcatccaatgttagttcctctggccttgaagtggctagaagacctatgctagttaaagcttcttcgatctcaagtgatgtgcatatgtgctgaagtgacttgcgcagcatcttacgcttctcattgaatgctgaattaaccattgagaagaagcttttagtggaagaaacttgggggtattctgagggtagcttcagcttgaatgagacaacagctgcatcaacattaggctgagggaaaaaattggatcttgggactttaagtttgtactctggatctgagtagaaattaacaaatacattgacgggacgatactcaggggtccggagtgatgacactaccaagcgcacggcagtctcctcctggagcaataaaaccacttctgagaaaatgtcacccattggtagaagtagtttgatcacatctgtactgatattaaagggaatgttggcaaccacttttgcttttctagattctggatttatgcttccaaccaatgatgacatatgagagcgcacatgacatttgacaatatcctcagtcaaaacctttaactttcctgtacttgaaaatctttcactcacaagggcagccatgtgtttatccttctcaactgcaagaacaaatgcgcccgagtttaaaagaacattagtcaaggaaccagttccaggcccaatttccaacaccacatcaccttgttcaacaccagccgcaccggcaagttggtcatttatgtcagcattcaacatataatgctggccaagtgattttctggggaatctgcctttggagttgagagctttgagagtggcgtggtaatcatctgcgcttcgcgtcgaagctctgctgcctttttcagcgcaaactacgtaaggcgttcttctccgtacgccggcggtgctatcgtgcgccggtttgtggtggcggttaagcaatgcgtgagatattggcgggaacgtttgaagagagcacaatgatgaaggagacatgtttggttgttcgttacttccactgttatctattttgaaacttaccacatatatacaaatactacagtgttgtctctttatcctatgttgttcaattgttttcaaagttg

SEQ ID NO: 46430 - DNA, 517 bp, Glycine max
  unsure (1)..(517): unsure at all n locations
  Clone ID: PAT_MRT3847_141929C.1
atttncccaaanccaaaannncccaaaaaccaaaaccccnnnnannnaaaacccnnnnnnnaaaaaaaaancccctttccccnnnnnnaaaaaaaanttttnccccnnnnnnccttnncccnnnaaannnanattaccccaancnnannnnaantatnaccnnnacctnaancccccaaaaatnccnnaancccccanttaanaannntnnnnnaaccanctaccnaaaacaaaatanacctcnaaannanncannccacccaaanntataacaaacnntncannccnctnnnntaaactnnntaccaanatacanaaatnaaatanncaancaanatncanacnctaatactnnnaaannnacanacanctattantacnanantnatcancnntcctcacnccacnatanaancnanatantcnncnattcatnacctanactcatnnatcccnaancnnatncaacaccacacatcnaacacaanatcaaccanattnacncactatnactcca

SEQ ID NO: 46431 - DNA, 455 bp, Glycine max
  unsure (1)..(455): unsure at all n locations
  Clone ID: PAT_MRT3847_14192C.1
tctttgacgggtgttggcggttgcggtttccgttgtgctgaatcttaaccgttattttggggccctcaaatcgccgatactgtgttcactttcattgccggtggcggcgaagccaccgtaccagccaccgacaccgtccaatccatttcagcctttcgaattacgatgacgtatttcgaggaggacgccattaacgatgacggtgatcgcgtgagggacgtcgagcgcaatcacgacggcggaggagaatacgtcaaattggtttgggatccacaccggaggccgtgcccactcaccggggaggatcatcgcgcctctggtattgggttaaattggtgctctgtttcttatgtctgggcctcttggctctcgttgcttttgaatgggttgccccactcttcatagaanaggtgattattcctataataaaatgggagacgaacacgttcagttct

SEQ ID NO: 46432 - DNA, 421 bp, Glycine max
  Clone ID: PAT_MRT3847_141930C.1
aattcggctcgagtaatattttgactttgtgtaaaaggggcttttgtttttaagtcttcctcttcgttaataaagccatcttcttcttcaatcatcgttgttgctgcaaaaaaaaaagtaaaagcaattgaagaagagggaaaaaatagttctctttcgttgcttaatttctagaaccgcgaaaaagtgcgaaacgtttccaaaacgatggttgtgttggtaaacaatttgcattgcgctccgaaaacgacgacgtcgtcgtcgtcgtctccgcgaaccacattgttatgaagtgagagggtttgttactttgttttggtttggttcggttcggttcggttcggttctgtggtggaaagacaaaagccatgaggtggttgcccacgctttcgttctcgccttcttcgaatccttcttcttc

SEQ ID NO: 46433 - DNA, 452 bp, Glycine max
  unsure (1)..(452): unsure at all n locations
  Clone ID: PAT_MRT3847_141931C.1
gcacgaggttgttcccagggctgctgtgttgcagtttcttttgtctaaaggtttggttaaggatgttaattgggcctccgcgtttttagtctctgataagattttcttgcagaaatttgtggtttcctttgagaaggaagccgatcggcttttgaagctctatgaagagaagatgatgttcctagataacactcactgatgcaagtggtggctggtgtttgtgtacttttttaaacttgattcgtattgctcaaagggaaccttgtaactgtttagaccaacagtacttgttgcatttgatagctggaatggaaccgtatggattggtgtgatcgtagatacttgttcatgactcttctaccatgttttgtcatatctagtactttatcctcttatgttatttttgtcaagaggattcctaacnnngtggtagactgatagtagcaaggttt

SEQ ID NO: 46434 - DNA, 280 bp, Glycine max
  Clone ID: PAT_MRT3847_141932C.1
ggctgcttcgtatactgtcctaatctgcatgggtgatttccccacccggacaaccatgcttgacgctacctgctttgctaggctctgtggaacagtgcactgcatggaggtctggcctccagccgtcaaaatgaaggctgcgattgtttcttacctgccataccttgagcactcatatttgtgcgacgaagtcgaataccttctcatgagtgtattgataccttcattggcatattagtcggagcacgagaatctgtaccttgatcaccggacgtattat

SEQ ID NO: 46435 - DNA, 1479 bp, Glycine max
  Clone ID: PAT_MRT3847_141933C.1
cccacgcgtccggccactcgttcgtccactctttcgtccacgcgtgcgagtgcaatagcaaaaacgaaaggaagagctaccgtaaccgtaatcgcactgttactaatatctctatagtttgttactgacgctgcactcaccgctaaactaaacttcctcaaccaccatgggagattctaatcggatttcggttcaccgtgttctcggcgaaggcttagttgctgatgtggtgctgtggaagaattggcgcggagcggttgcggtgctcgtatctgccaccacattgtggtacctcttcgagcgtgccggttacaatttcttgtccttcgtcgccaatgtagtgttgcttctcgttgctattctctttttctgggccaaagctgctaaccttctcaatagacctcttcctcctctccccgatctggagatctcggaggaaactattgccagggttgctgatgcactgcaaatttggttgaatcgagccttgtctgttgcacatgacatagcgattgagaggaatttgctgctttgcctccaggttgttggtgtattgtgggtaatatcttacattggtagtttgttcaactttttgactttgatctatatcggtgttcttcttagcttgtctctccctgtattgtatgacaaataccaggaccaagttgatggcaggctaggtgtgatacatgggattattcagacacagtataaaaaagttcacagtattgttttaagcaagattccaaaactctcaaacaaagaaaagaaggtgcagtaggaaaatgggtgcaaatggataaatgaagtctagttaggagtgtacgatgaagttcttgaggtttgaaatttctttttgctgggattctatcgctctgttgattgatggttagaagatggtatgcttattcttcagaatcagggttgaccaatagctttgacctaggtgcttattctcttatgattttctatgtaccccttggttacatgatcttttatcaatgggtatattaccctagttaaatttcatttggataagaaagattatcagagaggggaaaaatagaaaagaaaagacatgaagaacttgaatgtcagtttgttttttttaggatggtatgacagtttgatggttttggccacgaaaaagtgtttggttgggttggttatatgatgtattgtggaagtgtttacttaccactacaagtactgtgataatcttttcttaagtaggaatacagcactggaaataataataataataacaaatgtcttgtcattgcgtccccgtattcctagcccgaggttggcgtgtgcttgctgctaatgtgattgctaatttatatttcgtttactgactacatttgagttggctgcacccctagatcaccaattttgaagtgtggcttttcttttcatgttgttgttctaatgactcacactaaggaatgcccatggagtaattcccaagtttttggt

SEQ ID NO: 46436 - DNA, 524 bp, Glycine max
  Clone ID: PAT_MRT3847_141934C.1
aaaaggctaaacgccggggaagattcatttgattggataaaattgccgcccccttttctaaactggggaagttctttatgccaggcaatgatcgattatcaagtggcccgcccccccatcaaagacctttaaatttttaaatttcaagacccccccgttatcccctggcatcatcaaccctgaaacttttatcaaaagcctaatccccaaaactggggaggggaaagacccgttccccatgcttttaaaatccatccaatttttttttaccctttgctctgagcccttcagctttttttattgccttttcaaccccataaacctcgggataactcttacccttggttttcctgtcaccatctccctaaaatttaaatctcttttctataatatcacccacaagtggatacaataccccaacaggtttcccatacctcccaaggctctttatctaatcatcttcagcccccgccaagaatcctccaccccctggaaaagacccccccatttcaccaaactttttt

SEQ ID NO: 46437 - DNA, 394 bp, Glycine max
  Clone ID: PAT_MRT3847_141935C.1
gtgcgagcgtccaactttctcttgtagaccgttacctattttaagtgactggccgcctttctgcaacggctcgccctggaaacaaccctgacggtacccaattcatgtcgactatgttggacatccccgagttgggggcgcgtgtggcctggtatctgaacaggcccgtaacgctcgccctttccaaccgctgcgcacgctgtctggtgattggcactctccctgtatcgcttcattacgcgcgttgtgcgtgttggtcacccgcagagagaccgttgctcttgccatccccttagcgcccactgacttggctgtgttcccttccttcctcgccacgtttgccgcctttgcccggccagctctagatcggtgcctccctgtcggtcccctgttt

SEQ ID NO: 46438 - DNA, 409 bp, Glycine max
  Clone ID: PAT_MRT3847_141936C.1
cagttattgcttttataattttgggcattacaaggatctctatttaaacagataattattcaataaaatgtggccattcatctcccttcattctgtgagttaagtttttttccaacaaattcctatcctagattgtttttgaatccaaagaatcaaaaggaatgtattaatcaagtagggaggtgggaaggtgaactttggaggcgggaattgaagtggcgtagatcgtggtttcaataggagctaaacttgatgcataatttccaaaatctgatcaacaatggtcaacttcataaagaggtagatgatactttgtggtgggaaggggaaggagctggaaagttctcggttcactcaccatacttagcaatgcagaattggtattatggcagccatgaagtggtttttt

SEQ ID NO: 46439 - DNA, 216 bp, Glycine max
  Clone ID: PAT_MRT3847_141937C.1
acacacgcgtacgtccactcattttaatacaaccgaactctaatgcataccacttgcttcctttaataaattgggctatcgcactaccccccaataactatttattattttaccaccattcaaaccttttcgatcactccatcattctaactcttaatgcctaccaatcctgctttccattaccatatcatcctttccatttttacattctactca

SEQ ID NO: 46440 - DNA, 627 bp, Glycine max
  Clone ID: PAT_MRT3847_141938C.1
gagagaactagtctaaagttttttgctaatcccctctttacatagtaactgtatataactaattaaaaaatcttaattacattgctcatgcaagacacatacattgggggaccatgaatccatttttggcaacctgcacaatttagcgacctacaagtttaggaagcagaaaaaagaatcggttaccatccaacaaaaaaaagacaaattatacatacaacataggggtcacaccagtcacatttaaattcaataaactcacattttttggaaggacaacacatctaccatgtgtccactacagttatgcgtcagccacaatctgatccgtgttcagttcaaagcttctctctttaactttggcggcttatacaattttgacgtgcaaattggaacttgtgtgcattaaaaacgccactccaaacacacgcttaaagtttcatacattctccaacaagaaatgctgccaagtcaataaaatctaatccctgctttgtatagcatttcccgatcgtatcaacgggaaatgctagttaaacgcattactacactgaatataaagggagcaaaaacttatttgcttgagccaacgggcacaaacattcttatctggatttttttcctttt

SEQ ID NO: 46441 - DNA, 329 bp, Glycine max
  Clone ID: PAT_MRT3847_141939C.1
aaaatacttattctcacaaccctttctctatttatttagggggtttccgaatacatctgcttttcttccatagaaaccctactgacttttccaaggagaacctgatctacttcatgtttactgttttaatgcacacaatattactctgtttcagcgtgaaaaaagttccttttgacatgccatgagtgaaaattcccaataacgaagtcctatattgctcctttataagcctgacgtaaaatgccatcctcctctttaacaaaatggctagtttatatgctcccacatgctacgttttcagtttttttttcacagacctaacattaatt

SEQ ID NO: 46442 - DNA, 447 bp, Glycine max
  Clone ID: PAT_MRT3847_14193C.1
tctcgagccgattcggctcgagtattaagataaggttgtctataaaacataatgaagtaactaaacattaccttctttatgtcctttttaatgactcaaatttataaactgtaattcttttatacttttttaatgacttaatgtaactaaaatcattagtaatggaagaataaatatctttaaacagtatttagaactataataaaatcttattggagtcaaataaaaatataaaatttgaaattctattttatatcatggactcacggtcggcatcagcatggactcatggtcggcctgtgggctgtagcatcttgtaagttgaaattcttttatatggaaaggtacgttgatattatatacttgacccgggaataaactttttcaagaaggaaaaaaaaaaaaaagctgcctttgaaattgttgttgctggcaattgaattaatt

SEQ ID NO: 46443 - DNA, 347 bp, Glycine max
  Clone ID: PAT_MRT3847_141940C.1
ggggaagggccatattataaaaaggggggggggaacattccccaaaaaatattggaacgggaacgttttttcggggaaattttacaaaacagggaaaaaaaaacgcttcattgaacaatcttccctaaacaaataaataaaagaggaaaaaattggggcaattaaaagggccaattattggttgcccccaaaaaccaaccattggttggggaaaggtaaatcctgggacactaatggggtcgacattttaatttgaaaaagctttggtttattgaaaaggaacgggaacaccctgttttttgttaacaatagccattgccttggagcgggtccccataccaagggga

SEQ ID NO: 46444 - DNA, 300 bp, Glycine max
  Clone ID: PAT_MRT3847_141942C.1
ggggaaggaaccccattaaaaacattaaggaggggtaaaaaaaccattcccctaaaaggggaacacacaactccctaaaaataaaaaaaaaagggggccccaaaaggggccccgggtttaaacacagggaaaaaacccccatgggggtaacccccgggcgggccaaataggggaaggggggggtaatccggggggactattcccgggtcaaattcaacccccgcctttatggggggggcccttggtcggggcattgggaaaaaccccaaaaaagtcttttttggggacccccggccccgg

SEQ ID NO: 46445 - DNA, 322 bp, Glycine max
  Clone ID: PAT_MRT3847_141943C.1
aatttccccttacaataaaaaaaactcctttggtttcaaagaattccccttgcaaaataaaaaatttccaaatggcaaaagggggtcaacccccctcttcaattccttttctttcaaaaagcaatggttgaaaatttgaaaaaatgcgggcgcaattcaaactggaaaaattccaatccatgaaaacttcaaaaagggcaaaatcttcatcaacatccagtgaatttatatagtaaatgatctctggaaaatatggctggcgagcttgaggccaaaaagcattcaaagtacaatcctaaaacttgtggcaagcagatccatg

SEQ ID NO: 46446 - DNA, 1927 bp, Glycine max
  Clone ID: PAT_MRT3847_141944C.1
ggctcgagatttgattatatgctttcatgccgagtttgctccatgattccagcacctgcgtttcgtatttattacattccacttattactgcttttgtagctttgatcacatttgactttattagtgcatatatggaaagtttcgcctcgttcccatgtgtgatgttgaatccgccctctgcggagcgaaatgaaggtacatgcgttaggcgggaaagagatggattactgacacgatatatgaaggaggttcatgcaccatttcttggactatgtggagttaaaatcttggtcattgccgtatttgctgcatttaccttagcaagcattgcattatgcacaaggattgaacctggtcttgagcaacagattgctcttccacgggattcctaccttcagggttatttcagtaacatatccgagtaccttagagttggaccacccttatattttgttgtaaaggattacaactacagtttggaatccaaacacacaaaccagctatgctccattagccactgtgattcaaattctcttttaaatgagatatctagagcatcattagtgccaacatcaagctacatagccaaaccagctgcctcatggcttgatgattttcttgtatggatatcacctgaagcttttagttgctgtcgaaaattcacaaatgactcttattgtccacctgatgatcagccgccttgctgtttaccagatgaagggccatgtgggttgggtggagtgtgtaaagactgtacaacatgtttccgccactcggatttggttaatgatcgtccatctacggcacagttcagagagaagcttccctggtttcttgatgcactgccatcagctgattgtgccaagggtggtcatggagcttacaccaacagtgtagatctgaatggttatgagggtggtgtcatccaagcttctgagttccgtacttatcacacaccagttaatagacaaggtgactatgttaatgcaatacgagctgcaagggacttttcggcaagaatttcttcatctttaaagatggatatttttccgtactcagtgttttatatcttctttgaacaatacctggatatatggaagttagccctgatcaacatttccatagcactaggtgctatttttgttgtctgtctgatcatcacatccagtgtgtggagttcagtaatcatattacttgttctgatcatgataattttggatctcatgggcgtaatggcaattttgggtattcaactgaatgcggtgtctgttgtaaaccttattatgtcaataggaattgctgtggagttctgtgtgcatatagtacatgctttcacggtaagcttgggggataggagccaacgagcaaagacagcattgtgtaccatgggggcttccgtattcagtggaatcacacttacaaaattagtcggagtcctcgtcctttgcttctcaacatcacaaatttttgtggtgtattacttccagatgtatctggccttggttctcattggcttcttacacggtcttgtgtttctacctgtggttttgagcttgtttggtcctccattaagatatacagtcattaaggagcagctagaagacatgccttctgcttcatcagaacagcctctaattagatgaaagttagattttaactacgtgattacatacttaatgaacaagaaaaattgttttgattatagaggattaatagtatcttttcttttgacttttagatcgagaaagttcattgcttatgtatctgaacatggtcacggagaaactcagtcgatttttgtaatttctgatgtttggtaggtttgatcatcagttatgttggtgtgtatataattccgataacatttgcttatatttgaagcaaatatacgtttataattattaatatacttctgtttttttttaa

SEQ ID NO: 46447 - DNA, 397 bp, Glycine max
  Clone ID: PAT_MRT3847_141945C.1
ctcgtcctttgcttctcaacatcacaaatttttgtggtgcattacttccaaatgtatctggccttggttctcattggcttcttacacggtcttgtgtttctacctgtggttttgagcttgtttggtcctccattaagatatacagtcattaaggagcagctagaagacatgccttctgcttcatcagaacagcctctaattagatgaaaatcgagaaagttcattgcttatgtatctgaacatggtcacggagaaactcagtcgatttttgtaatttctgatgtttggtaggtttgatcatcagttatgttggtgtgtatataattccgataacatttgcttatatttgaagcaaatatacgtttataaatatttatatacttttgtttctttttaa

SEQ ID NO: 46448 - DNA, 259 bp, Glycine max
  Clone ID: PAT_MRT3847_141946C.1
atggagatacatgtgtaccgtgtctccaagacttggaagctgggcgagcagcgggacaaagtgtattcccgaggttgatacgatacgcctgaagaacagctcaagagcatagggaacgtgcttgaggaggaaccgaaggaagggctgcaggttccgacaattgacttgagagcgatagactcggaggacgaggctgttcgagtgaaatgtcgcgagaagctgaagaaagcggccgaggcatggggtgtgatgcacgtgg

SEQ ID NO: 46449 - DNA, 453 bp, Glycine max
  Clone ID: PAT_MRT3847_141947C.1
gtagattttgcttataactggctttcaggttatgaggttggtgtcatccaagcttctgagttccgtacttatgacacaccagttaatagacaagtatgcagtgtgataagtgatgatcttattttcattgctttggcatattttttttcatacatttctctgtttgttctaatgaaaatcttgttagggtgactatgttaatgcaatacgagctgcaagggacttttcggcaagaatttcttcatctttaaagatggatatttttccgtactcagtgttttatatcttctttgaacaatacctggatatatggaagttagccctgatcaacatttccatagcactaggtgctatttttgttgtctgtctgatcatcacatccagtgtgtggagttcagtaatcatattacttgttctgatcatgataattttggatctcatgggcgtaatggc

SEQ ID NO: 46450 - DNA, 1592 bp, Glycine max
  Clone ID: PAT_MRT3847_141948C.1
attttatgtggtctggtgtcattggccctatctagatgtacatcatatatgtttactattgttgacaatctgcacaaggccactggcattccacgatcttcattcccaatacagggaggcttatcagttgggttgatagcattgatatatcctgaaatcctctactggggttttgagaatgttgacattttattagaatctcggccatttgttaaaggcctttccactgacctattgcttcagctaatagctgtcaagatagttgcaacttctctatgcagggcttctggattagtgggagggtattatgccccgtctctctttattggtggtgcaactgggatggcttatggaaaattaattagtttggctgttgctgagtctaatcccacaattaacctctctgtgttggaagtggcatcaccacaagcttatggcctgttccttttgcaggttggaatggcagcgactcttgcaggagtttgtcaagtaccacttactgcagttttgcttctgtttgaattgacacaggactatcggattgttctaccacttcttggagcagtaggcttgtcgtcatggatttcatctgtacagacaaaaagaggagatgatggaggggcaaaaaaaattgagttagaaaactcaaattctcctttacttccagaaacatcttctcgtagttcaattgagtcatctgctggtaatacctttgctgaagatgtgtcatatttgagtgatttgtgtcaagtggaaagttcactttgtgtagaggatgataatgttgaaacaacatattttgtaaggagaacatttgtttcagaagccatgaagacgagatatgtggcggtttcaatgtgcacaccgcttatagaagtaatagatctcatgcttgcagagaaacaatcttgtgcagtaattgttgatactgatgatactttaatcggttttttgacgcttagagacattcaagagtatggtaaatttgcaaaagcaagaagcacaaaacataaggagcttttagtttctgaattttgccttttaaatggagaaatatgcagcgtgccatggacagctacacctgatatggaacttcattatgctcaaatgattatgaaggagcgcagattcaatcatgttcctgttgtgaggaatatctatgaaagaacatatccagttggcattatagacccagagagtatcagtctaacatgcagtgctttggccaccagacagtccctcagctaatatttcacactgacttaatcaccgttaggaggctgaagactctttcttggcactataatatctgcctttaacacgtcaagttaaatcctgtcacgttggtttcgtgggtgtacgtaaaaaaaggttcagtggagttcatgtgtatagttatgttcgatgaaagtaaatgtagttccccaagagagaacccttgtaatttgatatagcacgtattgtctgatatttaatttgcagtgatcaatttggtactgcaatataatagtaataccaccatgactttgcaattttcaatataatttcaattttcaatataaaatgatttttttttctgtgactttctccct

SEQ ID NO: 46451 - DNA, 214 bp, Glycine max
  Clone ID: PAT_MRT3847_141949C.1
cccacgcgtacggctagtagtgattgtctgttgcagggcaatactgtatcgaggacgatgatagcatgatgtgacctttcgatcttaataacaatgcctccggattgcatgaacaggtggcctgcacgtgccttaatttgactgcacgactaatcagtagcgtctgcaaacacctcttaaatcattggtgatgcctaacgagctgctagcgcac

SEQ ID NO: 46452 - DNA, 643 bp, Glycine max
  Clone ID: PAT_MRT3847_14194C.1
aaaaaccaaagtagaattgtggcatttgtaacgtacaacgtacattagcaatatatgaaaacattatgccccccgaaaatacaaaactaatctctataagtaatctatctgccaagaactctcttcgttcttctaatacaatcaatgttttctacggcctattcatattatgtactccgataatataattacagctgacgacacctgtcttagagtatacaaaaaaataaagccaatgaggccaaaattaaacactaaaaacagggagcagtatcaaaaacaaaaaataaaaataaaaactgtcatctctaatgtcgttattcaaccgacttctcaagattagtgtcttcttgatctatctgcaaagtagggccttcttcgttcacgtctttgccaataacggcttcagattctttggcatcaggtgtttctccattttccatttttggcagttcgccattctcagctacgctcttggattcttcattgttcactggtttcgggagttctcttgaagaggaggtctctaataggcggctgattccatcatatacattctttgcatccataacaagagttgctccacccggatagcaacgcccaaaacaagttgcacaatgaggataagcaacctcaataaatg

SEQ ID NO: 46453 - DNA, 219 bp, Glycine max
  Clone ID: PAT_MRT3847_141950C.1
catgaacattgacgaggacatccattctttgcagctcgattcggcacatccaacgcaagatgttgaggctgaacctaaagctgttcaagctgatccaaaagttaaacctaaagtgaatccttctgttcaacattcagaacaagttcctgaaaatattcctgaacactttaatgttgtctttaatggtcaagttaatgctcgtaattctaccacttgatg

SEQ ID NO: 46454 - DNA, 441 bp, Glycine max
  Clone ID: PAT_MRT3847_141951C.1
cctcgtgccgatgacagtcgagaatggttcgaattagtgtattaaatgatgctttgagaagcatttccaacgctgaaaaaagaggatttcgacaagtccgagtccatccttcttccaaagttattgttaaatttttagaggtcatgctcagacacggatacattggagaatttgaagttgttgatgaccaccgtggaggaaaaatcgttgtcaaccttattggtcgaatcaacaaaaccggagttatctctcctcgatttgatattcaattatctgatttagaaaagtggattaacaatttacttccttctcgtcaatttggttacctcattttaaccacctcctatggtatcatcgaccacgaagaggccagacaaaagaaaactggaggaaaaatccttggttatgtatattaagccaatggacttcaatttttatcac

SEQ ID NO: 46455 - DNA, 270 bp, Glycine max
  Clone ID: PAT_MRT3847_141952C.1
attggacggaacaaaagtgtgggtaaccaaaaaaagtgttacataaccataacggtacgtatcgagttattcataattggctaacaactactgttccaagctcaaactcaaattagaaaaaaccctctaagagaacaaaagacaagctacatgcatatatgaatttacagggaaacaagctagcttagcgtcacgaggtatatatatatatttatcggaatttagatatatatattcacgattttaagctcttaaaagaaaagaactagt

SEQ ID NO: 46456 - DNA, 330 bp, Glycine max
  Clone ID: PAT_MRT3847_141953C.1
ttaattcccgcggggagacccacgcgtcgcggtcacaaccattcataagtaccaatatttcgaaaggatcaacttttttacaacaaagaagttttggctattgaatgcaaaaagacaacagaagtggaagaggaatgttcaccctcaccctaacaagctccacctccaccttatgaacctgttaaagtggaagcaccaccagtacaaccacctgctgatctgttgaatttggaggatgccaattcctgtgctgcagattcggaagcgaagactgcattggctttagccattgctcccgttgctgttgaacaacaaccttctgctgtttta

SEQ ID NO: 46457 - DNA, 754 bp, Glycine max
  Clone ID: PAT_MRT3847_141954C.1
tacggctgcgagaagacgacagaagggggaggaacacaatgctggtgacgtggttcctacagaggccccactccatacccttcgtcctcgccttcttcctcttcctcgcgtggatctcactcgccctccagcgcgcgtcctactcctacgcgccgcctcactcctcccacacagacatcagggccaacctcgtcaggttcgacgcttccgaggtcgcaaaggacaagcgcggttggatcttcgaccccatcgctctcgccctcgcttccggcatctcaggtggagcagtgacgtgtgcgtcgcttcacgtgggagaaattagggctgggaacaaaagagcgaatcacagacaccaccattgtaatgagactttcctcatttggggcgctgctaccaagtataggttggagaacaacgatgaagataatggttatgctgaagtgatgcttggcagagatgagattgttgtagctgcaagtccagttcacaaagcgcatgctttagtgaacattgattctattcggagtatcttctttataggatgtcaagacaatgttataagctataatgcctctagtactgactttaatgtttggaaagatctttgaacatttttcatattttttttgtttctaaatctgaaatgtatctgagcctcatgttgctgcacagcatgatgaagttttgatctatcagttgtctatatatctatggagcttagttccaaaaaaaaaaaaaaaaaaaaaaccccccc

SEQ ID NO: 46458 - DNA, 504 bp, Glycine max
  unsure (1)..(504): unsure at all n locations
  Clone ID: PAT_MRT3847_141955C.1
cgtaagnctcggnaattcggcttcgagcaaaaaaaagcaaaaattgaagaaataagaaacaagaaccaaaagaaaaataaaaaaactggaaataaagaaaaaaggtgtggtggtgacttttgggcccactgaactcccaactgaagataggggggggccccgcactatgaccctcttcccccggtatttttttttacaccggttcccttaaggttaccaatttttcctttttggggctcatttaaagctttggggaattcagcgcaaagacggtcccgggggggaaattgttttccttccatttttccccaaaataatgaaccccgctttttaaatttgaaacccgggggcccctttgggtgggcgaccccccttttaaatcggtgggaacattttcccctttttaagggggaaagacggtcggccccttttttttatagaaaaggccccccccccgggggaggaggttttttttttggtcccccgggtgtttttttttttccc

SEQ ID NO: 46459 - DNA, 889 bp, Glycine max
  Clone ID: PAT_MRT3847_141956C.1
gaggaaggggaaaaaaacaaacactaggcagtgtctgtgttctcttccgtttccgattattccaattcgaaatctgcaggatgagagtggaaagagagaggaacagcaacacagtgatgccggcggcggcggcggcggcgggggggaggagaatcgggtacataaacgcgcaaacggcgtcgttgcagcagcatcagatccgtggctcctcagtggtgacgtggttcctgcagaggccccactccatccccttggtcctcgccgtcttcctcttcctcgcgtggctctcactccgcctccagcgcgtggcctacgcgccccctcactccttccaaacggacatcagggccaacctcgccaggttcgactcttccgaggtcgcaaaggacaaccgcggctggatcttcgatcctatcgccctcgcccgcgcttccggcatttcaggtggagcagtgtcgtgtgcgtcgcttcacgtgggagaaattcggccggggaagataagagcgaatcacagacaccacgattctaatgagactttcctcatttggggcgctgctaccaagtttaggatggagaacaacgatgaagatgatggttatgctgaagtgatccttggcagagatgagattgctgtagctgcaagtccagttcacaaagcgcatgctttagtcaacattgattccattcggagtatcttcttcataggatgtcaagacaatgttgtaagctataatgcatctagtactgacttcaatgtttggaaagatctttgaacattttttccattttttgtttctaaatctgaaaatgtatctgagcctccatattgctgcacagcatgatgaagttttgacctatcagttgtctatatatctatgaagcttagttc

SEQ ID NO: 46460 - DNA, 416 bp, Glycine max
  Clone ID: PAT_MRT3847_141957C.1
cttataaatttgatttcataataataaaaattattcaaataagtatatatgtaaaagaatgtgttactagtatagattttttttacttttgaatagcagcacagtactagtagtattagtttggataggatactcaagcaaatttattgaatattttatgcaaaatagaaaaatcaagaagtacacaaaaggccttgtcttctattttgttgctttcttgtgtggcaggattcatcttgtttcgctagaaatcattgaattatattctgaagggcatagttcacatatagaatggagggtgcaaagaagggagatatctgctccagaaaatgggaaactggaagggttggaggtacttcaataggctgtctatctacccaattaagagtatccttcgtaaagtgacttcaaacttc

SEQ ID NO: 46461 - DNA, 446 bp, Glycine max
  Clone ID: PAT_MRT3847_141958C.1
aggggctacagaaacattgcaagagatagaaaaagcaaaactgggttatcgcatttactccgaaacaaaccgtttcgctcgtgtgtcggatctgcgatggaagccccacccaaaggcgctgctataagaagaggcgacaggaataagtccggatccaaatacatcaatgctggcgtgcaattccacctctgccgcgtcgtcagttactagaagaaaggacgactctgttgccgacttgggaccggcgctaccatttatctacccgccgttctcgaatatgtcgtcgcagaaaagcagaagctggccgggaacgctgcacgtgacaaccagaagaataagattaaccctttgcacatgttgctggccgagaggaatgatcatgagctgtggaaactgcttctaggtgtgactattgatagcggcggaatgaagccgaacattaaccc

SEQ ID NO: 46462 - DNA, 1913 bp, Glycine max
  unsure (1)..(1913): unsure at all n locations
  Clone ID: PAT_MRT3847_141959C.1
ttgatgtcacttaacatgatggaacaataanatgaattaatcnagttagtagaaggataacagaaatacatctagatgagtttggtctcagtcatcacatggatgcttaatgagaaaaggttaggtacaaggaattgcttgaatggaaatcgagaagagccatggatttcttagaaatgccacatctgaagcttagaatataaaaaaatgcaggatgatataacaatggttaccttgaaagtagaatcaggaaggtttagatatgatgcctgtcaagttgtgatcattagtaaatcatgtgcacatcattacaatagaaagaacgaaagaccctagctacacaaagacaaattcagaataaatatttcgaagttatgatacgggccccccctcgagccaactttggaatattttattttataataaaacgttcaaatagacaagaacatcctaaacaataataataagcacaatcataatgtgagtagcagcttcttgcaatatttctaattgcaatcacgaaagtttaggtatgatgatggctattggctagaaacaacaggaactcttctgctatacaaataatgtcaaaaaaagaattacagtacactacagtacatcagcggaagatactcacttactcagacaaaggagggtactttgttaagcaaatgagtgaatataacgaacgtcaacccaaagaatgattgacttgatcaaatgacatgtagtgaatatatgaggaacttgtcaccaccgagtaaacacaaacttttatttgttctgtgtgaatgtagtgtatttactttccaatgccaagttcttttgagatgtctcttgtcaagctgaactgcaaagtattatgccatggaaataacgtgcgggtgacaggaagctttctccgaagatccttgaaagtagaatcaggaaggtttagatatgatgcctcaagagaagcaaggtactctgtttcatggtgacgaataatgcttgttatggcaagtgcacaatcttcaggggcctgaaaaagagttgcatctttgcattcatgttttgcatctaactgcacatttccttcctcaaaataatgggcaccgacctgcattttaccctttacttccactgtttgttgttcatctttgaactcaatattccatattgaacaccaacttccgttgcagaaattctgtgggctatgcctagcagcagaaatcaccacagcaagctcgaaatcagcacctgggccctctacatccttcccactcacacagtagacagagcagaaaccttttggataagtttcttcaacatatttaagtgtttcagcatccagattgcatcgaaattcttcaatatatggagatgaaagttcttcgtctgtggcaggtctcacctctgtacaaacttgtttagcatggtcaacaattgcaacttgcgcagtcctaggttcaagaaatgcattaccctcaagctcaccgaacgaagtaaccagtacgtctccgcttcggttgggcattggaatggaaatcaagtgcgatttgttgtaatagggaaaagcctcggaagcggcttccttgtacaaatcgtcgttgttgagaatcgatttcacatctttggcaacgtattggatttctccgggaggagagttgaggaggaaccatttcgcgatctccactttctgcttatcgctgagctctgattcttcctcttcttcggccatgtctccatacagaggagaagacgtgatgtttttcgctgagcgctgatgaatcttcttctccttcttcggccatgtctcagtacagaggagaagacacgattttatttaggcccgtgggctccacaatgggccccacgccggccaatactgaaagatagagcagcgaagggtagtgcgcggcggtagtgtgtgc

SEQ ID NO: 46463 - DNA, 1095 bp, Glycine max
  unsure (1)..(1095): unsure at all n locations
  Clone ID: PAT_MRT3847_14195C.1
acaaaaactttatttattacaagaatccataagtgtacaaatattagttaactaaggcagtttagggcagttgatataatataaggcaatgacatttttttaataccaagattgacattcttaattatttgtaacttcaaataacaaaaaagatagttttttttttttcaatatctattgtactagaaaatattttctatatccaaaacatgcagcctttatcaccaccgttgcactacaccagctccactttgcttctgctcgatcattctgtcttatggtagcatccctcaaccactacttccaacaactcatttgttcacaagttttggcaccactccataacaaccagcattgctataaagacttgccataacaaaaagaaaagggttttggtaataataagagagaaaggtttctgtactgtataaaaggggtggtatatagcacaagtgcatgctcttttgtaattggaaccatcagcatttttcactctcaccatcactctttctcacaaattcactcacacacaacacatatgcatacactttttatttgtaaaaatttctagtataacttctccaaaagatgaaaaaatatctacaaattaacgaatggataactcaattattttagcttatgaaaaatttcgtttcatatttttcttcttattttcttctgctagaagtgtttctagagacgcttacaacaggcacaaagacaccatgaccatcctgagacaccaaaaccagaagcaaaaactacacatgacccatgcagcaaaccccaaagccaccacgtacaccattttcacatacccataagctaaagtgacacccgcaacttaagcaacggagaagtatcacggccccggaacaagattcaagtagcnactatgaacactgttctgatgcttcacttgttgggttgtgtggtagtttttcctcatgttaagtggtatcttccttcacgggctgttacttcctgcacccttgactatttcggaagccataaaggaggtgttggaagcaacttggaaggtgcaggaaacaatagcctccttcacgttgctgcatgcgtttgggaatagcccac

SEQ ID NO: 46464 - DNA, 538 bp, Glycine max
  Clone ID: PAT_MRT3847_141960C.1
caagtctagggaggtatgtgagtgtctcttcatgatgcatgctgtagatctgttgcttctttcgtcatttacttcaatgcaatatacactgtttaatctctctcttgttattgtatttttggttcttttattcatggacatgatgtccatacttgttgacattacaggtagtggaacgttttcatgaactgtttgcccaaacaaaatataaggaagctgtctaacttgcagcttaatctccacaaggaatccttcgaactcctgacacagttgccaaatttcaggtttcttgataagatgttgctatctgagaattgtctcttgcttttttagccactttattcacagagattcattttctggttgtttactgtctgcctataggtggtgtcctttgtttgggcaattatttataattgtcaaaacgccattatccgctttacgtggcacagtgttcctgtgcaagctggtcttacttgtcctctgttgcaggaatttggaactctttcaacatggggaggggcgaattccctttgaa

SEQ ID NO: 46465 - DNA, 1108 bp, Glycine max
  Clone ID: PAT_MRT3847_141961C.1
ggacgggcctgattggggaagaagcgttctcttctctatcattcagaaaagacgagcgagatcttcatttattttatttctatttcaaataaaatcgtgtcttctcctctgtactgagacatggccgaagaagaagaagaagaagaatcagagctcagcgataagcagaaagtggaaatcgcgaaatggttcctcctcaattctcctcccggagaaatccaatacgttgccaaagatgtgaaatccattctcaacaacgacgatttgtacaaggaagccgcttccgaggcttttctcttttacaacaaatcgcacttgatttcccttccaatgtccaaccgaagcggagacgtactggttacttcttttggtgagcttgagggtaatgcatttcttgaacctaggactgcgcgagtagcaattgttgatcatgttaaactaatgtgcactaatgcagtacctccaagatgtatcgcttcttgtctcttgatatagtgctcaatgtctcaggtttgtacatgggtgagacctgccacagacgaagaactttcatctccatatattgaagaatttcggtaattctgaattttttgtgattgaaatattttatctgataatatgatgttcctttaccaaagtgagcttcacaatctattcagggcctgaacatactgcttcatgttaactttcattgactttatttcttttttcaaataaatttatctcagatacttaagtaatgtattattcctcaacttttaactgtctgaagtcgtgtacattagattgaatgtggaaatttcttcttcaatgttaattcaaatccttttaattgttgttctgtactagatttgtggtttcgatagagatattttgattgagaatacatactatatttttgttaggaagcagactcattatggtgttacttaataaaaaactatattggtcgacatttgaggacatgaaatagagattcaccctttaaataatttttttttttttgcacagcaccctttaaataaagtaactttaataccccacttctaaatctttcttgtaatgtatagtttgcataaaccaggatttgttttactgcaggcatgca

SEQ ID NO: 46466 - DNA, 380 bp, Glycine max
  unsure (1)..(380): unsure at all n locations
  Clone ID: PAT_MRT3847_141962C.1
gganccaaacaccccaaccaaaaccgccgtattttgtctctttttaattcccattaattttgaataacaatgttttgtttgaattccttcctctttattagaaatattttttatcgtctgatcgacaaacaaacccattcctataaattagttcaaaatcttaaagaacagatgtttttaacttaacaaaaaaatactcccattatttgttcctcttattagcgcttctaaataaatttatccaaacaggggataacactttgtccaccaatacctgataacttcaacatcattcgaagtgacctctccacacattggaagtgctctgaagttgactcagtgcctatttaatggttaaaagtcacaaccattgaattttc

SEQ ID NO: 46467 - DNA, 2167 bp, Glycine max
  Clone ID: PAT_MRT3847_141963C.1
gagggtaaaactcccttcccaccactcccatcaagttttttccgataatggaagaataacatagacgtgtagctcttcctcctcccactccattgtgttgctactccttcaattcccaaaagcaatgtcagagcgagacatagcttgggatttccatctccgtaagctctctgctagcggcagagactccaacaccgccaacgatcctgcttccgattcatctcttcttccttcggtgaagaagcttcatgaaatatgcaagaacgagtactccgaggacttggtagctagggtttatccatccattaacaagattttccagcgcgctgtcgcttccctctctcaatctcgaacctccaatggccttcttttacttgaaattcttcagttttacctggactttggggaggttgttcttcatgatgcggatcctagtctcaggacattttttcgtttgtgcttgagcagggaatttgctgatcctgttgttgcagaagcaacgcttgaatttctcatcatcaacaagaagaagcttctaacttccttccctaacttattgcctcagttttttccattgttgttaaagttggttgcttggaatggtgaaagattagagaaactatttttgaaagcctttccgggcttgatgtcacctgggtcatttatttccttatttccatctttagtagacttgccaattttggtagtagcattggaaaaggtggaaaaaagctcaggaccactaattgggagcagcatagcttctattcagaaaaatactgcccctaagatgctacttgcccttatggatgaggcatatactggttcaactatagaagatggtggaggagattctgaatctgaggataacagtgcaattgatgtagctgatccgtttttccttgaacttttaaaggatgaaaatgatggtatcgctgaacggccctggtcgtctccagtgatggctgcgatattacaagcttcggtcaatagtccttattctgataggctgaaggcagtactcaacatggctcctcatcttcttgatgtgtacttctccatagcattgcatactgtcaataattctttgatttgtgcattgattcccctgcttatgtcaagatttgcaacaatatttccggacaaaatattttcctatgaggttcgcaagcgacttttggagtttatgctctctacatttcagtgttcaccaaatttcattgcccttttaaagaaacctataatggacagacttggagaagcttatgacagcccagagaagacagaattggccttgcaactatgttgggccattggagagcatggtggaggtggtggatctcacaaagatgaagcccgtgagctttttgagagtttagaactgcttctgtatgaaaacctttcctcaagtcgtgtgggcatgactcaggaggtatccgatgaggatacttacagaaggtcatcacagtccaggcttttatgttttgttgtgacagccattgcaaagcttgctacgtatcatcgagagttactgccaagagcacgtgtgtccttgggcaaggtggctcggtctcgaatttcagatcctagagtatggagacgtgcatgtgatttcctgggtttgatgaaagaccctgctatatgtgcatccatattggggccttcacgtcctgcacaaggcaccacacagaaagtaggcagcataaactggagtgaaggttcaacgaagatgattgcacatattccgttttacattctaggggaacaagaagggccaccttttcatgatttctcattctcagatatcattccaagcatatgattgaagctgaaattgtaccaggtggtcatcttggtagttgatatcattctgatctatcctacattgttactttcttaaatctgtatattattaagccttccgtaaataagcaagttcactttttagttatttgtccagatttctggtttattgcttggcttttagcattgaatcctaaagattaggattctacttgtaggcggacaagtttgagtagatttggctcttttcttgttgaaactatgattttgtccggcccattggaaaatatttagaccaatgtaatgtgattttcctgttaaatttggttatttaaaaaagttacggtttctattgaggtttggg

SEQ ID NO: 46468 - DNA, 342 bp, Glycine max
  Clone ID: PAT_MRT3847_141964C.1
agcctacaaagaccaacaaacagttccggaacatatttgtttcagctacaaagaaaaaccgcccctccccctctaaacaaaaaccattggcaagccaaataaaggctccacgctttctctagaaaaaaaaaagctccttatgactttctccacctttatgaggacctattgacactcgggtaacggactttacacccccacttgaagaatctcgcgagggatttttacttaaatctacagctgtggcgagtatagggtggggtttaacaactggatactgcctgatttacacctttaaaaaagggcccccgctttatcgcaaaagaaccttttttacttgcc

SEQ ID NO: 46469 - DNA, 950 bp, Glycine max
  Clone ID: PAT_MRT3847_141965C.1
aattcggctcgaggggaaagatactgagtctgatgtgctgactaattttgataaggatcttggaattcggtttagctcggccttgaactatattgtccgggttggctacattcttcatttgatacttgttttccctgttattcatttctcgctgcgccaaacagtggatgcgctagtgtttgagggatcacctcctctatcagaaagtaggaagagatctctggggttgactgtggttctgttggtcctcatatatattggctctaccatgattccaagcatatggacagcttttaagttcactggagcaaccacggctgtttcattgggctttatatttccttctcttgttgcattgagattaagtcatcagggggacttaagctatggggaatggattttatcttggttgatgttggtattagctgtgactgttagcatagtaggagttgttggcaatatctatagccttgagagtaagtcttagtccacgatttggtttctttttcacaggaatcatgtggtaatttttagtacagaacatttgttcattggctctgctgcaacgtaattcaaacagcggaggattgggggtgacaggattgttctgtagtatgggataagtatttttgccccagctatgatatatatgatatgagatgcacattaactttcatttgaggaatgatgaattgatgaccgattgattcaatatgagaggaatttgtggctgattagagtttgccacagacatagctatgtatactgttctgttctttatgcctgtatgatcttttttgttaatcgattttacacaaggatagtgttgtaacatgtgtaacagattcacataattgcttaactggcacatttccacgatttattttcattttccagctgtattagttgttttccatccaccaatttttttgtttttttgaagactgtgc

SEQ ID NO: 46470 - DNA, 372 bp, Glycine max
  unsure (1)..(372): unsure at all n locations
  Clone ID: PAT_MRT3847_141966C.1
gggtacgcgcgcggccccggtccggattcccggtcgacccacgcgtccgctctgcctcttccctctgagatgcaaatttctcaagccaaattagctctctgattcaccataccctgtctgttcaccccttctctttctcatcccctgtttcctcattttctctttcttccctcacaacacatcccccccccccnncccccccctttttccccctttgatttttttcctggggggaggggataatgtttttcttttttggnaaattttaaaccctttgaaggtttggggacctgggtngatggaccgaatggactttgagaggaaggcgatggtgtggnttttatttgattatgaataaaagaaaaagaatgg

SEQ ID NO: 46471 - DNA, 1541 bp, Glycine max
  Clone ID: PAT_MRT3847_141967C.1
gattccctgcaaagaatctaaatgactaaatccaaatccaggatataaagatatcacacctatcatcatttcatttgtttcttctccccttccatgaacactactttctccctcttcttccatatcttttgattaattctagctatcatagttttaaaaaattcaaccatgcgcctcttctctttcccacactacaaatccttttggagatcttcaattgcatttgcatttttcttaacatttctcactctccaaacccaatccactccaatcccatgcaacaaggacccctacaaggagctcaaccttatccctaacaaaaacggcaccgtcacgcgccccaacaaaccccccgagagcccgcccgcaccggatcccaacctcaacaccctcgtactctccaaagacatctccatcaaccaatcaaaaggcacatgggcgagagtctacctaccccgcgtggcactggatcacagctccaagctccccttattggttttctaccatgggggagggttcattttcctcggtgcggcctcaacaatcttccacaatttttgcttcaacatggcaaacgacgtcgttgcggtcattgcttccatcgaataccgtctggcaccagaacatagactacccgcggcatacgaggatgccgtggaggcactgcagtggatcaaaaccaacaaagatgattggctgacaaactacgtcgattactccaacgtttttctcatggggagtagtgccggaggaaacatagcctacaacgcgggtctacgagcagccacggttgatggtacttataatcagattcccaagatcaaagggcttattttggttcaaccatttttcagtgggacccaaagaaccggttctgagctgaggctagagaacgaacctcatttggcgctgtgtgttaatgacgcgttgtgggagttatcgttgcccgttggagttgaccgtgatcacgagtattgcaatccaacggcagggaatggtcctaagagattggaaatgatcaaacggcgtggatggtgggtgctggttaccggctgtggcggtgacccacttgtggatcgtcaggtgcaacttgtgaggttgatgcaaaggaagggagtgagagttctggggcatttcacaccaggggattatcatggggttcaagatagtgacccattgaaggcaagggagctatatggggtaattaaaacttttatttcagctttaaattaatgttcattgctcaagagtacttagagtaagaatttcttgtaattgcatcatttaatgagtgagagaaataaatattggatatagacattttaaactccacttatcccatttttttcctttctatgttaagtggtcatgatgtgtgaagtttgttgttgagaattgaagtctcgttttgtgtcttgcttgctagttccctgcttgatctttcagtagaaaacttcaaattattaaatgtaagctatataaacatttaatttttgcactttaaaaaaaaaaaaaaagggcggccaacgactagtgagcta

SEQ ID NO: 46472 - DNA, 164 bp, Glycine max
  Clone ID: PAT_MRT3847_141968C.1
cctacgcatcctcaaagctcacataaacttttatgcgactacatacctctcctatcctgtcgcctatattgaatttactttcattcattatacaaccttgtaaccgataactcctaatcaaatccaaaaatcatctcatttcatcacatacccttttctccatc

SEQ ID NO: 46473 - DNA, 201 bp, Glycine max
  Clone ID: PAT_MRT3847_141969C.1
ttttaataaaaaactcttctctacttccaatgaaaaccttaacatttttgccaattcggtagagaactttaaatctaatgcattatattactacgagtttccgaaaaaaaaatgcctcactctaacagagaaatgtatttccacacctggcttttccaactgaaggatcatttaggtgaagatcttatattgaaacacatt

SEQ ID NO: 46474 - DNA, 749 bp, Glycine max
  Clone ID: PAT_MRT3847_14196C.1
cctggataacattcttcttgagaaccttggcaacacaaggacattgcaagcagtttttgagcttgaagctcttgtcctcactggtcatttttctgagaaagatcatgaccctcctcggggacttcagctgatccttgggacgaaaactacaccccatttagttgatacccttgtgatggacaacctgggatattggcaaatgaaagtctcacctggagtttggtacttgcagcttgctcctggaagaagttccgagctttacattttaaaggaagatagtgaaggaaattatgataaaaaatcatcaaaactcattactattaatgattttcggggtaaagtatttcatatggaagtagtgaaaaaaaagggcaaggagcatgagaaattactccttcttgatgacaatgcacaagataataagaaaggaagtggcttgaattgcaacttcttaaaatgggcttctggtttcattggcggcaacaaatgatgcaaaaaggctggaaaaagtccacaagagaaaggaaagggtggacgacatggaaaaactattaatatctttgctattgctggtgggcgcctatgtgaacgctgtgtgaagattgtgatggtgaggggggtaaagaatgctggtgggggctggggggtggtggggggtgggggaactgccgtgggtgctgctgtggagggactgggtggggcgcgtggggcctggggggtggggggggggtgtggggcgggggggcgtg

SEQ ID NO: 46475 - DNA, 135 bp, Glycine max
  unsure (1)..(135): unsure at all n locations
  Clone ID: PAT_MRT3847_141970C.1
ggattngngcacaagaagggatagtcacttttcgaggattacataaattaccactacctccgagctctgctgcacttccttgttcacaatcccaacaagtttctcgcccggcgcgagttttccattaccaacccc

SEQ ID NO: 46476 - DNA, 121 bp, Glycine max
  unsure (1)..(121): unsure at all n locations
  Clone ID: PAT_MRT3847_141971C.1
ttgtggtgaaagcgataatcctagtccgagtataataactagtacgaatgatgcaaatgatagngatcccactgtaggagatagttctaataatctcgatgttagtgaaaaatataagcat

SEQ ID NO: 46477 - DNA, 144 bp, Glycine max
  Clone ID: PAT_MRT3847_141972C.1
tagggaactcctgaagctggctccaggaaagagatctcatgctcctggctcttttaggaatagcacaaatacctatgagagggaactccccccacaacctaatcagggtcaaagaaagggaataacacgccgggagggagccta

SEQ ID NO: 46478 - DNA, 173 bp, Glycine max
  Clone ID: PAT_MRT3847_141973C.1
acccgaaaaactaactaacataatatggggtgaaagaggtgagaatgtttatcatattggggcatattcaaagggaagtgaagatgttaacaacataaaataatgggatcaaaaagctgctgggacttaactcacccaacttcaaaagccaaaagcttaaacttatttttatt

SEQ ID NO: 46479 - DNA, 1233 bp, Glycine max
  Clone ID: PAT_MRT3847_141974C.1
ctatgatgggagacagaaaaagaaacatgaattatggggaatggctcggacgttgctgtgaaaattttgatggaacaggattttcttgctgagcgcttcaaggaattcctaagggaggttgcaataatgaaacgtttacggcatccaaacattgttttgtttatgggggcagtcactcagcctcctaacttatcaattgtcacagaatatttatcaaggttgtactcctctacatgttcctcatctttttccctcaaagagggaagtttttcaaggctatggataataggatattttgaccttgagattctaagagttcttgacctaagtgcaggggtagcttatataggctgttgcataggtctggtgccaaagaagtattggatgagcggcgtaggcttggtatggcttatgacgtggcaaaggggatgaattatcttcataaacgtaatccccccattgttcatagagatctgaaatctccaaaccttcttgttgacaagaaatatacagtgaaggtttgtgattttgggctttcacgtctgaaggccaatacatttctctcatccaaatcagctgctgggactcctgagtggatggctccagaggttcttcgtgatgagccatcgaatgagaagtctgatgtttacagctttggtgtaatcttatgggagcttgcaacattgcaacagccatggattaatttaaatccagcacaggttgtggcagctgttggctttaaggggaaaaggctagagatcccacatgatgtgaatcctcaagtagctgcactaattgatgcttgctgggcgaatgagccttggaaacgtccttcttttgccagtattatggattctttgaggccattgctcaaaccccctacacctcaacctggttgtccaagcatgccattactgacctgaatggtttgaacgccaaggttcttttcatgcacatatgacaggattttattggtctttgatgtctaacaagattacactgctttagttgtccctagagtcaattgtatatttctttaattcaggtttaagaaatactgatttccaacgcagagcatggatactccctctttattgttccaaacaaaattatttgattaggtgatcttgtaattttaccgagaaatgtttcactttttcttctttcataattttgtatgtaaaaaaacattcccattgtaattacattcagttaatgataagcagctttgcc

SEQ ID NO: 46480 - DNA, 2269 bp, Glycine max
  Clone ID: PAT_MRT3847_141975C.1
gctcgtttttttctcgaggttgatttaattggaaagccaggaaacttatccgagcctgattccttgctcaatggtccatcttccatctcattttcttcacccttgcgctttccacgacttaaaccagctgaaactaccattgatttcaggtcactggccaaacagtatttctcggactgtgtgtctcttgagcttgtctttgacaacaattctgcagaacagtttgatgggaagtgtaaagacaggaataaccctaggccaattttgactgacagcaatagaagttctcaccttcctctgcatcctcaagattctcatccaagctcacgggaacaaggttccgaaacatatcaatcatgtaaccctcctcagaacattgtagactcgaccatgacatgccgggaatggatgcctttaaagcataaatgtcctggtggtacagaaacacagacctgattactgattcctagcaaacatgctagagagttttaccttgatatggaggatttggacatatcgtggagtgatcttgttttaaaagggaaaataggatcaggttcttttggaactgtacatcatgcagagtggaatggctcggatgttgctgtgaaaattttgatggaacaggattttcaagctgaacgcttcaaggaattcctaagggaggttgcaataatgaaaggcttacggcatccaaacattgttttgcttatgggggcagtcactaagcctcctaacttatcaattgtcacggaatatttatcaaggggtagcttgtataggctgttgcatagatctggcgccaaagagatattggatgagagacgtaggcttagtatggcttatgatgtggctaaggggatgaattatcttcataaacgcaatccccccattgttcatagagatctgaaatctccaaaccttcttgttgacaagaaatatacagtgaaggtttgtgattttgggctttcacgtctgaaggccaatacatttctctcatccaagtcagctgctgggactcctgagtggatggctccagaagttcttcgtgatgagccatccaatgagaagtcagatgtttacagctttggtgtcatcttgtgggagatcgcaacattgcaacagccttggagtaatttgaatccaccacaggttgtggcagctgttggctttaagggaaaaagacttgagataccacgtgatttaaatcctcaattagcctctataattgagtcttgttgggccaatgaaccctggaaacgcccttctttttcaagtataatggattctttgaaagtattgctcaagccccctatgcctcaacctggtcgtccaagcatgtcattactgacctgaatggttggaatcatagttgttattcatgcacatactacaggattttattagttttgatgtctaacaggaatacactgtttcaatagtcccagaggcacagttgtacatttctgttctaattcggagtaagaatacccattttcaacgcaaagccaggatactccatctttattccaacaaaatattgtttagttaggtgatactatattttgtgaagaaatgtataatttttttcatccataaatttgtatgaaaaattattctcattgtaattataatcagttaatgataagcagctttaacggtcttggctaaagtccgatgtttacagcaatcttatgggagcttgcaacattgcaacagccatgggttaatttaaatccagcacaggttgtggcagctgttggctttaagggaaaaaggcttgagatcccacatgatgtgaatcctcaagtagctgcgctaattgaggcttgctgggcctatgagccttggaaacgtccttcttttgcgagtattatggattctttgaggccattgctcaaaccccctacacctcaacctggtcgtccaagcatgccattactgacctgaatggttggaacgccaagttgcttttcgtgcacatatgacaggattctattggtctttgatgtctaacaagatttcactgctttagttgtccctagggtcaattgtatatttctttaattcaggtttaagaatattgattttcaacgcagagcatggatactccatccctctttgttgttccaaacaaaattatttgattaggtgatcttgtaattttaccgagaaatgtttcactttttcttctttcataattttgtatgtaaaaaaacattcccattgtaattacattcagttaatgataagcagctttgccagcgcc

SEQ ID NO: 46481 - DNA, 1051 bp, Glycine max
  Clone ID: PAT_MRT3847_141976C.1
cccacgcgtccgcacgttccgagttttctgatcgctcatagagagttcgacgcggcggttgcagaagaagattgcaagatgaagttcaacatcgcgagtcccaccactggatgccagaagaagctcgagatcgacgacgatcagaaactacgagcattttgggacaagaggatctcacaggaggtcagcggagatgcacttggtgaggaatttaagggctatgtcttcaaaattactggaggttgtgacaaacaaggattcccgatgaaacagggagtgcttactcctggtcgtgttcgacttttgcttcacaggggaactccttgcttccgtggatatggaaggcgtaatggagaacgtaggagaaagtctgttcgtgggtgcattgtcagcccagacctctctgttttgaacttggtaattgtgaagaagggtgagaatgatttaccaggattgactgatgctgagaagccaaggatgagaggcccaaagagagcatccaaaatccgtaaactgttcaacctgtccaaggaggatgatgttaggaagtatgtcaacacctaccgtcgtacatttacgacaaaagctgggaaaaaggtgagcaaagctcctaagatacaaagactggtcacccctcttacgctccaacgaaagcgggcaagaattgctgataaaaagaagagaattgccaaggccaaatcggaggcagcagagtaccagaaactccttgcctccaggttgaaggagcagagagaccgccgcagtgagagtttggctaagaggagatccaagctttccagtgctgccaaggcagctgtgtaagctgctttcagatataaagagatatggtgaagttttaatcatcatatttagtttttgtttgttattttataaccggctgttgtgataaactctggttttgctatttttgattacattgagttattgaagtatttcttatgcagtgttactcattgaatcatatttattatccatttctagtttatctattttatgtatgaggagattattaatagtcattgtggccatc

SEQ ID NO: 46482 - DNA, 1112 bp, Glycine max
  Clone ID: PAT_MRT3847_141977C.1
aattcggctcgagctcgagccgattcggctcgaggctgcgagaagacgacagaaggggaccgtgcgctagttctgagtattctgatcgctccctgagagagctcgtcgcggcggttgcagaagaagattgcaagatgaagttcaacatcgcgaatcccaccactggatgccagaagaagctcgagatcgacgacgatctgaaactgcgagcattttgggacaagaggatctcacaggaggtcatcggagatgcactcggtgaggaatttaagggctatgtcttcaaaattaccggaggttgtgacaaacaaggatttccaatgaagcagggagtgctgactcctggtcgtgttagacttttgcttcacaggggaactccttgcttccgtggatatggaaggcgtaatggagagcgtaggagaaagtctgttcgtgggtgcattgtcagcccagacctctctgttttgaacttggtaattgtgaagaaaggtgagaatgatttaccaggattgactgatgttgagaagccaaggatgagaggcccaaagagagcatccaaaatccgtaaactgttcaacctgtctaaggaggatgatgttaggaagtatgtcaacacctaccgtcgtacatttacgacaaaagctgggaaaaaggtgagcaaagctcccaagatacaaagactggtcactcctcttacgctccaaagaaagcgggcaagaattgctgataagaagaagaggattgccaaggcaaaatctgaggcagcagagtaccagaaactccttgcctccaggttgaaggagcagagagaccgccgcagtgagagtttggccaagaggagatccaagctttccagtgctgctaaggcagcagctgtataagctgctttcgatagagagatatggtgaagtttaatcatcatatgtagtttttgtttgctatattatgacggctgttgttatgataaactatggttttgctatttttgattacattgagttattcaagtatttcttacgcagtgttacgcattgaatcatatttaactagttggaatatgttatccatttgaagttattttatgtatgaagagatttattcatattgtggcc

SEQ ID NO: 46483 - DNA, 154 bp, Glycine max
  Clone ID: PAT_MRT3847_141978C.1
ctcacactcagctagattttaatgccaacaccttcaccgctaaatcctccatcgcactgggggcaatagcttatgtgatgcgccgcacccaccggaaccatccacagatacgacgcaagcctaaaaaccaaagactcggctagatgcccggaga

SEQ ID NO: 46484 - DNA, 264 bp, Glycine max
  unsure (1)..(264): unsure at all n locations
  Clone ID: PAT_MRT3847_141979C.1
gccgcgccggaaccgcccgggtccgacccacgccggccgtttacgcgaaccgcccacgcgnccgactcagagggacaggacccagacaccagccaccggacaacgcaagacaccgaggaagaaacaaccaagccccacaggcacaatagggactccagcgaaccaccgacaacaggccgcacacacggagaaaaggccacccaggcaaaaagcagagaaagtgcggaatgggacagagactggcccggaaaagcaaagagacac

SEQ ID NO: 46485 - DNA, 315 bp, Glycine max
  Clone ID: PAT_MRT3847_14197C.1
gtcctccctccagcgacttcacatttaggattgctgctagagttacagaacattcagtaattaccgtttccttggggcgtgttcccaggttaggcttctcacgtgtgggtgaatctctactttcggagattcctagtgttgaaagttcctatccttcaagaggtcagcagcaggaaaggacagtgatcaaggagcatgttcttgaattcttattgactatgaatcactctgaggaagctgacaaccctgggcctagatctggctcaaatcttgtagatcacataattgacacacatgttgatcagattcaagacc

SEQ ID NO: 46486 - DNA, 1037 bp, Glycine max
  Clone ID: PAT_MRT3847_141980C.1
ttacaacaatgggttgccttcaaatctcactgctagcagaaatcctagcttggactatgggttcaagggagctgaaattgccatggcttcttactgctctgaactccaatatcttgcaaatccagtaactagccatgtccaaagtgctgagcagcataaccaggatgtgaactctttgggtttaatttcatccagaaagacaaatgaagctatcgagatccttaagctcatgtcttccacattcttgattgcactttgccaagcgattgacttgaggcatttggaggagaatttgaaaaactcggtcaagaacactgtgagccaagtttccaaaaggattcttaccacaggtgtcaatggagaactccatccttcaagattttgtgagaaggatctgctaaaagtggttgatagggagtatatattttcctacattgatgacccctgcagtgctacatacccattgatgcaaaaacttaggcaagtgcttgtagatcatgcattggtaaatgcagagagtgagaaggatgtgaactcgtccatctttcaaaagatagcaatctttgaggaagagttgaagaatctcttgccaaaagaggttgaaagtgcaagggttgcttatgagagtggcaaagctgcaattccgaacaagatccaagaatgcagatcttacccactgtacaagtttgtgagagaggaattagggactgggttgctaactggagaaaaggtcaggtcaccaggtgaagagtttgacaaattattcacagcaatgtgccagggcaaaattattgatcctcttctggagtgccttggggagtggaatggagctcctcttccaatctcttaaatttattgtaactcttaacaaatattttatttgtacctatgcaagaaaaaccataatcatttggtttgtctatcatttaacaaatgttcctttaatgtcaaataggaccttgtaatttaatattttaatggaatttcagtagtttgccggagctttggttctattatatactaagtctcattttttg

SEQ ID NO: 46487 - DNA, 401 bp, Glycine max
  Clone ID: PAT_MRT3847_141981C.1
gcggacataatgtaattcaaatgatgcaaccttgttgacatgtttttaattaactcgacatgatacagggacccccaaaaactcataacatcccactggggtttcccattctcatggctgaacctggtctttttatttacacacacatcctgaacattatgcgcagaatcagtggcagccatccttttagggaaaaaaaacttttctttctgagaggggcttctccaaagtccactcccataaaacctctgccacatttcgttctccaaatcgaccacctttttgttcttctccacagagctccggctccatataaccgccccttctatgcccatagaagctcacagcgtttaaacccacctggctccaatgattccctcacagcagccggctgggcaccg

SEQ ID NO: 46488 - DNA, 519 bp, Glycine max
  Clone ID: PAT_MRT3847_141982C.1
tttttttttttttttttttttttttttctattttttatttttttttgttttttgtggtttttttattttttttttttttgggggagtggggaacatttatttttttttttattatgtaattaaaaaaacaaaaaacttacatttagatattttatatttacatgagacacaaaaagggggaactggtaaaaatttttttgtagaaagggtaaaatatttagtaatttaaaaccggataatattgggattttttttccccgaaaaatttggggttttttttagggggggcccaggggaaggaaggaaaaaccttgtattcttttttaaaaaaggaaacaacccccttttggaatttttcggggcaaaagggagccttggggaaaaaaaatatggttcactgagggaaaaaaggcgacctgatatttttttcaataaaaaaatgggtaattgtttcgctaagggtttgatattgggaaaacaggtctggggtaaaggggaaaacttatttgggggtattat

SEQ ID NO: 46489 - DNA, 454 bp, Glycine max
  Clone ID: PAT_MRT3847_141983C.1
cgcagacgacagaagacaacgcatgcttatgctaactatatatttataccacaacgcgactcttgatactcatgggaatgatttattcgtactgtgatgaatcctaactattatgataaacttattaaatgtaattaacattagaatttttacttcactttggattcttaaacatctgtacccttacaaactgacactttattgataccgaaacttgaaaattctttgattctaaaagctgcatactagcgaagtatcgattagagcatatcattactgtatttaactattcaattccgctctaaagaacatacaccttactgttatacagcactttcttaaacataatcctcattgcttcagtttttctattgtcccacatttgtcattttaccatgtgaataccaatttatattattattcttattagcataaatcatttttaatattctca

SEQ ID NO: 46490 - DNA, 627 bp, Glycine max
  Clone ID: PAT_MRT3847_141984C.1
ctcctccatacgaaccggtccctgataatatcaagttcttttatgatggaaaagaagttgagctgtctgtggcagcagaagaagtggccaccttctatgctaaaatgcttgaacatgactacacaaccaagcctgtgtttgataataatttcttcaaagattggcgtaaggttatgaccgatcatgaaagatcaattattactgatctcaagaaatgcaattttaagcctatgaataagtatttcaatgagcaatctgaaatccgtaaggctatgagtaaagaggaaaagaagaaaatcaaggagaagaatgatgaaatccacaaagagatgggcttttgtactattgacggacaccaagagaaaattggcaatttccgtatagaacctccagggttattccgtggtagaggtgaacaccccaaaatgggcatgttgaagaaatgagtaatccacacgatgtttaatcagctgtcgctaagattctaaggttctaagctcctgcgggacccatgtggaagaggttcgtcatgaaaccaagtccctgcttgcattggattgaactgctcatggcgtgcgaatatgtgagttgacgtccggggcacgctcatggataagggattgggat

SEQ ID NO: 46491 - DNA, 413 bp, Glycine max
  Clone ID: PAT_MRT3847_141985C.1
ctcctatatggaatgctgggacgcctcacgtgaccgaccggaactgccgggccggcccgacccactttgttttgctcgcgtggggttatcgatgtctgtggctgacgatacagtcaccgctgcaaatgtaggcacgggcccattatggttatgtgggtcattaactcaagaatcttgatgatgttctttatccaatgaatggctctcccgactgaggttctttccacctagccgtagctgcaacttgatttcacggacgcgaaatgaacaagagccttgatacacggagatgggcaaattcgtccaggtactgcacaagaagaagaacccagtggtgaaccgcgccgaagactcaaccggatgagtgtctccaccgtagagcgtgaaggacattgacagacagagagagcaca

SEQ ID NO: 46492 - DNA, 672 bp, Glycine max
  Clone ID: PAT_MRT3847_141986C.1
atggatgttaaagaaaatcttgctaagattgaaaaggaaattgatgcaagcattaaaaaaagtgcgcattcagcacaacctcacgtgattgcagtaacaaaatatgttacaatagagcgagctagagaagcgtataaaataggaataagacatttcggtgaaaatcgattagatggattcaaagagaagaaagaatctctaccaagcgatgttaaattacatttcattggttctttacaatcaaggaaagtaaaagatattataaatgaagtcgattattttcatgctttagatcgtttaagtctagctaaggagattaataaaagagcaaatcatgttataaaatgtttcttacaagtaaatgtttctggagaagaatctaaacatggcatagctcttgaagaagtgaatcaatttataaatcaaattaaagaatatgaaaatatccaaattattggattaatgacgatggcaccattgactgatgatttatcgtacataagaaatttatttaaagaattaagacataaaagaaatgaaattcaacaattcaatttagcacatgcaccttgtacagaattatctatgggaatgagtaatgattatcaaatggcagttgaagaaggtgcaacctttgtcagaattgggactaaacttgtaggagaataggag

SEQ ID NO: 46493 - DNA, 3102 bp, Glycine max
  Clone ID: PAT_MRT3847_141987C.1
cccacttcgtccgcccacgcgtccggggggggtggagttgaggagtagtatacatagcagcagcacacacggggagagagaaaggaagacaagagagaatgacagagaaaacgtttaaaatgaaaacccaatgacccaacacagattcacaattcagtttcagagagagagagagagagagagatccactcttacaagtcaaactatgtctcactctctacattcacatttcacacacacacacccttcccctgaaatgacccttttgcccttctctctcggccttcatcttcttcttctcctttgactcaacaaccccccctctctctctttcacacagagagacactttctctctctacaccgcaatggacgccggcgaagccctctccgacgatccgaatcggcccaattccgccgccgacgcagctccggcccccgcgggagcaaggtacaagctcctgtcgccggctaagctcccgatctcccgctccccgtgcgtcacgatttcgccggggctcagtccgacgtcgtttctcgagtcgccggtgctgctctccaacatgaaggtggaaccttcaccgactacagggtcgctttctttgcttcatcaaacagcatatggttccatgacttctgctgcatctgctacatttcctgtaaccactgtgtgcttcaatagcacacgcaatacgtaacgatgatgagaattcggctcgaggaaaacctagcttctttgagtttaaaccacacaatagatcaaatatggttcccgcagactttgacaaccatgcaagtgaaaaatctactcaaatagatggtcaaggaaaagctcaagcttttgattcatcaccattagtaaaaaatgagtcagcatccccttcaaatgaattaagtctatcatcacctgttcaaatggattgctcaggaggtagtgcccgtgttgaaggtgatttggatgaattgaaccctagaagcaacataacaactgggcttcaagcatcacaagttgacaatagaggtagtggactttccgttgcagctgatagagtatctgatgatggatacaactggagaaaatatgggcaaaaacatgttaaaggaagtgaatttccacgcagttattacaaatgtacacatcctaattgtgaagtcaagaaactatttgaacgctctcatgatgggcagatcactgagataatttacaagggaacacatgatcatcctaaacctcaaccaaaccgccgttactctgctggaactattatgtctgtgcaagaagagagatctgataaagtttctttgaccagccgagatggcaatggatcctatatgtgtggccaggggtctcacctggctgagcctgacagtcaaccagagctatcgcctgtagcaacaaatgatggtgatctagatggtttgggggttttgtcaaaccggaataatgatgaggttgatgatgatgatcccttctcaaagcgaagaaaaatggaccttggaattgctgacatcactcctgtagttaagcctatccgggagccacgggttgttgtacaaactctgagtgaggttgatatcttggatgatggctaccgctggcgcaagtatgggcagaaggtggtgagaggcaatcctaaccctaggagttattacaaatgcacgaacactggttgccctgttagaaaacatgtggagagggcatctcatgatccaaaagctgtgattaccacatatgaggggaagcacaatcatgatgttccaactgcaaggaatagttgccatgacatggcaggaccagcaagtgcaagtggacagacaagaattaggcccgaagaaagtgataccatcagccttgaccttgggatgggaattagcccagctgctgaaaacacaccaaacagtcaagggagaatgatgctttctgaatttggggatagtcaaactcacaccagcaattccaatttcaattttgttcatactacgacagtgccggggtactttggtgtgctaaataacaactctaacccatatggttctagagaaaatccaagtgatggtccatctttaaaccattctgcttatccttgccctcagaacatagggagaatactaatgggtccttaaaattgtttgtacaacaaaaaactaaataaaatgaaattctgagttccattttgctttttcttttttggcgggtaaagctttaaaagcatagctcctcattttctctttggaaatgctgatagttcttttatgttcatatccttatatgatgagagctgctctttagcagaattagctgtagctgtgccccttcaggttgactcttaattctaattgctgtttgtataattatatacagattcttctgtacaaatatgaagcttataccaaagttgcttcaacaaaaaatcttgtaaaagtgtttggtggattcaactatttataagtagtttctagcctgttctcaaaatcatgaattttaaccctgagaattgctgtaaattcacggcagccagagttgcacacccctaagtaaaagggatgctttctcaatttggggatagtcaaattcacaccagcaattccaatttcaagttcgttcataccacgaccgcgccggggtactttggtgttctaaataacaactctaacccatatggttctaaagaaaatccaagtgatggtccatctttaaaccattctgcttatccttgccctcagaacatagggagaatactaatgggtccttgaaattgtttgtaaaacaaaaaattaaataaaatgaaattctgagttccattttgcctttttttttggcgggtaaagctttaaaggcatagctcctcattttctcttcggaaatgctgatagttcttttatgttcatatctttatatgataagagctgctctttagcagaattagcagtagctgtgccccttcaggttgactcttaaatctaattgatgtttgtataatttatatacagatttcttctgtacaaatatgaagcttataccaaagttgcttcaacaaaaaaccttgtaaaagtgtttggattcaactatttataagaagtagcttttagcctgttaaaaaaa

SEQ ID NO: 46494 - DNA, 377 bp, Glycine max
  Clone ID: PAT_MRT3847_141988C.1
cccatatgtgccacagagaacgaaaatatcctttcagaggctgaggattgggattctgcaaggctactctcatgtgccaggattttctgtccggcagatctagagcaaagatggtggtatacagcgagctcctcctaatgatgtgcaagaactgtttgctttgacttgatcgaaggttaggttcaaaaagggttatcatgcaagacccagctgtagagtatgcttgacatatctgataatctctatttctgctataactgacataatgatatcagaagtgtgagcttttccaaccagaatagctatctctctgctgcacatgactatccgaaagaaacaaagtcactgctcagagcatactactcactctgtgacac

SEQ ID NO: 46495 - DNA, 693 bp, Glycine max
  Clone ID: PAT_MRT3847_141989C.1
tctacaccgctatggacgccggcgaagccctctccgacgatccgaatcggcccaattccgccgccgacgcagctccggcccccgcgggagcaaggtacaagctcctgtcgccggctaagctcccgatctcccgctccccgtgcgtcacgatttcgccggggctcagtccgacgtcgtttctcgagtcgccggtgctgctctccaacatgaaggtggaaccttcaccgactacagggtcgctttctttgcttcatcaaacagcatatggttccatgacttctgctgcatctgctacatttcctgtaaccactgtgtgcttcaatagcaataccgttgatgagagaaaacctagcttctttgagtttaaaccacacagtggatcaaatatggttcccgcagactttgacaaccatgcaagtgaaaaatctactcaaatagacagtcaaggaaaagctcaagcttttgattcatcagccttagtaaaaaatgagtcagcatccccttcaaatgaattaagtctatcatcgcctgttcaaatggattgctcaggagctagtgcccgtgttgaaggtgatttggatgaattgaaccctaggagcaacataacaactgggcttcaagcatcacatgttgacaatagaggtagtggactcaccagtgcagcttggcgagtatctgatgatggatacaact

SEQ ID NO: 46496 - DNA, 1060 bp, Glycine max
  Clone ID: PAT_MRT3847_14198C.1
attttcgtccattaccacttccacttttcctctctctcgttttggtcactccaaagtccaaatcgatcactcttcactctcattattcccaacctaacaacaacaatgatcccagaacactactccgactcatctctcttccacagctccctccttaccctcttcctaatcgcaccccccaccttcctctccctcaccttcctccaggccccctacggcaagcaccacaggcccggctgggggcccaacctccctccccccttagcctggctcctcatggaaagcccaaccctctggctcaccctcctgctcttcccactgggcctgcactcccacaaccccaaagcccaggccctcatcacccccttcctaatccactacttcaaccgcaccatgctgtaccctttccacctgctcctcactccttcaaagaaaaccacaccgggcttccccctcagcgtagccctaatggcattcgccttcaacgttctcaattcctacctccaggcccgaacggtctctcactacaacaatcactatgatgactcgggctttttctggttccggtttttgtgtgggcttttggtgtttttattggggatggggattaatgtatgggctgatagggttttgttgcggctcaagagcgagggaaagggctacgtggtgccgcgcggtgggttgttcgagctcgtggcgtgtccgaattactttggggagattgtcgagtggctcggctgggccgtgatgacttggtcatgggccgggctgggcttttttgtttacacttttgcgaatttgggtccaagggcccgggccaaccgtaggtggtatttggagaagtttggggaggattatccaaaggagagaaaggctgttattccttacttgtattgagtttttttttaatgattttcttttattggatttggaattgggaatgtgggtaaaatgatgaataattgaatgtggtgatgaatgatgcaatgcagctcaacttgcttaatgtgaggtcaaggatttttttcttcttcttaattatcaatttggtttctaaatt

SEQ ID NO: 46497 - DNA, 491 bp, Glycine max
  Clone ID: PAT_MRT3847_141990C.1
tttttctgttttttttttgttttttttttccataaaaagggaaaaatttggattaccctttcatgagaagggcaaccaaaaagaatcattttgtttggggaggcaagccacccgctagcgaagggttcccttatattattttattaacataacggcaaaaggggaattttttacaagaaggtatttacgcggtgtgcttttgccacaaaaacacacccgctaggaacggttgattattccttaaaaatgatccttcccttgaagactaactttctgaaagaacaccatgtggggcaggggagcccgctgcaaaacctggggacaaaacggaattactttggggggggtcctggacctggtggagaaggcaccaacatgtttgcttgaggacccttctccttaaaggattcacgcaacttcttttttgatatggaaatggccatatccctccattccacataacttgtgctaccggaaacacttttaaatga

SEQ ID NO: 46498 - DNA, 205 bp, Glycine max
  Clone ID: PAT_MRT3847_141991C.1
ggagatcgggatgaccttcggttgggtgtacacattttactccactgccgttgaccccaataatggcaatgtgggaattgttgctcccatcgtcattggttccatggatggctgctaacatttttaatggtggggcctatctccatatcagctcatgaaccctgctgcgacatttgtgcctgctgatgtgagctggacctggacc

SEQ ID NO: 46499 - DNA, 149 bp, Glycine max
  Clone ID: PAT_MRT3847_141992C.1
tcggctcgagcgacgacgatggggggagaaaagaagcagataagctaacagaggcaacaatgggaaatccttctaggctaatcccattattacttgactaacttgtgatactaatgcccttaaattacttatcacaacatgacttcact

SEQ ID NO: 46500 - DNA, 316 bp, Glycine max
  Clone ID: PAT_MRT3847_141993C.1
ggctcgaggacctctatatgatccttagaacacggccgctgtattggtaactttttgaatttgaggttcacatttactttgatgctaatgaatagaatgtactattatacattggctttacatgagagaaatatatagtacactaaagcactgttaagatatgttggctatgggggtggctaatgataggaccccaagataactaaggcgtaggtaagatgaacgaagaatttgggtctgccttcggtgaaagcctaatattagttgcttgaaatgctgagatccatctgggagaggttgggcactctaaaattac

SEQ ID NO: 46501 - DNA, 319 bp, Glycine max
  Clone ID: PAT_MRT3847_141994C.1
gggaagaaatgggaataatttattttgaaagccattatactacatacaaacatacagagggccccatccctttttctatgtacaataattattccccctctatcgacatatcgaagtggccccccgaataagtgaggacaattgaaacccgcacccccaaagggggcatcctttaaaaaatctccgaaagttcattttaaaatagaaatttatttttgagaaacaacctctccaaatattatatggggaacgccgaaatcaaattgtttcagtgggaatcattataacagcacgcttctatggggtttgaacaaaaccc

SEQ ID NO: 46502 - DNA, 620 bp, Glycine max
  Clone ID: PAT_MRT3847_141995C.1
cccacgcgtccgggaaactgttagatcctcagccatagaaatcagtcaaattgataagacatgcgttgtttttggaatattaatctgtttcaaagcccgcatagcatattcttgatgagtttggttagggaagaaaaaccatagaaaaagagaaagaaatctgaaataagatcgagtatggaaggattggatggtttgatagagaggcttttggaagtaaggaagaacagaggcaaacaaattcaactggtagagtcagaaattcgcagcctttgcagcacggcaaaagatctcttcctcaggcagccaaacctgttggaattggaagctcccattaacgtttgtggtacgtaattaaaattaattttgaatgtatgtaattaataacctagctagctagcagaggatgcaggtgtaacatagagttggatcaggtgatatacacgggcaatatccagacctgttgcgagtgttggagtacggtgggtttccgccggattcgaattacctattccttggagactacgtggacagaggaaaaccagacgtggaaacaatatgcctgctgctcgcctacaagataaaataccccagaaaactttttcctttttcgaagaaac

SEQ ID NO: 46503 - DNA, 246 bp, Glycine max
  unsure (1)..(246): unsure at all n locations
  Clone ID: PAT_MRT3847_141996C.1
ggnnaaatngtntcgctgaaactgcagangcggctcgncgcgagcgtgctcaantgtggcanaggaaangtttggcntgacnccaangaagtcancganatctccatggncaattctcgncannacatanggaanctggttaaggatgggtttatcatcaggnagcncaccaagattcactgctcgctcacgtgctcgtcgantgaaggaanccaagaggnaaggncgtcactcnggatacggtat

SEQ ID NO: 46504 - DNA, 639 bp, Glycine max
  Clone ID: PAT_MRT3847_141997C.1
cccacgcgtccggatcactccaagcgaaggaaactatgggcaaaacgttcctttttttctattctattgcttggagtgattaaggtttggggtttgttgatttcgtgtagtgattaagagaatggcagaagaaagcgagggaccgatagaggaaagggagatcatacctgtttggctctctggttcgttggtggtgactacccaatgaggactcgaggagacaaagtaaaagagaggagcaaggaatccataaattttctgttggttcttttctttcctcttttatatgttttcttttttaattttggatgttggggacgtgcatgtagtcgtccccaatacgtgcccccgacggccagctgtacccaagaaattgacgtcattcccgggacgttcccttgccaccctgttccgtccccatcctcatgcagtaccggaaacaggggacaccacctagcaggtgtccccgtgctttatacctttctagattttttcttttcatgactcaatttgagaatttaactgaattcaattttagatattctggacgtttcttttcaatcaaaatttgttattgaagttcaaatttgcgattgtattccatgtattttttgtactgaagtccgaattttcctttga

SEQ ID NO: 46505 - DNA, 412 bp, Glycine max
  Clone ID: PAT_MRT3847_141998C.1
cggtaaagaaacaattttttttccccacagtaaaacccccccccaaggttttcccctataccaaaaccgtttgaattttcccaaaccccaatcccttttaaaaatcaacaaaacctaattggcaagaaagaaattaaagggtatgaatcctgggggagataatcttccttgcataaaaagattttcctggctttaaaaaaaaagaaatcccccttatggaaaaccttccgtgaactggggggaagaacttaacctgccaggagttgctgaacctgaaaatttgggctccccttaagaacttggaaaattgaaggccacccgtacttttacagggttcacctcctttgaactcttgcaaaggatttggccttgaacggacaaaaacttattttccggcaaggaaaccattttt

SEQ ID NO: 46506 - DNA, 401 bp, Glycine max
  Clone ID: PAT_MRT3847_141999C.1
cacttaactcttggagtaaatcacggtaccgtcccaccccgcgaaaccctaattgttcacacctaaaccctttgcttcactgtttgctttctccccttttcttttggcgggggtatcttcacttgcaaggctccaccttctgcaaatcaaaacagatgctacattaggtcaggttgtttattgtgctgctgatgtattctccttggctaggaaaagacccacctcatcacccgggtaacaccatcaacaatccataatcatctactgggaacctgctattcgaggattacgagggtaatctggtactccgaggaaaagacgaacaagggtgtttttattcatttattatgcattgtaaaaattgaatgtttgggagggtgggtctggaagcatcacgagtg

SEQ ID NO: 46507 - DNA, 339 bp, Glycine max
  Clone ID: PAT_MRT3847_14199C.1
aaaagggcaaaaaaattgggtgacccctctaataatgaaaataccccgaataacataatggttaaagcaacgttcttttcaaaagggaaaaaaagtttgaatcccctcccacaaaaattatgccttaaaaatcccattgaaaaagcctaaaggaaaataagtttttaaaaccgggttttgggggaaagcaaccccttttgggccccttcctcaatttgggggcccgccccccttccccccagggggggggcaggtatttttttctttgttggcccccccccccccccgtttgggcccccccccccttgggacaatttgggaatggtggggttgcagaac

SEQ ID NO: 46508 - DNA, 193 bp, Glycine max
  unsure (1)..(193): unsure at all n locations
  Clone ID: PAT_MRT3847_1419C.1
gggtcccatagtcatgggcctttatgggaacacgggaccgaaaactgccnaaaactttccagcgctttgtacaggagaaaaaggagtggaaacaattgctaaccctcttcattataaacgcaccacctcccctaggattatacccacctttatggcccaaggcgctaatcccacccgtgcccaagaaacaggt

SEQ ID NO: 46509 - DNA, 929 bp, Glycine max
  unsure (1)..(929): unsure at all n locations
  Clone ID: PAT_MRT3847_141C.1
ctagttctagatcgcgatctagaaccacggctgcgagaagacgacagaaggggatagatagaatagatagggtgtgggaaataagaacagcaacttctctttactgtgtgtgaaaaaaatggccacactcacacttttatcatctctgtctctgcgctcttcttcttcttcttcttcttcttcttttacactctcttcttctttttcttctccctcctcctttgcctttttttgtagcttccccttgcgctctgccacttcatcattgaaggtacaaacaattcagaagaagaagcgcgtggtgaaggcagtggaagaagatacccagcaagaactcaacgctgctgatgactctgaacaaccatcaacctccgaagcaccacccgttgtggttcccgtttccccatcagatactctcaccatgttctttcaggcagagggaacagtgagtgaaacagctattccagctttgaccaaagctttagaggagacagaaggtgttacagatttgaaggttcagcttgctgaaggacttgcaattttagagttgaagaagcagacaacagtcccagctacaggagtggcttctagttttgtaaaaaccatacaaggttccggctttaaattcccgcccttaaattttagtttttaggatgaaaaagttgcagttgcctaaattaaatgtactggtgtaataaccatagttttagggaggtaaaaaaaagggtttaaaaaacttgcctttcccccttttttgactaaagcctcccaccatctattttggtttgtatagggctgactgagggtaatggttaataatgttgttgttcttgttatccataatggtaatatttcctgaaaaaagtgagattattttaaaaannnnnnnnnnnnnnnnnnnnnnnnnnnnnnnnnnnnnnnnnnnnnnn

SEQ ID NO: 46510 - DNA, 1045 bp, Glycine max
  Clone ID: PAT_MRT3847_142000C.1
gaggccacttgtacctaccacagtcacccactcagctaagcttttagaatttgagttaagttaccttccttcaaccataatacccctgccagctctgtcctgttcctcaatctctctacatatctatctatctttctatcatcacaggatccttaataagtcagaactttgtcacaactttttcccatcactttgtggaaagatattcattctaagggaaaaatgacagaggagcaatccaaaaaggtggctgagactgagagttttccctctaatcctgcacctgaacctgttgttgttccaaaggaggatgtggcagaggagaaatctgtaattccacaaccctctccctctcctgctgatgagtccaaagctcttgtcatagttgagaagactagtgaagttgctgaagagaaaccgattgaggggtctgtgaaccgagatgctgtgcttgcaagagttgcaaccgagaagaggctgtcactaatcaaagcatgggaagaaagtgaaaagtccaaagcagataacaagtctcacaaaaagctttcagccatttcagcatgggaaaacagcaagaaagctgcagcggaggcagaattgagaaagattgaagaacaactggagaagaaaaaagcagaatatggagagaaattgaaaaacaaaatagctacaatccaccgagaagctgaagaaaagagagcatttattgaggcccaaaaaggggaagaattcttgaaggcagaggagactgctgcaaagtacagggcaactggaacagccccaacgaaactctttggttgtttctaacaagcctgatcattaaaaaatgctgtactattattattattattttgtattttctttgatagttcatgtcagtacatcgtgtgtggtttggttgtcttttgctgagttgtagttcatgttcatttattatgtttgcatagtgatatcactgatatgttggtgtgaatataacaatttactttgtgtatacacaagaaattgaattattcaatttgggtattacgaaaaagaaagaatg

SEQ ID NO: 46511 - DNA, 1629 bp, Glycine max
  Clone ID: PAT_MRT3847_142001C.1
gcacccgggggcctgttccatcggggtgtcttggttctcgaatcccgacccccgcgctgctgcccgggccggctccgccctagcatggctatagctataatctagaggcaatgaatccttctctcacttcttcttcctcaaccttgtcgtcttctccttcgtcctggttctcgaccaccatcacctcagcatggctataactataatctagacaaggcaatgaatccttctctcacttcttcctcaaccttgtcgtcgtcttcttcgtcctggttctccggaatcgttcgagttggccgttccaacagtgtcaaaatgtccaataactccgctgctgcaccctcctccgacactgccggccccgtcgtccgcaaaaatcagttccgaggtgttcttttcaagtacggtcccaatcctattcaggttgcatttaagactggtgatttcaagcggcaagtcatttttattggtggattgaccgatggttttctagctactccatacttggaacctctggcaattgctctggaccatgagaattggtcgttagttcaattccttatgtcatcttcatacagtggatatggcacctccagcttgcaacaagatgctaaggagctggatcagctgattaattatttaattaacaaagaagactctgaaggtgtggcattacttgggcatagtactggctgtcaggatattgtgcattacatgcgcacaaattttgcttgctcccgagctgttcgtgctgccatctttcaggctccagtcagtgatcgggaatatcaagctacactccctcatacagcttctatgattgacttggctgctaagatgataagtgaaggccgaggtctagagttaatgccaagggaagcagatcctagtgccccaataactgcctataggtatcactccctttgttcatataatggcgatgatgacatgttcagttctgacctgagtgatgaccagttgaagatgagacttgggcatatgtctagcacacattgtcaggttatattttcaatggctgacgaatatgtgccagattatgttgataagaaagctctagttgagcggttatgcagagcgatgggaggagcagagaaagtagagattgaatatggaaatcattccctctctaacagagttgaagaagctgttgatgctattattgacttcttaaaaagagagggacccaagggatgggacgatccatggagttaatgtaggtgtctatcaattttcaatgccttcttttgttgttatgatagtttttattccattttgtcaatctttcatttttctcccatatataattttttggggtggaggggtttgaatttcttgtggttgttatttgcaaccatagtttttgttgatatatcagatgttaatattttttgtcttgagaaatatagtgtatctgttttttgaattaattaattttaacccaagtaaattttgcaacattttaatcaaaaaaaaaaaaaaaaaaataaaattaaaaaaaaaaaaaaatataaaaaaaaatataaattaaaaataataattttaaatatttatttaattctcttattatatttctattatttatcatttcatattttatataactttttt

SEQ ID NO: 46512 - DNA, 451 bp, Glycine max
  Clone ID: PAT_MRT3847_142002C.1
atcggggtgtcttggttctcgaatcccgagccctgcactgctgcttggaccatcatcagcttagcatggctatagctataatctagaggcaatgaatccttctctcacttcttcttcctcaaccttgtcgtcttcttcttcgtcctggttctccggaatcgttcgagccggtcgttccaacagtgtcaaaatgtccaataactccgccgttgcaccctccgccgacaccgtcggccccgtcgttcgcaaaaatcagttccgaggggttcttttcaagtacggtcccaatcctattcaggttgcatttaagactggtgattataagcggcaagtcatttttattggtggattgaccgatggttttcttgctacttcatacttggaacctctggcaattgctctggaccatgagaattggtcattagttcaattccttatgtcatcttcatac

SEQ ID NO: 46513 - DNA, 683 bp, Glycine max
  Clone ID: PAT_MRT3847_142003C.1
agaagaatgatctccaccccaagtcacaaattcttaaagagtcattagtcagtaataaatgtggtaatgttccaaaaaatgttgatcaacgtaaaaatgaacagaatcttacagcaaggaagcaaaatcataaagagaacatggctggaaatattgccactactactaaggtggagaaaagagcatatccatcatttgaagcttttacaatagaggaagaagaaggttcaggtggttatggcaccgtttaccgtgctcaaagaactactgatggaaaacgggttgcaataaaatgtcctcatactaatgctcataaaaaccatgtaaataatgaacggagtatgctcgagcgttttggtggtaaaaactatataataaggtatgagggctcttttaaaaatggcaacagcgactgctttgttttagaacatgttcaccatgatagacctgaggttttgaaaaaagaaattgatatagttcagcttcaatggtacgggtattgcatgttcagggccctttattgcttgcacaaagagggagttgttcacagagacattaaacctggaaacttccttttctctcgaaagctaagcaaaggctatcttattgattttaaccttgccatggatttaaagcagaagcacaacatcggaagtaaatctaaaccaagccatgatgcagca

SEQ ID NO: 46514 - DNA, 1972 bp, Glycine max
  Clone ID: PAT_MRT3847_142004C.1
ggcggcagttcatataatattgcttcttggttcattctagctaattttgatggctcttccaatttgtctcaccgttattgcaattttcaccctttgttgtgtcattaattgtaacaatggcgttgaagcgtttcatgacatatacccggatcttcaatccatttcagcacgttcggtgagcaaacttcagagaactggataccattttcaacctcgtaagaattggatcaatgatccaaatgggcccatgtactacaatggaatctaccatctattttaccaatacaacccaaaaggagcagtttggggcaacatagtgtggggacacgcagtatcaaaggacctcatcaattggaaagaacttgaacctgccctatacccatcaaaaccctttgacaaatacggggtttggtccgggtcagccactgtactcccgggtaaaggacccgtaatcctttatactggagtcattgacaagcaaagcaatgaggtccaattgtatgccatacctgaaaacaaatccgacccatttttaagaaaatgggtcaagcctaaggcctttaacccgattgtggtcgcggatcacagcatgaatgctagtgttttccgcgacccaaccaccgcatggtggagcaaagatggacattggaggatgttgattggtggtagaagaaaagatagaggaatggcctatttatatagaagtaaggattttgtgaagtggatccaagccaagcacccgatccattcggctgcatccacgggcatgtgggagtgcccggatttttatcccgtttctttgaaagggaaaaacgggttagacatatccgtagttgggagtagtagtattaagcatgttctcaagaatagccttgaccttactaggtatgagtactacacaattggaacatacttcaaaaataaggataagtatattccggataacacttcggaagatggttggggtggacttagatatgattatggcaacttttatgcttccaagtcattctttgacccaagcaagaatcgaaggatcttgtgggcttgggcaaacgaatcagattccaaagaagacgatgttaagaaaggatgggcagggattcagtcaattcctagaaccgtgtggcttgattatggtgggaaacagttggtgcaatggccagttgaagaattaaatagtcttagaaagaaagaagttaaaataagtcaccaaaagcttaagaagggacagcatgttgaagttaaagggattactgcagctcaggctgacgtggaagttaccttctcattctcaagcttggacagggcagagccatttgattctaggtgggtgaacgcacaggatctatgttcacaaaagggttcaaaggttcaaggtggggttgggccatttgggcttttgactttggcttcagaaaaattggaggagtttactccagtgttcttcagaatttttaaagctccaaacaagcacgtgattctcatgtgctccgatgcaagaagttcctctttgaagagagaattgtacaagccatcatttgcaggctttgtgaatgtggatttagccaaaaataaaaagctctctctcaagagtttgattgatcactcagtagtggagagttttggagccggaggaagaacaaacatcttgtctagggtttatcctaccctagcaataaagaaaaaagctcatttgtttgtgttcaataacggtactgagcatatcaccgtggaatacctaaaagcatggagcatgaaatctgcacgtcgaaactaaaaaatagtcagctagaaattagtacaaataaatgaatcaagtagaaacaataatacctcttattctcttgttttctacaaaaagaggtctaacttttagccttctgtccatggtgttgtactcacctagcacgataagctactacattgacatatactggttttaattttacgtaaacgaaatttaaaaacc

SEQ ID NO: 46515 - DNA, 692 bp, Glycine max
  Clone ID: PAT_MRT3847_142005C.1
acgaggccgtcatggttgctctggatcacatatcggggatacgattcctttggtttgcagtaatgggtgctctggatcacatatcggaactctttgactgctccagtggcagttccaagcacaagaagcgcaagcaattgcagacggtggaggtgaaagtgaagatggactgcgaaggatgcgagaggaaagtgaggaaggcggtggaggggatgaaaggcgtgaaccaggtggatgtggagcgtaaggccaacaaagtcactgtggtcggctacgtcgaggcctctaaggtggtcgcccgcatcgctcaccgcaccggcaagaaagcagagctctggccctacgtcccctacgacgtcgttgctcacccctacgcacccggagtctacgacaagaaagccccctccggttatgtccgcaacaccgatgatcctcactattcccatctcgcacgtgccagctccactgaggtccgctacaccactgctttcagcgacgaaaacccctccgcctgtgtcgttatgtgaaactattctctttatttgttatcttcgctttcattctatcttgtttttcagatcatgttgtattttttctctgttgaatgatactccttcgcctttacctacatctttctttcttccttcatagactcaatcacaaaacgtttccagttcatcctcaacaactct

SEQ ID NO: 46516 - DNA, 1015 bp, Glycine max
  Clone ID: PAT_MRT3847_142006C.1
aaaaaacgaaaaggggaaaatcggaaacgaagtctcgcaaaacgcagcctacaacgcaagttcgcaaccctaacgcgaagctcctcgtcgctcccaaggcctccgccgtctccgtcgcgccagagtccagacatagcgtcgtgaacagttcaatgttctatctcagtaaaatcgaacacaaattgcccctgcctccttctcgttttgttcttcctattcgagaagctatacacatggagcttgagaaacttttcttagataaggttatagcaaacttgggcctctgcatttctgtctatgatatcagatccattgatggtgggtttatcttccctggtgatggggctccaacctatacggttgtgttcaatttgattatgtttcgtccgtttgagaaggagatcattactgcaaggcttctttcatctgatgctgatggcttacgattaaccattggattctttgatgatatttatattcctgcaagtcgtttgcccgacccaaaccactttgttgagactgaacagaaaaaaagggtattctctggccaagagtcaacgactaattccccgagcaataaaggtgtatggtattgggattataacgaacaagaatatcctattcaagatactgatgtgatcaaattccgagttacaaacgtgagttatccccaaattccggttgagcaaccaaaagaatcaaagccatttgcccctatgttgatctctggagcgatggatgatgatggtctaggtcctgtttcttggtggtttgcagatgaggatgaggatgagtaaatgtgagtccaaaaatggtgaatttttcgtttaagtaatgatctcattccctaggttttgttcagtctagaagtaatttgtttggtcggatagaagaaattagtagtttgctgatttctagtttaacaactcatgttacaactcagcaacagtatacttttgtgcaattcctttgcttcgcaaagtattaaatttaatgaaacattgtttgacttttt

SEQ ID NO: 46517 - DNA, 936 bp, Glycine max
  unsure (1)..(936): unsure at all n locations
  Clone ID: PAT_MRT3847_142007C.1
ggttttataaaatatcgacgcaaaaacacgctctgctacactatcctgccattcaacacgatctgtccagtgattccgctctccgtcaagtctgctcatggtgaagaatcacgaggccatccgccggtgaagaatcactaggccatccgccggtgaagaatccctaacgcgaagctcctcgtcgctcccaaggcctccgccgtctccgtcgcgccatagtacagacatagcgtcgtgaacagttcaatgttctatctcagtaaaatcgaacacaaattgcccctgcctccttctcgttttgttcttcctattcgagaagctatacacatggagcttgagaaacttttcttagataaggttatagcaaacttgggcctctgcatttctgtctatgatatcagatccattgatggtgggtttatcttccctggtgatggggctccaacctatacggttgtgttcaatttgattatgtttcgtccgtttgagaaggagatcattactgcaaggcttctttcatctgatgctgatggcttacgatgtagtgataagttgccatgagatgcaactcccatgaggctaagcgtgacacttggaggcttgagggaattgggaacctttcaaataaagcggataagaaggaatgttgagcaactcagttactaagaggatgagaggtcatgattaagggattcctgatgagctctccagtgagactaagaggatatgagtaaccattggattctttgatgatatttatattcctgcaagtcgtttgcccgacccaaaccactttgttgagactgaacagaaaaaaaggtgatgtgtccactttctacattatctttgaacttaatacatacaatcttttattattattntgntggtgaaagcagggtattctctggccaagagtcaacgactaattcctcgagc

SEQ ID NO: 46518 - DNA, 391 bp, Glycine max
  Clone ID: PAT_MRT3847_142008C.1
aaggaaaaagggcccaaaatttataaaaccccccaaagaaaaaccccccaagggaaacccctaaaaaaaattggggccccccaaaggaaaccacaaaaagggaaactggggccccaatttaaaccccttttaaacccaaaaaaaaaaaaggagccacccaaaatgtggaaaggggaaggaacccccgaaaggaaccccggggattaagaacctaaaagggcccgttttcccccttggggcccccaaagaaaaccccccatggggccccaaagacccccaaaagggggtaaccccgcctaaaaaaagttccccccccggggggtttggaaaaaacccgctttgggggggaaagaacttggggaaccccgaaaaataaattctcccctggggg

SEQ ID NO: 46519 - DNA, 1235 bp, Glycine max
  Clone ID: PAT_MRT3847_142009C.1
ttcattctttttgccttgacatgaatcaaaaccagcttcagccccttcctctccttagtagcttcttaggttcatctcctgaagaatctttgctacaaaaccaaaatgaaaatcctaatgcatgccatgctcaagttgaggatgttacagtggccttacacataggcctccctgaccattcaagtggctccaattccaccaataatcatggatttgtgaatgccacaactcaagttcctaacaattactggataccaactcaggagcagatcctcattgggtttagccatttctcttgtcctgtgtgccacaaaaccttcaaccgctacaacaaccttcagatgcatatgtggggacatgggtcacagtatcgcagaggcccagactcactgaaacgaacccatccacggcccttgttggaccttccatgctactgttgcgcaagagggtgcaagaacaacatcgagcacgcacgtgccaagcctctgaaggattttcgcacgcttcagacacactacaagaggaagcacggttccaagcccttcacgtgccgcaagtgtggcaagcctctggccgtgaaaggtgactggcgaacccacgagaaaaactgtggcaaacgatggctttgtatctgtggttctgatttcaagcataagaggtcacttaaagaccacataaaagcctttggatttggtcacacccctttttcttctttttctgatggtatgtaattaattaaacatgcatggcacaaaacttattatatggctcctttagtgttgttggttgtacagtttttcaatcagaattcaagtttcaacttcatattttgcataattatttaacgcaaattttaattatgcaagttatcgaggtgtgaaactgactttgatcgaagaacggtacaaacatgcactttattataacgacttatcttgtcttaatttctagtacttagacaatttaagggtgatctctatgttgttatcaattaataatgaagaggaatgagtttttcttaagttatgttactgtgttagcatttaaatagagaggaataagaagggagacagggtaaagaaactgagaatttgattccaatttattgattccctggttgccttttctgcttcaatatatgtaattagtttgttctgtgtgtgattaaaaagtgaacaaattctgaaatctcaatggacttcttcttatgctagaaaaaaaaaaaaaaaaaaaag

SEQ ID NO: 46520 - DNA, 584 bp, Glycine max
  Clone ID: PAT_MRT3847_14200C.1
ttttttttttttttttttttttttttttttttttttttttttttttttttttttttttttttttttttttttttttttttttttttaaaaaaaaccaaaaaaatggaagggaatggcaaaccggccccggggggaaaagcccccccccacccaaaaaagggggcccgggccgtttttttaaaactcccaaggcctagggacaaaaaaaaattaagggacccccaaaaatcccccaaaaaaaatgggcgaaaaaaaaacaaaaaatccagggggtccttggaaagggggggattcccacctgggaaaggacaaaaagggggggctttttaaggacggggggggggccctaaaccccgttttccccgccctggggcaaaaaacccggaagggccgggaggttaaaaacaaaacccgggggggggcccgaactggggggggggggggccccccgggcggttgttaacggggggggcccccccccgagcgaccctgagggggcaaggggcgagggcccctttttaaaaagggggggcggaaaaacccttagaacgttttcgttccccccaggaaataggggggccccc

SEQ ID NO: 46521 - DNA, 155 bp, Glycine max
  Clone ID: PAT_MRT3847_142010C.1
gcctattacaacctggaggaaagctgtacacggttctaccatccggaaaaggaggatggaaagctgaacaagctctgccgtgatgaactgtgccgctgtgatgaggagaattgcttcatacaaaagtcggatgacaaggtcaccctggaataacg

SEQ ID NO: 46522 - DNA, 419 bp, Glycine max
  Clone ID: PAT_MRT3847_142011C.1
cccaagcttgttcaatacatcaagccacctcacagttcttagtttgaagagtaacaggttgaagggtccatttccaccttcaatccttagggtcaccactttaactgaaattgacatgtcaagcaatcaaatatcaggtagcttggaagatttgagtgtcttgagtagcttggaggaactagatttaagggaaaacaggttagagtctaaactacctgcaatgccaaaagggttgataagtctttacctcagcagaaactccttctcaggtgaaattcccaagcactatggtcaactaaataggcttgagaagcttgatgtttccttcaattcactcacacgcactgctccttctgaacttttttctttgccaaatattagatacttgaatctggcatccaacatgttgaatggaccac

SEQ ID NO: 46523 - DNA, 360 bp, Glycine max
  Clone ID: PAT_MRT3847_142012C.1
ggcattgcgaccggaattccattatcataaattatgccacaaaatggtatttgacgagcatcatcataaggctctgataccctagtaagcaaaaaatctaaaaagggctgggatttacattatgagggatctcatcttcggcatcttcggcagcatccttatagggctgaatacaactctgaatagctccgaaaatcttaaaaattatggacatggggaaaaaaattccgctagcctttagtataattaccggaaggaggggaaaggggaaatcttccgttccatttggaagccctgggaaaagatgtcttacaaggaaaactagggtaaaagcttttgcaagggatcgacagcaaaacc

SEQ ID NO: 46524 - DNA, 443 bp, Glycine max
  Clone ID: PAT_MRT3847_142013C.1
aatcatacataatggcagagacaaggctaacaaatcaatcacttatccacttgaggaaaaaaggggaaagctctcaaataaataagaacattgcaacatgcattttcatccaaatgtaaacaacaaattctgtaaatcaatgagcatttgtcatcacgcaagaattttcttctaagaaaaataaaaattgagaatttttctttacatttcatacttaacaaaataaaaattatctaaatagttcattatttttatttgatgtggattgtgggattgacatggaccaattggtaattgctaaggcaagacaagtatattagtcatcacatgtttaatggaaactactcaaacgaatgccagaggaatttataataacattttttttacagattatagcccccttcaaattcaacaattttactcatgggtttttcaaaattgaa

SEQ ID NO: 46525 - DNA, 514 bp, Glycine max
  Clone ID: PAT_MRT3847_142014C.1
gattcgctttttaggtagattgagggaggggatggcagcaggatgtgtcgttgtgagccatcgagttgcccctgtgacatcttattgggacggggtcgcattagccccgtaggacggccaggtctaccacgagccggtgccggcgccgctggttgacccgccggagcttacgttttggttgttttacagagcagggataggcagagttagcggcctcttgtctggttctctacatccccgtactatccgttgtgggatgcggcggggcttggtccaagcgtggttccgctgggatccatggaatcgcttgctccttctgtggggtgatgtgtcctcttgctaactgcaccgttggcttctgcgggggccgcatcgacccgtgggccacctctgagctgcttttggcgtggaaaccgtggttgccgttggcgattatctacctcccgatgctacgctcgggtgctattcctggcgctggggtggggatgggtgccgaggggaccaacaaactccg

SEQ ID NO: 46526 - DNA, 518 bp, Glycine max
  unsure (1)..(518): unsure at all n locations
  Clone ID: PAT_MRT3847_142015C.1
atgaactagaaatcatcaatcagagtatttgagaataattatagttcaatagtgtctcaaatccaaaaattcaagcagacaagtaacttggtccaagcatcatctacatatctgcaatggcattgacatatttaaatggcgaaaaatagagcattttccatggtttacctcaacacggtggctgtccagcaagaatgtttgctactgcattacctactacagcatgaccagcttcatgccgtgcaactagagccttctcaattcctctactttcgggaggcttcttttctattccctgtaagcttatcaaggatcgacatctggagtcacacaaaatgtaatcgaaagagcaggcaccttacactatttttttacatatctcttcaaattgtttcttgcagtgtagacccctccctgctgcaggagcagtcactccacaaactgctaaaaccaacttatttttgattgggttagaatgacntcttaatcccccttctttgagcttgaatttggtcttt

SEQ ID NO: 46527 - DNA, 511 bp, Glycine max
  Clone ID: PAT_MRT3847_142016C.1
tttgtggagtgactgctctggcagcagggaggggtctacactgcaagaaacaatttgaagagatatgtaaaaaaatatgtaaggtgcctgctctttcgattacattttgtgtgactccagatgtcgatccttgataagcttacaggtggaatgtcttgaaaattatgaccaggccttacttacttcagggaatagaaaagaagactgcgaagttgagaggaattgagaaggctctagttgcacggcatgaagctggtcatgctgtagtaggtaatgcagtagcaaacattcttgctggacagccacgtgttgaggtaaaccatggaaaatgctctatttttcgccatttaaatatgtcaatgccattgcagagatgtagatgatgcttggaccaagttacttgtctgcttgaatttttggatttgagacactattgaactataattattctcaaatactctgattgatgatttctagttcatacatgctctggttatcagattcctgattt

SEQ ID NO: 46528 - DNA, 528 bp, Glycine max
  Clone ID: PAT_MRT3847_142017C.1
cgatttctgtatcccaaataacccaatgaatcatcatcctctgaattcaactcgctcgcacatgggaatcgattgatcaacatcgcccagatctacaactgccttcgactggacatcaactattattcattcggaatcgaagacagtgtcaggaggtttacaataactcacacacgctgctcaaccaattgagctagaccctcttgacacttccagaattgtttctgtgcaggctcggcaggcttgctaaagctattgagtttaggggtgatttcacaccatttgttttgtccaaaacgacaccttgtagctgttttaaggcacacaaatcagaaacttaggtttgcgattttctgtagaagccaccgacgtcttcaatcaagagcatccataaccagacatgaagttgaagacgacaacccagtcgcaaattgaattagaactgtagaaggcaaagtgcaaagcaatgggttgaagttcatctctctcacgatttcacccattgttgtaaaaaataggctgtcttta

SEQ ID NO: 46529 - DNA, 417 bp, Glycine max
  Clone ID: PAT_MRT3847_142018C.1
aataatcaattctgataatatgggccctaaaggataatttcattggtcccctttccaaatgactaccaccggggggaagtacccaggatttttaaaaaggaaatgattataaacaaaaaagtctgtacctttgtataacaaactaaacctttgaaaaaaccagatcacaataaactatctggtttagctgggaccctcttgaaaaaattacttggtactgaaggcattttactcctaaactttggatgccccaaaaagtttaaacctttcaccagagccccccctttgaatggggttgcctagagaaccccagtagcacagaagctaaaccctccaaaaaggctggttgctctggggattttccaactcaggaaagactgaaacctttccccttgggtacctttgtccccaacaact

SEQ ID NO: 46530 - DNA, 388 bp, Glycine max
  Clone ID: PAT_MRT3847_142019C.1
gttgagctcttataaggagggtatgcccacatcatggatcgcctgctcagctggcaccaggggcaaccgtgccggagccagactggcttcttgatttacctgccttaaatccatggctggcttcctcacgaggaagaccaacaatgacattacctacattgctagcaactggataagagtacaagaccatcataggtgtatctttattgtcccctgaaaattgaagggcatgcgatactttctatacaactactgttcgaatgcatctttggctgtagcatacgttttcttgatgggacatacaacatggatagcataaccttcttttagccttttgaagaatatacttcgcatcaatggtcgttgatcgttattggggaaaaactat

SEQ ID NO: 46531 - DNA, 632 bp, Glycine max
  Clone ID: PAT_MRT3847_14201C.1
gcacgagttaagatctgatcatttttcttaaccttagacccttgtgactcctccttttttttctgttttcaattagcgattcttttcgttgaaagtgatgtgcatctactatgattctctttttctctaacagtggaatagagaatacgaaaagatgcaaaatcaaccggttcctctatggactggcatggtcccaattctcaatggatttttgctatttctcgtaggttccacaatttctaaccttttaaccaattttcgcttttccccctttctgggttttggttttcattccccaaaattaaggaatccattgcaagcatcttgcttttgcgctggttttggattcttgtagacttctggggtctcgcttccccccctgcagaggaacgcatgcagggcggagactgctttttgttttgggtgtattttgttcggtccgttgggggttctttggtcttgcggggtgctcttcccgcttctgcttttctttccgttgagtcgtccatcctcgttcaaaccgtgcgtttttgtttcttcgttgtcttggatgttccgctttacgtccccgttcggtcggctcatctctcttactctatgtatatgaatgctcgatgatgattgttttgctt

SEQ ID NO: 46532 - DNA, 533 bp, Glycine max
  Clone ID: PAT_MRT3847_142020C.1
atttcaatcccaggttgaagggggattatagtgggaggcctgtgattgagcagaacacttgttacaggatgcagtggggttctgctctcaggtgtgagggatgtgttgatgtgcactctatatatgcagcttccttacccacatcacatccaagttttgctccacagatgcatcttgaattgcttcctcaatggaaagctccacctcttgtacacgtgaatgtggagcttttcattggaatactttctgctggcaaccattttgctgagcggatggcagtaaggaaatcatggatgcaacataaactaatcaaatcttcaaatgtcgtatctcggttctttgttgccttgcatggaaggaaagatttaaatatggagataaagaaagaagcagattattttggcgatattattatagtcccctacatggatcattatgaccttgttgtgttgaagacgatagctatcactgtatatgggattcgctcagtggctgtcaagtttatcatgaactgtgatgatgacacgtttgtc

SEQ ID NO: 46533 - DNA, 830 bp, Glycine max
  Clone ID: PAT_MRT3847_142021C.1
ggcgagaagacgacagaaggggggtgttggttcttcttttgctatctcaatctcaatggcttctaagatcttctatctattatctctcctcttgctagcacaccttcttcagccacacgtatttgttaaaggagatggcagtttgatagagaaaacctgcaagaacaccaagtactacaatctgtgtttctcctccctgaaatccaatccaagcagcgcaaacgcggacccaaagggcttggctgtgatcatggttgggattggaatggccaatgccacttccacttctctctatttgtcttctaagatgcttggcactgccaacaacaacgattccaccttcaaaagggtgctgaaggagtgtgcagaaaagtacaagtatgccagtgatgccctccaagcttctgctcaggatttggttaatgaggcatatgactatgcttccatgcacatcattgcagcctatgattactccaatgtttgtcacaacttgttcaaactctactcgggtttggtttatccttctgagcttgctcctagagaggatggtttgaagtgtttatgtgatgttgctttggggattgttgagaatcttaatcggtagctagtttgcatttgcattcatatgccaaatttgaaccactaaaattatctggtggtgtgtatttttcttctatatactttaatttctctttctgcgtctcaatgtttgcaacagctgggtgtaaaacaacgatcaaagcttatataagagcttgttaattgatatgttaatctagtattaaaccgcgtatttggcccaacaacaacaaaaaatctactataaacca

SEQ ID NO: 46534 - DNA, 405 bp, Glycine max
  Clone ID: PAT_MRT3847_142022C.1
tcctggtttccagatttacagtcataaagatgagtttgcattcagagggtccatgatgagtaggctacaaaagagagctccatgtccacttcagataaagcctactactactgtgataatatcctctgcttgcaatggagcacagaactcagtgggggctgcttcaacttcctcttcaacttcatcttcattaaattccttcttcactagtaaagatccgatacctcttctttctcctcttgtggtgcttgaatccacctccatcagagaagaaaacactgcaaaatcacattgatatgttgtatttgcatgttctgtactatagttttctcgatttagttttttgatcttataaacttatgtaccacaagtcctattgtaaattaaattcactaaattgttcgt

SEQ ID NO: 46535 - DNA, 377 bp, Glycine max
  Clone ID: PAT_MRT3847_142023C.1
atcttctctaaaaaacactacctgctaaatattctcttcagacacgatgaatgaccgtgtaccgacatgctccagctgaagaagttgccgacagggacagggcccaaggagtcacaaaggcacttccaaaaagaggtcagattaagtccaagatagtggaaagagcctttcattgcatcaccaatggaatttgtcaagcctcgtcagctggtggcctgcattttccaagacaaaaatagtcacttagcttgaagcagggctgattaatgcttaaggattttcttgttcgtatattgtatcatttagtttttctccttcctcctgtaacttctattgttgttattattattatacacatggctccatgcttttccccg

SEQ ID NO: 46536 - DNA, 266 bp, Glycine max
  Clone ID: PAT_MRT3847_142024C.1
ctacaatacaaaatgtgattttttattaatcctattaataataataatgggggtactaggaataatattgattacaggcctcctgaaacacaaacacagttgttatcaaaaccagctcgatatttccttcccaacaaacgagcttcaataggaagaaaccacagataatacatgtgaatgcaatagggctacctatatgcttgtctggcacatgatggccattgccaactaaaaactattccaccgacgtttcaataacggatact

SEQ ID NO: 46537 - DNA, 281 bp, Glycine max
  unsure (1)..(281): unsure at all n locations
  Clone ID: PAT_MRT3847_142025C.1
ctcgcaagcaaaaagaaagaatcccaggcgaggagaaagatggaggggaaggagcaggatgtgtcgttgggagcgaacaagttccccgagaganagccaattggnacggcggcgcagagccaagacgacggcaaggnntacccaggaccggcccngcccccgntgtttcnccgagggttttnncgtcanggtnnttttacagnggggggnatancnttntntgggcccnttttngtgttcccnaacttcactgtctnnacccttanggcctccccgggnnt

SEQ ID NO: 46538 - DNA, 248 bp, Glycine max
  Clone ID: PAT_MRT3847_142026C.1
tttttgggccacaacagaaataccattttatttatttacaatttccatttttctcttcaattcaaagggctataacaatttttcccccttttgcttgcaaagtctttgtgtcaaataacatcagggtgtgactctcaaataaagcttataaaaccccaacttgcttaaaattggattgaattccccaaaccattttacctggaacaattttttcaatcattttaggatataacagagtaaaatctttt

SEQ ID NO: 46539 - DNA, 237 bp, Glycine max
  Clone ID: PAT_MRT3847_142027C.1
aaacatgaagtcctgatcacagccgtgcgggtgctgtagcattttatcattactcccatatctttttgggtggaaggcaacagaaggaaagaaaattattccccaaagctactattcttaccctttttttccacaacatggttaccggaaactttttagaaaaatattccccttaatggttaagaaacaaatattttcataaattccaagccaaattggcggaaaaaatttttggaa

SEQ ID NO: 46540 - DNA, 167 bp, Glycine max
  Clone ID: PAT_MRT3847_142028C.1
attgcaagttgtgccccccttgtctcttgttcaataagaatcgaatttgaagtgtatgtagtcttgatctacctaggtaggcattgccattttggtttttttcgtattatcttaacttgacttcgacttctttgcttattggctaagcgtataacatggctagggct

SEQ ID NO: 46541 - DNA, 842 bp, Glycine max
  Clone ID: PAT_MRT3847_142029C.1
cagttttgaatacaaaatcttcctttcttctttgtcaaattcattatgcaatcaccaaactaattgaatcatgaatccaaaaaaaaaaaaaatgaatccacaaatatttcttctgtacatagtcaaatcaatctacaaaatattcttatgaacatgtgggtcaagcacgcgaagagcgaaataatcgcttgatgatggcaactttggggagggaattcctgttgttgatgtgagtaattttccgagtggtaactttccctattgatggtaatctgaaagtaagtgttactttcttttccaaaacgttaatcaccacagactctgtctctacattcatttttgcaataatgtcagtaaccctcttctggcacttctcacattgcatgtctgcagagagaacaacctcctgaacctgaggcatggacaagaactccatagaagctagactagtcccactcccaccaagaggaaaaccctttgattttcttacaccaacaaccactccttgaagctcctttttagcaccatcttcacaatccatacctttgattaggtgtgcaacagatacatacagtgctttatatgtatatttaatagatttgcagcctcaatcccatcctgagagagagagagagagagtgcagaaaacgatctttgctcgagccgaattagaagctagactagtcccactcccaccaagaggaaaaaaaccctttggtcttcttacaccaacaaccagttcttgaacctctttattagcaccatcttcacaatccatacctgtgattaggtgtgcaacagattcatacagtgcctttatatgtatatttaataggtttgca

SEQ ID NO: 46542 - DNA, 134 bp, Glycine max
  Clone ID: PAT_MRT3847_14202C.1
gcagcttcaacgtatctccacattgtctcctactcttactgtgctcgtggcgtggcatcattttcatttgttccagtcactccagtcctagcatagccatcgctcttttctcccctacgatcctcatctccctc

SEQ ID NO: 46543 - DNA, 912 bp, Glycine max
  Clone ID: PAT_MRT3847_142030C.1
gaatacaaaatcttcctttcttctttgtcaaattcattatgcaatcaccaaactaattgaatcatgaatccaaaaaaaaaaaaatgaatccacaaatatttcttctgtacatagtcaaatcaatctacaaaatattcttatgaacatgtgggtcaagcacgcgaagagcgaaataatcgcttgatgatggcaactttggggagggaattcctgttgttgatgtgagtaattttccgagtggtaactttccctattgatggtaatctgaaagtaagtgttactttcttttccaaaacgttaatcaccacagactctgtctctaacaatggcttttgtgtttcattgtaattgatattttcattttcactgaacacttctcttcttttacccttactgagcattttcctttaatttaactggtgagaacccttatatgaataaactggtcacttcatgccagaacatatgccagcctattcctaggggggaaaccaacaaggaccacctcttatgaatgatgtatgcatttccctcactctctctctctcttctctggcttcctgttgggaatcaaatgctccattcatttttgcaataatgtcagtaaccctcttctggcacttctcacattgcatgtctgcagagagaacaacctcctgaacctgaggcatggacaagaactccatagaagctagactagtcccactcccaccaagaggaaaaccctttgattttcttacaccaacaaccactccttgaagctcctttttagcaccatcttcacaatccatacctttgattaggtgtgcaacagatacatacagtgctttatatgtatatttaatagatttgcagcctcaatcccatcctagagagagagagagagagtgcagaaaacgatctttaacagct

SEQ ID NO: 46544 - DNA, 422 bp, Glycine max
  Clone ID: PAT_MRT3847_142031C.1
acggctgcgagaagacgacagaaggggacaccaatttatctaaacaattgctttaattttcaacaaagaccaaatcttcatcatgatcaatcctttgtcttcttctcatatggttaacatggagtttatctctaatgcaatgatactttcattctcaatactattgttgctaccaagtgcatcatattcactatatcaaaagcctgaaaatcatatcaagacagctatttttgtaatagggagttttgaaatgggacccggatcaattgcaacaaaaacatttgagaatataaagtttccaaaaggtcatgttggaattaagagttttgatgcggaactagttgaccaagaagggaactctataccttcgtatgaaacttaccttcatcattggtttgcaataaagtaccaccaaaatatta

SEQ ID NO: 46545 - DNA, 307 bp, Glycine max
  Clone ID: PAT_MRT3847_142032C.1
gttgggaaaatgttgaccccccttccaaaaaagattattctttttcccctggatggggggtttaaatctggccatgtttttagtctttaaaagacatgtttttcaataacctgggcaaagcaaaattcttttttttaagtttgaaaacgtaaacaaatgcttccgcaaagcccaaaaaccgacaagaagcccgggaagctacaatctcattcatggcatggtttcataacagcaatttacaaaagttcatttttacactttatcaaccaatgtaactcctttttggttggacattttcttacctggt

SEQ ID NO: 46546 - DNA, 917 bp, Glycine max
  Clone ID: PAT_MRT3847_142033C.1
ctaacattagtttattatcataggacaacataaatctgtgttaactccctgtgtccctccctatattattactaccgagagagaaagagtgatcttgcaagttctgttctattcctgttccagcaagccatggcaatttcaggttcagagactcagagtccttcagtgaaaagcgtttctcaggtggaagttgagtgtgtgaaatgcgactcgtgcgggttcacagaggaatgcacccctgcgtacatcacgagggtgcgtcagaggtaccagggtcactggctgtgtgggctgtgcgtggaggctgtgaagcacgaggtggtgagatcagatagtctcatcaccacggaagaagcgctggaccgccacatcagcttctgcagagagttcagatcatctgcggttaccaataataaaacagagcaccccatcttcgccatgggacgcgttctccggaggagcctcgactctcccaggcctctccgatcgaactcgagtggggctctcccgtccgtggacggggttcgagccccacacttgcttcgatcggagagttgcttctcttctatctcgggttaataaggtctatttagtttgctttattagactcttttagttgcagcaggtaggtaaagcatggagcatagagactctgggtgtgtttttctgtgactgacaggttttataaatccaccacgaagcctctctaacattggccctttctgtttagactttagattgattgagtggtttgtttcatgactttactactagctcctttttctatgatcatcaatgtatatatagattgattagcaaattctaaaatttagttcttctaatctgggcttgcctttttagtattatcttcttctgcagaacataataaagaataagacaaaaataagatacagttt

SEQ ID NO: 46547 - DNA, 1413 bp, Glycine max
  Clone ID: PAT_MRT3847_142034C.1
ccacgcgtccgggaaaatgaagagagaggagaattgagttgggttgggggcatggaagaagaagaagaagggcttgccatgctcatcactcaccttcaccatttctctcactctctttctcctctcttttttatgcagtatactactatattttaacatccttttcccagattgtccttctttgacattgatgattactccttagatgacttctgtggccttgtaatggcagctggaaagtctggaagttccaggatgttggagcctctaaagcatccatctaagaagtctcgaagagataggagccttggaaaatcatctggaaggtcctccagggatgaagctatggaacaacaaatttggaaaaaattgcctgaggatctatttgagcctgtgattgcacgacttcccattgccacatttttctgcttccgctctgtatgccagcgatggaattccttgctgacttctcaaagtttttctcagcattgtgctcaagtcccacaagcaaacccatggttttacaccgtaactcatgaacatgcaaattccggagccatgtatgacccttctatgaagaagtggtatcatcccactatatcaacactgcccgcagagttgatagttttgccagtggcttctgcagggggtctagtttgctttcttgacatttatcgtcaaaatttctatgtttgtaacccattgactcaatccttaaaggagttaccagctcgttcagttagggttgggtctcgtgcgtctgtagggatgacagtaaatggaaactcaactagtgctggctacaagatcctattagttggttgtgatggagaatatgaaatttatgactcagtgacaaagtcttggagccatccagaaaacatgcctgcagatattaagctcccgctgtcactcaattttaggtcacaggccgtttctattgacagcaccctgtacttcatgcattcagatcccgaagggattgttttgtatgatatggcaactggggtttggacgcagtacataatcccagcaccattgcatctgactgaccacatgctggctgagtgcgatggccggatattgcttgtggggttgctcacgaagaatgcagccacatgtatatgcatatgggagctgcagaagatgactttcttgtggaaggaggttgacagaatgccaaacgtctggtgcttggacttttatgggaagcacgttagaatgacttgcttgggaaacaaaggcttgctgatgttatccttgagatcaagacaaatgaatcgattggttacttacaacatagcaagtagggaatgggtgaaggttcctgcgtgtctggtgccacatggaagaaaacgacaatgggtagcacatggtactgcattttatccatgcctcactgcaatggcttga

SEQ ID NO: 46548 - DNA, 515 bp, Glycine max
  unsure (1)..(515): unsure at all n locations
  Clone ID: PAT_MRT3847_142035C.1
tcctctagagctgccgccctttgggtttggggcttttttttttttttttttttttttgttgagaatctccctgtttctattggtgaaagaacaggaaatccatgtaaacaaactggtactgtgcgaaaaaacccggtttaaattgggaaaaaagagggaaaaccctgaagtttttttgggagggggggggggaaccgggctaaaattgaaagggaaaaggcctcaggccggtggtttggtgaagaaacccttagggggatcccttttaatggaaggggaaagggaaggggaaaaaggactgttcctggttttttaaaaggggcccccataaatggtctgactgaaaattccatcaaaggacccggacagaagggataagcgccccctggaaaaattttttaactccacctcccacccagaggccttggaaaaagggacaaagcccatggagggaaaaatttnagagaccaaagggtcccccgggaactttcttaccctcacacaaagaggggggg

SEQ ID NO: 46549 - DNA, 1308 bp, Glycine max
  Clone ID: PAT_MRT3847_142036C.1
caatggttaaattaaatcataaataatcttgcgctctattccggagaccgtcatgaaaatgatttctaacagacaaatacgctaatgaaacaaattgggtataaccagcgctgtggttgaaagaaatattcataaccaataaaattacttttgactgaggggggggggggggggggggaagatctgcagcatctgtgatttcactagaaaggcatataaccaggataagaaaacgacttcaagtaatgcctataaataaatccattccaaaattaataaaaccaaacaagcgaagaggcaagtactctggctaataaatgatcctgcaagtcaaataaatactactactttctttccatcaaagggtaataaatacaattctatttttcatcgccatagttgacatgataaggttaagtgaatgcggtctgagatctgaaggaaggagcacatatcagactttctctaattagggaacaagtatgccaccaacagagactggtgtttttgatttctatacaaggttcctctggggatgccaactaggaatcctcaatttcaactactagccatggttattagatagccaatacctgcagttataagtccaagtatgccaccagcaacgacctgaggaggagtatgcccaagaagttcccggagtggtctgctttcagccagaggatgttcagcaggaagttcgtatacaatttgattcaaaagctctgcttggcgtcctgcttgcaatcttacaccagtagcatcatacatcacaatacaagctagaaccaaagcagtagcaaaaagaggtcctccaaagccttcatggaacccgattgccgcggcaagagcagtgacagtagccgaatgggatgaaggcattccaccagatccaacaagttgcttgggatcccatcttttttccttaaaccaggcggtgaaaaacttgatgaattgtgcgatggcgaaagcaacgatggcggaaatgagagggtaattgcgcatcatggaagacgaagtcgtcgtagctgcagcctcactcatctcctcctttctctatgttatttatcttataattaattaattaattaattatatttggattgtgttaattgattctcgaatgtctttccctctttcttttcttttttgccaaagtgagaacaagaacgctgggaaatgttattatgttacaaatgcaagtaggaacacgaagggggtttgttttgttttgttctgagttctgaaaaaatgaaatagttgttacactaacggttttaccttagcttaggtttctctcaactgaat

SEQ ID NO: 46550 - DNA, 426 bp, Glycine max
  Clone ID: PAT_MRT3847_142037C.1
ttccaggaaggtttcccgtcatcactgtatgacgtcctccttctttggggggggggggggggggggggggggggggggggggggggggggggggggggggggggggggggggggggggggggggggggggcaaaaaaaacaataaccccttataaactggccaaaaaccctaagggaggccaagggacccaaaagcgataccttttagccccccaaagaatggggataaaacaccggtccctaaaaaaaggccaaatggaaaccttccggaaaaaaaaaaattttggggcatggaaaatagtttgtttcccaaaaaaaaattcccctttttaaaagggggggttttataattaaggggagcctttaaactgggggaattaaacccaaaatttccaaaaataaagccccctcgcgagaattttccca

SEQ ID NO: 46551 - DNA, 158 bp, Glycine max
  Clone ID: PAT_MRT3847_142038C.1
tcggtaccgtgaatttccctgggtctgactccatcgtcgtcactgcatgtgtttacattttttgatattgagttatatttcttcttactacatgagaattgtcgtgtcctcagtgactctatttgtgtttttaaaatctcactaaaattccttttttg

SEQ ID NO: 46552 - DNA, 378 bp, Glycine max
  Clone ID: PAT_MRT3847_142039C.1
gctttctgtttgtaaggctatagctggctgtggttatagatggcgccataacatacgtgtgcgggtatgagcagatataattctactggagcttcaaaacctactaatgaaacctacattggacacaaaatggcatcatgtggaaaatgtgatctactcgcattgattctttttatgtcaactattggatcagagagcagagtggaaaggaaggacttgggccaggaccttggtggagagggggccggactactgactggtggaggaaacgtggactggagggggtaataaacccggagctgtatggggaccaccatctgagtatacgttaaagtcaacatggagtgacagacgaggctatgtttagctcccttattt

SEQ ID NO: 46553 - DNA, 270 bp, Glycine max
  unsure (1)..(270): unsure at all n locations
  Clone ID: PAT_MRT3847_14203C.1
tgtcactccacaccaattgtaggatgttagtaatcaaatgttatagctctatgaacaaaatcgaatgccgccttccaatgatgtcgatggaggtgggacttccaatcggaccactgcataagctctagctactaatatgaaaatgcagctgcaaagagtaattcccaggctggagctacaaggctggaaacatcaaagactgcatcttctatggccatatttgattcaacggacccaatctctttnggcgtcccatctcaaaccatggta

SEQ ID NO: 46554 - DNA, 308 bp, Glycine max
  unsure (1)..(308): unsure at all n locations
  Clone ID: PAT_MRT3847_142040C.1
ncncgnncacgcgcacggnattnggnngcgnnnncnacnagtnccacccncagnggacaancncgnnngcancggnagaactcanccagaatgctaaggtgttagaaaagngcncgtgcggaagtactacngtgntgtgggaaaggacnaacttgtggacgaggnngacatcaaaacnttcttacattngagcaatcgngaagganacattccgcatgcaccngccactccaagtggtcacaagnaagtncacaaangantgngngnttaatggnnatgtgatgccagnnggngctnggttctctnca

SEQ ID NO: 46555 - DNA, 1662 bp, Glycine max
  Clone ID: PAT_MRT3847_142041C.1
aaattatgcacggcaaagctaaaaggtaaggaacggcgttgttgagcggaggaagatgagcgtttcacatttcgcggttctatcgtcgtgttgtcgtccacgcttcgccccttctttgtcgcgtgcttcagccctccgttctcgcatccggtgttgtactactctcacttctacttcttcagagactcccactccaacctccgtcaagaaacgagtagtgtcgggagttcagcccacgggctcaattcacctcggaaactattttggcgccatcaagaattgggttgcccttcagaatgtgtatgatacacttttcttcattgtggacctgcacgcgatcacattaccatatgacacccaacagttatctaaggctacaaggtcaactgctgctatttacctagcatgtggagtggatccttcaaaggcttcagtatttgtgcagtctcatgttcgggcacatgtagaattgatgtggctgctaagttccacaacaccaattggttggctgaacaaaatgatacagtttaaagagaaatctcgcaaggcgggagatgaagaagttggggttgcccttttgacttatcctgttctgatggcttctgatatacttctatatcagtctgattttgtcccggatggtgaagatcaaaagcagcatttggagttggcctgtgacgaggctgataataatttaaattgaggtagaatgtggaagttttggggagtaggaggcggacccagtaccatacttccagagtcccgtgtgcctcccaccgctagccggagcccgcccctaactgatgacttgtccaagatgtcaaagtctgcagcttctgatcaatccataatcaatattcttgatcctaaagatctcatagcaaacaagatcaaacgttgcaaaactgattcatttcctggcttggaatttgacaactctgagaggcctgaatgtaacaatcttgtttccatataccagcttatttcaggaaagacgaaagaggaagttgtgcaggaatgccaaaacatgaattttggcacattcaaacctcttttaacagatgccttgattgatcatttgcatcccattcaggttcgctatgaggaaatcatgtccgattcaggttatttagatggagttttagcacaaggtgctagaaatgcagcagatatagcagattctacacttaataatatttaccaagcaatgggattttttaagagacagtgataattgatgccaaataaattaagattggcgagacctcaacttaaatgctaacttttggatgattcatgatcggcctcaaaattttggagtaatcttatggacatttatacttgactactggaaatggaaagattatttgatgcaaagcctaaaggtctcattagttcttgatgcaatgggctatctccttcatatttctccgagtatggttgtttgccttcattttttattttattttttcaatctctttcattttttacttgtattctataatgaattcagtatattgataaattgttccgccattgtattcgatggagacacatgacctagtcattttaattctgtcccccccacgttctcttgatgatgacacaacccattgttttagctcatcaattggaacttcattaaaatttttctttcgctat

SEQ ID NO: 46556 - DNA, 461 bp, Glycine max
  Clone ID: PAT_MRT3847_142042C.1
ccacgcgtccgggaagcaggttgaaattttacacaacctggtgctatagtacacaagtgttcaaagctaaatactttttgaattatggatttttggatgcccatcttagtcataatctaagctatacatggcataacatccatgctccaaaggttttggtaaaggagggatgaagatggagaatagggaatggtaaatctgttaatgtatggccccaaccttggcttcacttaaaagaccttgaacatgtcaccatgccaccatcactcggtttggaacattggatcgtggacactctcattgaccaagctaaccattgctggaattcaaatttgattaagcaagtctataatactcaagatgtgcaacatattctctctcttgttttgatggatatcaatgtgaatgacaaataatttggaaacttacaacaaataatgactattatgtcagatattcct

SEQ ID NO: 46557 - DNA, 214 bp, Glycine max
  Clone ID: PAT_MRT3847_142043C.1
acgaggttcgttgatgctattgctattagaggttgttattcgctggaatttctttactgttgcagtggaatttttttttcttccctagtttaagctgattatggatgtcgtgttttaattgaaatggagataatagaaatttgtaatcgggtggaaaagttccccttgttcattgaaaaaaaaaaaaaaaaaaaaaaaaaaaaaaaaaaaaaaa

SEQ ID NO: 46558 - DNA, 284 bp, Glycine max
  Clone ID: PAT_MRT3847_142044C.1
gccttatatcttttttctttcgttcctgtttgacagatagttcttcttcttcccactcactctcactctctgtgttggtgagatgggtatgtcatggctgtgctgctgagaatggctcaccctcacaatggcaacaccaacaacacttccatccagtatttggtactccatgactttctgggtatcaggctcacatccgattcctcgaactcagtggatgtcttgtaatcggaaccttcggccttcgagtcgtctaccggaggacgctgccccttctcggacac

SEQ ID NO: 46559 - DNA, 2493 bp, Glycine max
  Clone ID: PAT_MRT3847_142045C.1
caaaaacaaaacctcaatctctctttcttcctttctctccctctcttcttcattcttaggagagaaaaacacaataaaactaaaccctctcttttcttaacgccgtaacgggcattcccaaccaaaggcaccgtcacaaaccctcacgtgcgagtcacgtgtttttgtgaattctctttgccatggctctcgaccagctttcgaatcccaacgccgttgacggtgccggtaacggcgcgacgccgtgctccgctgtggaccggcggcatcgaggacgggaggccggctgcgaggctgccgcggtggacgcggcaggagattctggtgctgattcagggaaagagcgatgcggagagccggttcagaccgggccgtgggagcggttcggcgttgcgaaccgaaatgggcgttggtgtcctcgtactgcaagaagcacggcgtgaaccgggaaccggttcagtgccggaagcgatggagcaacctcgccggcgattacaagaagatcaaggagtgggagtcgcaggtgagggacgaaacggagtcgttttggctcatgaggaacgatttgaggagggagaggaaattgcctgggtattttgacagggaagtttacaatattctcgattcgccgtcgtcaacggctgcggctgcagctgcggctgcggcggcggagactccggtgccggtggcgacggttgaggaggaggtgcacctctatgatagtaatcggagggtggggagtgaggatgggttattctcggattctgagaaggacgaggttttgcttttagctactaccaaggatgttcctgcacctgttcctatctcagaaaaattatgttgctgaaactgatggtagaaattggttttatgattgggccactggggtatatgttgaaaatttattgatgttcaagtaagaagcgtacttagaggatgaaggagagtgacaaaattttgaaactactaagggactgtttgcataaccgttaacggacatttcacacttttggagacagaaacacagaagcaagagaatggaagcgttaacttggctttcgtttcaacggaattacaaactagcaccgagagggatttagcatgtgtttggatttgcattaaattatctatagttacattgaaatacaactaatgtgattttaggaatatactcacataattagttttataccgaggaattgattctgattcataattgatatttgagttgaaataactttgacttatatttgtattggataatttattttatagagctttcctactaactggttttagaatttaaaacactaaacataaattactttatcgaatacgttagttttttaaacataaatcactttagtttaaatcaattttaaccaaacttagtcttgcaaaattatttttgcaaatgctcactcaaacacacacttagagttcaaagttaaatattatggcattattatttgatttatgtagcaagttcagctggctcgagaaagatttggttgatattattgttgttgttggtaatgtctggtgttttttggtatatactaatgctgttgtgtttcttgtctctcgtgaagttggaaagtgtataggtatgttactggctttcattgctttggggacacttcttttttttatgaaagactaatttttagtgtttttcttttcttaattttattttttgattctagcaatgatgttgtttgttataaagttggaagtagtggaatgtggaggggaggatactgggattcccatatggcattcttcaattctatatttgttttttcttgatttttctttttcttttgatttgcagagaagcaatatcagccccatctccaaggctgcgaaggggaaggcaaccctcaaggtactaccaatgagaaacgggcaaacccaaatccagaaatgggttctacatctcaaggggaacggaagaggaagtggttagcaaccgatggagaggaggaaactttgcaaagccaattaattgatgtcttagaaaagaatggcaaaatgctacgtgatcaacttgaagctcagaaactgaatttccagttggatcgtcaacagcagaaagacactgcaagtaacatagttgctgtactagataagcttgcagatgctctagggagaattgctgataaattgtagagcaaggaggatcagaatagaatagtgtacataacaatttggagtcaacaatagtggttcccataatttatctcaggatagtttctagaagatgaacatcatactagttaccctttcttttttttaatcttctgtctgcattatgccacttttttgtggtttactactgccactaaggcattttatacacaaatttggaggttactgcattttatttattctcttctttcagtgaggttatatgaatctttctccggtcaataatagtggttgtacagatgataatgatattactattacttattaaggtacatttttatt

SEQ ID NO: 46560 - DNA, 243 bp, Glycine max
  Clone ID: PAT_MRT3847_142046C.1
gattgagctagtgtccagggttagtttcaaacattaattatttcgatgttgactaggctagtgggcatattgtaatcaagagtgttgatgctgaattagctgatgaggccgggaaatcagtgccacttcatgaatattatcttgacaattgggctatagtaagaaaccatcaatcccaaaatgtgtcacagattaatgaaacagatcatattgttatagtgagaagcagtggcttttgccaag

SEQ ID NO: 46561 - DNA, 277 bp, Glycine max
  Clone ID: PAT_MRT3847_142047C.1
tttacatctgcatcttcaatattgcttctggtttattagcttcgcgaactagaacaaataaccctatacagatccattccatagccatgtcacgtgttgtccctctatctcacgattgagaacccgtcgttcttcttaagaaggctcccaccgtcgacgccaagaatgacgagaaagccgtcaactcctgccggcgctccgacgcgcaaattgaaaccctaaaaaagtataatgctggtacaaataaagcatcatctagcatcacttcattgaacac

SEQ ID NO: 46562 - DNA, 355 bp, Glycine max
  Clone ID: PAT_MRT3847_142048C.1
aatgctggacagctgcgcgcccgctccgccgttccgggatcgacccacgcacccacacgtccgataaaccgcaaacacaggttgccgtccccttgcgactgagacaccatctactccacaccggcttcctagtaccattctaccttttccaacacccttgcatacaacccttgacggcgaagatattcattcactgtcttgtctccagagctcggcgaatcactgactgctccactattaccgattagatgagcacacgcgctacgccagctacagaactcgggggcctatggacctacccgctgacctttggtgggctcgtcggctttgttgagatcgatcttaacaacttcca

SEQ ID NO: 46563 - DNA, 1224 bp, Glycine max
  Clone ID: PAT_MRT3847_142049C.1
agcaattcggctcgagcccattttcccttttgatgttctaggtgtcccagccttgccaaagttttcacaaatttcaaaagggtcttgcatgagaaggacttagtgcgctggcatggtaataacaaacaacaccgttttctaggctgcggcaggttttgtgaaggagggaaagcagcaatggaagatgaggctttgattgattataagagtgaaggtgttgaaagaagcatagaatgtgaaaatggttgcagtgatgagagttttgctgatttgattaaagaaaagggtggagagagcagttccaactctgaaattctattatctgagatgacagaacttgatgatcaaaattttgatttgaatcatttgattaaagaaaagggtggagagaagagttctagctctgaggtgatgacagaacttgatggtcagagtcaaggtagtgctgaagattcatcctcatcaacttcaatgatgtggcaggttcaggaaatgcctacatctaatagtccaagtccacgtggaagggaagatgcatagaaaaagggcatgtgtaatgagaattttgaggagaaaatctcaggccacgcgtccgcagtgctagagcttgaattgatgaaggagaggtttgcaaaattgttacttggagaagatatgtcaggttctggaaatggagtccctgcagccttgactgtatccaatgccatcactaatctatgtgccaccctctttgggcaactttggagattggagcccttggcaccagagaagaaagcaatgtggcgacgagagatggagtgtcttcttagtgtcagtgattatattgttgaattgaagcctacatggcaaacatttccagatggaagcaaacttgaggtcatgaccactaggcctcggtcagatctttatgtcaacctgccagctttgaggaaattagataacatgcttctggaaatactggatagttttgttaacccggagtttaggtatgtagaccaaggggttttggccacagatgcagatggctcatcttcattccgccaagctcttcagcggttagaagagaaatggtggctccctgtacctcaagtccctccttgtggtctacgtgaagattccagaaagcagttgcagcacaagagggatagtacaaagcagatattaaaagctgcaatggcaatcaacagcattactttagctgacatggagatccctcatacatac

SEQ ID NO: 46564 - DNA, 688 bp, Glycine max
  unsure (1)..(688): unsure at all n locations
  Clone ID: PAT_MRT3847_14204C.1
gtgtcacagtgaaatggtactgtagctcagtcgactttcaaaaggcagaagattaattaattttctgcaagtgaggcatgtggggattggggaccgtactttttccaatcaaattacacgtaacttgacattgacgccaaatccaagactccttggaagagtagttttcttgccactagcaattggaatgatataaacatctctccattttcgagtggattgaggtggaagaaagagagaaacaaggaaaggtaaagacaggagagtaagtaatatatgtgacgagattgggaaaaaaagagatatgaagaaaatggattaaaaataaagtggaagagaaagtgaatatatgtttataattgttatttacaagtcaatactcctacattgcatctggttggaagcggagaaatttgaccaaccaatttcattctcacaagagcggctgtttaatttggcttggtctttcgccaaattaattggtagtacatacgaatttgctttttagatttttgcttcaaagaattgtttatgtcaagataattgagagatggttaacttttgaataagtacccatgcttgacttctgaaacctaaatatactgcctagattaatttcttatataaaaaaaaaaaaaaaaaaaactcgagactagtctcnnnnnnnnnnnnnnnnnnnnnnnnnnnn

SEQ ID NO: 46565 - DNA, 340 bp, Glycine max
  Clone ID: PAT_MRT3847_142050C.1
aaaaaacacacaaagaactggtcggacatacatgctataatattttttgcctttacaacttttggaagataaacccggggttttttttttttttcaagggggtgggtttaaaatgggggtgaagaaccccaagaaacaaaactgtttcagggggacaatgaaatgacactttttttttttagacttggtttaaaccggagattttcggttcaattaaaaggggcagaaaaaaataatgggcttgatcaggggttttgaacccccccctggtttgcaaaaaaaaaagcggggttgggaacaaaattgtgttgggcacgcttactgttagttattggggaat

SEQ ID NO: 46566 - DNA, 1008 bp, Glycine max
  Clone ID: PAT_MRT3847_142051C.1
ttttatggcaaaatgggcatgccttggtccaacgttacggctctcgttgaagccatgaggtcgcgtggggtcgcccccgatttgtatacttacaatactctcataagttgctgtcgccgcggttctctctatgaagaagctgttcacttgtttcagcagatgaagctggagggattcacacctgacaaggttacctataatgccttgttggatgtttttggtaagtccagacgcccccaggaggctatgaaggtcctccaagagatggaaccccctggcttctctcccaccagtgttacttataattccctgatatctgcttatgctaaaggtggtttgctggaggaggctttggaccttaaaacccaaatggtccacaaagggattaagcctgacgtctttacctacaccacccttttgtccggattcgagaaggccggtaaagatgactttgccatccaagtttttctggaaatgagagctgtgggatgcaagcccaatatttgcaccttcaatgcccttattaagatgcatggcaaccgaggaaagtttgccgagatgatgaaagtttttgatgatatcaagctctgcaattgctcccctgatattgttacttggaatacccttttggctgtctttggacagaatggaatggactctcaggtctctggaatatttaaggaaatgaagagagcaggctttgtggccgagagggacaccttcaacactctaattagtgcctacagcaggtgtggttcctttgaccaggctatggctgtttacaagagcatgcttgaagccggtgtcgtaccagatctttccacgtacaatgctgttttagcagctttggctcgaggaggtctttggggacaatctgagaaagtccttgctgaaatggaggacggtcgctgtaaacctaatgagctgtcatattcctcctttgcttcatgcttatggccatggtaaggagattgaaaaggatgaatgcttttggccgaggagatttac

SEQ ID NO: 46567 - DNA, 266 bp, Glycine max
  unsure (1)..(266): unsure at all n locations
  Clone ID: PAT_MRT3847_142052C.1
aaaatagnnatcatggcagcgagtgggggttggcagcagcagnttcttagcattgtcttgtgcaggngcggccgcaaaatcaacacgcgtnacaccctagaacgttttttgaacancctcacaagaatcagacacngaggaaaacaccgcataggttagttgtggntgcggtgactcacgctctgctgantnaagcaagtccgacgaaaaaatcccttcgtggngaanaccgnactccgatgaaccaccgccatgggtccgggatg

SEQ ID NO: 46568 - DNA, 815 bp, Glycine max
  unsure (1)..(815): unsure at all n locations
  Clone ID: PAT_MRT3847_142053C.1
tacgaattcgagctctgtacccggggatcctctagagtcgacctgcagagtgtgaagaacgaaatacttaaaacgcaccgtttcaacgaaaaagccagcttattaaaattacgaacaaataatccatttcgtcctaaaagtatgaaaaaccaatcaatttatgataaaaatatataaatttaattattgaatgtgagaagtaccgcacactagtcaatgaaaaaaaattgtcagtattttttcacatttaagtattaaatttataatttttttatcaatttatcatccgatatccattactaaaaacatacaaaacatatttaataagtttttataatatttgataatttttaattataaaaagtttcttaaaaaaaacttataatagagagtggtaataagtgtgatagtgacattttttatttcttcaaaaaatgaggtaaaatgtgttttaattttatcatttttttaaattgatattaatttctatgttttaaaatcttttttttaataactctctttataaaacttaaaaaattgagatactttttttctgttgcaagaaacttgagaggcttaaaatttaattattttactatgttatcaaattctttagtatgataggataagaatgcaattttttatcgaataattgcataaatctaatttatactaatgtatatatatatatataaattaatttttaaaaatattaatacaataaatattttttattaaacacataatttgtatttttaagtttataaggcaatattcatggaattattttatgagctaaaaaancttaaattaaa

SEQ ID NO: 46569 - DNA, 798 bp, Glycine max
  Clone ID: PAT_MRT3847_142054C.1
gcatgggggtcatagatgtagaggacacaaactatgtgctacgagaagaagaagcaatttgggtgctaaaatagatccttacttacttgaatgagttactgtcaaaacttagagccatgttttctggagatcctggtaccacaattaagttggcagttttgctctttgttcttgccagatgtggcagctacataaccatttggaagatggccaaattcggcttctttggagtttttaccgtgccaaaaatctgctcctcgtattctgcacagttaactgcattcgcaaacttttggattcgtcgattccgggatgcttgggattcttgctctcacaaaaaggctgtggctcttggcatttttggccttgtttggaatttgtcatcagtggttgctcgcatttggtcagtgtttgtgctatttgtggccttcagatattatcaacaacattatttggtgagagaggaattggtggaaaatgaagcaggatgtgatgaaacatggcaagaacctgctggagttaaagttggaatgcagagacaacagtccacccacaaaatctttgaaactcagaaagtaaagaaagtattttaaagagcgctaaattattttgttagttccacgtagattttctccattgtataaaattgttgtcattgtaaaggtcatttttagtgtttttcttaatagagcatggttcatgaggaaaaagaaataatcccttggacatttatggcttgttattagaatttgttaattctttctatttcaaaaaaatggttgcatggtgctgcccaaa

SEQ ID NO: 46570 - DNA, 1495 bp, Glycine max
  Clone ID: PAT_MRT3847_142055C.1
cacactgattcaacgatggacgccaatggcaattgggaagaggacgatgacgaggagttcgagttctcacggaactattttctggccaaggaactcgcctcctcctccgccaagaaatcgaaacacaagctcaccgacatcgatgtcgttgatgaacaggaattgagggatgccgcgtcgaaaattgaacccaatcatgaatacgagatcactctcttgttggattcgtacaaaaccatgtatcctgaatggatttttgcgctaaggtgcggttttgggcttctgatgtatggatttggatcaaagaaggctctgattgaagattttgcttcaacagagctgacagagtattctgtagttgtcattaatggatatcttcaaaccattaacttgaaacaggttgttatagccttagctgaagttctgtgggaccaaatgaaagctaaacaaagggtttcccaccgggacttacccaagagccagcagccatccaattctcaatccatggacgatcttcttacatttttggatcaagcagaaatagaggatggtgatttttttgtttgtgttgttattcacaatattgatggacctggattaagggactctgaaacccaacgatatcttgctcgactagctgcttgtgcacggattcgtgttgttgcctctattgaccatgttaatgctcctctgttttgggacaagaatatggctcatacacagttcaattggtgctggtatcacgttcctacttttgctccttacaaggtggaaggcatgttttatcctatgattcttgcacatggtagcgccagccaaactgtcaaaacagctactatagttttgttaagtttgacacgcaatgctcagagtgtattcaaaattcttgcagaacatcaactctctcaccctgacgaaggaatgccaatcagtgatctctactcagtctgtcgagaacgtttccttgttagcagtcagattacactgaattcccatttgactgaatttaaagaccatgaactggtcaagattaagaagcattctgatggtcaagattgtttgcacatccctctgacagcagaagcacttcagaaagttgtgctcgagatcaattagtagattcaaaattggatgataagcaggcactgtttattgaatgaaaatccaattatttgaagctcgttcttgatgggaacctaatctttgagtttacaaactagttttatgaagaaatttataatcatttaggttagccccccacccccccaactgaggtattgtttgataaaaggcataaaagcaagtcaatctgccaccttccaagtgaagtcataggtcgggttgtttgcggtcatgaaatctgtcaagcaaacaacccattggacagtgtgtctttatcgtccatttgcattgattgtgtaccatttgataatttttccaattgagatgcgtgcatgtggtatgaaaaatgaaaagacaaatgatttttcttccc

SEQ ID NO: 46571 - DNA, 645 bp, Glycine max
  unsure (1)..(645): unsure at all n locations
  Clone ID: PAT_MRT3847_142056C.1
actcgagccgattcggctcgatgttcttatggtcttgtcacttgtgctgttgtgcaccttctagcagttagttatagacaaaaaaacagagggaccctgcttcaaaatttcattgtatagattgtttgttctatattttctaatgggtatcaagttgaatagaccagtcactgttgagattttgtttcaagtttttatagtcctatccttgtttaggattacaacttcggttttacaaccagcaaattttgtcttcggagattctcttgtcgatgtggggaacaacaattacattgcttccctctcaaaggctaattatgttccttttggaattgactttggaagaccaacagggaggttcacaaatggaagaaccattgttgacattataggtcaagaaatgggtattggttttaccccaccttacttagcacccactacagttggaccagtgattttgaaaggtgtcaactatgcttctggggcaggtggaatcctcaatctcactggaaagctctnntgtgaccgaatcaactntgatgcacagttagataattntgctaatacaaggcaagacatcatctncaacattggtgttcctaccgctctcaatctattcaaaaggtctatattttcagtagcaat

SEQ ID NO: 46572 - DNA, 264 bp, Glycine max
  Clone ID: PAT_MRT3847_142057C.1
tatgaaaatggaagagttttcagatgaggttgatgatgggtttgatgatgatggtgtagaagaagatgatgatgaaatggggtttttgaatggaagtgaaagtacgcttggagaagaaagtgaggggttaacagatgagttagattgggagaagagtattgggtgaagatgatgatgagaagttggaattggatgggtttacacctgctggagttgggtatggtaacataactgaggagtatttagagagggtgaagaagaaga

SEQ ID NO: 46573 - DNA, 262 bp, Glycine max
  unsure (1)..(262): unsure at all n locations
  Clone ID: PAT_MRT3847_142058C.1
tggtacgcctgcagtagccgtgccgagttcccggggcgacccacgcgggcgctgatgcacactctctctcctggaagaggggggcggcgtcttcctcttccgacgagcgttctcgctctggcttcctcnggggggacctcngggccgggagcgctcgtgcggggctatttgacgaggggngagagcgtcttggggcatctancancccaatacanatatnggaanagngggcctgtggtgagcaatcctctacanatatatg

SEQ ID NO: 46574 - DNA, 344 bp, Glycine max
  unsure (1)..(344): unsure at all n locations
  Clone ID: PAT_MRT3847_142059C.1
gttgcgtaggtcgcggaacccgcagcgaacgcaagagagcgacggtcaacaacacgacgcggccggcgcccggacaaaganaggacccngacgagacaaacacaccagnggacgagccaacccggccagcggaacaaggcaaggacacgcggggcaccccaaaccggggagaccacacccccagacagaaagacagagacccccaaaaaagccgggccacccgccccaaacacgacccccaagagaaccgagacggaggancaaacaacgccgaccaccaaaccgacacaacccaaaccaaccgcgacgncggacacggnacgcgccccccccaagggcccgag

SEQ ID NO: 46575 - DNA, 316 bp, Glycine max
  Clone ID: PAT_MRT3847_14205C.1
cttaataaaacattccccagggggaaagaccaatataaacaaaaaacccccatctatcttttcaaaccttaaaatgtctccctctttttcgaacacccccatataaaccccatgatatcatgctgcttatcaaccctctacttaaaacgttccaacttaaaaccaactttatggtcattaagtttccctcaatccttattccacacacaaaatccctttccttgatgcttaaccctctcaccctatccttcaaaaccctaacccctccaacaaaaaagatattctttacctctggcctaaagaggacttatctttt

SEQ ID NO: 46576 - DNA, 1353 bp, Glycine max
  Clone ID: PAT_MRT3847_142060C.1
tacggctgcgagaagacgacagaaggggggaggttgatagttaatctatctgcaacagcaacattgtgacagtgacagtgtcgtaggatggagaaggtggtatgtgtgaccggcggcagcggctgcattggttcatggctcgtccatctcctcttggatcgcggctacaccgttcacgccaccgtccaaaacctcaacgatgaagccgagacgaagcatcttcaatccctcgacggagcgtccacgcgcctccgcctcttccagatggatctcctccgccacgacaccgtcctcgccgccgtgcgtggctgcgccggcgtcttccacctcgcctctccctgcattgtcgaccaagtccacgacccccagaaggagcttctggacccggcgattaagggaaccatgaacgtgctcacggcggcgaaggaagcaggggtgcggcgcgtggtgctcacgtcctccatctccgcggttacgccgagccccaattggcccggcgatgttgccaagacggaggagtgctggaccgacgttgaatattgcaagcaaaaggggttgtggtatccattgtcgaagactttagctgagaaagctgcttgggattttgctaaagagaatgatttggatgttgtggtggtgaatcctggcactgtgatgggtcctgttattccaccaaggcttaatgcgagcatggtcatgctcgtgcgccttctacaaggctgtgccgaaacatatgaggacttttttatgggatcggtccactttaaggatgtagcattggcacatattttggtgtatgagaacaaatcagcggctggtaggcatttgtgtgttgaagctatctctcactatggtgactttgtggcaaaagttgctgaactctatccagagtataatgtgcctaagatgcaacgagatacccagccgggattattgagaacaaaggatggagcaaagaaactgatggatttgggtttgcaattcattccaatggagaagattattaaggatgctgtagaggatttgaagagcaaagggttcctttcataaataatgctgctgctgctgctatttagaaccagagtgtaatgtttgcaatatgagtacttatgacacgagcctgtaatgtatagtctgtttcctctatgcctatgatgctatgcaaattggcgctgactcgatatgtattttcaatctgatgcttttttattaataaaaaataaaagctagaattgaccgggagaggttaaggacttgaatatcactgactctcatggatattttcaacattttcctgaacatttcatcttgctctaaacatgccaggaattatatatcacattaatactgatt

SEQ ID NO: 46577 - DNA, 538 bp, Glycine max
  Clone ID: PAT_MRT3847_142061C.1
gcaacagcaacagggtgacagtgacagtgtcggaggatggcgggaggtggtatgtgtgaccggcggcagcggctgcattggttcatggctcgtccatctcctcttggatcgcggctacaccgttcacgccaccgtccaaaacctcagttattaccatcccacactctttctttcattcatcatttcattattattattacaactctcacacaacacaacacaacctttctaagttaaatcgcttttccttcttctctcactagcgagagacgatgaagccgagacgaagcatcttcaatccctcgacggagcgtccacgcgcctccgcctcttccagatggatctcctccgccacgacaccgtcctcgccgccgtgcgtggctgcgccggcgtcttccacctcgcctctccctgcattgtcgaccaagtccacgacccccagaaggagcttctggacctcgcgattaagggaaccatgaacgtgctcaccgcggctaaggaagcagggtgcggcgcgtggtgcttacgtcctgcatct

SEQ ID NO: 46578 - DNA, 371 bp, Glycine max
  Clone ID: PAT_MRT3847_142062C.1
gaatagggatccccgggctgaggaattggacgagcacctgtgtccctggcagaacacaaaaagcttcgcactgtaaaaacaaattagcctattgtcaaatagtgatgaacttagcttggatactgatgtgagtggctggaatgatcttgggttaggattgcagacgctggtggcagtttcctagaaataaaaaaaaggtgaccttatcttagctgcttgctgaaagtgaaagtaggggagctgatgtaaaccaaaagaaaaggtagaaagcggagagatagatagaaatctggaaaaatgtaaaagggttaaatggattgcaacaagaaaaaaagcttgttctggggaagaaaggagagggttcggaggaa

SEQ ID NO: 46579 - DNA, 462 bp, Glycine max
  Clone ID: PAT_MRT3847_142063C.1
ctgatgtgcccccatctatgactcaaaacggtaggtcaagcagatattcctttggctcaagcaatggcaatggtgatacccctgcacaaaatggctctgctgttatcaatgttgatgattatgatagtgatagctccaattttgcaccatccacgccatcaactatgtcaatggctgttccagcagaactaggtggagctgtacccttgatcaacagattccaggtggatggatttttaaaattaatgcagaaacaaattcaatctgctgggaaacatggatttttttctaaaagatctgtaggtccccaagttcgagaaaaagttacatttgaggacatgttgagttttcaaaaggatccaattccaacatcattgctcaagttaaatgttgattttgtaagtagggcaacaaaattattccaaataattttgaaatatatgggaattgatccatctgatc

SEQ ID NO: 46580 - DNA, 274 bp, Glycine max
  Clone ID: PAT_MRT3847_142064C.1
ctcattcatgcttgtctataacacataccttgcaaagcactgaggcgaaaccaatccagagccagctcaacctatcatacacacaaaccttccttcaaaaccaagcacttcattcccaataatactgtctaaaaccctcggcttcgatgagccaccccaaaccaccgatttccacaccctcttcctcatgcacctctacttaaaccagcactcctgttgcttcaccgacgacaccgacctcggcttccgtatctataactgcgaccccttactc

SEQ ID NO: 46581 - DNA, 513 bp, Glycine max
  Clone ID: PAT_MRT3847_142065C.1
catcacactttttaatatagttgatcgaaaaacattgaatttatcttaacattagttttaactctctaaataaacatcgaaacacactacaatataaaatattataatgttgcattggtttttatattgaaacacccaaatcttttgtgtgtatcataacttcctaggttagttaccttggacattgtgtatttgctttattgacatcacacttttcaatacaatttaacaaaaaatcttactataaagaagatatactaatgttgcattattttttgattttggaacactgggaaagaagatagcttaatgctgcattgttttttgattttgaaacactcgaaccatttatgtatattataacgtcttaagatggttaccttgggcattatgtgtggtttattgaacgaaaaatcttacatcatcaaattggttataacatccatttcaaatatctaaaaaaattaaaacacaccaggaacgagatatcctatcctaatgttgcattaggtc

SEQ ID NO: 46582 - DNA, 322 bp, Glycine max
  Clone ID: PAT_MRT3847_142066C.1
aggcgtgagaacacctgagagaggacaaccgaagagtgccgctaggatattgcggctgataggctatgacatacaggaatgactgccatggatcctacctatgccgctcagcatatacgcatccgataactgatgcttaatgcttctgctgatatgaaccggcctaattacgatctcattatgaacgtttacaaggaatcatgcactaagagtgacgacataatcatagaacaggtcgtgcttatatacagctcgactataacactggtatgtatatgctcaggaacatactacatgacatgatgctcagagatgcgatgct

SEQ ID NO: 46583 - DNA, 304 bp, Glycine max
  unsure (1)..(304): unsure at all n locations
  Clone ID: PAT_MRT3847_142067C.1
tcgcncgcacgcgtacgtaagctcggaattcggctcgagngcgagatatncnaanntnnnnacanctcnntcagcntcagcttcagctnnancannnnctggtnntnnngtagataccngggtgnncnngggtacattttttcgtgacagatgtgccatgnatgnccnnngnnncnngnnctgacatnctagataactcngcngaaggagtnntcnncggagtcnnatctntgaacgcttgtgtncgaaantgtcagttgaancngtttcntgctcggttncggtnccaagagnnttcagcnna

SEQ ID NO: 46584 - DNA, 1089 bp, Glycine max
  Clone ID: PAT_MRT3847_142068C.1
gcagcggctaccctaatcctctcctcttcctctctactaatttcagctatggccgacgaagctgtggttgttccagatcccacccagatcgatgtcaagctctttaaccgctggagcttcgacgatattgagtggcgacatccaagcacgccacgtatgtgcctcacaccgccggcaggtactcggtgaagcggttcaggaaggcgcaatgccccattgttgagaggctgaccaactctctcatgatgcacggtagaaacaatggcaagaaactcttggctgttaggatcatcaaacatgctatggagattattcatttgttgactgaccagaaccccattcaggttattgttgaagctgttgtcaacagtggtccacgtgaagatgcaacaagaattggttcagctggagttgttaggagacaggctgtggatatctcaccccttaggcgtgttaaccaggctatctatcttctaacaactccagctgaaccaattcttgttgcatcttcacgtggaccactgttgacaacagcttcaacaataacctgaatggggttctggtcagtcaacaaatgaataatctccatagcatgtttgatgatcctaacagccaagagtttcttgccattgtttctaccgtgcatcatgagagagttggtcagcctctcaacaatggggcattgcgccttcctgaaccgcttccaccgagtacctgccggcggtgtgaggcacatacgtggcgtgcttggatgtcgccactccgatataatcagccagagaaatgtcagtaatctaataacacaaaacaaaaacaaaaaatcaacaataattacacatttcacataagaacacatcgaaaaaacatcagaacagaatacacatcacagatttttaggatataatttaataagcagctgaaccctaaaaacatggaaattggtacctcaatatcgtcgaagctccagcggttaaagagcttgacatcgatctgggtgggatctggaacaaccacagcttcgtcggccatagctgaaattagtagagaggaagaggagaggattagggtagccgctgcttacgattcaat

SEQ ID NO: 46585 - DNA, 212 bp, Glycine max
  Clone ID: PAT_MRT3847_142069C.1
cacacacgccttaaaaccacaattcaaaaaccatgtttgttaagactgaaatcgaaacggcggcggggttgaaaatgttatggcaaagtaacaaaccttgttattgggtgaactagggaacattactaacctttcttaggggattacaatgcacatatataacttgcatgaacatgaatccatactaaatgagcttcatgacttagagggac

SEQ ID NO: 46586 - DNA, 258 bp, Glycine max
  Clone ID: PAT_MRT3847_14206C.1
gtcgcttcgcgatgcccatgcttgaggttatcatttttggggcttgggtatagatgactgctctgagattttaggttttgcccttaattgtattttggggatgggtagacctaagatcaaaccttttgtaattattcgaaccattttcattattattttgggttgtatttgttgctctctagtttgtttgagacgtatgtatttggttaactcttctggcatatgatacctacttattatatttgatgaccatggaga

SEQ ID NO: 46587 - DNA, 535 bp, Glycine max
  Clone ID: PAT_MRT3847_142070C.1
aaagcggaaaagaatactttatcatttctcagggggagatcagagacaaacaaaaagcccataacccttacgaaagaaaaaaaaaaaaaaaaaaggccctttaaaaaaagcccataaaacgggggtttgtaacaacggtaataatacagggaaattttattattatcagcatccgggcctaaacctaatcccaatcccataaaaaaaaattaaaaacccccatccattttgaaaacgggggtcccaccgttcccgttaaagctgttaaaaaaaaaagccttttgatactccccgacccgcttttaaaaaaagttggtttttccctggaggaaaatcagctccatccaatcgaacgggttctgaaaattgaacaccttcccgaacccaagcgcccccagaaaccgatttgccaaaaactaaagggattgactcataaaataaccgttcatccccaccaacgcgcaggggagggggtggaacaaaaactcccgttaaatatccaggggggccctaaaaatttccctaaccccctcct

SEQ ID NO: 46588 - DNA, 414 bp, Glycine max
  Clone ID: PAT_MRT3847_142071C.1
aaagattaacttgatgatcatcaaccatccaaggattgaggacgtaaggaacaagtgcacccctagaaagtgaatttaggatgaaaacacttggaaggaaaaccattcacaagataagatttcagatatattcaattatgcacaattttattttttttattgtgataatccaacatctagttttgtgtggagggcagcagctattggttgagggtgaaccaaacaaaggggttagcaaggccagaaattgcaacaccgatgagaggcccggcccactggattcagtggatgatgcatgtccagctctctacagtagggccaaatgtgacagcgggggttatggtcgattagatatcgtccccccctaccatatgttccctgcaaccatgatacccatggccatgggagcaataa

SEQ ID NO: 46589 - DNA, 394 bp, Glycine max
  Clone ID: PAT_MRT3847_142072C.1
aaaaaatcacgagtatcaaaaagaaatatttatccagccgaggcatgattgattgacaaagaatgattccctccgaacagaaagagcgtcccttcatgtaagagtcttgaagaattcattcgaccgacttgtcgtcgctagctgaccaagacagacataccttgtacttttgggcattgcttctattacgaaatctctagttggatgaaaatagcgctactaaacgaaagcctctgtcttatatacgaaaccgccagtggacagcgaacaaatatgccattacttgactcaatctatccggatgatcgaaggcgtatcgcgagcgacgcttcttatacgttgcttcgactgctgtgtacattcccagcccataagaggcgtgggtaccatactc

SEQ ID NO: 46590 - DNA, 316 bp, Glycine max
  Clone ID: PAT_MRT3847_142073C.1
atagaagttccatccaattatcaacatcctctgtatacgaaatgctaatgctgcctttctatattttctcctcttggaaacaagtagattcactgggtttgttggttccttatttatctcgtttcccacgtttgtctgttcttgatctgagcttctgcaatctacttcaaatcccagatgctattgggaacttacattctttagtaatattaaatttggggggaaacaaatttgtgattctacctaataccattaagcaactttccgaacttccatctctaaacttaaagcacttgatgcagctgaagattttgcc

SEQ ID NO: 46591 - DNA, 193 bp, Glycine max
  unsure (1)..(193): unsure at all n locations
  Clone ID: PAT_MRT3847_142074C.1
gtcgaccacgcgtccaggcacttttcctatttgggtatgtgttgcggttgtggttttggttgtagcggtgagagtgagggtagtttccagaaaaaaggagcgtnctggttgcgtgggtggtctagtgtgacgtggtcggcttgtatgtggtggcgtggggggtttggggccctttgctgtctgcccccccctt

SEQ ID NO: 46592 - DNA, 298 bp, Glycine max
  Clone ID: PAT_MRT3847_142075C.1
atcggtcttcgttatctcactaccctagttgtagcgcaagctcttcctgagataccatatggggtcctttatgaacgtggaggataaccttatctaatcttagcacgttgaatataatattcggactcttaacaacaacaactttcatatgtcatagtccctagcgatagtgaagaaacagcgaatcctcgatcaagctacctatctatagctccttgctgatgtacgcaagtacaacgttaacaatgcttgctctctcactcatcatgaactgatcaacagctaactcgtaaggaat

SEQ ID NO: 46593 - DNA, 322 bp, Glycine max
  Clone ID: PAT_MRT3847_142076C.1
accacgcgtccgtccacgcgtacgaaatttttggagtgccaatgtgaagaggaatagaaacttgcgccacaggcacaaaaatgccaccacattacaacgaggcgtataacaagatcgaacgagagcgaatatgttaccgagagaagaagagggggtacaggcgctggatgagataacgctctgaactgcgaatttcttgtatcggaagcgtactgacaggctcgatatgatgattcaacacaggacctggagtcctaagcaccctaagcttcggcaatatcttcacagacggacccgcgctgtgacagacgtagctatcaaa

SEQ ID NO: 46594 - DNA, 398 bp, Glycine max
  Clone ID: PAT_MRT3847_142077C.1
gctgaaacaaaaaatttgcttcgaacagctttcggatttttcaaacccacccatcagtttttatctctaacaccttttgatgtctgtaaagaggggcaatctcagagattatatttacggggtgaaaagacatcagagtcaggtgtgtgaagaagccttagaagggtgccttcaaacttgttactattacaagacacgatgcccgcaaaaatacggctacgcgctacagggtgtcctaattcaaaacctgaagtcggagagagtgtcaccagcccaccttggtagtctgcctaagacgctgtaccattatcaggggaaggcgctttctctggtgaaacacctatcttatacacaggaacaccttattctggtgacagagtttggtgcaaggagacaca

SEQ ID NO: 46595 - DNA, 346 bp, Glycine max
  Clone ID: PAT_MRT3847_142078C.1
ggcaaaagaaacccaccacggattttatttattgtccttataccgctcatttattttgttattatacgcgagcgggcggaccaataaccataaggcggaacgccgtaaaactacacaaaacttaagcccttatggcaccactgctcccaaatcatatacggtcagatccaacatcctttaaaactatttcaacaagtgcccaaacactacgacgtttgtcgactataaacattactttccaaaatatacctacctactgacagaaacataatcaactatcatatattcaccaacataaaaatctatgtactgctcactatcaacaccacgatttctggttaccata

SEQ ID NO: 46596 - DNA, 1268 bp, Glycine max
  Clone ID: PAT_MRT3847_142079C.1
acttcactctcggcaacggatatctcggctcttgcatcgatgaagaacgtagcgaaatgcgatacttggtgtgaattgcagaatcccgtgaaccatcgagtctttgaacgcaagttgcgcccgaagccattaggccgagggcacgcctgcctgggtgtcacacagcgccgaaagaaagaaacctaacagcgccatagcgttctctaagctatcgtgcgaggtccctcgacctccgcacaaccccagcaccaaggggctgtgcctgtcgtcgtcttccacgcccatgtcggaacccgacacccaggcgccgccgccgcctccgttcctgctccagcgcccgccgcttctgcagtcggcgtcgccgctcttcaagcagcggtcgtggtcgccggacgccttccgcgacgaggcgtggctccgccgcaaggggaactggaagaaccgccgcagtaagagcgtcaccgatgaggacgtggacgagctcaaggcctgcatcgagttaggctttggattcgattcctcccccgaggtcgagctcgatcaacgcctctccgatactctacccgctctcggcctctactacgccgtcaacaaacgctacaacgactcccttgtcaccaaaaccacgccgtcctcctcctcctcctccgccgcctccgattgcgacagcactccttgcccccacggcagtccccactccgccatcttcaccaccggtgataaccctcagacggtgaagacgaggctgaggcagtgggctcaggtagttgcttgtgcggtgcgacaaagttcagatgtgtgatgataataattaccgaatggagaagcagggttgtaaaacctaaaccatacagtagaagcaatgtgtgatgattgatattataaatgacaacgatttcccaccgaaccagaccaaaccaaaccgagagtgaaccctagttaaccacccaatcgtggcggaaccaaagtagttagttagctatattacattacaattacatgtggggctgtcggcagcgccttgttttgtactgtacttgtccaatatgtgatgactaagccaaggtagatctattatagtattatctatgtcatatgatatatgctagacgtacgtacaaattagttttgtttttgtttttgtgctgagtgtgtgacaggaagaaaaaaaaagtcaaaaggtgttctactgcatttgaatccagtgctggttgtgctgcttcttttctctttcctcttggtcttgctcggttgctagtactttattg

SEQ ID NO: 46597 - DNA, 263 bp, Glycine max
  Clone ID: PAT_MRT3847_14207C.1
ggggacacatcaaccctgcagtgacattctggttgttcctgggacgcacggtgtctttggtgaaggcgtcgttgtacatgataccacagtgcgcaggtgcaatctgcggtgctgggttggtcaaatggttccataaatcgtagtacaacaagtaccgacgtggacttaacactgttagcgaaagctacaacaaatgtaccgctttgggagctcacataatcggtacgccttgttcttgtccacaccgttttctccgccactga

SEQ ID NO: 46598 - DNA, 1794 bp, Glycine max
  Clone ID: PAT_MRT3847_142080C.1
acggaagtttgatccataaagccagtggtgtcccttcccattcaagagggccgaaagaaagaaacctaacaacgccatagcgtttcctaacccatcgtgcgaggtccctcgacctccgcacaaccccaactccaaggggctgtgcctgtcgccgtcgtcttccacgctcatgtcggaacccgacatccacgcgccgccgttcctgctccagcgcccgccgctcctgcagtcggcctcgccactcttcaagcagcgatcgtggtcgccggacgccttccgcgatgaggcgtggctccggcgcaaggggaactgcaagaaccgccgcagcaagagcgtcaccgatgaggacgtggacgagctcaaagcctgcatcgagttgggcttcggattcgattcctcccccgagaacgagctcgatcaacgcctctccgatactttgcccgctctcggcctctactacgccgtcaacaagcgctacaacaactccctcgtcaccaaaaccacgccgtcctcctcctccgccgcctccgattgcgacagcagtccttccccccacggcagtccccactccgccatcttcaccaccggtgataaccctcagacggtgaagacgaggctgaggcagtgggctcaggtagttgcttgtgcggtgcgtcaaagttcagatgtgtgattgggaagcaaatgaagaagcagggttgtcaaacgtaaaccataaaatagaagcaatgtgtgattggtattattataaatgacaacgattccccatcgaaccggaccaaaccgagagcggaccctagttaaccacccaattgtgacggaaccaaactagttagttaattagctatattacattacatgcggggctgtcggcagcgccttgttttgtactgtacttgtccaatgtgatgactaagccaaggtagatctgttctattatagtattatctgtcacatatatgatatatgctagacttacgttgtcggcagcgccttgttttgtactgtacttgtccaatatgaaatgactaagccaaggtagatctattatagtattatctatgtcatatgatatatgctagacgtacgtacaaattagttttgtttttgtttttgtgctgagtgtgtgacaggaaaaaaaaaaaagacaaaaggtgttctactgcatttgaatccagtgctggttgtgctgcttcttttctctttcctcttggtcttgctcggttgctagtactttattgaaaatcaaggaacaagagagaagtgaagtgaagaatataacattcttgtaactctgacaaagagatttgacttgcacgaggaatacagcttgctttctagctaacatgggctggctgggtacgagtacgactcaacttgtgtgtctttcgtgaaaggcaagacactgaagcttcaaatttcaacattctcctgttcgtgtcatcgattgggaatattgcggtgctggcaatgctaactttgtgtttctgactcattgtacttaattaatttctagctagccactctgtcatgactttgttttccttttccaccgattttccagcggctgggagcttaatatttgcgggaatggaatggaacatctctggcgtgttgacttttcacgcggaggctggcgtcaagtcaaattactgctaacaaaacgtatattacagtgttaataaaccccaatgttaggggaactctgccatgaaaaatagaaggttccgatgaaggaatgtggtcagtttgggtgataaaaaaataaagagataaatgataacttaattacag

SEQ ID NO: 46599 - DNA, 194 bp, Glycine max
  Clone ID: PAT_MRT3847_142081C.1
caaaaaaaaaacgccttttttggaaaaaaccaacaaccctggcttaaacaaatataaacaaccgctttaacaggcgtaaacacacaaccacggaagggggtggtcacaaaaacccaccactttctttcggggtgtcgcagggaaaacaaacaatggttgccaactgccccccccccaagagttccccacccttc

SEQ ID NO: 46600 - DNA, 436 bp, Glycine max
  unsure (1)..(436): unsure at all n locations
  Clone ID: PAT_MRT3847_142082C.1
cccacgcgtccgaggatttaaaacttgttgctggagatgccagccataatgttgaaaaggagcttcgttctgaattcttcaatcaaccatgggttgaggatgctgtcattcgttacctgaaccgcaaaactgcaggaagtgatgctcatggacgcaattaagaaaacgttgtagaggtggagtttctatttcttgctttttctaacaactcgatatacttttgtttttgtaatcctttttagggaagagagtttgagtacccaagatgaggagtagaagaaaggaaagaatgtaggacaaagaaaatgtgttttagatagtgaaaatcaaggctagtgtgatcagaaattctgtacagaatttcagaaaaatatatactgatccgtttattttggttgcccctggctcanaananaaaaannnannnnaaaaaana

SEQ ID NO: 46601 - DNA, 139 bp, Glycine max
  unsure (1)..(139): unsure at all n locations
  Clone ID: PAT_MRT3847_142083C.1
ggaagcgcgcgcacaaanacaggnagaggcaagcgaaggaaaccagagcaacgcgaacactttctcaggttccttatgtgtacccttcatctcttagcagcaacaaagcttatcctttttggccttgcaagcgaaggag

SEQ ID NO: 46602 - DNA, 393 bp, Glycine max
  Clone ID: PAT_MRT3847_142084C.1
cgaaaaataccaggccggtggggctggccctttaataataatggcaataatttgggttcggccttggggttttttaaaaaccggtaccacccttcaagcccgttggaaaaacggccaaactggctttttaactttaactggcaaatcccaccctttacttaataatagtttaaaagcccaaatccagccaaggccaccactgattccagttcctggaaccactaaaaaaataatacctaaaaggctttaggaaaatgattccacctttggagccaaaagggaagcccaaatattggtccaatgccaccttaggcacccgggggacggagtccatgatcctgggaggaatccacgggggccggaggcataaatggccacatggcaactccggga

SEQ ID NO: 46603 - DNA, 1685 bp, Glycine max
  Clone ID: PAT_MRT3847_142085C.1
cattccttgtccaaaagtcaatgatgaatgtaaccatggttttcttgaactgagaagcatattgggtcaacattttgtctctgagttagtgtgtaaagcaaaagaactagtgcaagcatacaagcttcaaaatgtagttaagaccgcagacaacttctgttcatgtttgaagcttgatagaaacacagatgttagctatagtaatatgaggaaggctgcttctcgagaagatttgactgacaactatttatactgtcctaaagctgtagatcctcagtacaaggatttaaggcattttcagtggcattgggaaaagggggagcctgtcattgtcagcaatgtgcttgaatgtacatctggtttaagctgggaaccgcttgtcatgtggcgtgcattacgtcatgtaactaataccaagcatggccaacatttggcggagaaaacaattgattgcttagattggactgaggtattggttaaatgcagggggaaattaatatccaccaactttttactggctatacaaatggtcgtagtgattggcttgcttggccacagatattgaaattaaaagattggcctccttctaatttatttgaggaacaattgcctcgtcattgtgctgagttcatatcttccttacccttcaaggaatatactgatcctcacaaaggttctcttaaccttgctgtgaagttgcctaatggttctctaaagccagacctggggccaaaaacatatattgcttatggatttcctcaggagcttggacgtggtgattcagtgactaagctccattgtgatatgtctgatgcagtaaatgcgttgactcatattgctgaagtgaaactggattctgatcaacttactgtcattgagaagttgaagcaaaagcatctcgagcaagagaaaagggagctacttggtgatgatcaaggatggagaaactaatgttgacatgcttaatataattcatcttctacaataaatgctttggacaggcaaactagtgttgaagtcatggaacaagaaggtggattatgtgatgggaaagaagttgatcagtttcatcaaccgtctggtagtaatgaggttgccattgctaatgaggatggtatttcatatggatcagagctcatagaggttgacaaagtaaaagtaaatcaaggtgatttgttgtttgggggggatgcttcagatggtgctctctgggatattttttggagacaggatgtccctaagttgcaggaatatctgaagaagaatttcagagagtttaggcatgtccattgctgtcgtttaaagcagggtaaattattaaaatgattcagttatctgtctgagtactccttatcaacctgagtcatttataacaaatattttcacctttaggttatgtcatagatccatgtcatagagattcgacaaagtttaacgttggctgtcgaaagcctaacacaaccctctccttttatccgggcttgggaccggctaagaatagcaaagctaccctaggcaggattcacctttaggttatatttttaaattttaatatttggagctttgcacccttataacattgacattctcccattcccttattttattctgataaaaatttcattaaatatgcatgtcataaaggattgggtgaaggatcaagctgctaataaatagttatttag

SEQ ID NO: 46604 - DNA, 465 bp, Glycine max
  Clone ID: PAT_MRT3847_142086C.1
ctaggaatcacatctgtgaaccattaggacccgtacaagtgaatccgattcctcttcttccttcaccaaccattgacgttcaacagaaattttggtggatctgctgctagttgtggatttcggactgttgaaatggcttccaatgccacatctaaaaatgcttgcccaccgccaatgaaagccacatcaaacggcgcgtttcagggtgacgatcctcttgatttcgcgcttccccttgctattttacagatatgccttgttcttgtagtctcaaggggactggcatatcttcttaaacctttaaggcaacctagagttattgcagaaattattgtaagttcatttcttttctttgaattttaatcaatctaattaacttagcttatattttctggttcataatataaataaatagccaacaggattgacacatctgatcgagttttccactcttgtgatttggat

SEQ ID NO: 46605 - DNA, 971 bp, Glycine max
  Clone ID: PAT_MRT3847_142087C.1
ccacgcgtccgctctctctctatttctttctctttctctctctcttctcagcgcgcgctcttttctcttctctctcctaatatcacagatctcgttctcgccaacgattcactaccgaaatttctcgttttgttccgttcaaggatcgatgttcgataaatttgattctctccacaccatggtgtttttctttccttagccacccacaagaaagaaaaaaacgattgggttttggtttggttcggttcggcttttttaagtggttatcgtacggcaatgccggccgcggggatgcggcgcacgacgagggtgttcgggatgaagggggccgagacggcccgcgttttacggtccgggcggcgcctctggccggactccggcgaggtcaagaccaagcgatcccacgacggggaccagtggccgatggcgccgccgtcgaaagccgcgaaaatcgacgccccggcgacgccgcgtaaggggaagcgctgcgaggaggctgctgctgctgtggttgacaggaggttcggcaagggccttgtgtatcagaggaggaggaagggtttgttgaaaaaggaaggttctagaaggaacggggaggttttgcgctgcgtgatttcggttgttgtgagtcgctgtgcagggaaaagtggaaggtttttgaggttgttagcttcggtggtgaggtatgttactaaagttagggtttctccgaggaagctgtcggggttctgtatgtcggaggcgattcatggggcttttgcgtcgcaagggatgcagtttgtaaagggtcctacggttgttaacactggaatatgccagttctttggggtcacagggactgtgcccgcattttctgtggacttttctgctgtttctccttgttttgagtatctgcagtatgccgatgttcttaaaatctatgtttaagtcattttttcttgtacataatccaataaatgtgcctagtgatg

SEQ ID NO: 46606 - DNA, 511 bp, Glycine max
  Clone ID: PAT_MRT3847_142088C.1
aggacacatgaataatgtttcatgtgttatgttccatgccaaacaggacatcattgtgtcaaattctgaggataaaagtattcgagtatgggatgccacaaagcggactggaattcaaactttccgcagagagcatgatcggttttggattcttgctacacatcctgaaatgaatttgttggcagctggtcatgacagtggcatgatagtctttaagctggatagagaaagacccgcttttgcagttagtggtgattctttattctacacaaaagaccgattcttgcgtttcttcgaattttcaactcaaagagagactcaagtacttacaattcgacgacctggatcttcaagtctgaatcaaagtccaaagactctttcctacagccctactgaaaatgcaattctactctgttcagacgtggatggcggatcttatgagttgtattgcttatccaaagatggtacaaaggacagcttttggaggggtgatacacaagatcccaaaaaa

SEQ ID NO: 46607 - DNA, 190 bp, Glycine max
  Clone ID: PAT_MRT3847_142089C.1
gctacgcgtgcggcaactgctatacttgcttctcagctggatccaatcaaccccactttagacatgggtccctacatattccgcagccgcttcggcctgaagcacttcaaacgagtctcttccgatctcctactaaaagcgcgagtcactgatgtggggattccaccacggcggggccgcaggggcccat

SEQ ID NO: 46608 - DNA, 304 bp, Glycine max
  unsure (1)..(304): unsure at all n locations
  Clone ID: PAT_MRT3847_14208C.1
ggtttttcctttttttttttttttttttttttttttttttnaaaaggaataaaataatttttctaaatcacaaaacattaataactttttttaacatatacctgacatggggaacaattagataacaattgcttgggagtagcgaaagacaaaaataggttttttccagcttcattcctatttttcatcaacaaaggaaaaagccctgatttcctctacatcttcatagctacccaggaatatgggagaacgctcgggccacttttttggaaccaaaaaaagggccctttgggtgccggggaaa

SEQ ID NO: 46609 - DNA, 799 bp, Glycine max
  Clone ID: PAT_MRT3847_142090C.1
tctgactacggtaattaactggtaaatacggtaatcaactggcaaatacttggacaatggcctcagaaaatggtcacaaactagaccttgctcacagtgctgttcctgatcccaagcccaagacggattgggtcattttttttcttaggagcattcgctttttttttccacagatcatctgctaacacttgtagattggtagttgccaccattggcactaacccagtaacaattactcttactgcaatgtttcagcacactccagcttttacattcttcgtgatagtcaatgcaattgccagtttctataacatggtggtgataggagtggagatattaggaccacaatatgattacaaagaacttcgtcttggactgattgcaatattagacgtgatgacgatggctctagcagcaactggagatggtgcagcaacattcatggcagaattaggaaggaatggtaattcacatgcaaggtgggataagatatgtgacaaattcgaagcatactgcaaccgaggtggtgttgccctcattgcctctttcgttggcctcattctcctcctcgttgttacagtgatgtctatcaccaagatgctcaagctaaatcgcatttagcaccttcatgcttagaactaatgcatgacattcatatcctgctttctatattcacctgttttagttcattattccagtgtgtgatatatatgtatttagttgtgtcaggaccacaaataaatgcgttgattacatggactttcttagttttgtataaaattaatgttaatatgttggt

SEQ ID NO: 46610 - DNA, 283 bp, Glycine max
  Clone ID: PAT_MRT3847_142091C.1
aagttaaattaaccctaaattttcatttcatacgaaaaggacacttaggcaacaacaggggggggggaaaaaaactcaattaaatatagcaatactatctaaaagggacggggggcaacaaaaacatggggcagggccgatccataaaagacgggctaaaatcaaaactttagcaaaatcgggtataataacatttttttaaccagaaaccaaaaacctaaataggcttagggggttttaaaataagggggcaaccacaaggggtccagccactggatcaagg

SEQ ID NO: 46611 - DNA, 401 bp, Glycine max
  Clone ID: PAT_MRT3847_142092C.1
ggttgcgaaagcacagaaacgttatattgagtatatctccatagcacaaaaaactgcctggtctaagatataacacgtatatagggattagacctacactaactcccaggacgacgtctactatggggagatgatgaaaagaggtacattctgacccatgtgaagggcctattactgaatagcgctttaaagcataagaacgcctatggcttactactatctggcatcctgatgacgaccctgatgcacaaaagatgggagattgatgaatcttgtgtaacaccttctctctaaccgcaatcgctcaatgcttgcaacactggggggcttgcatgctggggaaccctccactcctcctacaataatatctaacaaagggtatacgaacaaaccgtataaat

SEQ ID NO: 46612 - DNA, 298 bp, Glycine max
  Clone ID: PAT_MRT3847_142093C.1
aaataacataacttgggtggggatctagaaaagcaaacatacttgaacaacacaactcgaaatcatgcaagtattgttagacaagaattatattaattgggtagattcggatgtatagaatatatggggctcatagcctttggggctgtaccctggttttggggaacatttaatggaacatgccatgatactaatgataaggtctataattatttgacaacctgttcctttaattgagcccaggtgtactcgtgtgacactaagttctggtctaaaatccggattgtgttagcctaag

SEQ ID NO: 46613 - DNA, 267 bp, Glycine max
  Clone ID: PAT_MRT3847_142094C.1
cggacgcgtgggctcatctaatgcatgatgctattttaatcccgatataacccagagaagaatcttatcctttttctccttgttctctctctttcttttttttgttgaacctgattgaaataataggatttgtgagtgttgccattttttttctttctctcgattagttgttaactatcttatcacttatttcattatcaatatgaacgattccctactatggtggcaaatgtgtttttggtattttaaggaagtagccaaggtgac

SEQ ID NO: 46614 - DNA, 502 bp, Glycine max
  unsure (1)..(502): unsure at all n locations
  Clone ID: PAT_MRT3847_142095C.1
ataatatatactaanaaacctnaccccaccccaccccnacccccccggnggggggggggnggggggggggggtntnnnnnggngnnnnnnnnnnnnnnnnnntttttttttttttttttgtgttttttttttgtngttttttttgcggccggcgccgccgcccccncnncccnnncccnnncttttttttggcctctccaaaacaaaggtttgtgggggggtgccttgngnnnngggnnnnnnccngggngnnnngggggggnngggccttcggcgctttttctcctngtcctttgaactgtgggtngggggaaaaaaaaaaaaaaatattacccttaaaaatctggggcaccttgcgtccttgaacctataaccatatttaagctaacctagcctcctccatgcctcgggaccgacaaggggtagtccatgaatattcacctgttggccatcgacctacacccttccgcctgaatcttaggcccttactcaccctccgtgg

SEQ ID NO: 46615 - DNA, 302 bp, Glycine max
  Clone ID: PAT_MRT3847_142096C.1
aaattcctagcagtaattgcctactacggatgagagattggtacgcacaaaaaccgaggtgataaatccttcatcttgactcaattcacagactatgccactcccatgacgcccctagatgaagaaactcttttctcaagtcgcacaagacatggttgaggaatggattgattgtgacgttgatgaggattcctatgaagaaggttttgtccgcgcagcacttaatggggttgaggggccaggactatatgggaagagtccctctaggcgcacccgagttttttctcttgtgtgcttttacg

SEQ ID NO: 46616 - DNA, 315 bp, Glycine max
  unsure (1)..(315): unsure at all n locations
  Clone ID: PAT_MRT3847_142097C.1
aaaaaaccgccaaaagnagcagccgctgcagcncccccgaagcnaancccagcagcagaaacccaaccctgtttgagnagccgagaacaacaccaangggagaggaggaaaagaaacctataggactcctccaaagcggaggtgaagaaacccgaggaagagaagaagaaaaaaaaagcccccccagggggggggccgggggaccacaaaaaaccggaacacgagncgaaagaggaagttgctgctccgacacaaaaccggcaccgggcgagattgtgctcaaagagcccacgcattgcgaggggtgcgctcgca

SEQ ID NO: 46617 - DNA, 426 bp, Glycine max
  Clone ID: PAT_MRT3847_142098C.1
aaaaaggttgttttttagttttggccaaccaaaacccaaaaccccaaaaacctcccggcggccttggggccatggtggaacaagttattaaacattacctcccccccaaattggcggaaaggggaaaaaatggtataccatcgggggagcccggaaaattaggacggttttttccatccaacaaattttttaaacccaagccctaccttattaagggggttaaaaccgccttttttgggtggcaatttctcccggctgtttgggggggaaaaataggaaaaattttgtttttgcaaaaacctacccgggccttgaaatttttccaaaactttaaagcagatgccgccaagggcccaaatctgtagcttgcttttttggcaacacaaacaattttttaaaccggggggacagccattttttccaaat

SEQ ID NO: 46618 - DNA, 208 bp, Glycine max
  Clone ID: PAT_MRT3847_142099C.1
cgaactggagccaacatttccatgaacaccccaatatacattgccggcggacattgctgctgccattggtgaagaagatgtcgccaagtatactgatgctgtcaaagaatttgtttgcatgacccctccggattctcggaagaccacacttgtcttaagggtgaaggaaaagctcaaagccgaggaacttgaggaggatgatcttact

SEQ ID NO: 46619 - DNA, 450 bp, Glycine max
  Clone ID: PAT_MRT3847_14209C.1
gagaagctgaaaatggcgatgaagaagttgcgcgtcgtgaaagtgaaaggcccttgttgtcctctcccctccccaccagcaccacgagacacagccgtctcccccgtccactacgcccgcttcctggacttcctgaaatcccactgggccccacctttcaccccggacaccctcctccactttttgaaatccaagctccatcaccacccttccttctcccacttcgacttccacctcttcacatgggcctcctcctccctcgactctttccgccacacccacctcaccttccactggatggcccgctccctcgcctccacccaccgcctcccccaactccgcaccctcctccacctcatctcctccaacccctgcccctgctccccctccatcttctcctgcccccaaacccaacccatcttctccctctccatccacgccttctccaaa

SEQ ID NO: 46620 - DNA, 261 bp, Glycine max
  unsure (1)..(261): unsure at all n locations
  Clone ID: PAT_MRT3847_1420C.1
gtttcttacaagcctctactatactgcttcaccttctgctctagctcattcagtgctcatcgttggctttctgatactctctgtgtagacgaaccagaccttcacgcagatgggatatngctctctgaattctctggcctccgaagctcatcaggcttcctttcctcttctagaaaatcttcagaggatttgcattctgtcattggcttccagacctatgctattggaccgagtggaagattctaaaaggtgtgatagaag

SEQ ID NO: 46621 - DNA, 504 bp, Glycine max
  Clone ID: PAT_MRT3847_142100C.1
ctgaaatttaagttactttttcgtcgatcttgtgcttgaatcaaatgcttgttcacattatcaaaaaaaaaaaaaaaaaaaaaaaaaaaaaaaaaaaaaaaaaaaaaaaaaaaaaaaaaaaaaaaaaaaaaaaaaaaaaataaaaaaaaaaaaaataaaaacgggaaaaaacaaaaaaaaaaggggggtaaattcctggcatttgcccattttaatcgcatggcaggacatgcaaaattctgcaggtagccaaataaaaaacagggccgcaccggccgaattccccaacaggcgtaaaaaaaaaaaggccaaagccaaacgccctttacaaccgtattaaaccctgaagggtgaatgggaacacccatatagcaacaatattatcccccgtagatttagggggtaacgctcaatgtaacaagctaaaaaatgcccggcccctatcgcccaatccccaaggtaagttccaatcctttctccccctttatgcctcctatttacggc

SEQ ID NO: 46622 - DNA, 455 bp, Glycine max
  Clone ID: PAT_MRT3847_142101C.1
ttttaaatttaaagttttatttttttaaaaaacatgaaaaacttatagcttggggagggggggtgatgaagatgagggagtaatacgcaaagacaggcataaagtctagacgggcagaagcacaacatagaggaggaaaccacaaactctggttaaatagagagagatgactgtgggaattcctttgaaagtcaacccttcctcacttgaacgaaggagcaaaggggatggcatctgaactggcccagggcgggtactcagactgggaacactgaaccaagcatggaattatccttaaatgccagacagagaggtaacaaaccgggggaaaggttctaatgcctccttataagaagatcaatacggaggcaccctgtatgcaaggaatatgaaatcagaagcatgcacagacaaaatatctatcaaggaaagatcaataaggggctcaaactagg

SEQ ID NO: 46623 - DNA, 2520 bp, Glycine max
  Clone ID: PAT_MRT3847_142102C.1
cgctcccgccgcgcggccatccctcttgtgtctccgccgaggcttttgctgggcgtgcacctgtgaggtctagcaagcaagaacaaattcacaattccattgtgtctactttgcttgctttgatggatggccttgactctcgtgggcaagttgttttaattggagctactaacaggattgatgctattgatggagccttacggcgccctggtagatttgaccgtgagtttaactttcctctgcctggttgtgaggcacgtggtgagatattagacattcacactcgtaagtggaagcatcctcctccaaatgagctgaaaaaggaacttgcagctagttgtgtaggttactgtggtgctgacctgaaggctctttgtactgaagctgccatccgtgcattccgtcaaaaatatccacaggtttatactagtgatgacaaatttgtcattgatgttgattctgtcaaggtagaaaagactcattttattgaagccatgtctaccattactcctgctgctcataggggagctattgtgtactctaggcctttgtctctagtagttcaaccatgtcttcagagacatttagagaaagccatgtgtagtatatctgatattttccctccagcttcaattacatcagagttgaccaaactttcgatgctctcctacgggtctgcaattccacttgtgtatcggcctaggcttctgctttgtggtggtgaaggtacagggctggatcatcttggccctgcggttttacatgagctggaaaaatttcccgtacattcattaggacttccatctcttctgtcagatcctagtgcaaagacaccagaggaggcattggtacatatatttggtgaatctagaagaacaacaccatcaattctctatttaccacaatttgatgtttggtgggagactgctcatgaacagctccgggctgttctcctgactttgctagaagaattaccatctgacttgcctatcttactgcttggtacatcctcagttgcactttctgaagttgaggaagtgcccacttccattttccctcatcgctcagtttatgaagtgaatatgccatgtgccaaagataggactttgtttttcaatcttttgatagaagctgctatgtcaatattgttggagggaatcaacaagaaatctcaagacaccggatgtctccctgaacttcccaaggcaccaaaattggctagtggtccaaaagtgtctgagctaaaagcaaaggtggaagctgagcaacatgcacttcgtagattgcgaatgtgccttagagatgtttgcaaccggattctgtatgacaaacgatttaatgccttccattatccagtgacagatgaagatgcaccaaattatcgttcaattatacagaacccaatggacatggctaccattctgcagcatgttgataatggtgactatattacaagtgctgcattcctgcaggacatcaatctcattgtttccaatgcgaaggcttacaatggagaggactacaatggtgctaggattgttagtagagcttgcgagctccgtgatgcggtgcatgggatgctctcacagatggatccagcactggttgcatattgtgaaaagattgctagccaaggtggcccagttcagttgtctgatgaattaggggattctacattccctgctactcctgttgtgcagctgggtcaaagtactagaatgagtgctcgacttcgccatgtccaaccagaagttaatatgaatcagagttacgaagtattgaagcgaactaagaagatcgctgaagtgcatgcagaagacaagtcacaagaagattcggtacccccaaagtcttcccaggagcatcaagccaatgacacaaattctgaaaggctggaaaatgtgtcaattgaaggagatttgcatggaacttttacaaataaccttgctgatggcaacagtcctgatgatgtcacaatgctagatggtgaattttcaggagaagtagagtctgtcaagcagctttttgtgaagcgtagtgaaaattacagcattccacaacttgaaaggctttacacgagagttatgaagggcgtgtttgaaaccaaaaataaaggagtgaatggggatcttaagtcttcggttttgaagtttttgttgaattttgtagaggatgatgcaaatttctaattactgggtttttcttctcctccaatgatttagaaaaaggaaagatttttactgtaaagtcgggatttttttaatttaaattaaatgtcatttgattgagtacaaaaattccctttcttctcccttcccgagagccacaattgtccaaagcgatgtatagtagtgtgtaaccatttattctgtctctattctgaattatcgtaattataggatattaggattagatgaaaatagaaagcttaaacgtcaatggtcagtcagagagatagaactttttttttgttgctgtcaacctatagcaactactattaaaaaaatatgttctctacct

SEQ ID NO: 46624 - DNA, 965 bp, Glycine max
  Clone ID: PAT_MRT3847_142103C.1
caacgaatgaatctgacacataccgttctctatccctgggcgatcctaacggtgatgagtccttggccttcattttggagttgtctcacatatctccatcccaagaacaaatcttggccactgctccatttgtcggagcagaacaggacaccgccgcctccgcctcccatgacattgacatgctgtcgttgccggactccgtccccgaagacgtattccacacgccaccggaggagtcctcgcttccctcctcctcctccgacaaccattgcgtcgttaattacgccgtcgtcgacgtggatgatgtgaatgctgggaccgatttggtgaaggattctgagttagggttttcggatgttcacatggaagaggttaacggagaggacatgggaaatttggaaacccttgttggggatgtgagcattagggtgtctgaatctgctgaggtaagcaagtcaagtgatgtggctgcggaatcccgggggaagaagagtaagcagggtaagaacaaaagtgccgtttctggagagcagaagaagactgttaaggaagcagggccagggctgcgtcgggtgttgcctccctcaattgcacgtcgacgtcgatgactgaaacgggaagtggaagaagtgggaacggtcggggtggggagaaaaggaaagctttgatgtttttgctgtgcttaaagctttctcagagttagagagcactgttgaagaaaataacgatcaccatcttactctgttggacgtggcagagctcgtggtgttacctttcctcggccaaggtggtggccggagggggataactttgacccaccaccacaatagcgtaagaaaatgaaggcagatgctttttttttttttttgaaaggtgatctcaatggtatattttgccctaactgtcttggatgtctatccgaattgtatgttttacgctttcaaaggtgtttaattgatgttaat

SEQ ID NO: 46625 - DNA, 749 bp, Glycine max
  Clone ID: PAT_MRT3847_142104C.1
ccacgcgtccgagcttgtagatagtagtaccccactttgggaagactatgagttgaggggctttgcactctgtagctttttctcatgtctcactagatttctcttgtagatgggaacacatcaacaactttgagagtggcactgaattgcgcgctcagcgcatgagtgaagcagcaatgaggattgctaacagatctaataatttgcaaaagtggattatatgtgatgaattagaaagaaaattttactctgctagatctgatgaaaatcacgagaagaaagaaacaggtaatgtagagtccactgacaaatggacaagtggggatgaccctaatcagaaaactcgcaaagacaatggagaagatggaaaatgtgatacaagagacaatccaagtagttccagcactaatggaaaaccttctgctgtggaggaagaagaagtgattctcttcaggcctctagcgaggtataattctgcaccattgtacgcactttttccccctcatgagcagatgtcatcaccaaaagacaaggatgataaagtcttgccttctgatgattgtctgcgccgtactacatctctgcctatggcacaaaatccatttcaaattgatccgtggggattccaaggtgacattacgaattcaaggatgaacaaatcgttccaactgctagaaccttcaatgaaggaatcaaatgcacacacattttttgagggtacaatctctgctgggcatccctcactcaat

SEQ ID NO: 46626 - DNA, 784 bp, Glycine max
  unsure (1)..(784): unsure at all n locations
  Clone ID: PAT_MRT3847_142105C.1
cggacgcgtgggcggacgcgtggngaaaaaaaaaaaaaaaaaaaaaaaaaaaaaaaaaaaaaaaaaaaaaaaaaaaaaaaaaaaaaaaaaaaaaaaaaaaaaaaaaaaaaaaagaaaaaaaggggtgggggtttttttagtttccttctttttcgtgggggttctttgcttggttttatggttgttttttttggggggttcattgtttttcattgtgccgtgtttttacactggtggggattgggaaattcttgggtttttccactttgttttgctttttcccttttgtcctttttttgaatgtgggggaagagagaaaagttccgcccttgctatcctttgtgaaaggttgggtggtttgtgtgtggatgggtgcatcccttgttttggcccttttggcgcgggggttttgggtgggttttctcgtgtttgtgtttcgcatagccccgtaacgggccggtattttcgtttttttttccttttcttttttggccttttttttcggtttttgccgtgtttccccttcttgctttttttgtttggggttttttgtttgtttggctttttttggtttttggggctcttttgacctttaaaaagttttgtttttgggggttgttgtccttttgtggggggtttttgccgttttttggggtttttaaccttcttgtctctttgtttgtgtctttttttttttttttgtgttattgtgttttccagcttggcacccctttctacgtctttttgtttgttgtgttttttttgtggttttgcgggttttttt

SEQ ID NO: 46627 - DNA, 1698 bp, Glycine max
  Clone ID: PAT_MRT3847_142106C.1
ggtccggactttcagtcgttccacggttaaatcatggaaccgccattgcagcaaaaatcgccgcaaccgccaccacgaaccgccaccatcctcgggaagtaccagctgacgcgcttcctcggccgcggaagcttcgccaaggtctaccaggggagatccctcgtcgacggttccgccgtcgccgtgaaaataatcgacaaatcgaaaaccgtggacgccggcatggagccacgtataatccgcgagatcgacgccatgcgccgcctccaccaccaccctaacatcctcaaaatccacgaggtgctcgccaccaaaaccaagatccacctcgtcgtggagctcgccgccggcggcgagctcttcgccaaaatctcccgccgcggaaagctaccggagtccaccgcgcgccgctacttccagcagctcgtctcggcgctccggttctgccaccgcaacggcgtggcgcaccgcgacctgaagccgcagaacctcctcctcgacggcgacggaaacctcaaggtctccgacttcgggctctccgcactgccggagcagctcaagaacggcctcctccacaccgcctgcggcacgccggcgtacaccgcgccggagatactccgccggagcggcggctacgacgggtccaaggccgacgcctggtcctgcggcctcatcctcttcgtcttccttgccggacacctcccgttcgacgacaccaacattccggcgatgtgcaaaaaaatttcccgacgagattaccagttcccggagtggatttcaaaaccagcccgttttgttatccacaaattactcgacccgaatccggaaacccgaattagcctggagtccctgtttgggaacgcgtggtttaagaaatcactaaacccggaaacggcggaagaaaacgcgttggggctgagttatgtgaagagtagttataattacgaagggagtaaaaaaagttcgggagtgacagcgtttgacataatatcgatgtcttcgggtttggatttgacgaggttgttcgaaacgacgtcggatttggggagtaaaagagagaagaggtttagttcgagtgcgagagttgaggtggtggaagagaaagttaaggaagtgggtggggtattggggtttaagattgaggttgggaagagtaacggtgcaattgctttggtgaaagggaaggtggctttggtgtttgaggtgcttgagattgtgcctcatgaacttctttttgtggcggttaaggtggtggagggtgcgttggagtttgaggaacatcattggggggattggaaagatgcgttgcaagatctcgtgctctcttggcacaaccaagaatcgtgatcatcagttaatgataggtatagttagttcttctcaagtgaaggatctacatgaggtttgatgttgaaggactaattgcagaacatgacatgcacactcacatcgtgctcgtcctgatgagaagaaacaaacaaggttgatgatgcttgttttgtgatttgattttgattttgtgttgaagcttagttataggtgtattaatttatatatgatggtttgaaaaataaaagttgttgttatgtatacatgagaatggtggctaaatgtattcaattctccgtttttgagttcatagaaaaaaattgtgtttccggggggaggaaagggggaaaactaattatggacccctcc

SEQ ID NO: 46628 - DNA, 587 bp, Glycine max
  unsure (1)..(587): unsure at all n locations
  Clone ID: PAT_MRT3847_142107C.1
gttattacaaaagaagggtgaagaatggcgatgagtacaaaccacgactagcttgagtcttggacactttgagactttgagaaaaaaaaaatgtctagtataactcaagtttgtcgtcattcgtgctcattgtcattcttcaccaccatccacacacaccccttcactgttatggccacagaccaccctttttcttcatttcattccctttctattctccattttagttccctttctttaaatatgactattaaaacagttattacaaaagtcaacaatcttacatgataatatatgattagatgccgctctaaaaaatctttagtgttagtcagtacattgtaattaaattctaaagattcatctcaaaatatttttctattattctggaatgtttatatttactatgttagcggnggaaaatactccactgaagtgagcaagccaagaagtgtgcaagtgatggtgcgttcataccttgtgaacttagccttgtttttttaccttgtgtgcactttagatgtttcctctatttagaagtgccttattttctngtttaactgaagacttgattaagaacagtttga

SEQ ID NO: 46629 - DNA, 759 bp, Glycine max
  Clone ID: PAT_MRT3847_142108C.1
cagaaactccatcgccgtcacggaaatccaccggttcacggcgcgcccgcaccgcactagatccagaacgccgtcgaacagcggaagccgctgctgcagtggcatgtgcagcggcacgagcccccgcagcgcgacggcctcgctgttcggcgccaccacgttcatggtcgtggttaccaccggtcacgttccggagcctcatcgctgcggcgaaggagccggtgccgccgccgacgtcgaggccgaggcgcagcaccgacttcgcggccgccgcgatctgaaacagctgctggatcgggagatccaaatcagtcttatacgaattgaacctcgaaatatcacgagaaggttggaagccgaggttagggttttgtttattcaagcaatcgaacgatttgcattggtaatgatcccaaattacagcgttgtcagggagggaggaagggaaggggtttttagggagggaatttgggggaatttgtttctgtggacccacggagaggcagcggcggcgaaggagggggtggcagccgcgatccacaaggggacagggaagatctagagtataactctacttttctttttccaaataataaaagatctaaacagacagcactgcatagcccaacgtgtgtgccaacaatctaatctaatggttttgcattttcctttcctaaatccgcttacccttaattttttattttagagtccagaataatgacttgaaccacgtccctgaccttaagatgatgatttttg

SEQ ID NO: 46630 - DNA, 1278 bp, Glycine max
  Clone ID: PAT_MRT3847_142109C.1
aactactcaacactgaaaaacttatttcaaagttacagcccgaggaaattcagatggacgtatatattaaaaaaagagcagacatgttagtatggtaaacctgttgaaatggtaaaaccttgttatttgcatcaaaggttggccatttcatgatttgatgaatgagtttatcatttatgaacaaccctattcagaaataataacccgaaagccccaggttgtttcttactgttatactcaagcagaaccaatgcacgaaattatgggccccaaactaaagtggatggtgacagaactttcacatactattgcgtaatgtcaataagcaagtttgtgaaggctacgagccggacccctacccaaaaagagcaactcaaatgagcacatttgtccttctgagagctagaaaatgatatgaggaagtctcttttcaggtacgaacgatgtcaaacactcccaattcaaaatctataagcttgtgaagtctgcagtttgaccaatcacctctctggctagtggctagtggccaaagccctcatcagtgaggcagcataatcctaaggcgccaactgtatccaaacgtgaaaagctgcatcaccgcaaagagtttcttgcctgtaaagatcatactccacgagggagataattcaacaagaaaactatctttcacggacccagttgcagttctttacacctgccaacttcattggagcaacatcacgtgcttcatgctcttgaactcttgatgcagttgctgcctctatctggcgcctgggactttgcgaccataacttagttttcctaatgtgctcagtggccttttacttgctagtcgctattcttcatatatattctgtatctagttaaattcaatgaagtcatatgggagaatatgagatatcaatcatatcatgatgcaagttagtaataaaccaaaattattgttttgttcttatcacttgccagaacaaaaaacaacaagctggctgtttagttttttaatcatctactctgctccatttccaaatttccatatttatctatccatgtctaaacctaagtaaaatatccctaatgaccaaacttgactaaattgacttgaaactccagttaattgtaaaggaacttatagaacatcatcgctggtcccaattgctgaaagcagttcattctcccagttcctcctctgtatctgaacttctaatgctgcaatagggggcatggggaaggggattggaaaggttgcaaaacatcactgtccaataattaacatctaat

SEQ ID NO: 46631 - DNA, 514 bp, Glycine max
  Clone ID: PAT_MRT3847_14210C.1
cctacggaataaatggccccggtggcctccttatttgaacatatggccaaaaacacatgttacaaggccaaaaattgttgcaacattaggagggccatttgcaaacttaggacataaactagggactgtagttaaaacccaaacaaccttgacgggtccaaaaaaaacagttaaaaacccccctcccccagtttaattcataaccaaacagcataattttttaatttataaaaaaactttcacaaaactaaaggcccttttttccatagggaacaaaaaaaattttcattgatctttccaacccctttttaaaaataaataattaaaatttccggtccttgacaaccggcctttttttattgaaaaaaggagtttaaactatttgaaaggaaaagccaccttgttgacaaattttgaaatatcacttgagcataaagttcatcaatcccagaaaggccataccattctgaaccactgcctatgggaggtggctagggatttcttgctcagggaa

SEQ ID NO: 46632 - DNA, 399 bp, Glycine max
  Clone ID: PAT_MRT3847_142110C.1
cgcgggtgctgtatatgggtttacctttccccgcagaaccccagaaaactgcaccttcttcttcttcttcttcttctccctcgaagccattgaagcttccccatagaacctgcagcaccaacatatccattcccagcactgccaaaggcggtggcaatcgtttgctgaaaacccagaagctgaatttttatgtttctcctcacagagctgtgtcagcggtgagattgatgcggattgagcttggtggtgcttttgctgaccttctcaacgagaaagggaaaggttctggtgaaaacgagatgggatatgttcaaagaacgcttggctttcgcactcgggaattgaatcaccatgatcttagattggtcacagacattgttggggggacgattcgctgga

SEQ ID NO: 46633 - DNA, 504 bp, Glycine max
  unsure (1)..(504): unsure at all n locations
  Clone ID: PAT_MRT3847_142111C.1
gtcaaatacaaggcatcccttgatggtcataaagtacagaggtacaagggatagtggtgggaagagggagttctcaacatattagatagtatcccttcaagctgattatgtaatatgtatgtactgtgtcataaatgctttcagcatgcaagaaaattgtacttttattacaggttaaatagcaatataagatgcattacaatatcccaggggtgcacaacttgctttttcctgtattcatttacaagctgcaactgttgggataaatacgggaaaaaggtgcctattgtccctagtcatgtgcattcgattaacgattccgtgtcagcagaagaagctgccgatgattacgagtttgtcattcgacagctggtgaaaacccgtgttgtcagcgtgtctgagattagtgattgtcccaagtttgacctcattctgcttggattgggtccagacggccacattgcctcttngtttcctaaccactcagcactcaatgaaagggaa

SEQ ID NO: 46634 - DNA, 278 bp, Glycine max
  Clone ID: PAT_MRT3847_142112C.1
cttcctagggagaaattcacttgctcgaaaccaaaaatatgcttaatatcttttaatcgtaattgataaaaatgcttcctcttttttcttttcttgtttccttttggataggaggtaattaaaatggaagctgttggacatgggaaaattatgtttgttatatcagttcatttagtcactgattcactactcttagttcactaggaaatcaaatgttgtgcacaattttgttgggtcttaaaacatttccaaacttcaccttgccttaaactgtaaaa

SEQ ID NO: 46635 - DNA, 295 bp, Glycine max
  Clone ID: PAT_MRT3847_142113C.1
ttcacagcctctctctctccttggattcgctgttctttctctgagatctgtttgctatacgactctgatccttatcttggtctcgatgctctgtcagagtgttgccagacttggcagaagaatgcacttgtccttctgagagatactgttgtgcgtaacgaggactttcgatgaggactggaacctggggtgttgggggttaaggaatactagatccgaatgaagcgtactgcaattgtcttttcttgtgacactgggttaggttgaagttcagcgtgtgaatattaatggttgt

SEQ ID NO: 46636 - DNA, 421 bp, Glycine max
  Clone ID: PAT_MRT3847_142114C.1
aattcggctcgagttcaggcacaaggaagcctcccagaggaaagcttcctctgccaatcattatcaccacaatctgtgttcttctcttcatagcagtcttgtatgctgagagactaagtttccttaactccagctccattttcaagtccaaaacatgtcctagaaagcacaacaaatcaaagtctaatgataaaaaatctgaggaagtgtttgcaaatgcctcgtggatcgatgataggttcgattttgacccagaagagtgcaatgttgcaaatggaaaatgggtgtttaacagttcattgaagcctttgtactcagacacaagctgtccatacatagacaggcagttttcttgtgtcaagaatggaaggaatgattctgattacctccattgggagtggcaaccagaagattgcacctt

SEQ ID NO: 46637 - DNA, 489 bp, Glycine max
  Clone ID: PAT_MRT3847_142115C.1
aaattctatatatagcttataagctctatgacttgtgcctgtgttagacttcaacattggaggtagaggcttacccagctttagatgaattgacctctcagcttagcacactcaatcttgaacgtgttagacagatcaagagtcgtttggttgaactctccggtcgtgtgcagaaggtatgtaatattcatcgcccaacacctgtcaccatgcacatatgattttacataagaattttggaaaataaatgaaatgaatacactctatgataatattctgtagtactcagcagtgttcaaattgatttgagcattagcaactaaccgtaccctttcattcttcttacatggatgccaacatgtagcaacactaaacaagtctttaagctgttcaatcgatcttaaagaacttaattgtaacattttgcctttcaccgtggctatgtgcaacttctggtcgttttggattgcattttgcaaacacacctgt

SEQ ID NO: 46638 - DNA, 568 bp, Glycine max
  unsure (1)..(568): unsure at all n locations
  Clone ID: PAT_MRT3847_142116C.1
cggacgtgtgggtttttttatggcgtgtaccttacttaccctacgcacttcctctctcttatcctacaccatccattatcttagtccactcaccagtatccccaatttccaaggggatccctccttccttttccttccgctgcaatttgtattgtgcagttaaacgataaccaacgtctaatgttaaatgctgcacgtcgaggcagtttcagcgagtttctctcacccattaccccaaatgttgctgccgcgtcctgatctgcttggatttgggctttatttgatgagaaaaacatacccacttgggtgtgattgcaaaattccttctccaacagatctgagtctctgtaaagatatttacagcacggaaaaggatctcctttctagataatttggtgaaggcgggacacatgattggcaaggctgctgaatcttgttagcttgatgaaatttccaatcaatgtcgtctgttaattagggtgaatggatgtatgtgaatcagggaagaacaaagctccagagaccccaagagtaagaccacccctcgntctggcagaaaagaaacatg

SEQ ID NO: 46639 - DNA, 346 bp, Glycine max
  Clone ID: PAT_MRT3847_142117C.1
tttcaaaataaattgagggggcttcatataattaaacatttgtttgcaagtttttacaatttaggtgttgtaaatgcaattttaaaccttgattacaaatgaaacagcactagaaatatgccgtgtgagtaccatggagtttttatcttcttaacaattgcttttgtatatcttatttatgatctgttcaataatttaattttctggacataactttggttaattttgaatcctagatattaagcaggcaaccccatctggatgatgagatctacaacaagcttgttcagagagctaaagatgtaggatatgatgtgagcaaactccacaagaccccacagagcga

SEQ ID NO: 46640 - DNA, 129 bp, Glycine max
  Clone ID: PAT_MRT3847_142118C.1
tgggtgaccagtgcggatacgcgtcgtgacgatatcattattagaacacgcaccgcttgcatatgctggtggctgaccattactagctctcatccgcacacatacccatagctttgccctacgatgcca

SEQ ID NO: 46641 - DNA, 185 bp, Glycine max
  unsure (1)..(185): unsure at all n locations
  Clone ID: PAT_MRT3847_142119C.1
cacggaactcgagctcccaggacaaacaggaagaaaacgagcncagtcgccaggaggagggagccacccacccagggcaccacagaatacccagggaaaccagcggagaagggagccaagaacgaccccgaagaacgccgaacacagacagcacaagccagcaagcagaggcaggcaacaccagg

SEQ ID NO: 46642 - DNA, 511 bp, Glycine max
  Clone ID: PAT_MRT3847_14211C.1
taggaaccctgatgttagccagtgagaggattccgcattcgcaagacttctagtaaacttcacctacaactctattatacttcaacggttgaagcaacctccaaaggtataccatagaatagagagaaacagaagtgcatgccattctgcaagaactctcaaagcaattgttacggcataaactcgaatttggtagtttatttttttcttcttctttaatatgtggaggacatcatcttcaatgaattgaagggatttcaggattgtatataaaaatcaatgaggttaagtggcagaacttgaggttttaaagagattttcttcttgacgatttggtattcataacaacaaataaaaatgaagttcatgaaacttggaacaaaggcagatactttctacactgaacaagctaccaggactctgatatcagagatagttgtagaccttgtgatacaaatcaatgatattacttatttgttacacaagctgcagtttccgcttcttccaaaat

SEQ ID NO: 46643 - DNA, 733 bp, Glycine max
  Clone ID: PAT_MRT3847_142120C.1
tgtttttgttaaggctggatccttgctggatgttgacagtcacattctttattctccacttccctgccgtgttcccttgcctgggtttgaaagcttccggttttgcttttcacaatatgatgagaaagacagaaatctcctaagaaacttgtgctttcatcttggagctaaatatggggagaagttgactaagaaggttacccatttgttgtgtaaattcaccaatgggcccaagtatgaggctgcttgtaaatgggggattcaatcggttacatctgaatggatatttgaatgtgtcaagcagaatggagttgtggccattgatcagtttttaccaaaagaagtcactgctcaagaccgagatgcaggaatttgcactgtgagtcaatttcctacccaggctgttcaaatgataagtgacatgccctcccagttgtctagtcaatcacaaactttgagaggcacgacaaataaaaatgtcagttgtggagttgataatcatgagaccagttttaagataccaagtaattatagcaaaaaggcaagggcttgtggaggaaaccttgcctatccaataagaagccttcagcttcaaattcaggtattcatgctgatgacaagaatttttccaaagacaatatgcttatagatgccgggggaggccttttcaatcctgttccaaaatggtgctgctgcaattgaaggacttggtagagcagactatgtagatgca

SEQ ID NO: 46644 - DNA, 545 bp, Glycine max
  Clone ID: PAT_MRT3847_142121C.1
cataaattacgcgttgaaactttgatctaactgggtgttcccgccgaccctcctctctctctctctctctagaaaaaagaaaaaaagactttgaatgaaaacttgattgaggctcttttaaaaccaaaccaaacttataatctctcattatggtcttcttctgaaggaagagaagaagttaagaacaaaaacacaataaaagaaaagcagtaactctctttctctctatctctctctctttctctcattgcgaagtcgttctcttcaatggctaagtcaaagaacaatgccaacaagttgtcctacatatcagttccatctcagatcatcaactccatatcatcttcttctctgcaatctcttcttgactctcccaagaagtcctcaaggaacaccaacagcaggttctttatcttcttcaccaaccaccaacagcatcatcttcagaaaaccaaggatgtggttcctgacactcctttcttttggataccttggcatgctcaagtttggcctcacactctacaccccgttttccccctacccat

SEQ ID NO: 46645 - DNA, 224 bp, Glycine max
  Clone ID: PAT_MRT3847_142122C.1
cttctaactttcttacaacaatctatatttctaccttaactctacctccaatccctcctttccccatatataataccattccatctttaccctacttttaaaatatttaaatttacatacacactactattatcaatatacttcctcatctacattctacacatcattcctacatccatcaaaaatacaaaccaatttatttcttaagaactttccaatctctt

SEQ ID NO: 46646 - DNA, 424 bp, Glycine max
  Clone ID: PAT_MRT3847_142123C.1
ttttactttttcttatttttttttttcttttattttaatcttcggggtattttgttattttttaccattacccttctatttttgctaattatatcatcatacactaaatgagttaatcacaaaaggcattatttagtaaaaagtgatgggagtagcaacaatattaaaataccgggatcggtgactgaaacactgatccactactcatcattaaacataaccccacaacaaacggtgaaagaaatattagtgacagcaacactattttagaataaattttcgtgcaaaaacctggtgttcaaaattgggcacgacagcctgatgtataatacacttaatcacggcggaaggactatattcctcgaataagacaacttatggattcaacacaccatgagaagaaattcaatgcttggggcgtacc

SEQ ID NO: 46647 - DNA, 468 bp, Glycine max
  Clone ID: PAT_MRT3847_142124C.1
cgcgttctgtgccattttgttcttcttgtttttttttttcttctttttttcttgcgggggagaacaaaaaaaccccgggggtgggaaaaatttaaaactgagggtattttaaaccccaaaattgtttgtcccgcggaaataccttaaattccctcaaaaaaccccccggttttcggttttccgaaaaaaaaaaaaccggggactcccgtttaattttaaataaaaacccctttttttttagtggtttccggaacccccttttaattttttttttttaaaaaacgtttgtttttctttttggggaattaaaaaaactttttgttgggtgtgggcagtggcccccccccccattgtaaaccttggaaaaaagggggggcaaaaaaaaatttttgggggggcgcttttctggggggtttcccaaaaaattttcccgcgggggaaaaacttttttttaaaaaaccttttttt

SEQ ID NO: 46648 - DNA, 389 bp, Glycine max
  Clone ID: PAT_MRT3847_142125C.1
agcgctcgaagctcggaacggctcgagctctctcgaaactttagaaacctacaacctaccgtcattttcttcgacccttttgccttagaaccttatagaccgacagaccaaataatatacagtattttttactattatattatttcctttggattgatattaagaggaaccagatgatagtggtctagccttttgtatatttcaaacaacaatgaactgttgatttgttaaagtgtataagaacttgagcttaaaaagcggtggtagctggttagtttcagactggtgaagcttatatgaaccattaccgcggcaaaccggaatacgccacgagtgcaaatcattcgaccctttttgacaaactacactcgtcagatcctcgggtgact

SEQ ID NO: 46649 - DNA, 232 bp, Glycine max
  Clone ID: PAT_MRT3847_142126C.1
gcgcccacgcgttcgcctacttttacttgtcctcttttctcttaaaccttatcacctaatcgggatacagccaaatcagaaaactgcttcatctttcttagcttaacatggcatctccacctttactttccaatacattgacatagctgtctttgtcggactgcttccccgaagacgtattccacacgccaccggaggaagcccctttcatcttttcctctttgtcaaccaa

SEQ ID NO: 46650 - DNA, 203 bp, Glycine max
  Clone ID: PAT_MRT3847_142127C.1
gatgagaaaatatggcaaaatcgacatgagagagtgagccacactatcttcttctgcctgattggaactgctgtgttgtttgctattattgaaaaaccaattgtttaattgaattgtgcatgtatgttaatcctagcaagagcacaaagatgcttctctggacatgtcaatataattatatgaatgcgcttaatttgtgaata

SEQ ID NO: 46651 - DNA, 274 bp, Glycine max
  Clone ID: PAT_MRT3847_142128C.1
gcaagatcataggaggaaaatggagcagaagcagcagagcatagaccccttcaaaggcaaaacaaggttacccagttttgctattccagaaagatatgaacttaatttaatacccgatctctctgcatgtactttttctgtcaccgtgcaaattagccttaccatcaatgcaagcaccgagtttcttgtcttaaacgccctggaacttgtcatacaaaacactcactttaccaactctcaagggcaggtgagtagtttttagtaatcaaaacct

SEQ ID NO: 46652 - DNA, 395 bp, Glycine max
  Clone ID: PAT_MRT3847_142129C.1
tttaggctcttgaccacataagcttattaaggggatttgtgggcagggtaggtgcttaggcgactggcatgaagcagatgtatacaggacatatgcacgagacagaagctggtgaagagagtgcaaatctcatcctcatggccattggacttcaggtgcactcacgctatgtgcgttaaaagtttcccttaaccattagagagcactggtggtgcagtcaaagagtgctaccttggaatgctgacacctgatatcacaaagacttggaaacaaggtgggactgatcaatcctttgattgatgcatgaatgatagaactgtggggaacacgatggctacgcaacaacataagagtaaccggtaccagacacgctgagagaatgatgattacaccct

SEQ ID NO: 46653 - DNA, 265 bp, Glycine max
  unsure (1)..(265): unsure at all n locations
  Clone ID: PAT_MRT3847_14212C.1
caaaaaaantncntttgannncnccnctnaacngccnnctnaccngctnnaactcatncagcgncaagtncncgactacgccggcgaagcacacagcaangaagngnnngccnncncacagagcaaggaaanncananacgnncanccnangcnanngtacncnaancancaacntaccaancaagagtgncntncnnnanangngnacncaananccanntnagnangncgnacagccacgnaaanncnanggnaagganncan

SEQ ID NO: 46654 - DNA, 448 bp, Glycine max
  Clone ID: PAT_MRT3847_142130C.1
atgttcggtattcaaacgtaatagaaacaaatggaatttgaataaaacaataattgttcacttcctttttttgtgatactcagtctttgagattggacgcgatgatgttgccttatgacaacgtgttatgctattatgcataagaatggatactcactaaatatagcgtattggatgatagattaaagaacagaggatgctctctataattgtggatggtgtttaatgttttaaatcctttaacataataatcctatccacttgtcaaaaactcatcagaatgtcaataatttatacttattcttatacatcaaaatctaagttggatgagacgcatgatcatccaaacctaacaatctcccttttttgatgatgataaacaatataaattttgtttttttaaaaaaagtaagagaggatatatatatatatatgtgtgtgtgcgtgt

SEQ ID NO: 46655 - DNA, 707 bp, Glycine max
  Clone ID: PAT_MRT3847_142131C.1
ctactctactttagggccattctaggtttctctttgagtcctagcttgcttttatgtgcttttcattgctttaatttttgaataatccttgaaaatttgtcttattaaaactctattggtttagattttgtttcatttttttgggtctttggttattgtttgtctctttgtttccttgtttgtgagttgccatgtagggaattggaaaggaggattggtaccatcccttgaagaatttgagtcaagaagcaaggggtcaacctccttaagagctattggactaagaagaaatccaaattaagtgaatcaccaaagagaggacagcaaccaaaattgaggaccgttttgtaattgacaatttacttaacttcactgctttcaagttttgtaacaaaaaggcctttcattggaagtgtgttgggagcgtccaataggtttccaaacttccatttgtgtcaaataattttaggcaattttccctaaggataatgagtgttctgttgggaaccttaaatgcagtcatctaaacactcctaggatccgcctagtttacatttcttgcattttaatttcttgcttactttcatagcttattttctttactagtcacgccaagtttatcttgtaattacataatactttcttcgtgcttatcatgctcatcttgaattcttttgaaccctcccttctgtgtcttctcgcagccg

SEQ ID NO: 46656 - DNA, 300 bp, Glycine max
  Clone ID: PAT_MRT3847_142132C.1
gataacaacagaggaacaattatttgatattggtggaaaactgactaagacataatatgttataatgctaatttatccatgaaacattggcaacacacatgttattgcaaagaaaaacacaactatctatgacatgcttaaccagttgtttttgctttccatattacaacaccctcttattgacaaacaaagggtgttcttcaagaccagccagcatactgggcttttggggttaaggaaaacaagctctgctgttggcttgaaagaaaccgtgcagtccttttacaagggaggggtcaa

SEQ ID NO: 46657 - DNA, 429 bp, Glycine max
  unsure (1)..(429): unsure at all n locations
  Clone ID: PAT_MRT3847_142133C.1
cgctcgagttcatgctctgcgatatatttgcttattttaagacatgttggtctaaaaaaaaaaaaaaaaaaaaaaaaaaaaaaaaaaaaaaaaaaaaaaaaaaaaaanaaaaaaaaaaaaaaannnnaaanannnnnnnnnnnngggggnggnnnnnnnnttttggggccttttaaaaccccgggatttattctcccgcccggtccctccgggccgtaccaattttccttttttaaatttttttttttggtttggcttaatcatttgccttacgtatttcctttgcgaaattgttttccccccccctttcccccccccttcccaccccgaagccttaagggggaaccctggggtgcctcttttttgggtttttttcctttatttttttttccgtttctttccccttttcctttgggggaactttttttt

SEQ ID NO: 46658 - DNA, 520 bp, Glycine max
  Clone ID: PAT_MRT3847_142134C.1
ggcaatagatgcccatgcctatatctaccccgcaaccatgtacagtctcaaatgcactgaccgaccctacgcgccatggaacgcttaaaatacatcctatccttctctcaccgaaagccccgtcaagtattaacacaacagaacagaacattcaaccgcctacaaacaccacatgagagccccatcagatagccttatgactgacctggtcgggtaccacccgacgcaaagcttgacttcaaacacgaacttcccaacatctttctgggtataacgccgagagctcctgcacaaggcgcacgttgaggaaacctatgtcatctctttggactaacacaaaaaacacatccttgaactgccctctggcggtgccgctatgcttacggaagggtctaaccttgtcaagttggccaggaaggatcaaagcttagctgtttcgactatgctcaggtccaaaaacaagatcaagtaccatttcctacaggtatggcctaatggggaggggcactggttcgcaccc

SEQ ID NO: 46659 - DNA, 409 bp, Glycine max
  unsure (1)..(409): unsure at all n locations
  Clone ID: PAT_MRT3847_142135C.1
tgtnncatttttcaaatcgttcaagtctctctcttttttttttcccaaaagaaaaaacatttttttctagagaagtttgaattttcgtttcttgttctggtggtcgtgtgaggattatcgtggtgtgactttgattttataaatctagggttctgatagtggggaaatagatgtgatcaacgcagtgttgtggacactgcgctcaccattatagaccttcaccgccattactgcccaagcccagtggggctcctgctgcaactgctccaccctttaccacatcgcttgcgcctttggccgcaacatctccatcctcttctactgcaccggcgagaccctacgagaacacattgaccccaccgagcccttccttaacttcctcccacgcatggcgcccgacctcatggcc

SEQ ID NO: 46660 - DNA, 509 bp, Glycine max
  Clone ID: PAT_MRT3847_142136C.1
aatatttttgtagttttacggagcacgaacaagccacacaaattagtgtggatgttataaacattttcactctcatcgattacaacactacacgcatacattgacatctagccatccattgcatgcactcacatgcatacataacatatgaattaacaccatgaacatgcccttctacccaacttttacctacttgcacagcgcttattgaactaaaaaatgacaaaacgccctaacaagcctgagtgacctcggacgattaaaaaacaacagcgtgttatatcctcgcatccccatgaacctgctgcggtcttgatcggtccattgaaccaatccaccaacccatttaaagaaaaaccccttaagcatttattgcataaaaccttacagattccttgcacctatagaaggggaagaaaattcaaggcccaaatcatgcgggaagcacttaaggctcctcatggagcttgtaggcaacatggcactgctttctgatctcaccccttgtg

SEQ ID NO: 46661 - DNA, 415 bp, Glycine max
  unsure (1)..(415): unsure at all n locations
  Clone ID: PAT_MRT3847_142137C.1
tgttttcgtatgctcgccttctggggtcgagtacaaatcctaccatcactacttctcatcaatagtcccagagccttcatttaccagggcttttaccaggactaaaatgctgtgtctgtagcgctgcttactgtccctgttacgagcactgctagtttccaccaccagnttnacccccattatgaccaacttatgaccatcatatgccagtcaaacctaaccctacagcaccagctgcggctcataatccattggttccctcattgtcacagtcatngagtcagtcaaccagtgactgtactcctgacggtgccactgctggtgtcctgggggaagtcctgtggttcagcatgctaattcaccatactgaaaccactcatgtgaaccacccacttgatgcaccgattctctgtac

SEQ ID NO: 46662 - DNA, 192 bp, Glycine max
  Clone ID: PAT_MRT3847_142138C.1
gtatccgtcacatcaacacatacacgagctaaggaagccggggctagggactactaatatggtggcatgcgttcatggaatgctccactgatatgatgcaccgcgggagcgtgtatggcgcagtggttttttaccaggagacgcacagtgatgcttacgctggctgaaagtgcacagcggtcacgctggttg

SEQ ID NO: 46663 - DNA, 219 bp, Glycine max
  unsure (1)..(219): unsure at all n locations
  Clone ID: PAT_MRT3847_142139C.1
attcacatgaaggtgacataatatacattttgantaaattttataaaaaaaaaaggcttttggaaatatatacattcataaacacacttgaaaataatggtttttttacctaacaacatgggggagttatttattgcaaattagaaatcttttttgcaaagggaaactgaaacacttgagatatatgatctggtagcccctttttcatgacccttggaa

SEQ ID NO: 46664 - DNA, 685 bp, Glycine max
  Clone ID: PAT_MRT3847_14213C.1
acgagttgcaattgaacttgtcatcagtgagttggtccatactatgcacagttgatatttgatggccaagcagccctagttataagaacctttgtaccccacttaggctttgactcagaagaagaaataagaaggtaaaataaattgaatttctctcattagtttaaatcaacttattcaattaattttatagaagttttcccatccaacttctccaaaagctgaggagcataagttgattttaacttatgcctcatgggtgaagctcaattcattttacattttaagtgcttatggagaaggttattcgaaaagggcatgatttggttccattcaaatttatgatatggacccatctctatttgtatgtgggtgcactagtatgtttatgtgcatcagtgcatgtgctttaattgattccagttttcaggctgtaggtgttgcacagccttttagaggtgctccattggagtattttcatatggatttttaaaagattctgttctttataggttgattttaatgtttgggcattaagagattatttgagaatatggctggactatccaattactgtctctctgtaacagtcgtattactttcactctttttcaaatgtgactcaaattttcatctcttttttacctttcacactttccaggcctgctgaatgttgcaatcaaac

SEQ ID NO: 46665 - DNA, 378 bp, Glycine max
  Clone ID: PAT_MRT3847_142140C.1
gctgggatttgggctcgggttatgatggagctagcccaccaatttggctggctcataattgtaatagagataatgagttcgtatacatatagtcgagcacaacatagatatttagtggttaccactatacagatgaatgaagtggagacatggttttcataattggattaactgatttcattacagtcttatctactaaaaagagatggaagggctagccgacagactggtgagctctaaaacacgggacttaattacgagccggtacctgccggcgttcctgctgtccatataatgagtcgtatcaaaggttggcgtattcatggccatacctggaacctgtgtgaaaatgagattcgctcacattgccactcatta

SEQ ID NO: 46666 - DNA, 628 bp, Glycine max
  Clone ID: PAT_MRT3847_142141C.1
attttaggaaacagtttatggaggctgctctctcattatttggatctggctgggtttggctagttttgaagagagaagagaaacgactggagatagtcaaaacttcaaatgccatttgcccaattgtgtgggatgacataccaattatcaatttggatttgtgggagcatgcatattatctggattccaggaatgatagagcaaagtatgtggatgtatttatgaaccaccttgtgtcttgggatgctgcaatggaccgattgacaagagcagaggcttttgtgaacttaggagaacctaaaattcctgttgcatgaaatattgaaacgcttaatgattacagttacaggggtggcaatggccatatggcatcttaggtggagttgataaaaggaatgagtagatttcactcatcatatgagtacattaatactgccccatgtgcttctttctggttgtcaaattttgcagtgtttaggattcaggccaacttgtaatttggggggatctactgaatttagaggaggcaaggatttcaatgtagaacgagagagaaaaaacaagtttgttcttggacttattacagtctcattgtatgaaagtgtgaatgtaattatttatgtggtac

SEQ ID NO: 46667 - DNA, 428 bp, Glycine max
  Clone ID: PAT_MRT3847_142142C.1
gaaagaaagttactttttctactttcacttctgggttttgagaattatgcaatttcatcatttaatttgatgcttttcttttttccattattgggatttcctccctttcccccccatcatttttggatgataatgtttgctcatgttgcattttcaaatgaaaaatcttatttttttttttcaatacacccgcgtgtaatccttttgtttgcagatgatgtactgggacaaagattttttctttttcattaattaatttttgcacattttatttttatgtgattttgaatgtttgcgagtgtgtgattattatttatttgtgctttttgtatccggggaattagttctgtgatctgcagtgcactagtactaaggcaatgtgacgacttaatatcacgagttgcctaatgaataatgtgcaaaaaaga

SEQ ID NO: 46668 - DNA, 1177 bp, Glycine max
  Clone ID: PAT_MRT3847_142143C.1
gtacgacctgccagcgtccggtcccggtccggaattcccgcatcgacccacgcgtccgcatctacaaggttccaatgccatgtctacaccttttctaagtccattatactagatttcctttctcttaggtttcccatgaccacactcgtgcaattctctatcaaatgttcgaacttgaagcacaacttctttcaccatggcatatacaagagacccacttgctctttctctcggatagaaacaaagtttggttcttttaacgggaatagcttgaaactgagagtaggcagggagagcttgtgcttcttgggaggtgcagtgtttaaaaatggggaagagaaggggtgcaagagggaaaagagggcggtgttggtgaagaataatcaagggtttggcttcaatggaggaggtggtggtggaagagatgatggtgccactgctaggattttgggaaaccttgctttagctattggattgacttacctttctatgactggacaacttggttggattttggatgctattgtgtccatttggctcattgcagtgttgataccaatagtaggtcttggtgctttcctcttgtgggcaggacgagatataatgcaaggcacttgtccaaattgtggaaatgattttcaggttttcaaatcctctctgaatgatgatttgcagctatgccctttttgtggtcaacctttttctgttgttggcaatgagtttgtgaaagactcagtgaagttttcgaaccaatctacaacatttggacaagcattcaataatttcacccgttctagaaatgcccttttgttggctggcgaaaaagattctggtaaagcaattgatgttgaagctgaaattaaagatgtagactgagtcttcacagctataacatgttggatgactacactgaacaccaatctaattaggttaaagaacaggccgtggcttgcattttccgttgtattgaagacacaatgaatgacacacattcaagagagaatagtgtgatgagcaaagtaacacattctagagaggagtgtggtgagcagagtaacattgcaattgtaatataagttttgacagtaatgtttctcaggtcacacctctattattttggtgtaccaaaatgctgcttcattttttcctttcattgttacataaaaagcttagaagg

SEQ ID NO: 46669 - DNA, 442 bp, Glycine max
  Clone ID: PAT_MRT3847_142144C.1
agcaaagcgagatgatctactctactcagactcggtctcttcagagatggcatctgtggccctaacacctgcccctgtcactgatgagatgtcctcacatagaggccttccctccctctcaaagaactcctctcccttcagacttgaggccaggggtagcaagacgatcaagactgacaagccttatgaaattaatggcggcgtgtctgagacggaaggagctgacgcctctggcaagaaaggcaatgcaaaggacatctaccattctgtacacatatgcggagctattgtcgatgggtacagtcctatctacgacaccatagactgatctccaaccggagatagtctacactagcggcacgactggctcggctacttatgcctgtactctacttgatactgtcgctaaggagtgccctcttgactacgccactactgcttt

SEQ ID NO: 46670 - DNA, 255 bp, Glycine max
  Clone ID: PAT_MRT3847_142145C.1
taattattaaaaaaattaaataaatattaaaaagaaaaagctgtaagtaagggcgtcttaaagttcctcggccaaattggagtacagaatcattcccaaagatctatgtggcatatgcgaaccgtgaataccatagttttaataaaatttgaccaatagtagagagtaggcaggaaggaatgtattagaaagtgtattcttaattgtaacactcttaagaagtatatatcaaaccaccttaaattcatgtatgtt

SEQ ID NO: 46671 - DNA, 144 bp, Glycine max
  Clone ID: PAT_MRT3847_142146C.1
atacggcacatcactatatatcaagcatgatggcaatgcacaaatttatagtagcattctgcagtgccggcagaaccatttttatagatagcgatggcatagtttgtgccacacacacaacgatggatgtatggcgactttttt

SEQ ID NO: 46672 - DNA, 437 bp, Glycine max
  Clone ID: PAT_MRT3847_142147C.1
aaacacaaaaaaaaagcctcataggctgttttatttattcatagagggggcccaagtcatagttaaatagcccgattctttcctcgctcattttgagcttttacagcatactttttagtcctacatacttattcagaaaaaagccctcaaaatggaaaacaagggacccttttttcccttgtccccctcctttttttggggggggggggcatccacaaagggggacccacttgggctttttattagggtctaaatatctttggcaaacccagggaacccaagctcctgcacttgactaggtatcgggcttatcaaattggctttcaaacctgaaaggaagttcctttggttgttctcggctttgatcccaaaagcaaaaaatttcagatcggggggagcgttgaccacaacgggataacctgctgggattacaaata

SEQ ID NO: 46673 - DNA, 212 bp, Glycine max
  unsure (1)..(212): unsure at all n locations
  Clone ID: PAT_MRT3847_142148C.1
cccacacgtncggttggaaggcgctcattatctcaccactggtgagctcgacagccttagcgagcatcagcttgtggattgcgatcacctgtgttatccagaacaatattgaacgtgtgactcatgctgtaacggcggcttgatgaacaacgcatttgactacatactttcaactggggcgagtcactgaagtaaaggactattcatacacc

SEQ ID NO: 46674 - DNA, 260 bp, Glycine max
  Clone ID: PAT_MRT3847_142149C.1
aattgatgcacctgaagccgacctttttttttaaatacaggaaaaacaaagttgaaagaccccataatgcccccaggggatgggtttaaaaaacaatgaaagggggtcctaaatgggtacaaaaaaaaaggttgttttttaattgaaaacctttggggaaaaggttttgaacaatgggtaaaaaccctttcttggactcaaaaagggggcctaaaaaaatttgaatgaaagccatttttttaagtaaccgaacccgtggg

SEQ ID NO: 46675 - DNA, 339 bp, Glycine max
  unsure (1)..(339): unsure at all n locations
  Clone ID: PAT_MRT3847_14214C.1
cccgcccggccccncggncggncngnaactgttcgcataatattcatcagaccatctgtccggcctggggcaatcaggacttccaaactacaaaccgtggccttcgtggtggccacggcggtgctactacgatccctcgcgcgctagtacttacacgctgaacgtctacactgacttcgatgcatactgatgcaactccgactatctgattatggttcgaactgactatgagaataaatgactgtcacggtctgacacccaatcttactgttcaccggcgtgcaactttatctcaaacctaacgcggcccctgatacaaaacgactgcgcgccaccctg

SEQ ID NO: 46676 - DNA, 318 bp, Glycine max
  Clone ID: PAT_MRT3847_142150C.1
tttttattgcatgagaaactaaactgttctagtggacgagtatctctgggcggttcctaaaattccaaacctacttttgtttttgagaaggaatcgttctcagaaaattgggatgcgttattgaagaaacatgtttgcctacgcacaagcagctttaactgctaaacttcatgccactcctatacgagggtttccaaacgattcactttgcatctccagcggtacccgtgctatccccacagtaggtctcttgcacaatagaaagagccttgttgctgctgcagcgaccgtggtagaagttaccacaggttccaaggg

SEQ ID NO: 46677 - DNA, 477 bp, Glycine max
  Clone ID: PAT_MRT3847_142151C.1
gaaattggagagaaagcaaaattccttgccagaagatagtcatgcagatggaaatgttaatgataactccattttgaacagattgaagtcaacttatagtcgtactactagtacaagaaaatctgctttgaccagtgctgaatatactgataacaggaactcaaaggttcataattcttctatgatgagtagattgaagtctagttacagccgtgctactagtgtgaagaagccacaaatacctacaactgtggaagaaaatactacaaatacttcaaataaacaacaggtattacccattaggctcagtagtcatcagattacccttttgctatcatcaatctgggcccagtctatctatcctctaaacacatctgaaaattttgaagcaattgctcatacctacagccttgtcttgctagttgctcggagtaagaattcctcgcatgaagctctaactcaaagttttcagttggc

SEQ ID NO: 46678 - DNA, 692 bp, Glycine max
  unsure (1)..(692): unsure at all n locations
  Clone ID: PAT_MRT3847_142152C.1
atgtgaaccaatcggatctagtgagagaaatgaatcagtctatcactttggatttgggtaagcctacttacataacaaacaaacttgcacctatgcttggcaatggcattttgagagccaacgggctcagttgggcacaacagaggaaacttgtcgcagctgagttcttcatggacaaagttaagggtatggtggggctaatgatagagtcagcgcagccattactactaaaatgggagcaacttatcgagagccaaggaagtgccactgctgaagttaaagttgatgtaaatttgaggggcttctcagctgatgttatttcaagggtttgctttggccattcttattccaagggaaaggaagtcttctcaaagcttagaagcattcagaaggccatgtccaagcacggtggtttcctttttggactcagcagtttccgtgacaaactgaaacatttctcgtcaaataagcaaaatgagatagcaggtttggagaaagagatagagtcactgatatgggagttggtggaggaacgcaagagggagtgctcagagacatcctcatcagagaaggatttgatgcagttgctgttggaagcagcaatgactgatcagagtctggggaaggacttctccaagcgattcattgtggataactgcaaaaacatttactntgctggccatgaaaccact

SEQ ID NO: 46679 - DNA, 354 bp, Glycine max
  Clone ID: PAT_MRT3847_142153C.1
cctgtaacaccttcacctccttccccttcaacaccttcaccgtttccttcacctacgacacctgtaacgccttcacctccttcgccatttccttcacctacgccacctgtaacaccttcacctccttccccttcaacaccttcaccgtttccttcacctacgacacctgtaacgccttcacctccttcacctacaacaccttcaccatttccttcacctacgacacctgtaacaccttcacctccttcgccatttccttcacctacgccagctgtaactccttcaccagtaccttcacctccatcacctacaacagtaccacctgttcatagtccttctccagggtatttgcca

SEQ ID NO: 46680 - DNA, 948 bp, Glycine max
  Clone ID: PAT_MRT3847_142154C.1
ttttttttttttttttatgcaaaactattctcttgccaataatagtttcaactatagtaattcaagccatttcatgtggtacaacgaaaatgactatagaatataatgtcattaatttactttccttcaaaatctctaaattccatatgcggatgatccttcatggatatcctgtacaatttgataaaaagggggcatctatcctaaccttttgagggccaaaattgtgggcatatactactgtacagagggcaaaaatacagaaaaataatagtaatggaaattggtgaggcattttaaatagggcatcacagttgacaatacgcgcatctatacatatctcaacaatttacaacaaataatacaggtaccgttagaaaagaccagaggtgcctcgtgactcttgatcctgcatgtggaagcgcatcagttaattactaaacaaaaatgctcatccagtggtcaagttacatttggaatattgcggtgagcatcagcaaattcccgaaccagccgttttaaaactcggccacccttcccttgcatatgcccaaaatcgctctttaatccatcagagttcttgctctcaagataatcagtggctgcatcagctagggccttggaccaaagtggcactatggcctctgcttctccatggctaaggtattcagcaggaagagcctgaaccgctgagtgcagccagccatgaagagtttgccagcaaagtatagccttccacgttgttctttcagttaaagtgcaaattgctgccagttgttgcaaaattgtagcacacttgtgaacccgtgacattgcagacacaccgagtaaagcatacaccacattagatacaagaccctcaccactgtgagatatgacatgaatggctgtgatgttgaatgatccctcagtaatacaattcatacattctaacaaagagacaagacc

SEQ ID NO: 46681 - DNA, 512 bp, Glycine max
  Clone ID: PAT_MRT3847_142155C.1
ccctcgcgtccgcccacgcgtccgccgacgagatgagtttgttaaaaagcaggattggaagaatcctttgagtgtgggaaaatgagtatgtacggtagggatccgtggggaggcccgctggagattcacgccaccgactccgccacggacgacgagcgcagccggaatctccaggagctggaccgaggcgctttagacgagacccaacagagctggctcttgggcgccggagaacagaaaaagaacaagaaaacctacgtagaccttggctgcatcatcgtcagccgcaagctcttcatctggaccctcggcaccctcgccgtcttcgccttcctctccgccttcatcactctcatcgtcaaaaccgacccccgacaccaccacaagcccccccctcccgacaactacaccatcgccctacacaaggccctcctcttcttcaacgcccagaaatacggaaagctccctctccacaacaatgtttctggagaggcaacctctgtcttcatgac

SEQ ID NO: 46682 - DNA, 2403 bp, Glycine max
  unsure (1)..(2403): unsure at all n locations
  Clone ID: PAT_MRT3847_142156C.1
tacggctgcgagaagacgacagaagttatgtactagtaaatagtaattttattgtaaactatccggtacctgagagagagtagcatctgagtcttgtgtttagcgtaggggattgaaaatgagtatgtacggtagggatccgtggggagggccgttggagatccacgccacagactccgccaccgacgacgagcgcagccggaatctccaggagctggaccgaggcgctttagacgagacacaacagagctggctcttgggcgccggagaacagaaaaagaagaagaaaaggtacgtagatcttggctgcatcatcgtcagccgcaagctcttcatctggacactcggcactctcgccgtctgcgccttcctcgccggcttcatcaccctcatcgtcaaaaccgtcccccgccaccaccacaagccaccccctcccgacaactacaccatcgccctccacaaggccctcctcttcttcaacgcccagaaatccggaaagctccctcgccacaacaatgtttcctggagaggcaactccgggttgcaggacggcaagggtgacggcgtgccgcccgtcattaaggatctggtgggcggttactacgacgccggcgacgccataaaattcaacttccccatgtccttctccatgaccatgctgagctggagcgtgatcgagtacagcggcaagtaccaggctgcgggtgagttgggtcacgtgaaggacatcataaagtgggggaccgattaccttctcaagaacttcaacagcaccgccgacaccatcacccagctgggcatgcaggttggatcaggggacacctcccaaggtagcaccactcccaacgaccactactgctggatgcgtcccgaggacatcgactacgaccgccccacccagacctgcaccacatgctccgatctggccgccgagatggccgcggcgttggcggcggcatcgattgtgttcaaggacaacagggcctattcgcagaagctggttcacggggcgaccacgctctttaagttctctagggattcgagaggtaggtacagtccaaatgggagggaggcttctgtattctacaattccaccagctattgggatgagttcgtttggggaggggcatggatgtactttgccactggtaattcctcttacctcaagctcgctaccactcctcgcctcgccaaacacgctggcgccttctggggaggccccgactatggcgtcctcagctgggataacaagcttactggtgctcaggttcttctcagtcgtttgaggttgttcctcagtcctggttatccctatgaagaaattttaagcacatttcacaatcagaccggcatagtcatgtgctcctacctcccaatgttcaccagctttaatagaacaaggggtggcttgattcaattgaaccatggcaggcctcagcctctccaatatgttgtcaatgcagcctttttggctgctctttacagtgattatctcgatgctgctgatacacctggatggtattgtggacccaatttcttctcgactgatgtccttcgagactttgcaaagacccagattgattacatccttgggaagaaccctcggaaaatgagctatattgtaggttttggtaatcattatccaaaacatgttcaccatagaggtgcgtctataccgaagaacaaggttaagtacaactgtaaaggaggatggaaatggagggactcatccaagccaaacccacatacaattgttggtgctatggttgctggtcctgacaagcacgatcatttccatgatgtccgaaccaactacaactacactgagccaactctagcaggaaatgcaggtttagtagctgcacttgtggcattgtccggtgataaaaccaccggtatagacaaaaacacccttttctctgctgttcccccaatgtttcccacaccaccaccacctccagcaccatggaaaccatgaggtgttgtattgtgtcattcattgtcctcctttccatcaagtgccaaaagtgacttcatgattttgaagatggaggtagtagatcgaagaagtcaaggacggccgcacgtgaaaaaatggaagtagtgaaaactaggcctagtgattctagtttgtctaggaacaatctttggtttaagattagcattaaaatttcataatggtacttgagactgtcttttgtctacttgtttttttgttgttgtgatatacatagtatgtatgtatcaaatcttgaattctttaaacgtgcaaaacgaacagcatgtaatgtaggtgtcacgttttgatttataatgtcttatagttaccttgctcaaaaaaaaaaaaaaaaaaaaaaaaaaaaaannnnnnccccngttttttttttttttttttttaaaaaa

SEQ ID NO: 46683 - DNA, 163 bp, Glycine max
  Clone ID: PAT_MRT3847_142157C.1
tttacacgttttttcacatgctcaatgactgaggggggcttacgctagaattctgttagcacacatagtaacagaagggggttcttcagaagcccatggctacgaacccctaatttgggggcttgaatgtgatcaacctgactatgggggaaaaatcctgcaa

SEQ ID NO: 46684 - DNA, 378 bp, Glycine max
  Clone ID: PAT_MRT3847_142158C.1
acatcccgaaattattggcacggacgcgagttcgattatcttaaagcctctaaactacctcttttgctgcgctctgagaacgtccccttcttcctcctcgaccatgactcacttcacagggaagtaccatgatgaccttatactacgagctgactatagtgtgactcctcggaaagcggtattcttgctgctgatgacacaacagggacagttggaagtgctgtgtcagaatgagggtaaagagacattgaatccagacaggcgatgctcttaagcagctgcttttcactgatcctggtggtcttcaatatctcagcggtgtcatcctctttgaggaaatcctctaccagagcacagctgtaggcaagccctttgtga

SEQ ID NO: 46685 - DNA, 244 bp, Glycine max
  Clone ID: PAT_MRT3847_142159C.1
cctccgatccttctgaaaaagaagatcaagaaaagcccttaaagattgatgcccgcctttgacaaataatcctagcatgcagagctgatgtcaatgctctattggccaccaatgtggaggaattgtagtggacaaaactggaaactgcatcaggctccatcaaaaatcttcaaatagttacatgtaaaaaggcacttcccaaaaacacagttggaggaaccattctgcggagagatctattggc

SEQ ID NO: 46686 - DNA, 208 bp, Glycine max
  unsure (1)..(208): unsure at all n locations
  Clone ID: PAT_MRT3847_14215C.1
catctccactccttgcctctgagaggtcccatagaactacttccaagctcaaagtcaataatgatgcaacttcatcacacgatgacttcgtcgcagccacatcttccacccttcacccacacgaaattccacacaacataagagggaaaaatctntgcaanactcatacatcagcttcaccaaagtattccatcagttctacacaaca

SEQ ID NO: 46687 - DNA, 168 bp, Glycine max
  Clone ID: PAT_MRT3847_142160C.1
gagcgaaacagagagtgatttcagtgagtgatcggtgttcacttgatgtcaccataatcgtcagcgtcatttgaagaatatgccgatgagaacgatcgccgtcggaaggcgttacgacgcgactcacctctatctcgttccaggtcgccttccgctgactccagtcct

SEQ ID NO: 46688 - DNA, 228 bp, Glycine max
  Clone ID: PAT_MRT3847_142161C.1
ggctcgagatactatggtggcttacaaaataaacttttcttatgataatacgcctaaagctttgacgatcatctaagtcttggcgtctcatgtagatctttaatggaaatacacttgtcatctgaaataaaggagaaggaaaaccttgaagcagtggtctggatgctgacttgcaaccaagcaagttatgcttccatgggcaatgatatctacactaaccttttgcta

SEQ ID NO: 46689 - DNA, 222 bp, Glycine max
  Clone ID: PAT_MRT3847_142162C.1
catcgtcacagacatggctctaacacttcgtgcttcaacttcagttattaatcaggaggcaaccacagtcctcaacactcctgacaatgcacctgcaatagttagactttgaatatccaagccatcatcatcagggctccgtctccgtgctaagaattcaatgcacgaagctcatctcactcgtgcgaaatcgaagacagtgttcgctacggcggtcgcaca

SEQ ID NO: 46690 - DNA, 388 bp, Glycine max
  Clone ID: PAT_MRT3847_142163C.1
actttttatacaccaacgcctccaccaactcggggggggttttataataaatatagaggggcacaaccacataatctgacacttcccttgagagccttgctcgggcatccaatagacatggtgaaacaacatgaccccaatttttgagcaacctagacccctggcatctacgactgtgaggctaatagaaccaaatgatgggcacacctcctaaatatcattagaacacttactacgcggtatactaaaccaacatatatctgaaacaacataatcaaaaacgtactaagaaacagcaccatgaactactcttactccaacaccaaccttattgctaaccttaccaaaaaaagggatttcaacattccttaccagatcattcctaaca

SEQ ID NO: 46691 - DNA, 458 bp, Glycine max
  Clone ID: PAT_MRT3847_142164C.1
ctgcattgcagatcacatatctgttaaagctggcagagccttatacgctcattgtcacttggataggtgctgatcccctaattgcgcggatcgctatgatactgacagatgccattgtataagactttgtgaatttagagagcccttgtccggactgcgcatctgatgacacctggatctttgagactacacttggaacatcaaatggaggtttcaccaacactgtcatacgctacatctgaggcactgcactggcatgtgatgcatctacaagatggattacgataccataaagcatgtacctgccagcatggacgtctgcctgctaatcatataaagctgaccacctgttggatatcgattttagcactgatatgtaaagcgacaagcctatcatggacgaaaatcatatgctctttcgctcatgaactggaagacctgtcaccactatcatacac

SEQ ID NO: 46692 - DNA, 1846 bp, Glycine max
  Clone ID: PAT_MRT3847_142165C.1
ggctcgaggcctgttcgggtgttctgcgtttttgcgaatccgatttggcctcaattccgccattcctttttggattcgtctttttttttcttcttcttctttttcatggaccgcagagtctatcaccatcgtcctgctcctccggcacatgcttctccccctgaatactttgtacagtccaggggaacacaacttataaagacgatctatatttaaggaagaggacagggatgcgtcggatggctttgttgcacatgtcaggtggaagagtcttacccatcaaatgaaaatgagcacctgaaaagcccaaggaattatggagatggaaatcaaaaaggctcaaaggtgtcagctcctgtcaagcctgaaacacaaaaggcacctccacctattgaagctccagccttatctttagatgagctgaaggagaagacagacaactttggttcaaaggcattaataggtgaaggatcgtatggaagggtgtattatgcaaccttaaacaatggaaaagcagtggctgtgaaaaagcttgatgtttcatctgaacctgaatcaaataatgagtttttgacccaggtttccatggtctcaagattgaagaatggcaattttgttgagttgcatggttactgtgttgaaggaaatcttcgtgtacttgcatatgagtttgctactatgggctctcttcatgacatattgcacggtagaaagggagttcaaggtgctcaaccaggaccaactcttgattggatacagcgagttagaattgcagttgatgctgctcggggattggaatatttacatgagaaagttcaaccaccgattatacacagggatatcagatcaagtaatgtgctaatctttgaagattacaaggccaagatagccgactttaacctttctaatcaggcccctgacatggctgcacgtcttcattcaactcgtgtattgggaacttttgggtatcatgctccagaatatgcaatgactgggcagttgactcaaaaaagtgatgtctatagttttggtgtggttcttcttgagcttcttactggcagaaaacctgttgaccataccatgcctagaggacagcagagtcttgtcacatgggctactccaagattaagtgaagataaagtgaaacagtgcgttgacccaaaactgaagggagaatacccccctaaaggggttgctaagcttgcagctgttgcggcgctgtgcgtgcagtatgaagctgagtttaggccaaatatgagcattgttgttaaagcactccaaccacttctgaagtctcccgctcctgctgctccagaaagttgaagcaaataaaatcgcttagatgtctgcatcgtctgcacagttcgattcagttatctccagatttcatcaaatactgcggatatatctatacatctatatttttttataattttttgtttgagattggatgcatgtgtaggattgaattggcttgtttcttgttgtcattgttaaattccatgtatttatttcatcgcacttgtagtgccgagtctgctgacacccattgagccataatgcaacaataggttaatttgggttgtgtgggtaaatgttgtttgtcacttaacgttaatgccctccatattctttatttgtttcttgctatcaaactgagctgatacttgccttgaaagacctactatatttgttggacctttacggtgtgtttacaggattataattattgttcttgtttatagttattgttcttgtaattaatcccccccatttcggttctttagttgtggaataacaggattatgattcctgttatgttttgtttactttgaaaaaaaaaaaa

SEQ ID NO: 46693 - DNA, 222 bp, Glycine max
  Clone ID: PAT_MRT3847_142166C.1
ccgcggggtccgaaaattcaccccgtcgtcccggtacaaaaagggggccccgtcttgcctccaaggggcccggtccaccccgcagggccccttgtgggggggaaaccccccggttcacaggggcgaggggctcctggaccccttaaaagcccccaaaaaattggggggtttcggcaaaaagaaagaataccgcccccccctagggaggggggccaaaaccct

SEQ ID NO: 46694 - DNA, 1408 bp, Glycine max
  Clone ID: PAT_MRT3847_142167C.1
ctcttctcttgctctgggcctcttcgggtgttctccgatttggcctcaattccgccattcctttttttcttttcttttattcctcttttaatttctttttctttttcatggaccgcagatacagagactatcaccatcgtcctgctcatttggcacatgcttctccccctgaatactttgtccgcctggagaacacaacttacaaagacgatctatatttaaggaagaggacaaggatgcgtcggtggctttgttgtacttgtcaggtggaagagtcttacccatcaaatgaaaatgaacacctgaaaagcccaaggaattatggagatggcaaccaaaaaggctcaaaggtgtcagctcctgtcaaacctgaaacacaaaaggcacctccacctattgaagctccagccttgtctttagatgagctgaaggagaagactgacaactttggttcaaaggcattaataggtgaaggatcgtatggaagggtgtattatgcaaccttaaacaatgggaaagcagtggctgtgaaaaagcttgatgtttcatctgaacccgaatcaaataatgagtttttgaccccaggtttccatggtctcaagattgaaggatgacaattttgtttgagttgcatggttactgtgttgaaagaaatcttcgtgtacttgcatatgagtttgctactatgggctctcttcatgacatattgcacggtagaaagggagttcaaggtgctcaacctgggccaactcttgattggatacagcgagttagaattgcagttgatgcagcaaggggattggaatatttacatgagaaagttcaaccgccgattatacacagagatatccgatcaagtaatgtgctaatatttgaagattacaaggccaagatagctgactttaacctttctaatcaggcccctgacatggctgcacgtcttcattcaactcgtgtattgggaacttttggttatcatgctccagaatatgcaatgactgggcagttgactcaaaaaaagtgatgtctatagttttggtgttgttcttcttgagcttcttacaggaagaaaacctgttgaccataccatgcctagaggacagcagagtcttgtcacatgggctactccaagattaagtgaagataaagtgaaacagtgcgttgacccaaaactgaagggagaatacccccccaaaggagttgctaagcttggagctgttgcggcactgtgcgtgcagtatgaagctgagtttaggccaaatatgagcattgttgttaaagcactccaaccacttctgaagtctcctgctcctgctcctgctcctgttccagaaagttgaagcaaataaattcgctttggtttctgcatcttctgcacagttcgattcagttatctccagatttcacc

SEQ ID NO: 46695 - DNA, 277 bp, Glycine max
  Clone ID: PAT_MRT3847_142168C.1
ggtggaaagggagccctttgaagtaaccccaatggccgggaaatttttaaactagctgcggcgattttcaaaaaaaatcccaattctgggccgtgattggaaagcttttttcccaaaaactaacttcgtccaaatctatttacctaaggcgaggctccataaatttttgttttcaagagtgaagctgaaaggctacgggttttattcaaaaccccaattttcccaaacaaattgcgggaaatttttcccaattcaccaccacgattgttccttactc

SEQ ID NO: 46696 - DNA, 259 bp, Glycine max
  Clone ID: PAT_MRT3847_142169C.1
cccacgcgtccgtcgacgcgttcgggggcaccggataacatcaccaaggtcggctaccaaatcgcgggactcacgctcgcggaggccaagaacctcgtcgacttcgtccaggacaagcttggcgtctccggggtagcgatcgtccacgtggacgtagccgcgtgcgtcgatggcgccatggcggacactagggccacacttgcagactattacagcgtgcgacatcgagatcgcggatgcgccttgctcagcgagtata

SEQ ID NO: 46697 - DNA, 1162 bp, Glycine max
  Clone ID: PAT_MRT3847_14216C.1
aggaacagaaaaaggccaagccagtgtgtaactaatgaatgaatggtcttggctgaattaacaaacaaactgcaacaaagataagacaataaaaacgattggatctcctctcaaacttatgctcaaagtacagagggtatgtctttcagaacagtcaaaagaacagtttagctaggaattaaaaatatgtatatagattcttctacattctattggcacgtggttaaagagggccaaacaccaacagaagaacttgggtgttaaagcctcctatgagcacaacaaattttgctataaattgggacgttaggtgttgaaaatctgccacctggtaagtttacctcttcactgatatcttagagatgccatcttgtgaaaattgatgtcagttccagagggacaaaggatgcatgcactgaattggtattgagaaccaatctctgtagcaaaatgtgttgtcttcgtcctcggaaaagaattcaacttcataaccattcatccactggaactgggccgactcccgcggcccaagagccccgaatccgacacgccacccggaccaccccttctcatcctgaactgcccgccaccggacttgggcctcccgttgggccgaagttcgggcccgggcgggggggcctcctctctcggcacgaacccgggccgaaggtgcggcggcacgaacttgttcgtcttcggtggctgaggagagagcaagggcaagtccttgtcggggctggaaacaacggggacaaccgacgagagcggtgaaccggttccggttcggcccaggggtcggagcgagatcgcatccgatcccggttcggaccgggggtggttgtgctggatcgggctcggcggtggtggttgcggttgcggggtggggggcgtgacgggtttgggtgtgggtcgggttaggacaaggatgcggccatggggtttgttgggagcggagacggcggagtaggagacggaggagtaggaagaagaagaaggagaagggttgttcttgttggttttttcgtagatgtggttgaagttaatagaagcgtacttattgttttttgccatccaccaccttccagagaacagaacaacagatcgagatgcagccagaggaaaatgaatcacagacaatcccgcccgccggctcgagcggccg

SEQ ID NO: 46698 - DNA, 1604 bp, Glycine max
  Clone ID: PAT_MRT3847_142170C.1
cttccgacggctgcgagaagacgacagaagggggaactctcgcaagcttgttttcttgccttctttttctcttattctctactacaacattttttttgtgtgaaatttctctacaactaaatttccatataggctgcaagaccctcatcaacctacaattagtttgttacatatatagctaggttgaacaatatgggaaggtcaccatgctgtgagaagacagggctaaagaaagggccatggacaccggaggaagaccaaaagctcattgctttcatcgaaaagcatggccatggaagctggcgtgcattgcctgcaaaagctaggcttagaagatgtggaaagagttgcagacttagatggtcgaattatctccgacctgatataaaacgaggaaagttcagcttgcaggaagagcaaaccattattcaacttcatgcccttctaggaaacaggtggtcagccatagcatctcacttgcccaagagaacagacaatgagatcaagaactactggaacacccacctcaagaagaggctggacaaaatgggcatagacctaacaacccacaagccaaaaaatgagtccctagcctactccaaagacggctcgaaccttggccacatggctcagtgggagagtgctcggctcgaagccgaagccagactcgtaagagaatccaaactacaagaacaacaaaacaacctcggacctatgtcctctccttcctcaacacaaattacgaggctcgttctcaacaaaatcacacccctacaacaaaaacaacactcactaccaccgtgcctcgacgtgctcaaagcgtggcaaagttcatggtcaaacaacaacaacaacattaacaaatactcatcactaaacgacaagaagaaaaccatgcatgtgcgtagcatgtatgccatgatgctttcaaatgatgacctagagtctccaacatccactttgtgcttccccgagagcgtgcaaatgaataataataacaataactctaacgctatggtctcaaccgaccaccttgggttaatcaatgagaactatttactccctccaaccaccctggatgagttcattattaccaaaagtttaggaacaacaagtagtgagggtgcaattgaaaccgtgaatggtggtggtagtgactcgtggaggtacttcaccaaacacaacaatgaagaagaacaagttgaaactgatgagaagacaataatgtacgacacgatttcatgtttgcaagacgatgacggtgatattatggtggctgttgaggcattaagaggtgctggttattatgatgatgataataatagcaacaataataatgtcacatttacgcatctctctagcaatgtcaataatatggtgggtttcgaaaacgattttgattccaatgaagatttagcggcggtgaacttgcatgtgaacttcgaggagaataaggattattggaatggcatgcttaattagttagttataagtgaacaattttcctagctagctaccatgttatcatatgtagtacgtttgtttgtttcagagaaataatacattccttttgtcattcttcgcgaaaaaaaaaaaaaatatag

SEQ ID NO: 46699 - DNA, 1686 bp, Glycine max
  Clone ID: PAT_MRT3847_142171C.1
acggctgcgagaagacgacagaagaaagaacaatgaggcaacaagaacctgtgagctccgagtctgaggcgcgccgtgtctaatccgacgtcgttttggtggtgttctatgtcagtgtggtgctcgtgtttgggacatggcggaaacaacctctgcttctgtttcttctcctgcgggtgattctaattggagagagaacaagttgtggaaaggcacatttgctgtcgcaggaatcatgctcaccctcgttacctatggtgttttgcaggaaaagatcatgagagttccttatggggtgaacaaggactacttcaaatattctctttttcttgttttctgcaatcgcatcacgacatctgctgtttcagctggtgctttactggcaagtaaaaaggcattggatcctgtagctcccatttataagtattgccttgtgtcggtatcaaacatacttaccacaagttgtcagtatgaggccctcaaatatgttagtttccctgttcagactcttgcaaagtgtgctaaaatgataccagttatggtctggggcactgccataatgcagaagagatatcggggaactgactatttgttggcctttgtagtaacccttggctgctcagtgttcatcctgtatccggcagggaccgacataagtccatacggtagaggaagagaaaatactgtttggggcgttttgctaatgcttggttatcttgggtgtgatggctttacaagtacattccaagataagatgtttaaaggctataacatggagatacataatcagatattctatactactttgtgttcttgtattcttagcctggcaggtcttatcatacaaggacatttattaccagctgtagagttcgtttatatccataaagattgctttttttgacattgcattgctttcaactgttgcgacagctagtcaattttttatttcctacacaattcgcacatttggtgctctaacatttgctactataatgacaacaagacagttggtaagcatcttgctgtcatgtgtgtggtttgcccatcctcttagctgggaacagtggattggagctgtaattgtctttggcgcgatttatgcaaaaagcttcttgaggaaagcacctgaaaagacaacctcttctgtagaacatgtacaaaatggaaattcaaataatttgggagaacccatgatggaggctaactcctttgctgacctgatgtggtgctacccatagtagtgtgggtggggcagcttcagttttaagtttagagctgcacatttaatttttcaggttgcggctaatgcattatatgaaggtgatttgacacagcccctgattttgtgtcccaatcataacaatggagaacttgataggagcttagtccctcattttttgataggggagatcaataatactgatcaaagccaaaataatgtttataaattgaaatatgttcaatgtgtttgctcaaacaaggttgttttttggtttagttttcctgagtatgttttgttaaagacagaaggtttgtgctaatttctgggaccgtcgttcagttaaataccataagtgtacgtagaaaaactaattacaaggagattagtctataagattttaaccagaggaacgatttcggtagacacaaaaagctaattcagatgtatgttattttgttatt

SEQ ID NO: 46700 - DNA, 133 bp, Glycine max
  Clone ID: PAT_MRT3847_142172C.1
aaagattttatgcaattgaattttaaaatgactgggataaacttatcaattcaattattggaaattcgataagtaaacaatttaattcgggttgggccgtatggtatcaaaaaaatgcgagtactaactccca

SEQ ID NO: 46701 - DNA, 206 bp, Glycine max
  Clone ID: PAT_MRT3847_142173C.1
aaattacaaattaacaatcttcaacctataattgataatattgagaataatccatttatttaaattttataaaaacaatccagcctcttataaaaaattataaaataaaagttgcaaaatcaacttctaggtcacaaaaataaaaacagttttcttgtgcaactaaaaagtaattattcatatcctttaaggtggtacttataata

SEQ ID NO: 46702 - DNA, 282 bp, Glycine max
  Clone ID: PAT_MRT3847_142174C.1
ctgcacgcacggcatgcaccgttccgggatcgaccgatgcgtccgctcaggagggtagtttggcctttgtaattgctagagactccatatttccgtcaacttgcttagcgcttaataatccattatatagtgtcacgtaaatgaagtctacttagaatggttgttggacacatggctgagaatatgcaagcttcatatgtactcatatacctcttattgtttcatgcttttgacgctgcacaataaaaaaaaaggccgcacacgtaaggcctttccaaaaat

SEQ ID NO: 46703 - DNA, 261 bp, Glycine max
  unsure (1)..(261): unsure at all n locations
  Clone ID: PAT_MRT3847_142175C.1
gagaagaatacacaaattttgaagggttattctttgatgttatgttaggggaggtgagttttttttacaaactagaggaggtgtgaatgtcatttaagaagacctcaaggttggtcagtgtaattttcctttttttttaacttgccttacagtgactaagatcgacaaggttaaaggtagaaatnttctgaaataagggttgggttttgtgaatttgttttggggtttaatggtgactagaaatggaatgatggtagtgtc

SEQ ID NO: 46704 - DNA, 258 bp, Glycine max
  unsure (1)..(258): unsure at all n locations
  Clone ID: PAT_MRT3847_142176C.1
cttttcttctctannatntcnagttttcggggcgatattatgcagcagccnggggncnggtattgtaaccttccaacntngngcagcaaccgtancaanagtatnaggagnatgctccggcgcagcagcnacaannctacntnatgatgccgncgcagnatcaggcnngcagnctatgtngggcccatcgnccagcctccgtgcgcagannctgctagcggcgagagtccgaancctctggattgggnttgcagtact

SEQ ID NO: 46705 - DNA, 479 bp, Glycine max
  Clone ID: PAT_MRT3847_142177C.1
cctacgcgttcggatttattgtaattttgtcacgcatttaaggtaggctgaaccaccgaatcatcccatccctcctaaaaaaatttggacgcaaaatttttaaatggccgaatccggtgaacatgaccatgactttacatctggcgagtcgggtgcagctgccacttacccaaagcaatgctctgccttgcgcaagaatgagttcgtcatgatcaaaggccgtccttgcaaagttgtcgagatgagcacctcgaagaccgggaagcacggccatgccaaggtgcacctggttgcgttggacattttcaccaacaaaaagttggaagacatttgcccgtccacccacaacatggaagtgccagtggtcaagcgcaaggagtaccagctgctctcaaccaacgaggacgggttcatttcgctgatggatttggagacttgcgacaccaaggacgacctgcgtctgccggaaggcgaaattg

SEQ ID NO: 46706 - DNA, 623 bp, Glycine max
  Clone ID: PAT_MRT3847_142178C.1
cacgaggagatatgagagatatttcacctgcccatttacccggaatcaatggtgttaacttccggaagacgatttaaggatattttaccccaccatatgctatcatttattcccatctcttttagattatattttgtgcttcaacatacaggagtcataaagtgagtcgggtattaactattaagaatacactttttaatctactctctttatactttttattaattacaatttattaaaattataaaattaagaaagagatttatataaaataatattttttaataaattttaactaataaaaaaatatgttcaaaatagtatgagtaattcaaacagatttttgaataaaagaatgtgaactttaacccaataaaagagaaaaaaatgagtttggggaattgacaaagcgatggatgatggatctcttcaaagttcaagcataagccttgtctgctctgcattttggtgcagaattcgtggcattgtaaggttattgtttaacaacaagcaaacatcaagatatgtcggtgaaaaaaacgctgaggaaaacaaaaggaaaggctaagggagaaggtatagatgccaaaaccaaaagaagtaagctatgaattttttatttt

SEQ ID NO: 46707 - DNA, 248 bp, Glycine max
  Clone ID: PAT_MRT3847_142179C.1
tacggctgcgagaagacgacagaaggggttctttaattcattcagtcatctcatcctttgatgctcggccagatccgctcaagatgagtggccattttgattagctcgcaacaaaaccatctagtatttatgataagagcgagatattcacacttgttgatgggttggcgtgtgacaggatgatgctttgctttgctaggacagagcttaccagagcatataccaccctaacgatcaataccggattc

SEQ ID NO: 46708 - DNA, 357 bp, Glycine max
  Clone ID: PAT_MRT3847_14217C.1
aaatgatgtttttttttttttatcctttttttctttttaacaattttattttgatttgttttttttgtcttttataccaaaaatttttaaccgaaaaaaccaaacttaaaaaaggagaaaaaaaaattcgcgtggcttccccaaaccaacccaaaaccgaaaaaaataccggaaattacggaaaaaaaaccaacaaagggggcaaaggcaaaaaagcctttttttccgaaccagcccgagggggtaaaacacggggggccctatttcccaaacaggggctttcacacccggaaattccctgaaagggaaaaaaccggcccccccacggtttgaagcttgcaaaacggaattaatggc

SEQ ID NO: 46709 - DNA, 479 bp, Glycine max
  unsure (1)..(479): unsure at all n locations
  Clone ID: PAT_MRT3847_142180C.1
ccttacaattcaaatattatttttaattgtctcatcaagcacttaactctagtattcttcaaaggtctctttaggcttcgctcaccaagtgttttaagaaaaatgaaactgagtagtcatcatcgcaagattgaaataaatacacaaactgatagcttcaatctctcaactatagatttacaacaaatgcggagagaaaataagagagtttgcaaaagagtgttgaatacaatttttcaagtagttcgctaccttcatccgtgcaaacttttcgatatttacaacattcatgattgatagacgtcgagggaaaatttagtctaaagcgcttcagttttaatctgaatattacatgcttgatatttacatcattcatccattgggctaggactgcagactgaaaaagatgctttatagcacaactttccattcctatgattgacatttccaaaagnccaacttgnctcatcttttctttt

SEQ ID NO: 46710 - DNA, 398 bp, Glycine max
  Clone ID: PAT_MRT3847_142181C.1
ctcgagccgcgcgtttatttttccctcctactcgttagcagtcatagggggctaaacacgtgtccatcgacatgatcaatgttggctaccgatctatgcacgctgaccgccgtcactgtcagtgctgatgaacgcgctggaatcgtgaatgcacataaggacaagctgcagctattggctgggcaacatgtgcacatactggagacactgtcacgcaaaggcacacaacgcgtggaaattgtgagagatctgcagaatcaacatgattaggtggaggctagaatgtagagaggatgcgagcacatggggaagctgaataccaaatgctttatgaaccggtttactgaaaaagatatgagatggtgaatggaggatgacaggttgatagagtcacaaaa

SEQ ID NO: 46711 - DNA, 395 bp, Glycine max
  unsure (1)..(395): unsure at all n locations
  Clone ID: PAT_MRT3847_142182C.1
aataaaataataggaaaagaagaggctcagtgggcaataggctnggcccatccaatgaaccgnaaaggatgnggnncttancagnccacccccaaacctnattnntntgccacatgaaccctnccaaacacagaaaccatagnaaaaagaaacccagatnatggatnattaataatggaagccatatncgnaaccaaacccgntnnccatnctntncttttaactaaactntntncgaatnccaaacactngnnnncctncacaccaacaannctnnnaaaacannncgncaaaaacncacnccgctnnnnnnnnnnnnngnnngnntnccaaaaccaacataaagcaagagcagntggcagttttcaaccacaccgnaagatgaagnnctacgg

SEQ ID NO: 46712 - DNA, 190 bp, Glycine max
  Clone ID: PAT_MRT3847_142183C.1
ctccgggtaccggttccgggttcccggcacgacccactcgcgccttttgttcatttatgtctaccctcagtgttaccagacatccacctattcctaggaagaatgcaggagatatcataaaggacagagccgggtggggggatcaccagaaagctcctatagaaggatagcgacattgaactgacaatta

SEQ ID NO: 46713 - DNA, 587 bp, Glycine max
  unsure (1)..(587): unsure at all n locations
  Clone ID: PAT_MRT3847_142184C.1
cttctctcttttcttcaaacttanaactacacatttgtctgtgttggcgtcataagtgattcactctttattatgagtgtaacaatacagaatatatccacaaaggctatgcttggaaatgcataaggaaactgaggatgactatgcttacctctctaacttacttcaagactttaccattattcccaacattgacaaggcatggctttttagctcaccgggctcgcagttgcagggaatgtttgtcgtttcccaaccagatcttctaacaaacaagaggaggacatccatcatgtcctgcaacattctaaaacaaagtgacagttctgttaagtttctgtgggctccgtttccaatagagatgtccggcgtgtctatgattgttccatctccgtctggctccaagcttttagtcattcgaaatccagagaatgaagctccttgttgctttgagatttggagctcgtcgcgaatggagaaggagttccatatcccccagtcactgcatggctcagtatacaatgatggatggtttgagggggcctcggggaacctggatgaaacatgtatagcatatggagcagaag

SEQ ID NO: 46714 - DNA, 459 bp, Glycine max
  Clone ID: PAT_MRT3847_142185C.1
gctcaattccgcttctgagagtaatctccgtctcttgcatcgaactgattgaagaagaacctggatacgcatcgatgatcaaagcatgatgaagacgcatatcgtgatgaataatgagaacgttccgagggtgggcggaagtggccttgctctcaacgctttcgcgctcgcagaattcatgatcaattactatagcccagccatcataaagaagcaaagggagttctataataatgctaagaatgtgaatacgtctaataagcttgtactttcacctaaaccagctgaatgaaccctttttggctcttacacatatggagaatgtagatgaaactgtagagaacatggactatggttacaggaggaagacgaagaatattgctcttactttggaagagttgtacatgatgcagcctgaatagcaggagaaggaattattggagagagcagctgtcctgg

SEQ ID NO: 46715 - DNA, 113 bp, Glycine max
  Clone ID: PAT_MRT3847_142186C.1
aaagtgcatggagaagacggcgacttgtttttagaggaggttgcctgccctgacgcaggctcgacaacaagttacactccaactgcattgtaggaatcttggtcgccaaaaga

SEQ ID NO: 46716 - DNA, 1229 bp, Glycine max
  Clone ID: PAT_MRT3847_142187C.1
gccgaagttgatgtcgttggagttgggacgtccgagggcaaatattggtcatggggatcagaaagaggttggaggaaaactgttggaaatgtagtgcctttcatgtgtagcaatgggaacagtgaattaagagatttctaatttaatccggtggaggaaaacttttggaaatgttgtgcttatcatgcattgcaatgggccagtggaacggactgctcttgaatggagtttgctttatgggacgatattcagctctgtagttattttgtccgaaggctcgaatgttgatcttgttgtataggagggccatttggactatgcatacaggtacctgcccaaaatttttgatcaatttagcagtgcagaaggatttttgttcgttcaggataataccattcttaattactggaacttactacaagcagataaaactaaactttggatcactaataaggtatcggagtcatggtcttctatattaacaaatggtgaggactcagattggttatcacaacaagcaagaatggtacaaaaggttgttagcatgatgccagcccactttcaagtcagttacaaagaaacaagtgacaatgacaagaacctcctaatatgcagttctgagttgttctatgttcctcagcgccttatcagcgattttgttgagcttgttaaccttgtgggggacctagaaatccatcagaaggttgcaattcctatgttctttgtctccctagattctcctcagaattttgaccccgttcttgatagaatgatctacaagcaaaatccccctgcaaattccaccactctttattctgccaaagtccctgctgttcatccattgagtgtatcaagtgagcaagactttataaagcttatcagaataatggcagaaggggatccactcctcatggagttagtttgaaagtagaactctttcttcttgataatacctacatgacgagagaggatgcaagaaacatgtaacactcagatagcgctcctacatggtctcttaatcaaaaacagtgttacagtcttttttgtttcttgggtggttttttaacccttctctttccccctcccctttattgtgcagatttgttccacagaaaatgtatcattcctgattttttgccccttttttttgtgaaaaatgaaatgaaaatgtatttgtattcaatattgcaattcaagctctccattaagagattcttttttgtgatcaa

SEQ ID NO: 46717 - DNA, 1018 bp, Glycine max
  Clone ID: PAT_MRT3847_142188C.1
tactcatgtacatgttcattttgccttaattagatatagatcctggcatcaaattaacatcatacatacatacacacttacttatcttcatacattactctatgttaacaaataacaattgatccgaagtgtttactaggagtaggaactaagttagttatagttagaagcattagtagtatatatttatgtatgaggagatatcatataccagaggaagttaattcatataaaaggaaaataattaaatttaaattgtataattaaatataaatgattaagatttaatatcatttaattacttaaaaaattatatgaatttttttaaaaagtcatataatttttttgcattaaatttcaatctttgatatatatttaaacgatttaaatttaattatctcaatgttatattagatattttgtattaaaatatctatatatatatatgttaggacttattttatttcattttatttttgcataggggtatatagggtacacggaatctcactatcttcacgcgcgctctatgtttgtgagagatattccgattccttggaatatatcatactaatatatatatatatatatatatatatatatatagtatgatatatataatataatgtattataatataatatagtgtagtatactattacatttgttttatggcaaaggttagcaacttatatgcatgcttgatatggataaattaatattttactgaattctatgtgtttctttcttggtatatatgaatataacattaggttgcgaaaacttgttctttaagtgcgaggcaaaagctacaccacgtgacaaagaactatatcgcaaagttatggcgtgaagtgagtaaaaaacgcaagtcacttttaagatagaccacatgaaagtggcacattaagttttatttgatgttctacacagttaaataaattgaatagcttggtagaacttaaagtattcttcgttttctacttttatcaacctgtctttactcttcttttcttgg

SEQ ID NO: 46718 - DNA, 256 bp, Glycine max
  Clone ID: PAT_MRT3847_142189C.1
atttttatttgctgcttatgaggtgtttgttgtttttgggagacctgtgaatagggatatttgaagttggtgcaaattaaggatttttgggttccctaaagttgaaatattgatgaatctcagttggtaaaggtgttgcttttgatgaacagagcaggcccccatatctgttgtgtgtgaaatacttttataaagttggagattttaaagaggggaattttgtgtctgttgtaatcctatatcagctttttagatc

SEQ ID NO: 46719 - DNA, 1081 bp, Glycine max
  Clone ID: PAT_MRT3847_14218C.1
tttttaagacaataaaaacgattggatctcctctcaaacttatgctcaaagtacagagggtatgtctttcagaacagtcaacagaacagtttagctaggaattaaaaatatgtatatagattcttctactctctattggcacgtggttgaagaggaccaaacaccaacagaagaacttgggtgttaaagcctcctatgagcacaacaaattttgctataaattgggacgttaggtggtgaaaatctgccacctggtcagttttcatcttctgtgatttcttttgccatgtgaaaattgatgtcagttccagagggacaaaggatacatgcactgaattggtatagagaacccatctctgtagcaaaatgtgtttgtcttcgtcctcggaaaaggattcaacttcatagccaccattcatccactggaactgggccgagtcccgcggcccaagacccccgcatccgagacgccacccggcccaacccttctcatcctgtccgggccgccacccgacttgggccggccgttgggccgaagttcgggcccgggcgggggagcctcctccctgggaacgaacccgggccgaaggtgtggcggtacgaacttgtccgtcttgggcggctgaggagagagcaagggcaagtccttgtcggggctggaaacaacggggagcgacaagagcggtgaaccggttccggttcggcccaggggtcggagcgagatcgcgtccgatcctggttcggaccgggggtggttgtgctggatcggggtcggcggtggtggttgttgctgttgcggttgcggggtggagggcgtgatgggtttgggagtgggtcgggttaggacgaggatgcggccatggggtttgttgggggcggagacggcggaataggaagcggaagaagaagagagagaaggattcttgttgtgtgggttggtggtgttggttttttcgtagatgtggttgaagttaatagaggcgtacttgttgttttttgccatccaccacctttccagaaagcacaccaacagatcgaaaaatgcttcacgccagaggaaaatgaactccctatcgtatgt

SEQ ID NO: 46720 - DNA, 420 bp, Glycine max
  Clone ID: PAT_MRT3847_142190C.1
acgggcgggaataccgggccgaccacacgcgtccggccattttaaggtcccaatttcgcaaatccttataaataattcaataaataaataagggggggttttttttcctttcccaactttaaatttaatggttttaaaacctggaatggggcgggggccggtatttggttacccaaggtaccacgaagtagttaagcttaaattttggcacttttagcgtttaaaaataaaaccaaattttaaaaattcaacctttttaattggggttttttttagaaattaagccgggttggccaaggaatgtgaggatgctggtttggtagcaggaaactggggtgggggtttgcaattgttgggttaggattttttgggaagatttgagtaggtttcctttgttttaagggggaccagaagtgagtc

SEQ ID NO: 46721 - DNA, 384 bp, Glycine max
  Clone ID: PAT_MRT3847_142191C.1
gtaaggggaaatgataatcatgtttcccttcgggtctttttgggcttaaggaaaaaacccaagggttggggagaaccagagatttgaaggggccttctttgcgaactagcctaaggaaaaaaatgcttattgtcggccaaaaaacagggggatcaaggaaaatggggggaagcgaccaaaagggggtcccccccccataacaaaattggggggcaacacaatggggggggtcttacatgcgcgggcgcccaaatggaccaaggggggggcgacaaaccccttaagaggcccggccctaaaaaagggataaaaaaggccttttgaatccaaggcggataatggaaaaggggggcccttggacggtggtcaccatttccccttctt

SEQ ID NO: 46722 - DNA, 581 bp, Glycine max
  Clone ID: PAT_MRT3847_142192C.1
ataaagcttttaattaaagtcgattgagatgctttaatggttggaaggttggcgtcgtatatgaacaatgttgaggtagcaaatttatgaacttcatctgtgatcttttatataattgacatagagctggccacattatacatcttttggaaccttagctagtccaatccataagagctagtccccctcaccccatggccatgggatgaagtccttagcatgacccgattgcaaggtgaattcaaatcatcctagaataagaaagcattttactttcaaacgtgtaaaaactttccaataaggtcatgcatatatcaaccatctcaatccatctcaaaatttttttataaataaaccatcatcagcaatgtcaagtacacacgtttatgacattttctatcgtttgccaaaattcttattggtttgagttattatagtgtctttgtaggtacctcaactcttcaccggtcaccaccgatatctaccattttgaaagagagaactattgcaaaatcatctcagagctaacttgatccaaaaaaaaaaaaaaaaaaaaaaaaaaaagcggccgctctagagga

SEQ ID NO: 46723 - DNA, 369 bp, Glycine max
  Clone ID: PAT_MRT3847_142193C.1
gtctttttttttttttttttttttttttttttttttttttttttttttttttttttttggggaagtttaaaaactattttcccttccactaaatttgaaaaaaaacaaaaaccttggggatattttatatttctcttaataaaaactgaaatatccaaagggtgcaaaactttttattaccgggtcccttcctgcttaaaactaggcccaatccttccttaacaacaaaactggggtttgtttttttaacttaagcctccaccctttttttcctgggggtaagggccttccctgatggctttttcaataaataatggaacttttgggggggggatttggaaaaccgggtcttcttctaaaatttagggg

SEQ ID NO: 46724 - DNA, 441 bp, Glycine max
  Clone ID: PAT_MRT3847_142194C.1
ggctcgaggagctagaggatatgggcttaggcgtggccgattctcagacttcattcaacaatggcctgggagtgacttgatagctaacgcctaacgcatacggtatgtttgccttcatggcgcacccgatgaggattaatactactcgattgcggaactatacagactaaccggcatggtcccagagagtgtatccatatccgacttgagtgtggctagaaccgacattctacccaaggattgcggagtgggcccagacatctggttacaagacagatgcatatacgacacacggttaatctaacaaaccgatctcgggatggtcccactctagcctgggtgcgctgatcaagcgcctgctcagcatgctaagagaatccgagtatctgggactgggcccggagaacaggtagactgtgagatccatgtgcatgagactgc

SEQ ID NO: 46725 - DNA, 357 bp, Glycine max
  Clone ID: PAT_MRT3847_142195C.1
gttagtgataaactaaatcggaagctttatccgaccgctgtttatttgggagctctagcagttgtaatcgcgggttacggatgtcatgactgtatcatgggtggggctatgctggtagacgattctattcatgccaatcctttaactgcctttctgacactgatccgcatgcccttaaaaggcggtatgaccattaaaacacttacattttggtacacaattgtgcatattgaaccagacctgagtacaacgcgtctccttgggagacccactttccatgcagatgatgggacatgaaaggatgtctataatgctataggatcatgaattatgaaatgctgtcggtatgacatcaag

SEQ ID NO: 46726 - DNA, 717 bp, Glycine max
  Clone ID: PAT_MRT3847_142196C.1
cattggaataatgaggaacagtgtctacttctccaaagttcgtttctatggtaagcgttgcatttcattctctcttgatgactatagatactatccccgtaaacagtgtcatgactggggagaacaagacccttttgagaacatctggattgagccaccaaaggacttttctgcttgcatgtgaagaattttagtgaagcaacattttttattcatcgtcaagtcctaaaccctaatgcagaacatgtgaatatttggaaacattgctatgtttgcagtctgcatataggaggctaatatatgcagaaaatggaagttacatgtaaaggaatggacctctgtaagagggaagcgaaaaagacttgcctccttggttagtctttgcagattctggagcaataagattttttgccccagcacagcagaagacattagagttgatgctgatctagagattaattattattttgggcatgatccatagttatttatgtaggaatggacatctgtaaaagggaagcgaaaaagactttgcctccttggtcattttgtctttgcagatcctgaaatatttaagatttttttgccccaacacaacggggcttatgcagaacattagagtttatactaataaagagatttattaattatttgtttattgttactattgatattagtcttgtgtttagtattagtatcaattagcatttgattcaa

SEQ ID NO: 46727 - DNA, 1978 bp, Glycine max
  Clone ID: PAT_MRT3847_142197C.1
ttccgggaggccagtgaaacgcacacttaggctgcgagaagacgacacttgggggtttaccgtttcgtttgtttctgcggaaaatgggaggtgaagaaaatgtaaagcatcttgaagattgttctgtttccaatgcattgggcacttgggtattctcagttgcaggagctttgctggctattccagtggggataaagcgcaaatctctggcaccccttgtattttttggcaccactggtactatgttggatattattatgggaattagtgcttgcgaaagggaacatgcagagcgccaaatgaagttacttgaagcgcaaaatgctgctgccgagacttctttgggtgaaacagaaattgattcataaactgctatgttgaagttgtcagcattgtcaaatttatttggtcatgattgtaacaaactaaatgcactttttctggcggcctaaggtcaaatgttcttgtaaatgatagtttttttttttttcttataaataaaataagttggctgttttgcagcaattcttctattacaacatattaggtgtaattacaagtcaaataaggaattgagctaataatataaccaaaccaggtgttcctttataaattaaattcatctgtacacgggcatagaaaaaaatacataaaaattatttgttcagaacttggagagtagaccaaattgagtttcgggatatacacgagacgagattatattataacaattcttctcaccttagcagtcgatgtcgtgcacacttgttttccaaagacctccaagaaagacaaatttctttggctagagatcagacttgaacaaatgttcgtgttcttcttttagctctctctccaatcgtgtatttccatagcgagatttctggtctatccaaccaataatatcggagaatacaatctgcaaattttgtggtggctctccatacaatagaccgtgccacatttctggatacgactttagtgtcttatctgagcttgccgcctcatcatatagttgtttgctaactgctttatcagtcacttgatcttcctcaccatgtaaaactataaagggtagtgaaacctcatgcagactttgctcaatttctgtactgaccctcagaagttcgtaggctgttctcaaacgaggatttcctttgtagcaataccggttggctctaatctcttctctgactttaggcactttaaaggcgagatcaatgatatctggggtcggaactattctccacgagggaaaaactctgctaagtgcactcaatacactaatcaccattgtgttgggtttcatttcttctgcaatcttgcacatgggtgcgaccaaaattgccccatcccagtattctggctttttcctatgcaaaagtaaagccacagctcctcccatggattcccccatcaagtacctcatctttttcttgttctctgctttttcacaaattctagtgaaatgttgggagcaatcgtcgatgacaaaatcaaaattcataacaaggccaggaaccccttctgattttccatgcccttcataatcaatcccatacactgcaaaacccgcttttgcgagccttgttcctgtgcttttcattgtgatgctgcattccatggcgtagccatggcacaggaagattaacgcttttggacttccattcgccggaagccatcggcatgcaaaaagcttcaagcctcgagaattctgtacgtattcctcatcatatttgatctcagcttcactcgcctcttcatattcgaactcagcttcagtcgccatgtagaagggtgtattttgtgttgagaaggatgagaaagggagaggaaaaacagagtgtgaaaggtgggagagagagagattagaaaatgaaaaccccgagccgaattccgagctgagtaggatgagaaagggagaggaaaaacagagtgtgaaaggtgggagagagagagattagaaaatgaaaacact

SEQ ID NO: 46728 - DNA, 726 bp, Glycine max
  Clone ID: PAT_MRT3847_142198C.1
tagggttttcctttgtgacccaatattggttggctctattctccttctctgacttcaggcactttaaaggcgacatcaatgatttctgggatgggaactattctccccgagggaacaactttgctgagtgcgctcaatacactaaccacgactgtgttgggtctcatttcttctgaaatcttgcacatgggtgcaaccaaaattgccccatcccagtattgtggctttttcctgtgcaaaagtagagccacagctcctcccatggattcccccatcaagtacctcatctttttcttgttctctgctttctcacaaattgtggtgaaatgttcggagcaatcgtcgattacaaaatcaaaattcataacaaggcctggaaccccttctgattttccatgcccttcgtaatcaatcccatacactgcataacccgcttttgcgagccttgttgctgtgcttttcatggtgatgctgcattccatggcgtagccatggcagaggaagattaacgcttttggacttccattcgctggaagccatcggcatgcaaaaagcttcaagcctcgagaattccaaacgtattcctcatcatatttgatctcagcttcactcgcctcttcgtattcgatctcagcttcactcgccatgaagaagggtgtatttttgttgagaaaaaaagaggtttgattggtgaagtgggagagagagaaattagaaaatgaaaac

SEQ ID NO: 46729 - DNA, 204 bp, Glycine max
  unsure (1)..(204): unsure at all n locations
  Clone ID: PAT_MRT3847_142199C.1
ctgcngttctgggcattgncccaaccagcactggagctgccaaggctgcgnctctagtgttgccacagctgaagggcaggcttaatggaatagcgctgcgtgtgcctacgcccaatgttcgaggtgctgaccttggtgcgagtggtgagaagaagggtcttactgggtgggatgggaatgcagcattgaaaaaggaaatttttt

SEQ ID NO: 46730 - DNA, 396 bp, Glycine max
  Clone ID: PAT_MRT3847_14219C.1
tttggttggatctgatacctgaatgtgaacgactctttgttttaattgttttgctggagctttcttaagagggtttagggttttaatgcaaaagctaaaacaagagaaagagcatcgtcatctctttgctaacttgagccagcttggatgtttgtgctactgtgcccctttttttgtttgctttttaattgatggctccatagattggaatcatggctttatttcttcagcggacacttttacctggcccatgatcttgtttctttgcttgccatttgtcttttaaaatttggcctttgtttcttatcaatatttaccttattcgttctgagtcttgtatatggcttgctgcccgtaaatggttttggctatatattttttgcttgtttagttagt

SEQ ID NO: 46731 - DNA, 415 bp, Glycine max
  Clone ID: PAT_MRT3847_1421C.1
gattgccgttatttatccttgtttgttttttaccagggaggacatttttaatccttccattgacggtagatggaatataggccagcttggttcatgcatccacatacaattaaatttttaaacaccttaaagacattacaaggggcattaacgaggacctgaacattttttaaaccggattccccttcacaaagtgctgctgtggaaaaacaatagcgcgtaaaaacatttttatggcagcccattaacgcgcaggacagggcgatcaaaacctggttgacaatctcagagggaccctccccatagatctgaccaagcagaccaatctaggagggggtggctcaaaacttgtttttatattgtagtagattaacgttccctgggtgagtttttaaggggaacgagggaatttttt

SEQ ID NO: 46732 - DNA, 1230 bp, Glycine max
  Clone ID: PAT_MRT3847_142200C.1
ttccgcggaaagtagtcaaaaactcgaaatcgaagccagtgaaagatcgcacacttattctaagtctctatccctgccctgattacggtttgtttttgcagaaaatgggaggtgaagaaaatgtaaagcatctcgaagactgctctgtttccgatgcgctaggcacttgggtattctcagttgcaggagctttgctggctattccagtggggataaagcgcaaatctctggcaccccttgtattttttggcaccactggtactatgttggatattattatgggaattagtgcttgcgaaagggaacatgcagagcgccaaatgaagctacttgaagcgcaaaatgctgctgccgagacttctttgggtgaaactgaaattgattcataaactgctatgtttaagttgtcagcattgtcaaatttatttggtcatgattgtaacaaactaaatgcactttttctggtagcctaaggtcaaatgttcttctaattgatgctttttcgttggccttttttttctggtttttcttccagcagtgtagaccaaaaaaggcgggtatgaagcatttctatgttaatttattactataaggattgcagggatgtttggttacattatgtttccaatataatggtaattgaaaaacgcccttgttgggatatagctgtctcctcgtgtatttcaaagtgatccagaattagctattattagtttgtggaattaaaatctgctcaaatacctcttctctgactttaggcactttaaaggcgagatcaatgatatctggggtcggaactattctccacgagggaaaaactctgctaagtgcactcaatacactaatcaccattgtgttgggtttcatttcttctgcaatcttgcacatgggttcgaccaaaattgccccatcccagtattctggctttttcctatgcaaaagtaaagccacagctcctcccatggattcccccatcaagtacctcatctttttcttgttctctgctttttcacaaattctagtaaggagtgagagcaatcgtcgatgacaaaatcaaaattcataacaaggccaggaaccccttctgattttccatgcccttcataatcaatcccatacactgcaaaacccgcttttgcgagccttgttcctgtgcttttcattgtgatgctgcattccatggcgtagccatggcacaggaagattaacgcttttggacttccaaacgcc

SEQ ID NO: 46733 - DNA, 844 bp, Glycine max
  unsure (1)..(844): unsure at all n locations
  Clone ID: PAT_MRT3847_142201C.1
gtgcggcgctcaggcggcgttcccacttcatccatgactgacatatgtggctcttatttagctatgtctgttccttgttttctttctgtagtgtagcccttattttaaaatttcagaggttttggttttgtatatttgaagagcggggattgtgtgtatcggtgttgtgctacaatcaatgcactcttccgaaagagttccctgcaatattgtcttgagaaagtgggcagttgtgttttcatcttttgttgaaatcacaacaatcattttccctacatctctatcttctcaatcccttcccctccctctgattttacctttttttttatgaaaaaaaaatcgtattgattaagttaacttagaatatagtcctataccgtttacattttgtgggtgtttaattttaaaaatgaaactgccaatgtcagcgaaactaaagcaattttacactttttatttgttattatttcactaataggaacatgtaattgttgtgttagggctttgccaatcctttaaatcataaaagtataccactaatagttctactgttttaatttttcaaaatcccctcatgttttcatatttgaattgtggaccaagatttgaaaactgtgaatgcagaggcgatgggagataatgagtatgttcagggtatttcatttcgtcccatcagaatgacccatagtgggccttgaatagcctaatagcgtaacttggaaaaaatcgaaactttattacggggaaattttaacanagacacatattaacaagatacaagggcaaggaagacaaaatcaaatggccaacattagttttgtgggtactgattaaaaggattatc

SEQ ID NO: 46734 - DNA, 345 bp, Glycine max
  Clone ID: PAT_MRT3847_142202C.1
ggccactacgtattaccaacttcacagaccctatgcagcagcagcgacagcaacaaccacagctacgacgaatgcgaagagaaatcctatcgaatctcatttgactctgggtgtggatgcggcggccgcgatggctgaccacttggccagagttcttgctagttctatctttcaatattgatatctctttagttgccattcattagctgattatttattgcaatgtggtgacggctcttcattcactttcccgtcattcacacattaccatataagcgtacggcactatagctaatatgcgtccttacagctgtgtgcctttcctcaaccggtttaccattaaca

SEQ ID NO: 46735 - DNA, 288 bp, Glycine max
  Clone ID: PAT_MRT3847_142203C.1
gctacgcaccagtttcaccggacgaatttgttgttgttgggagcgatccgagaaaaagtgtgataacatgttggtttaccaggaccttcttacaggtgatgagcttctttgtgactccttacgttacaaggaaattgagaatggaatgctgtggtaagatgaggggaagtgacgttgttaaaggagcacatgatgtaacacattggtgcacacccttctgctgagtgtggatgagaagatgacggagttgaagatgcagctgttaaagttgtagacattgttgacaca

SEQ ID NO: 46736 - DNA, 432 bp, Glycine max
  Clone ID: PAT_MRT3847_142204C.1
gagattatgccattcaccgatgactgccgaattgtgacttctgctggtgatggccaggtaaataaatttgtgatagtgtgcatctaatcaaatattctgtttagctccaaattagcaggcttgaattccctctgcttcctctttttagcaataattaaacaggtgtcatttgatcatgtactctatgtctgtttattttattcttattatgatactctttagcttaatatatttattatgctagaagaacatcagatggaggggtcgagtctagcagaatggactagtctcatagaacatggtgaatcaagatttgaatccctactggctactaggagaggtgctcacatttaatatctgattgcatctcgaacaagattgtctcaaatacatgtgggaaacaaaacaaaaaaagtgatatattttctatct

SEQ ID NO: 46737 - DNA, 358 bp, Glycine max
  Clone ID: PAT_MRT3847_142205C.1
ggggggaacctaaacctaccaacgcctggatcccttgagaacgacaaaaactttggtatcttacaccccacccggtaattgataaaccctcttatattttttttcttttccaacataaaaccttactacaaattctctccatgcttgaccccccaaaataacaatttttacaaaaaaaccctttactaacccaattttttcttaaaacaaaacaactcccaattttttaagcgcacactgtctaaaaaatgacggccacatttgggacgtcactttccctttttcaaaccatcactactaattttccaaccttttgggctcctttacaagtcttttttaaaccccttggcgggggggg

SEQ ID NO: 46738 - DNA, 539 bp, Glycine max
  Clone ID: PAT_MRT3847_142206C.1
gcttacgcacacatagacaaaccagccacacaactaaacacaacattacaacaaaaagttaacaaacaacatattaaagactcttctaggtccccctgcggctgcggagggcccccctcacaatgaggtctcgttgttcttggaggagggccctcctcctttcttccagaccgcgaatgcggtccaggatccgttgcatggctgcagccacaagcgctggatcgatgggaggcaggtgctcccaaaaggcagccagggtttgctgccgttgggccttctcggtatcgatgttttgaatttctggatctatttgggaaagtctttcagcagttgctggatccatctccctttgctttgccaaatagagaaagaagcgtcctatttataggcgcgggggtccattaagaaaaaaataaaatccttagttttttcgcgggtatcgccacgcggcttaatccctctaactccctcaggaataggaggcaataatagaacgcacatcagagaagagagtactccctttctaaataaataaacaa

SEQ ID NO: 46739 - DNA, 228 bp, Glycine max
  Clone ID: PAT_MRT3847_142207C.1
catgtacatgttaatatgtcttgcttatttttattttagttgtgttattgttttcccaattttccacggcaccttgaatgtggtgttggcttaatgatgtgataacgacgaagaaaatttggatcttttaatttgcatgatttttttctggcgtctattgtgctgatcaacggagaatgaaatgagaattaattttaggaaatacattccctgataataatggaatag

SEQ ID NO: 46740 - DNA, 490 bp, Glycine max
  Clone ID: PAT_MRT3847_142208C.1
cttaactgagtgtgcagcatttcccagtcatggattctctgtctcttctcctctccccttatccactctccatcaaaaccccgaaattcccgaccttcaaacccttctcccatttctcaaaccatagcaaaccacactctccaaaatcccaattaccctctttttctgcactccaaacaccttctcttaactcactccaaacccccttagcaaaacctttcttctcatttaccatgctcaacctcttcactccacttccctgcctcgctgacgtggcctccgacgacgccggcaaaatcaacctcgaatcggttctggtttccatcgacaacttcttcaaccgctacccgtttttcgtcgccgggtgcacctttatttggctggtggtgattcctctggcggaagagtatttgaagaagtgcaagtttgtgtcggcgattgacgcgtttaggaagctccgcgatgacccgaatgcgcagctgctggacat

SEQ ID NO: 46741 - DNA, 345 bp, Glycine max
  Clone ID: PAT_MRT3847_142209C.1
ggctcgagcttttttgtgacactcactaagctcagggttatatcgtcaaccttagtggttttgtacaacatgtgccagcacactatgtggtccggtgaccatcccaatgcatgaaagcacgttcttgcccgtgccggctgaacgctctcaccaaaccgggcctagttccttcagatactcgctctatggctctggcgcttttggggacagcacggctgttactttaactccggcggtcggtggcgctgcgccaactgtgacttgtgatgacccctgatctgctactgctgcggaaggagcccaccgctgtccctgggagaggttaacctgttcaacaatctggac

SEQ ID NO: 46742 - DNA, 610 bp, Glycine max
  Clone ID: PAT_MRT3847_14220C.1
cggtttcgttttcggacgcgtgggattcttcaaaaaaactctagaatttgcatgcacctgttcttcatacaatggcattacgcgagcttcttgtgatggggattattgctgctggtttgtcttgcaaaggtttcatctgaggttaacataacaaaggagcaagatgaagaattttcctttcctgttgaccctgttaaatgttatttatttttttccttggcaaaaatattagtcaaaatatttcttaaattctgtgattttcttatgtgcttgatgtaaccgtatatgtcataatatccttactggaaatatgaaattctcttcagcttatcttgagaggcgggaacagaaggctaatgcaggacataggtaagcaaaacagagtattttggatgctttattaggttaactttgatcttgtgcttctggttttaaggtttaagcatgagtactccatattgcattttcaccaatgatatatcatatatacataaaaatgctcttaaatcaacctaatgggttttctatagcatacccaaaattttatttcaagaatgaaattaaataaggatcattatttatttgattctatacatgatcctttttgggt

SEQ ID NO: 46743 - DNA, 369 bp, Glycine max
  unsure (1)..(369): unsure at all n locations
  Clone ID: PAT_MRT3847_142210C.1
gcgtccgcccacccgtccncnttnntacaaaatggacgattctcacgatgagctctacattagtcggacgctgttaaatttttatgatagctgggaattaacaagtcccctgcgcttgcttttttggtcgcgatgatacgatactttgtgaaattacttgtactttacttttttgcttagttttacgacgaaacttctttatctgttaaaaaaacactaacttcaataggcccctttggaattcgggcgccaaagcgcccgaatacctggaatttttaaccatataaaaaaatattatttcatacaataaattttaataaaaaaggggccccctttctaaagatccaaatttttctcccccgtctttcc

SEQ ID NO: 46744 - DNA, 698 bp, Glycine max
  Clone ID: PAT_MRT3847_142211C.1
ggttctggtccggattcccgggtcgacccacgcgtccgcccacgcgtgcgattttgtttgcaacagctgtaatattatttcaacattatttgctgatttattgattatttttaacaatattattagttcatttaaaagtaattttgattattattatctaaacaagttttattccatcaaaagtactttgagtcaagaaatatccaaacataaatttgtctcattttttagcaaactaagtttgctcattcttttggttcaaacttaattcatgaactttaatccaaacatgtacccatatggattaaagtttacaaactgagtttgcaaaaatatttcaagttttgcttctccaaattaggttttcagacaaaattttactctcaaacatacttttggagagtaacgaaatgtgcccccaaattgattttactctcaaacatatttttcgatccttccccttgaaattcaaacacatgtttgaattgcattttgcaaacttaagtttgcaaaagtctcccaatagtttcttttcccaaactgagttttcaagctaaattttagcctcaaacgtatacatacttttggggggaattcaaacatgatgtcaaacttattttcctctccaaactaagtttggagctccctcacgggcaaaccaaacatagcctaagtcttacttctttcaaactgaattt

SEQ ID NO: 46745 - DNA, 684 bp, Glycine max
  unsure (1)..(684): unsure at all n locations
  Clone ID: PAT_MRT3847_142212C.1
ccaaaaccaaggaacatattggcaatcacaatgtttttaaactgcagttgttatcaccctcaggagaccttcaaaatcatgatcttgccatacattgtggacaaatgtgagcaacgtgacagttattgcagtcacggaaaccttgaaaactgtgatgtttcgaccccaattgttattgaagactgcaatttaatttcatggaaatcaaacttggataattgattcttcacttcttgatggcccatctgaatttcgtgaggactctgagtagctgtaggacactccaatcttcttcaaggcattggatatgaagctgttagtgctataagacttaatggaactatctgagtcaagcattccagtgttcaaaaatgggggttgatttggtgtgggaacatctaaatttgtattacttagcatgtaaacaacttgggacatagatggtcttnnggaagctgaagcttgtgtgcaaagcaatccaatttgaagcacccttgatgcttccgatggaggaaaatcatctcccaaggaaggatcaacagcttcggttaatgtgtttgatcggtntagtttccaagctgtttgtnnnnncgagccnnnnncctctctgannnnnttattcctcctgccactcacaatctccagancaagtactccataactatagacatcagctttatctgt

SEQ ID NO: 46746 - DNA, 268 bp, Glycine max
  Clone ID: PAT_MRT3847_142213C.1
gaaggtttaatattttattttatggtgtactaacccagtctttgtttaatgttgtacggggtttcctttcctaatatcattcacataaaaaaacatattctgcagatataactcctaaattcagaaactacttcaaaatccgtaaccattactaacccttcacaatatacacactcttcacctacactaagacaaccaccacccataccttggtcattgctaattcacacatataagctcaaatctgagatacctaaaatctttttat

SEQ ID NO: 46747 - DNA, 301 bp, Glycine max
  unsure (1)..(301): unsure at all n locations
  Clone ID: PAT_MRT3847_142214C.1
acgagcgcttttccctcgaattcagcgtaagctttccccaaagccgaaaaagaatcttccagaaacttcttttctttgaggagccatggccgaaagtcggagatccacgggcacggttaagtggttcaactcgcagaagggtttcngattcataactgcccaagatggaaccgataatctcttcgtacacttcacttccatccgatccaacagctaccgttctttatccaaaggtcagtccattaaatttctcctcaattacagcaacaacagccacaccataaccatcaacatcacctcc

SEQ ID NO: 46748 - DNA, 259 bp, Glycine max
  Clone ID: PAT_MRT3847_142215C.1
gtggtaccagagcctcagaactcaaaaactgccaaagcttccttacatggctgctctaaaatatatgcactgtctatcctcgttttaactgcaacgtcttctacactccttacttagtacttaccaatccataacaatttcatacccttcaacataatcacctgaaatgggtttagccacaccccaaccacaaaaaagactttccgaatttctcgatgaggagcaagaaccctttcttctatggggttaacttttaaaa

SEQ ID NO: 46749 - DNA, 365 bp, Glycine max
  Clone ID: PAT_MRT3847_142216C.1
cggcaattctccgggggcgacgccacgccgtcgcgccgcaccgcgttccgtcacgggctcgccagaagacgacgcgacgggcgatcagccctgctcagtcttcgtctctgcgcggcctctcagtgccggcgccagggcagttgggattaagtttgtctacgtaccactaccagtcagtagtagatgtcagtaacagccgagattcttgtctgctactcagctagctaggctgcacagtatggggtctcggagagcgctagacgagagttcggccagagtatcgcccagtccgaacagtgtcctgcgtcctagggtctagaacccttcagccaagcgctcgggagctggttgcaggcactcagcga

SEQ ID NO: 46750 - DNA, 412 bp, Glycine max
  Clone ID: PAT_MRT3847_142217C.1
tacggctgcgagaagacgacagaaggggaatgtttatcaggcaagtgggttggcttgtgtttttttgttatatatgttgggttgtcctgtgctgggtctggtctcattctccttattaatttgtgttaagtagcaaaccaaaaccaaaccaattttgtggttgtgtgtgagtgagaaactgagaataattatcaattatgggcctctcaaatttcccaattagtgcatctgaaggggtgctacctgtgcttgtgataaacacggttttctcagtggctttgttgaagagcatgtttagatccatgctccaagtagtgtttggtggcagtgctgctagtagttcttcaaacattgaacatgatgatgaaattagttcatcatcatcatcacgggaaaggagggtgtcaataac

SEQ ID NO: 46751 - DNA, 278 bp, Glycine max
  Clone ID: PAT_MRT3847_142218C.1
ttgggatctttagtcagtcgacccaaatgcacactagtaattaagtaattaacatgaaaactatttcattcttctatttccctttccaatgctcagaacctgtatgtggccccaagtccagactttcttttcccattgttcctgctgtgtgcatcctagatctacaggttaaccatttgcagctgacccatcaaatcaattctttgttaagttgtattgttgtaaattttcaagcggtcaacagaaatctttgtatttcaccagtagtccattactac

SEQ ID NO: 46752 - DNA, 675 bp, Glycine max
  Clone ID: PAT_MRT3847_142219C.1
tggtcgggaaattgatagtatggaccctcccttcatttaaccatttaccatcatcacatcaccaacttgaatgaaaatctaatctcaactctctccaaaaccaagtcttagttagagacttaagactctctctctatcacgatatctaactttggcggtggcattcaccactcactgactcgggcatggcaaacgacgctgctctgagaacctctctgctctggcttgcagcagttatattggtggttggaatatacacccactctttcaagaagatgatggccacctatgtcttgggtgttcttgggattgctgctctgcttcttcctgattgggattacttcaaccgagatttctctcgttggccttaccctgtcactgctgaggaaagggccaattcttctattcatgcccaaggatctggttttttaaggtttgcgaattctcctctgagggtgattgcttatagcgtggtttatggatatgctatgtacaaatggtgggagtatgtatcaacctaatgaatgattaacgagttttaattgtttagcagcagcagcagcagcaactgttggttcctctgaatcccaatttttagctgtaagcttaatttttttgttgatttaatttgtttaagtttggaggaatccacaaaccttatcagtgattgctgaa

SEQ ID NO: 46753 - DNA, 263 bp, Glycine max
  Clone ID: PAT_MRT3847_14221C.1
gaagaaggttcacttgatgcaggacattgcttcagagtttgcaataaaatgggattccaaagcttttgaactaaggatgtcaaaatgctctgtttttgcacaggaccgcaataattttaagtctaaccacacgagtgatcatgatataccattacaaggcaaggatgctaccccaaaaggagtcaagtttgagagaagtcatgaccatcctaatgacaggcacaaatttcagaatggcaaggaggctgttgtctcaaagggag

SEQ ID NO: 46754 - DNA, 363 bp, Glycine max
  Clone ID: PAT_MRT3847_142220C.1
gatcaccactttcattttgagcgtgtcgtgtctgtttctgagttatggcacagaagacgtttctgattctcagaaattaacatgaagggcatggttttgaagtaaataaatccagctgtgtcttgattgatgagtttggaagcattgcatttacattttgcagtgttggtgggtagttgttgctctctatagccatttctgaagtacactatagtgtgtatgtgtgtgtgtgatagagtgtcgagtttgaagattaagctacaaaggtttgtcctgttgtcttagttgctcattcttaaagaaacagtggggaacaacagtgatagctcttgacaggatcaagtctttgaagatttagcaact

SEQ ID NO: 46755 - DNA, 439 bp, Glycine max
  unsure (1)..(439): unsure at all n locations
  Clone ID: PAT_MRT3847_142221C.1
naaaaaaaaagagaaaaaaaaaaaaaaagaagacgggccataataataaaattgggaatccaaggaattacttttggaccccgagcccctgaacgatcatgccctccccttttctgcgggcgtgtaacgcttgaggtttttccgggccttacccctttttttttttaaggggggggttgtttacattggcaattccttgcaacacaaaaacccaaaccagtaaagccggggggggggactaatttaactaactctcatttcttaacttaagggccttttccccctttgtccctttggaaacctctttccccgatttgacttgtaaatccctcctccccgccttttaaatgaaatttccgcttaagggcaatgggggggtttttcttttccccgcgccaagtgatctttttttttacccgtttgccccctatccttcttt

SEQ ID NO: 46756 - DNA, 343 bp, Glycine max
  unsure (1)..(343): unsure at all n locations
  Clone ID: PAT_MRT3847_142222C.1
cggctctatctcnatcctctcaaacccaataataaaaaatatttctcatactaaatatcacaattactgggcgtcacatctcattatattgggtggcaaacatatattcttatcttcaaatacacaaacttattatcctcccaactaatacccaaaacttaaacttactcaaggggcaacccccctctagatatctccaccacccaaaatttaattccgcacacgctcctgcattcttaccatatttccctatatttactcatattaaaactttacttactaattatcatagctattatctaactgaaatagataccctctcacatttacacacaacatactc

SEQ ID NO: 46757 - DNA, 198 bp, Glycine max
  Clone ID: PAT_MRT3847_142223C.1
caaaataaagcacacttttacttaattaacagaagatagtgaagcaattgaaagaacctttcttgagtgtacacatcaagccataaacacatttaacacaaacggcggtcactaagaagacacatgatccaaacctgtgtcgaaaagacatatacgctttaaatgggcccggtacactaccggctgtctgaacactcc

SEQ ID NO: 46758 - DNA, 376 bp, Glycine max
  Clone ID: PAT_MRT3847_142224C.1
ggcatcaagaccagaaactacataaatatgaagcagcaaacaaatatcaaacgtgcaatagactgttctaactgaaaaccatctcgcaaagggaaagaatttacatttgaaaaaataattccaatcttacacgattcggtatgtgataaggagaggcatcaccagagtttaagatgtcaataatcgtttaatgccagttttctgctcggatgtgagtctagaggggaacttgatattgaacttgatcctcaagtttccctttttggaaggttccttgggaattggcataccctctcctttaataacttcttcgtatatcggactaatgacggagttggtggagactgtaagattcctcccatcaagtgtcgtcagc

SEQ ID NO: 46759 - DNA, 309 bp, Glycine max
  Clone ID: PAT_MRT3847_142225C.1
caacccagattcataaactctcaattagcttaccgtctctgtcttatacctcaattttattactattactagtacaacttatcatacacatataccactggatataactccaatctatgctatctctgtcactatgaagatatatatacacagaccaagtacaacaccaagctctatctagctatctacatgtctagccgtatatccatacaacattcactttctacaaagatctccgacgaccaaatcatctaacttcttaacaaattgctccaacttcttcctgacattcataatatgcaatcatat

SEQ ID NO: 46760 - DNA, 2023 bp, Glycine max
  Clone ID: PAT_MRT3847_142226C.1
ctcttctgcctgagttcgttgcagggtaaccatgccctccttatctggaggcagtttgcaggaatatcttaaaaatgtgtggggggttgccactggcaattgtggcaattggtggtgcattggctacaaaaggcagggccaacatagaagagtggcagatggtttgcagaagtttagggtctgaaattgaaggcaatgacaaactggaggatatgaagaaagtgctttccctcagtttcaatgagttgccttattatcttaagtcttgtttgttgtacctaagcatctttcccgagtttcatgctattgagcacatgcgattgattcgtttgtggatagctgaagggtttgtgaatggagaagaaggaaagacactggaggaagttgcagacagttacctcaaggagctcttggacagaagtctgctgcaagtggtagcaaaaaccagtgatggcaggatgaagacttgtcgaatgcatgatcttctaagggagattgtcaatttcaagtcaaaggatcagaactttgcaacaatagccaaagaccaagatataacctggccagacaaagttcgacgcctatcaatcataaacacattgaataatgtgcaacaaaataggactgcattccaacttcggtctctgctaatgtttgccttatcagataattcactcgagaatttttctatacgtgcattatgttccactggttataagttactcagggtgttagacttgcaagatgcgcctttggaggtttttcctgctgaaattgtcagtctataccttctcaagtatctgagtttgaagaatacaaaggtgaaaagcattccaggttccattaagaagctgcagcagttggagacattagatcttaaacacactcatgtcactgtattgccagttgaaattgtggagctccaacgattacgccatctcttggtgtatcgctatgagattgaatcctatgctaatttacattcaaggcatggcttcaaggtggctgcccctataggacttatgcaatctttgcaaaagctatgttttatagaggcagatcaggctttgatgattgagctaggaaaactcactcgactcaggaggcttggcatcagaaagatgaggaaacaagatggtgctgctttgtgttcatccattgagaagatgatcaatctccgctcattgtccataactgcaattgaagaagatgagataattgacattcacaacatcttcaggcctcctcagtatctccaccagttatacttgtctgggcgcctagacaattttcctcactggataagttctctaaagaatttggtccgagtgtttctaaaatggagccggttagaagaggatcctctggtacatcttcaagatttgccaaatctaagacatctcgagtttcttcaagtttatgttggcgagacattgcacttcaaggctaaagggtttcctagtctgaaggtgttaggacttgatgatttagatggactgaaatctatgactgtggaggagggagcaatgcctggtcttaaaaagctcatcatccagcgctgtgattcattgaagcaggtaccattaggcattgagcacctaacaaaactaaaatcaatagagctttttgatatgcctgaagaatttattacagcactgcgtccaaatggaggtgaggattattggagagtgcaacaagttccagcagtttatatctcctattggagggataggggttgggatgtctactcattagagacattaggagagagagagagtgattccagtgggggtactgcaatcagaagtcttgaaatttgtacgctctggaaggtttaacttttattttctttcttttaacatactacatatgtgagtatgcaagtgaatgcagtattttgttctttgcagttacctgagtcttgactgcaaatttcttcaagtttcaaccaaataaatcagggaacataatttgtttcttgaatatgaattccgaggttactgaataaaaatatagttagcttttg

SEQ ID NO: 46761 - DNA, 451 bp, Glycine max
  Clone ID: PAT_MRT3847_142227C.1
ggctcgagatttagtttagttgtcttgtcttttccagcgaggtgggaagaaggggagattcatatgttgatacatgtcctagctctacaagattattcattgaacctcttcttggaaagcctttatgcgtttgttgttgtttcttgagtctaaattacttgccttctgtgtaaggtcttatccagattggcacttacatatttatgaaatatgtactatgtagtttccattgtattttagtttctgttagagattcccaaacactaatagttagtcagtaagagagggtggaaggagaggagtagaaaggagtggtggcattctcttttgtatcgattgaaaactgagcattagctttgttgtagaaaggggaaaccctttgggaagagagatctttttcctgttctggtcatttcggtcaagaaataaatctggcttttcagttcttggt

SEQ ID NO: 46762 - DNA, 1215 bp, Glycine max
  Clone ID: PAT_MRT3847_142228C.1
caccatctcattctctcttcctttacacacactctctttatttatttctccttgcaaaaacaaataattttattattggttttatttaactgttgttggaggttgatcctagcttatgagtgagtgaggctaatggaatgtgaagagtgatgatagtattattatgtgtctatggaattcgatgccgcgattcccgtgtcccgagagcacctccctccagatacatagagaattccgtaaacctctcattgtgatgtcacctaagaacctgcttcgtagtaaggcttgtagatcaaatttatcggagttcgatgatgttcaaggacacccaggttttgacaaacagggcactagatttaagcgcctcataaaagaccaaaataaccactcagatgttgaggagggtatcagacgtttagtactctgccctggaaaggtttactacgaactcgatgaacaacgaacaaaggaagatgcaaaggatgttgcaatatgtagggtggaacagctttgtcctttcccttatgatcttgtccaacgagagctcaaaagatatccaaatgcggaggttgtttggtgtcaagaagaaccaatgaacatgggtggatacacttatattttaccccgactcataagttccatgaaggctgtaggtaggggaggttatgaagatgtcaaatatgttggtcgtgctccctctgcagccacagctactggtttcctcaaggttcaccttaacgagcaggctgagctagttcagaaagccattcaacgtgagccaatcaatttcccttactgaggcatagcatatactttgtttctccagagtgatgaaggcaataattggagggtagcttacaaacacaattcttaatatttgcttttcacctttatgtgttctggttttgacaagatgtcaggtaagctgaaattcaaggtgtatactgtttacttcagctgaggtaatttttttctgttaccaagaggtgaaacttagtcaattgtcctccaataaataaaaattgtttttttttgtgtgattactgattattactgttattgcttagtagtgtttaatagtttcaatatagaacaacagtggcatacgttttaaatactgaattcctttcaagatagaacaacaattgtaattaatatgtctgaagctgtggattttaactagtctgtatgatgtcgtatgattcatgtaaccga

SEQ ID NO: 46763 - DNA, 325 bp, Glycine max
  Clone ID: PAT_MRT3847_142229C.1
caaatgacaagattcctagaaacaaggtctgcccgtgtggttcccaaaagaaatacaaaggttgttgtggatctgctgtggggaaacaatcggctaagtttgtagttcaccaagcagctgactcaaaaaagggcaaaaaagaaaggaagcaaggaaaaaaggggatttctgcaaaagctgaagtacctagtgaatatgacttggtaacacctgacatgggtgcactttgtatttgaattgataatagataagttagttttgtgctttcccagaggagataaactattgaagatcgttctacctataattgagctcttcacaatac

SEQ ID NO: 46764 - DNA, 114 bp, Glycine max
  Clone ID: PAT_MRT3847_14222C.1
cactagtgaataagacaaaacatagggaagggggcattgattacaaagatttcatcaatctacactaatataaatccttcgaacttttacccctaagagaactcatatcatttg

SEQ ID NO: 46765 - DNA, 222 bp, Glycine max
  Clone ID: PAT_MRT3847_142230C.1
ggcacctgtgagtaatatttgagcttaaaccctaaccgctcttctcttcattactcactttggacacaatcataatggcgttctgtactaacgtcggaaatgtcttgaggcacgctgatgctcacagcacacatacacctgtcgcgtccatgcttacatacatcagcagacactcttcatgcaagcttttcagtgcaggcctattatacggattgatgacca

SEQ ID NO: 46766 - DNA, 514 bp, Glycine max
  Clone ID: PAT_MRT3847_142231C.1
attgaaggagatttctaaaaatgatacatagaagaaacaggatattttatactgaaccatgtttgatctgagatgttgattgtcagataggaatgcatgcattgtgcctagttgaatgtcatgatctctgagtactgtctgtagcattcaatagattaattagattaaaaaaaacggacttatacgatgttcattactgaagggggttaatggtttaatctcttactagtgaaatcattatagctacttttgagatgctggatttacaaaatatatttctctcaatttttcctgtacagctagtggcttttgattcttttggtctaatggaaatatttttaagtaaaggcagatatggaagtaggcaagtagccatatgcaattcaacatttttaatattttttaatttttgttaattttattgtgagatcaccaagtgacctctcaccttttagcctgcttgtgatactgatcatgtttgactgcttcagttctcttctctgctcatccttag

SEQ ID NO: 46767 - DNA, 314 bp, Glycine max
  Clone ID: PAT_MRT3847_142232C.1
ggctgaatgacaacaacttgggaaagttaccatgctaattactgagcattatttgggttaacaacatgtgttggactcttcgtttcataactagaaaaaaaactttatggtttacctttatatcaagaaagcgcttcgggggatgttaaacgaaaaaccattaatcgtatttctctaaaatgaaaagagtaccgaggcggtccatagcaaaaaaaaataattttttttttttaaatttaaaaaaaagccagaaaatgggggcatacatttttgttaaatcagatgatcaattccggggtaattatgatattgct

SEQ ID NO: 46768 - DNA, 296 bp, Glycine max
  Clone ID: PAT_MRT3847_142233C.1
ggatcctctagagcgggcgcgcttttttttttttttttgggatgattgagaatgattcatagagaaagcctgtatattcatacatacatacagatgcagcattacctttctctctccacgagtattattccccatatggcgctatattcaagtgttctctctgaataagagaggactattgtaccctgcagtgtcaaatgttgcattatttaatatatctgggcagagctcatcttcaaacatagactgatattttagaaccaaggtttcaaaaggtggtaaagagaatgcagaaa

SEQ ID NO: 46769 - DNA, 484 bp, Glycine max
  Clone ID: PAT_MRT3847_142234C.1
aaaagaaaaaaagaccgggttaacccaaaacaggcaaaaccaacaacggaacctggaaaccccatttttacccatttttaaaacaaaattattccccaggaaacagccccggccttgggtcaaactttaaaaaaagggggccatgggaccaaatggaacaaacccggtttaagtaaacatcacctgggggaccccaaaacttaaaattggaaaaaaaagttaaaaaggctcccaaaaacccaggtctggtttaaggagcaaaaaaaaggaacccggttaaagtaacccccgactgggggaaccttaaacttaaaattggaaagcaaagtttaaaaggctcccaaagaagaagtggttttttaataaaaaaccacccctttaaaattttaaaaatgggttacggagtagggaaattcacaccttgcaaagttggtaaaatggaaatcccggaaaaacaaaaaaaaccaaggcccttgggaaaact

SEQ ID NO: 46770 - DNA, 193 bp, Glycine max
  Clone ID: PAT_MRT3847_142235C.1
aagaaattatagagcacacatgatcacaagtctgagaaattggtttttttaagatggcttgttcacaaatcaagcgcatactatttgtggctttcattattctattgttgttttcctctcaaatgtttgtagcacgaacattgtaagaagaaagcagcctaactagcggggatgccaactcagttcaacataa

SEQ ID NO: 46771 - DNA, 143 bp, Glycine max
  unsure (1)..(143): unsure at all n locations
  Clone ID: PAT_MRT3847_142236C.1
caacaatcttaagncttcttgcgatagtctgctgcatagcaacttagctagtataatgagtttttgttgcatacacaatatgcttagaatctatgttgaaaccagtgcttgggnaaaatttagcttctaacatgtgtttggtg

SEQ ID NO: 46772 - DNA, 253 bp, Glycine max
  Clone ID: PAT_MRT3847_142237C.1
ttttgcaaccttgctatcacatgtcatcatcaacttggtttcaaaaaaacttgttcctttacagtagtttatctttgcaaagtcttacgtgtttgttttaccacttatatttttaagtgtccgccgatttcatgtatccgtaaccttcaaaactgggttcttgatctgccgtaacattttccttgctgcttgctcttgatgagtactgttttttttgtttttatcgttaaaagtcttaaattttcaaattcac

SEQ ID NO: 46773 - DNA, 258 bp, Glycine max
  Clone ID: PAT_MRT3847_142238C.1
gattcagctctgcgcctccatgttctcctgggatacatactcaaatgatccatgacacccaaagtaatggggctatctcggtgacttcagattcttcaaccgtcatgtgtatcagccatactgacgtacactctcgccgtcctgcgtcaccatacagtactcacaaacagcatcatcactcgcttcatgtactattgattccattcttcatatcacgctacacttggcaccaatcttcaattgttgctcacgtcactc

SEQ ID NO: 46774 - DNA, 404 bp, Glycine max
  Clone ID: PAT_MRT3847_142239C.1
agaacaagcctcttaaaataaatttgaggggctcccggaatcaaaggtaaatccccggggtccaaaaacttcctcaagggcaagcctgggcagttttaaaaattgcctgacccccattcctgaatagaggctaaacttttttagtttccagggcccccctttttaacccaccttttgacaggaaaagaaaaaattttttacggacccttttgttttttcctaaaaaaaataatatgaactttaccaacacctttaaaccccaggttctcacacttgatggaccgggttttgtgacaaacaaagagcgggggggcccgggatccctccctccccggcctgaggaaaaaacccttggagatacaggccctgtgaccaaaaaaaaacgaagttggcataaaacccaa

SEQ ID NO: 46775 - DNA, 437 bp, Glycine max
  Clone ID: PAT_MRT3847_14223C.1
ttgttttttgtttttttttttttttttttttttttttttttttgtttttttttcttttgttatttttgtttttgtttgaaaaaagacacgcaaaccccgtttttttgtacgaagcagcccattgcacgttctgaggcggggggggcttcgtcccggggaaaagccccctgaagggggtttaaggggggggaaaatttatctggagaagcggcctaaacaaaataaaaattttttttttgggggggggaaagttttggggggagggtgaacaggctttcctcatatatggccgcacggggagaagttggggcaaaagacctggtccaataggggggggcagaaaaagggggggtagacaaaaagaaattcttagtacgagaggtgcttggggcgagcccctcgagcttggggggcataagaaagaaaaggaggggggg

SEQ ID NO: 46776 - DNA, 268 bp, Glycine max
  Clone ID: PAT_MRT3847_142240C.1
cagctgaacagaagttgcacaaatatgctgctgtagaaaaacttcgtgagcgcattggtgatgatgataaagtggtttcacaaattttgatgataagaatggtgcagaagtttttaatgatgaatatgaagactccaacataatctatcctagttcttggctacagaacctgcctgaatggtcaaacaaaaagcttgaatcatcggataagaaagatgactatgcatctgagagtaccattctgacaaggaatccgactgcaaggcgt

SEQ ID NO: 46777 - DNA, 556 bp, Glycine max
  unsure (1)..(556): unsure at all n locations
  Clone ID: PAT_MRT3847_142241C.1
ccctttcgttcgatcttctcccacgctatctcaggtaacatgcctgagaatccactgcagaccttgttccataacattgaacaagtctcaagctttgttcaacaccatctctctaatttcataggccttcatcaccacccatcttcaggacccctcttgtccatctcttcctccaccaaaggcccactttcaaaaactgcaacttctgtacaactcgctgatactgctgtcaagtttaaatatgaattttatttgggagaatgagagtggaggaggggtggtgaagcggatctccaaactcaagattaccattttttggaatggttgaaagttcaggtcctttttaccttgatagggccccatagttcaaagtctgacatggagggagttatagtgagtcagccactagaattaaaagggggtgcgtgtatagagaggggggatttcacgtgtattcatgagagtcattcagttgggctgagagaanttatctgaggagctcttactctggaaaagtctgctgccccagtgactaaggaagagcttgaagggctac

SEQ ID NO: 46778 - DNA, 539 bp, Glycine max
  Clone ID: PAT_MRT3847_142242C.1
cttgggggggggggggggggggggggggccttacaaactgcatataaaggggttagagacaaatgaaagatatgatgaagttaccaaatcctattgaatgacttaataggttaaaagggtcaaaaggtaaaatagaaatagacgaaaacatgcggttttaagtaggcgggtgaaaaatataaacctaaagtaagaaggaacggacagggaagtaatggtggttagtggctgatttgtactagtcctagtactagtcctcgttgtcacaccacctagcgtactagtgctggtattactagtggtagtaagctgtacgttaactggtactagttgcgcaagttgcggattcaaacgcggcccagtagtaacctgcaatttacaacggacaacactacgtgtaaacacgaccacaatcacagttggtatacagggcgtaggtggcgtactagtactgtctggttgtacggtgtcacttcaaggttcactggatcgatctcgctagctcatcgtagactgtggtgagacgcgtattgaaaggt

SEQ ID NO: 46779 - DNA, 292 bp, Glycine max
  Clone ID: PAT_MRT3847_142243C.1
tcgcggacgcgtgggctgggataagacaacagaacggagggcaccgcactggaataatgagaatggatgctaggcttatgcaatatttgttgcaaatttgcccatgaatgcaacataggcacagctggaacgtgcttacaagaaatttgggcccattaaacaagatggtattcaagttagaagttatatgcaacagcactcttgttttggctctgtgcaatgagaatcttcttcttcaatgcagagcgcaattgaggcctcacctgccgttaccttaaatggacggatactt

SEQ ID NO: 46780 - DNA, 401 bp, Glycine max
  Clone ID: PAT_MRT3847_142244C.1
tagacggggtgggggaagactacttattggcgatcaacaatggattgtgatcttcgtgagcttacgctcacagacacacacatatatctactgtgactttacgtattatggtggttcatatctagctggttgatgctgacttgtacctagcgcagattactgcagcattgagcttgtaggacaacatactacatgggggttatgaagcggaaatagctgaactctgggtactactgaatgggcatatcccttaactgatgttataactctcatatagactccttttttccttttcaaactttcccttagaccatttatttccacctcacaacccttgaggagatagtgtcctagaatcttaagggtctaggataccagagtgatgttttatggcaaattct

SEQ ID NO: 46781 - DNA, 321 bp, Glycine max
  Clone ID: PAT_MRT3847_142245C.1
cccacgcgtccgaaacgctgaacagttgattgttggtagccatggctgcagcagccaccgcgaaaccgcttctgtcactgtggtttatgcttctgctaccgtcgtttcttcggatcgccgtcgcttaccgacccggcgacatcgttcccatgagctgcatgggtcaataccactcctcgcgaaccgtgtggcaggacctcattggccgccactgccccatcttcgccgggaatcgcgaggggtggatgcccatacccaagcccacgggttacactggggctgatgctattaaaatatggtttcaggttggaggggaaaagt

SEQ ID NO: 46782 - DNA, 435 bp, Glycine max
  Clone ID: PAT_MRT3847_142246C.1
cccacgcgtccgcccacgcgtccgcccacgttttcgcttatatataacgacggcggtagtggtaagtatacacaaactgaactttataaaaagactcttttacctaattggctagttcacaccctttaagaaagttagttaatttagtttagtaacattaagttctttagtaatttgtattatttttccaaaattatccttcaaattattgggactcattatctttctctttctaattaatcacattctgcctaatcgattaatgtgtgttagccttgttcttcaatccttacaagagagagaattcattctatctttttaattcataacattattgtaaagtaattaagggtattttaaacaaaaaataattaatgcaaaagacaacttgaaaagagtcttataaaaagggataaataaaatgaaaaaagagtc

SEQ ID NO: 46783 - DNA, 544 bp, Glycine max
  Clone ID: PAT_MRT3847_142247C.1
tttttttttttttttttttttttttttttttttttttttttttttttttttttcattacactctttttttttggaaatattaaacttttatttgattttttatcccaaaaaagctaaatctaaaaaagaatttatacagataacaatgtgggttttattccggggctcccttctttgtaacaaacccccccatcccttcggggtaggcctaagaccaatcattggagggaacaaacatgtttaggcccaacttcaattccttcaagaaggaaaccgggcttccacaaataactagtttcccggacattaatatagatttcaccttcttccaagcccgagtggaaaaactctcccatcccaatctctaaccacttattttttctcaccttaggacgttgccgaccccgaaatttgtcatcaaaaacattatcttctaagtggggatccaaacaaacatttttggaagctctactgcctccaacattacttactggaaacatgggaggatgggggggaaatccctggggtccaccattgggaacac

SEQ ID NO: 46784 - DNA, 483 bp, Glycine max
  Clone ID: PAT_MRT3847_142248C.1
ctcgagccgcgcgcgcaaaggattagggtttcgaacgtagcgcttttggagcttccatttcgatttatacttgcgcacgatcaggagggagggctttggagttgaatgcattgctcgtttttactgaaaggagaacccgcgctctctttggttgccgctttttttctgtgttctgaattcaatcagcactgagcattgatcattgagcattcagcattgagcagagtatggatatatcaaatcctgcagccttagtcaatgcggaactgttgcacttctatgttggaagaagggtaaggatcgtggtgcaggttgtgcgatctgatggtggagttgtcattggaaaatcaacagatgagaaacaactagttgtaaaaggatcacccccacctgctgctcctcttacaacttttgttgaagtttatggtcttgttaacagtgataagtcaattggtgctgagatatggaccaattttggtgatg

SEQ ID NO: 46785 - DNA, 1492 bp, Glycine max
  Clone ID: PAT_MRT3847_142249C.1
tacggctgcgagaagacgacagaagggggccgagcaacagtgaatttggccaccataccataccatgagcataagggcgcgcgcgcgcaaaggattagggtttcgaacgtagcgattttggagcttccatttcgatttatacttgcgcacgatctggtactttcgcttctcttactgtagctcttaataatgcacattttcgcaggctttactttctttcttttttatctcgtaatcttgcgaaagagattgaagaaaagaaatcatatacagttaattttattgattctccatgggattaactaggctattctacgtagcgcatcattctcatgtgaaatttcatagtaaaggatttcttagggagctgtaacattgttattcatatctcaaattatttgagataatatgtcatatctaaatctccaattaaacctagttaaggagggagggctttggagttgaatgcattgctcgtttttactgaaaggagaacccgcgctctctttggttgccgctttttttctgtgttctgaattcaatcagcactgagcattgatcattgagcattcagcattgagcaggtaacaaaccatgtttcatacttctttacattcacttttgtctcttgaaatttgtttgttgtgcgcgtctcaaatactattttcatattgataaacactgtcgtcttcatacaaattaattgagtaatttttgatagagttcaattaatggccaaatgagaaaccccccaagtttcgtggttgaaaagcgatggaatagagaagaatcaagtaaattgacattactcatgattgtcagactaatcctgccttcattgtacctgattattagaagccccagtgacaacgtgtagctgaagtatggtgcatatatcaaatcctgcagcctgagtcaatgcggaactgttgcacttctatgttggaagaatggtaaggatcgtggtgcaagttgtgcgatctgatggtggagttgtcatttgaaaatcaacagatgagaaacaactagtttgtaaaagatcacgcccccctgttgctcctcttacaacttttgatgaagtttatggtcttgttaacagtgataagtcaattggtgctgagatatggaccaattttggtgatgccatcgatatggatagctacaataagctttgtcagctcgcaaatggagaatttaaacacttgttcctgtgagttctaacaagcttgtctgatgatacagaggcctttctatcatttggaatactagaggagacataatcaatgtgttggcaacaatgtttttcattttttttttcctgatataatggtgacaatagggttgatcttatgtaaaaatgtaaaaactacccaagcccatcagcactagcccaatggacaatggtcacagtcctagtggcttaactagctgcaattttttataatttgttttggattctcttggtaaatatagtttttactggttataatgg

SEQ ID NO: 46786 - DNA, 246 bp, Glycine max
  Clone ID: PAT_MRT3847_14224C.1
aaacttggaaaccaaagaagacacgagcaataaccggccctgttattgttggaggttaatatcttctctgcatatgttttcttttataattttaatatttttgggttgtatcattggcataatctcatggcaaataacatctcagaaactatagtttttaacccaactgtgtgcctttgtgtgtttgatgtacccgatctcatctagtgggaaaagactttgttgttgttgttattgctatatcat

SEQ ID NO: 46787 - DNA, 225 bp, Glycine max
  Clone ID: PAT_MRT3847_142250C.1
tgctcggggttactctctgagccatagctgctcgtaatacaggctgcataatgtttaatatgtgggacgtatagaaaagcagcactcaagaggacttactgttcctcaatgggtacatgtctttttaacaaacagctacagaacagagcattgtgatgcttgtaagtggacaacatcaaaaccacattcctgtgataagagcttcccaacaaagagaagtggtcc

SEQ ID NO: 46788 - DNA, 160 bp, Glycine max
  Clone ID: PAT_MRT3847_142251C.1
ctctcactcactttctttctctgtacaactaggaagctttctctctctaaaagcggggaggtcctccagcaccgcgacctccaatctccctctttgacacagagagagatactgtgtgtgagaccagtattcagtttatggattccttttctcttctaca

SEQ ID NO: 46789 - DNA, 558 bp, Glycine max
  Clone ID: PAT_MRT3847_142252C.1
cctttacctcttggcccgcaaggacaagccggaagcccaggacgacctgggggatcgggacaaccaggacaacccggacaaaatggagttgtgtataagaccgttcctggaccgaagggacaacccggccaacctggagcaccgggacagcctggcgcacctggacgacctgggaagcctggagaccaaggacaacccggagccccggggcacccaggacagccaggccaacccggagcaccgggacagcctggtcatcctggcgctgctggagcacccggcaaagatgcctcgtactgcgcctgcccgccccggtcgggcggcggttatggcgtttccgggggaggcggaggcggtgccaaagtcgaacacgcgcccttgcccgctgaacaggcacctgtgccggaacaaccggcagaaagcgtcggcgtagcgcctgcaccggccgaagtggcgtcaaacgccgccggtggccaaggcgaagcagaagcggcgaaaggatacaggaagaaaatgtgaaagatcggataattattaatgcagaataagtgattggtg

SEQ ID NO: 46790 - DNA, 361 bp, Glycine max
  Clone ID: PAT_MRT3847_142253C.1
ggaattcggcacgagggcagattctgaagatgactatggcttctttagtgtgtgtcccagcagcatagctatcagtgatgataatgaggatgatgcagagtcatgtagctgtgacacaacaactagtacttgtggcctacctaaggatggtgaagatgatcaaggatttgctgaattttgtggcaatgaagttacagctttagaagatgaagcagaaataaggattgatcaagttattgtgaatgaatccgaagatagactattttgggagacctgcatggcagtggggtatccatgaatcccaaatattttagattgtcattaaacaataataaggtatatcctgtaagttcatatttca

SEQ ID NO: 46791 - DNA, 132 bp, Glycine max
  Clone ID: PAT_MRT3847_142254C.1
ggagtaatgatcatatcagagggttctccattgtcaattacactgtagctccctagatatattatagcattctttacacggagggatacattaccccccatctatgcctgcaggagcacttatgagactgag

SEQ ID NO: 46792 - DNA, 266 bp, Glycine max
  unsure (1)..(266): unsure at all n locations
  Clone ID: PAT_MRT3847_142255C.1
aattttttntnatgnnaaataatgtccgngatcanccacaagattgnggagaccctccatgtgggattgcacnataaagatgngcncaaaggatnacnccatggtgagcacaaatgtgaacacaaagtagancnccatggtnagcacaaaggtgaacacanagganaacaacaccatggggagcacaaggagggncttgttgataagatcnnggacaagatccntggtgatngccatgacaagggtgagananagaagnagantgg

SEQ ID NO: 46793 - DNA, 1341 bp, Glycine max
  Clone ID: PAT_MRT3847_142256C.1
gaaagttagtactagtaattgtgtagttgggatttggcgaagctcggttcagggtggaaaaggatcacaatgacggtttgcgctgtgcgcctttccctcacccacactccctcctaattgccatttaataaatccacctcactccttcatccaatgaatgattctatcttccaatggatcctcctctcatcactgactccacattctcccccgcttactctctcgccgagatttggcccggaatgccccatttcccccctcccttcccccacccctcctccgccgatcactccaccctcaccgacctcaccgccaccccccgcaagacaaaggactgctcctcctcctcctcctccgcctccaccgccgccgccgacgaggacgactgctccaaggtcctctcctccaccaccaccgccactgccaacctctccaataatgattctggtagcaataaacagatgaagttaggagggtccagtgttgaaaacgatggtttcaaagctgaggcagaagcgagttctgcgggtggtaacaagtcaagtgagcaaagcaataaaccttgtgaggcacctaagcaagactatattcatgtgagagcaagaaggggccaagcaaccgatagccacagtctggcagagagagcaagaagagaaaagatcagtgagaggatgaaaattcttcaggatttggtgccagggtgtaacaaggtaattggtaaagcacttgttctagatgagataatcaattacatccagtcactgcagcgtcaggttgagttcctttcaatgaagcttgaagcagttaattcaagaatgaacatgaaccctactattgatgggtttccttcaaaagatgttggtactcagccatttgacattgctggaatggtatttggatcacaagcagcaagggggtatgctcagggatcatcacctcctggatggctgcatatgcagataggaggtggtttcgagagaacaacataattcagagaagcctcattgggaatgacagatgaatcgataggattgattttctattaaaaaaacaaaaaaatagtgggttgattacagtgtgcttttttaacaacctagtcaactgttgtcgaatgttgtaggtttgcatttcccattgttatagtatgaaattatttatagaaagtgcatcttaatcgcatgtgcttcattgtattagcaattagcaagtagaaaacaatcttagtgtggttttcgtttttaatcctgttgtgataggactcctgcctcctgatttgatttgtataactatatatattgcaggtatgcaattgtgtattttgagtgatgatagtttctgaca

SEQ ID NO: 46794 - DNA, 526 bp, Glycine max
  Clone ID: PAT_MRT3847_142257C.1
caaaaaaaggatgttgtttttctcccaaaacattccaatttatataggaaacaaaacaggggggaagcaaacaaaaattcccaggagggttcagggccccaaaataaaaaaaaaaaaaaaaatccgggcccctttttggaaaaaggaaaaacccgggtcaacaacatcaaattttttaaagacaggggcacgggaataacccccggaaaagcccttccaaaaagaaggagaaaaatttaaagccccaccccccaggggggggtctccggggggaaaaaaaaccaggacggggggggcctaaaagccgggaaaagggaaccggggagggaaccaaacacctttttgacaaaaagcccacacttgaaaaaaaaaatgaggggccaaaaaaaaaggggaccaaaactggtaaacgcggacccaaattttcaaaaaaggttccccaaaaacccccaagaaacaaaaaaaggggctccgaaaaacctcccctctaaaaaaaagacaccccggcaaaaaaaaaaaaacaaaa

SEQ ID NO: 46795 - DNA, 457 bp, Glycine max
  Clone ID: PAT_MRT3847_142258C.1
tgttcttccttttgaaacgcatagtgaaagaaaatggttgaaaatatgaagagaagtagctttgaagtgttgggaatgtgctgtgctacagaagaagcactggttgaaagaattttgaagcctcttcgtggagtcaaagacgtctcagtgatagtccctacaagaacagtcactgtggtccatgatgttctcttgatttctgagtcacaaatagccgatgcactgaatgctgcaaggcttgaagctagtttgagactacagggagagactgataatgaaaagaaatggccagatttaactacgatggtgtgtggcttgttactagcactttctttcttgaagtatgcatatcaacctttgggatggttggcacttggttctgttgtcattggcttccctaatgttctactcatggccatagcttccataaaggctcttactctaatatcaacattct

SEQ ID NO: 46796 - DNA, 820 bp, Glycine max
  Clone ID: PAT_MRT3847_142259C.1
gtctaagagtccagtgtctctatatctatctaccatatatcttccttccaaaatccatcctctgcgagtgagtgtttcgttggagtcagaggcgatgatgtcttcaattagattcctatggatcctggtggtgtgtttgacggcatcatgcgcgctaagccaaccgcagaagctatcagcgtacgatgttctcatggagtacggcttcccggtgggtcttcttccgaagggagccatagggtattcactgaacagagacagcggcgagttcgctgtgtattttgaaggagcctgcagcttcgacatagaatcctacgcgctcaagtacaagtccacaatcacgggtgtgatctccaagggcaggctctacaatctcaaaggtgtcaccgtcaaaatcttgctcctgtggctcaacatcgtcgaggtctctcgtcagggcaacgatatttacttctctgtcggcatcgcttccgctgatttcggcgtcgagaacttcctcgagagcccccaatgtggttgtggcttcgattgcaaaacgctccccttaaacggtgacgtttacgtttcctcaatttaattacgcttttctgtgattcaattggtgaaccaacggattattgggttgcaaagtgtagtagatctatctctctcttttttatgctttttaagttaataattagtcctactttttattatcggggtattgtttgtttcccctcaaatgattttcagcataggggattccgccctttgtggtgccatttgcctcagaatccaaacaaatgttacttgtatctggcaatactctaaaaaaaagaaa

SEQ ID NO: 46797 - DNA, 532 bp, Glycine max
  unsure (1)..(532): unsure at all n locations
  Clone ID: PAT_MRT3847_14225C.1
ggctcgagaggcattgggcttggatgtgctctaagccttacaactttcactcgggctttagaatattggtatggtggaaagcttgttttcgatggctatattacttcaaaacaattatttcaaacatgcttaatattggcaaatacaggtagggtcatagcagatgctagtagccttactagtgacgttgcaaaaggggcagatgccattggcctagttttctcaatcttaaacagaaacacaaaaatagattctgatgaaatgactgcatacatgccccaaaagttaataggccatatagaatttcaagatgtctattttgcatacccatcaagacccaatgtgatgattttccaagaattctcaatcaaaattgatgcaggtatatccacagcagtggtaggacaaagtgggtctggcaaatcaactataatgggcttaatagagaggttttatgacccacttaangggatagtaatgatagatggaagagacataaggtcatatcaccttaggtcactaaggaactaca

SEQ ID NO: 46798 - DNA, 452 bp, Glycine max
  Clone ID: PAT_MRT3847_142260C.1
caacaatggggtcagctttgaaacatgacaacaggaaccagacaaacagtgtcaactgcgaaatgcgtggagaaataggaaaaacaaaaatagaaaacaaaatagcttcatagcttcattaacaagatagaatattcagacagcatgttatatgatggagtattacggagataaaaaaatgacatgttgatgtttaggacgatggatggagcgcagaactttgatatgagctgatatcactatacgcgcttaaaatagtctcacgcctttggcataatcttcctccatctcacgcatcccttcatccacagatttatgagccgtataacctaattctcgtcgtgcaagggcatcattgacagaaacttctcgcatgaatagtacagacccctgtcttgtaagtggtggttctccaattttcataaaaaaggacgctgcccaatagatccact

SEQ ID NO: 46799 - DNA, 1166 bp, Glycine max
  Clone ID: PAT_MRT3847_142261C.1
gtctctagcatagcatattcctgacttccaaaaagaagacaaaatcctctgcgagagagaaagagagaggcggtgatgtcttcaattagattcctatggatcctgatggtgtctttgacggcatcatgcgcgttaagccaaccgcagaagctatcggcgtacgatgttctgatggagtacgggttcccggtgggtcttcttcccaagggagccatagggtattcgctcaacagagacagcggcgagttcgcagtgtatttccaaggagcgtgcagcttcgacatagagtcctacacgctcaagtacaaatccaccatcacgggtgttatctccaagggcaggctctataatctcaaaggtgtcaccgtcaaaatcttgctcctttggctcaacatcgtcgaggtctctcgtcaggggaacgatatttacttctctgtcggaatcgcttccgctgattttggcgtcgagaatttcctcgagagcccccagtgtggttgtggtttcgattgcaaaacactacccttaaacggtgacgtttccgtttcctcaatttaattacactttttttttgtgattcaattgcccaacggattattgggttcggttgcaaactgtagatctatctagtatctatcatcttcttcttttttcttttttcttttttatgctttttaagttaataattagtcctactttttattatcggggcattgtttgtttccctccctcaaatgattttcagcataggggtttccgccctttgtggtaccgttttgcctgagaatccaaacaaatgtcacttgtttctggcagtacactattattgtcttgcccatatccgtcatttcgttggatatatcgctatttttatttttgtcttcttcttttttttttttattctagaagtaatgatataatacaataatttgctatagtatatatatcataatatcgatatcaaacaatagttcatatctttaaaattttagtttataaggcatgttcaatgtagagtgtagttctttgttttgattgtgaactctatcccattttgacatttttaagacttggatcaatgtgggtgatgcatcgtatgactaacaatagttcgattatcaaacaccggacggaagtgcaattgtcaatctacgtttcgtttgaaggca

SEQ ID NO: 46800 - DNA, 299 bp, Glycine max
  unsure (1)..(299): unsure at all n locations
  Clone ID: PAT_MRT3847_142262C.1
accacaaaaaaannnaacaagagtgttagttttttttttccaaaataccatttaaaacaaatttccccaactcggacatgaaataacacaccgcatggaaaaactattttggttccctagaacacatattttacttctttttccacaaacatctttgtttgcgacaatgttccaacatataatccataatttatttgtttgatcctcagggaataaaatcttcgactcattacctggaggaatatactttcattccttctctaaaaaaaaataccacccacacgcttcaaaaaattata

SEQ ID NO: 46801 - DNA, 499 bp, Glycine max
  Clone ID: PAT_MRT3847_142263C.1
tggcttggaacctttgggctgatttatgtgcttgcatggtcgtgagaagatgatagaaggggagagcggcggagcgcgtagaagagtgctgtagctgtaatttcaactagaagaagtgtagtcctaagtgagcgatagttattagttacgggctgcacgtatagttgtggcaagggcacacttctcctcgtcccgtttcataaaaggatattcttcagtcggtctaagactctcctgtaagacgctgaagaaaacactcgtaagcccgtgaagaaaggcccgattttgctctagaccggcgctacctctagagacctctatggcaccgtctaggctaacagtgctatcggtagtaaaacttcctgtacttctaaagtctatggatccgtgttcgaaaccttagaggattcgcattacccgaccaagaaggtagccctaaccaggaagtactccgagaggaataggaaggataaggatcttaagcctaggccgacctccg

SEQ ID NO: 46802 - DNA, 419 bp, Glycine max
  unsure (1)..(419): unsure at all n locations
  Clone ID: PAT_MRT3847_142264C.1
gcatatgaaattctccgaatgtagtccttaccgagaagggagggtaataaacaagaacaaaatagattcatcgaaaaagatctttcttcttatcttccttcagaaaaagataatttgtataaaatagaggataaatatatctgttgatcttaaaacccacttttattttaccgtttggcaaagtcacaatgttgaaataggtcaacaatagcatatcagagttgcttccaaagtatctcagcagtaggggatcataaaacttacaagctagtctcatggatttcccacaaaaacgaaacatagtagagctaagtaactcattctatattaacaagnacatacttagcataaattgttgaaacaaaaatgcctcagcatagatgaagaatacagaaaataaataaaactgtagtatacat

SEQ ID NO: 46803 - DNA, 1763 bp, Glycine max
  Clone ID: PAT_MRT3847_142265C.1
ctacggctgcgagaagacgacagaagggggtggtttgtttgactaaaccctaggagtaggagccgctttttggttgcgacttgggaggaagaagaagaagaagatgtctgcaactgcaagtgcaactttgctaggcatgccggggccatgggcttacgactatcacgagccatctgatccctatacaactaaaattggaggactccctgactggccccctcccataaacaccgatttgcttcgctgcgccgagtgcaccggccaactatgtctggtggcgcaggtttacgctcccctttctcaccaccggactctcttcgttctcggttgcgtctcgcccaattgcggaaccgcttggcgcgttcttcgacttcagaacgttgctgacgtggacacctctcagcaaaaacacgccgcgtccgttgctgaagttccaattgccaccgtgtcggacgacgacgacgacgacgacgcaattgacatggatttcgaacaactcggtaaggcactcttcgaagccgggacgctcgcttccaacaccaagcgcaagaaaccgcggaagaaatgccagaacaagctcccttcgtcttctccacatccaaaaacaacaacaactatagttcaaaatgacgtgcctgtggtgccatgcttttatatatatgcacaggaagagcagtctttgggggatattagttctgtatgttctagttactcgtccctttctattaaagggaatggaagtgacgtggaggatcccgatccttcacaggctgaagaaacctgggaaaaggaacaatatgaatacgataaagctttgaatgccgataggacgtacctcaagttcaagaaacgattggacgcgtatcctgagcaatgttttagatattcatatggtgggagaccaattttagctgcagctgataaaataaaccccggcagttgcagtctctgtggcagaccaatgcaatttgagatgcagctgatgcctccattactatactttcttcaggaagcacttggtgaccagagaaagatggtggaaaaatgggattggatgacccttattgtatatacttgctcagagagttgctgtgaagggattgaacaagcaaagtccaataacaagggctggattatagcagaggaggcagttgtagctcaatgtgaggaacccttggccgttcagcttggtgttgaggaagctatagcttaatcaaagaaaaggagttagcagtgtgttacttagtattggaattgcatttacaaagtaagatttggtgagttgaaattgtgtctggtgtatccatttggaccttctaacctgctacacaaatactcctggcttgagctagagagcaacaagatggatgttgcatacgctgccttccctggtctttctaaacaagttatgttcaattgtttataattttgaagcaggcttccgtaggctctcaaattgtagaacaaccaggtggagtcacatgccaacacactcataaatggtcacatcatcacaaatgtctcaatttaaatgattgctggtttaagttgaagaatatttctcatggattctccttcatgaattcagtgtctgattcatttgaattgtaaatgttagtttttggtcatgggcatgtagtccatattttaggtgttcacataatttttatcaattgttgcagatataggaacgaattcttaatgaaatttttacctatggaagtttgctttaaaaacaaataaaatttgttgcagttaagtgg

SEQ ID NO: 46804 - DNA, 250 bp, Glycine max
  Clone ID: PAT_MRT3847_142266C.1
gcaaaggctttccgatattgcgtgagcagctattatagtgacattagcaagtgccagtattacgtaaacgtgctagcagagtgcagaagagattcttgagccacattgagtgcatgagcatgcttgcttcgtttgctttgccttgcgatggtatagctttggagtttgcgttggagtccatatgtgtctcgtggttacgactacgttttttatgtcactgagtattccacgttgctaattggtgaatcgg

SEQ ID NO: 46805 - DNA, 111 bp, Glycine max
  Clone ID: PAT_MRT3847_142267C.1
ggccttaactaattgatcgcgggatcctattctaagatcttgagaatgtctacctgagggtgaggaagcagctgcatctgtggcacaactgcggtgctcacgtctcttgac

SEQ ID NO: 46806 - DNA, 556 bp, Glycine max
  Clone ID: PAT_MRT3847_142268C.1
taatcttacgtgtgccggcatattttgttaaggcctatataagataattaatctttgaatacaagctagctagtgccagtagtaaacatgccacactcatgaacagacatactggtcccataattaaagtgaattgtgttaggaattcatgtacgtgattggattgtggggtttgaatgagagtttcacttgatgagaaaagaatatgcataagattaaagagcatacagagaacagaacgtcttactaatgtacgtagtttcttaataaatttgttgaaagtattggtcttaatgattgtatagttaattaaagcaatgttaggttaaaatttagtcaagcttttgtcctaagtattgtatatatagatagtaatatattcctcttgttaatattttttttttggcttgtaaagaaaataaattcattaaagatatgtgtatcgactggatgacaccatcactttaaacactctcttaattatatttatttttctctacctttctcttatcatatatatatatatatatatatatatttcttttttctcttttct

SEQ ID NO: 46807 - DNA, 443 bp, Glycine max
  unsure (1)..(443): unsure at all n locations
  Clone ID: PAT_MRT3847_142269C.1
aattacaaacagggtttttacattatatcatacaaattgtgaggtagtaaaatgaacagtaacgggaagaacccatttttttttaggaaacggtgagataaacacgaagtatatacaaattaacatcaaatgtacctctatcctgaccctctcctttctggcataaaagaaaaaaaataaaacaaagaaataaagaatagaaggcttttccattccaaccttggatatttgtattttacacctaacctccaccactattaagtagctccttcttggtactcaaataacacgtccatgactggaactttctaaaaccaggattggcaccctcaattaacttaaatctgccatgctggtgccaaaaatacttcatgagttaatacctcagtcacttcaggtctctttatcccgagtaccatgaccaanaaactcttcaatcaaat

SEQ ID NO: 46808 - DNA, 168 bp, Glycine max
  Clone ID: PAT_MRT3847_14226C.1
gatcgccagagatcatgtaaactagattactctggtcatgcgtatagactatctctgtgcatattctgcgagactagaataatgctctctctcctagttaaacgtgccacatgttatacaccactactttcgtgacaccatatattgctgaagatgtcaggatgctac

SEQ ID NO: 46809 - DNA, 828 bp, Glycine max
  Clone ID: PAT_MRT3847_142270C.1
ctccaaaaccagggatgttaagatactacaaccaactattgcaactcgggtctcgcgtttttctggtgcaaattctctctatgagttggacaaagcaacacaagaggtcacaaatgctatagtagaagcacaatctcaagctcttggaggaccacttaatggagtttccatagggaaagacttgcctgtaattaacatttcaaggtcagttgggcttccagagcttcgtaggatgcgccgtaccttcataaaattgacagggcaaacaagtttaagtgggccaccacctccttctgatgcagatagtgcaaaaagaatgttcattgactacttgaacagggaactgggaacatcctgaaagatatgatagtcttgcaattcatcttatatgtgtgctaaaagatgccatgtttgtgtgtttagatcctgagctgttttatatttacctagagcattattattgaatacactgcttttttgaattccctctttattctactatcatttaattttctcttccaaaaaaaaaaaaaaaaaaaaaaaaaaaaaaaaaaaaaaaaaaaaaaaaaaaaaaggggggcgccccccaattaggaacctcccccccccgaaaattatttccgccccggcccctgggggcgacccatttttccttatagggagccttataaaacctgggcaaaaaaagggaaatagttgttccctgggaaaaattgttaccccctaaaattcccacaaaaaaaaaaaccggaaacaaaaaagggaaaccccgggggccccaaaggagggccctacccccctttattggcgtggccctcactgcccttt

SEQ ID NO: 46810 - DNA, 230 bp, Glycine max
  Clone ID: PAT_MRT3847_142271C.1
ccggccggccggatggccggtcacccacgcggactttttcgaaccggacacggagccgaccagaaaccgtatcaaaagcatgctgccgttccaagaccgggaaaatgtcctagtctagcgaccattcatacaggaaggagaatcacctcgtgcggcacagactcggaaaaatctctaaccctcaagccattgaagacacctccatcgaataagaccattgcaggaaaaac

SEQ ID NO: 46811 - DNA, 231 bp, Glycine max
  unsure (1)..(231): unsure at all n locations
  Clone ID: PAT_MRT3847_142272C.1
ttaggctgggaactgnatatccgcaattctctctctcccgataacgccacagtacagtttctctgtatttcacagtacaatcaaatgtcttgtcgatctaacatgggagataatgttggagaatcaagttagctaatgtcgagattatggcattgggaggactcatagatgaatggtcttaaagtgatccgaagctatgcgatgaggcatcttaaagaacaggacatttgg

SEQ ID NO: 46812 - DNA, 250 bp, Glycine max
  Clone ID: PAT_MRT3847_142273C.1
ggttcatttagcaagggagttgaacaatttcgacaagctttggagatttcaccacggtgtgtgcctgcacaatatggacttgctttggggctgcttggtttggcaaaagattgcattaacctaggagcatatcaatggggggcttcactgttagaggaagcatctgaggttgcaagggcaagtgcttattttttaagaaatatctcatgtatttggaaactacatgctgatattcagcttgcatatgcta

SEQ ID NO: 46813 - DNA, 496 bp, Glycine max
  Clone ID: PAT_MRT3847_142274C.1
aagcagacaactacgtttaaagccgccgtgcggtatatttacacatagatcgtataatttgcagttaaccctgccatgatcaaataccaaatcatgtgtgcaggattggcttctatgaatccacaacaacatactgacatgcaatttttaataatttgtgaagattttgaaaacaacatcatggctctcaactctcatagacacttggacctattgcttaaagcataacctaaacaaaagaaactggaccattgaactaaaacaccacaaattgtcaatgtaccattaacttgtacatacaaattaatgatgaactgaatagaattcagaaagtatagttcattatataatttactagacaccgttagcactagaatgtagcttcaaactgcacagcttttcattgatccgaagatgaataactactacctagctgctacttcagtttaaaccaaaacactttgtatttgacgtataaactgcatatctatatctt

SEQ ID NO: 46814 - DNA, 254 bp, Glycine max
  Clone ID: PAT_MRT3847_142275C.1
gcagacttcaacctaattgtacagagctgagagacataaataatataaaaacaaactttctacacaagggggacatttgccagatcaaaaaacaaagagaatgaagcctccctgacccaagaacacgcagaggaggtgggaaggacttgagctcgctgaagggcacccactgaacgaaaatcacctaaggatgtttggtgaacacatatcacaggagtgccccacaaccagaaggggatgaaacataaaggccc

SEQ ID NO: 46815 - DNA, 252 bp, Glycine max
  Clone ID: PAT_MRT3847_142276C.1
accacccgtccgcacatctttttatacggtatcttcgacacacaagccatgttatttcgcagagggtatgctcgagccttatgctgtatacgcacgcatatgcacaccattcccctgagaggacacgataagcttaccttacaacacatgaacgagcattgagacccaatctagaccagctttttcgatgccacaaacgctaattgatgcactctaagatgtctcaatactcaacgtgcagataaaaccgac

SEQ ID NO: 46816 - DNA, 207 bp, Glycine max
  Clone ID: PAT_MRT3847_142277C.1
aaccacccacctccaccaccacaacaactccaacatccaaaatccacccgccgagcacgaaagcgataataccccaaaagggcaccgggtctcggagcaaaggaggcgcgggtacaaataaccgatggcactcacaatggcaatgggaccggatcctctaacgagaatagcactcagactcagaccacacaacaacacggctactat

SEQ ID NO: 46817 - DNA, 328 bp, Glycine max
  unsure (1)..(328): unsure at all n locations
  Clone ID: PAT_MRT3847_142278C.1
wnaatctcangcacgctnacgtaagctcgcanttcggngcgaagtgcnatcnntcnngntancnggtacncnncagtggatgcanncnaagnctnggnnnngantgctcanttgnttgngncnnnntnnaantgcntgtcnctnancctnnancgcntntacggtngctcagnnagngtcccnnccgtncangnanatccnccgaaaaantncttannncgggngatnnncganntgtgattgcnanntngctaggantagtnanggttgtcnanagcccanggcccggncggtatgnagcnncnntggtgtngnttgtcttccnccn

SEQ ID NO: 46818 - DNA, 188 bp, Glycine max
  Clone ID: PAT_MRT3847_142279C.1
ctagaacaagaacaacagccatgcggcggctgcagcggcgtacggactatccgacgtcgatcatgattcgcaagatcacagaggcagcacatgttagttcgaatcatggcatcgccattcagagcactggcgtcagcgcgtgccaagtacgtgcggtgattacgaactgcggtcagcacgtgagatac

SEQ ID NO: 46819 - DNA, 135 bp, Glycine max
  Clone ID: PAT_MRT3847_14227C.1
ccggtctcggcaattccgagggtacgacgctcacgcgtatcgtagaagaagcgcgacacgaagagagtgccagtcgaggtccacagccgtggtaggagtctcgagtcgtgtcgcgtggaatctcgcacaagagac

SEQ ID NO: 46820 - DNA, 622 bp, Glycine max
  Clone ID: PAT_MRT3847_142280C.1
tatttgctgatattcaaataaggagacagctaatttccagtgccaagttgttgatggattggactcggggacaaaacattgtattttctagtgctgctcctacggtgaatgagcttagagggccctgtgatgttgcaaacttgttgtcattgtttgggctttccaaggagcgagctaatgcggctatttctaaaaactgtaggattcttttagctaattctttaaggaaaaagcgattttacaaagagacaataagagtagaagttttatcatcagatgcagcatctcattctaaggaagaccggtatcaagagttactaaagtgggaccctatctccagtggtgaaggtgatatcctgttggatgatatgcaaaaatcttctctagtctcctgtaaagcatcaaaacctgcaaaagccattgactttgcttccgtggtcaaaagccttccatctcatggttttgaaatcaaggatattttacctgcaaataatgctttccctgtctgcggagacaataaaataaatttcccgccagttcccgagaaactaagtcagtcaacacatgtacctaacagtttaactgagaagcccagcatacttgttcgtcctgagcatgatga

SEQ ID NO: 46821 - DNA, 465 bp, Glycine max
  Clone ID: PAT_MRT3847_142281C.1
gggccaccaaatctgcgtaaagcccccggctttaagaaaaatgattgaaaaaaatgttcctaatggagacaatgacataattcttataatgagctttctttttttttcctatgtcttcgggtcgaagggctttcatatgtaaaatccaggccgaaacatttgaggaatgccaccggggctaattgaaaataatggcaaggggggaaatccaacaaggcaacctgctgctgcttctcctccattatcttttctttccttatcaagcttggacttggcacaccgttgctatttctgccttttaataagaggtcctgcccaccctgcaagggggttgggggatgaggggccgactaatcgccattaacaaacggggagtcaatctggtgaatttgaatcttgacgaaaaaaaaaacactctaagaggtttgctgatgagggggcgtgtcctgggccacaaagttgttg

SEQ ID NO: 46822 - DNA, 417 bp, Glycine max
  Clone ID: PAT_MRT3847_142282C.1
ggacgaccttcttgaactgataaaagttcactctgctagtcactacaatctgacttcagaaggtatccgagaacaagatgttcaccttcatcaacatgatggaattctgaaacgaaatcctcagatatcttgactcgaaaacataatcctaacatgattaagtggatgtacaaatcctctgatcctgctcacaatacttgagacttgcaatcatcgatacactctgacagaacctatggactacgcaagcaactatactcaaaaatagatacctagacatatcaatgtgctatagctgaagacctgaatcctagtgctgcgactgaacaatcatagggaggagctagcaactcaattgcactgctatgtatacagagagaacatataaggtctgagtattcaagatgaatctccatg

SEQ ID NO: 46823 - DNA, 303 bp, Glycine max
  Clone ID: PAT_MRT3847_142283C.1
aaagaaagctttccgagaagcgagttttttaaaaaacaaccccattctttctccagtaataggcagtgggtcgaacattctccacgacttggaacccgctgacaaagactcgtgagccacctgttgctgtgacacaggatactgcccgaagaatggtagattcgcatgtctctggaagacctggctttcagggtggtgatcgttcgccagcatgttattttcaatagtcgcaatgatgcctgtcccttacgttgaatgtactctgcctatctgaagatgatcacacctcttgggattggcccc

SEQ ID NO: 46824 - DNA, 2103 bp, Glycine max
  Clone ID: PAT_MRT3847_142284C.1
gtcactcaactttcattttcatttattttatattgtttcacactcttaggatcaatcaattatttggtgccttgtaggctacaattgggcttctaacttgatgcttgccatcatccaaaatcaatgtagcagagattattggcacgttaattgtcccttcaattatgacgtaaaatgactttttctggcctatagatgtgaaggaaagagtactaggtttcacttgaatattgaacaaggatggagcaattactttggccttataagtagatgttgccgatcccacatttgtaactgttcttcgataagcacgactataatctaagccattaacagaaagagcaaatgttgggaggtttaattcatatacagctttcttgttagctcgtccactacaactgctatgatcttctgtgaggattcgaagctctttatctgtatacccctctccacacaagaacttgatataatctggcttcgtaatatcatatactaaaccaggatttgcggccttaacaggattaattagacctgctccatatgcgaattcagcatcaggattaagagtaggactcattggtgtggcagtggtcattagtgcagacttgatcatagcaggagaccaattgggatgaaatgatttgacatatgcagctgcagctgatacatgaggacaagccattgaagtgccagattctatgttgtattgaactgctcttttgtcacctttaaattctgaaattgtatagactggagaccatgcagctagaatattaactcccggggctgcgagatcaggcttgagagtgtttggtgtaagtggatttggacctctagatgaaaatgaaactatgaaaggggtttgtgaatcatcgttgtcttcgtcactcctaaatattgtggccgttgaatttctcaatgaaaccatgtaagaatgtattagtttaaagttccattcacttatgcactgcccacagctttcattagtttaaggaactttaaactaatacattcttacatggtttcattgagaaattcaacggccacaatatttaggagtgacgaagacaacgatgattcacaaacccctttcatagtttcattttcatctagaggtccaaatccacttacaccaaacactctcaagcctgatctcgcagccccgggagttaatattctagctgcatggtctccagtctatacaatttcagaatttaaaggtgacaaaagagcagttcaatacaacatagaatctggcacttcaatggcttgtcctcatgtatcagctgcagctgcatatgtcaaatcatttcatcccaattggtctcctgctatgatcaagtctgcactaatgaccactgccacaccaatgagtcctactcttaatcctgatgctgaattcgcatatggcgcgggtctaattaatcctcttaaggcggcaaatcctggtttagtgtatgatattagcgaagcggattatgtcaagttcttgtgtggagagggctatacagatgaaatgcttcgagttctcactaaagatcatagtagatgcagcaaacatgctaaaaaggaagctgtatatgaccttaatctcccatcattagctctttatgtaaacgtctcatctttcagtcgtattttccatagaacagttacaaatgtgggattggcaacgtctagttataaagccaaagtggtatctccatctttgatagatattcaagtgaaaccaaatgttctgtccttcacatcaattgggcagaagaagtcattctccgtcataattgaagggaatgtcaatccggatatactgtctgcttctctggtttgggatgatggaacttttcaagttagaagccccattgtagtgtatggtgatacataatttagtgtcattaattttttctttctaaagtcaaaatctagattatatgtttcatgaagattagtcgggactagagataaataatagtccgagaccatataataaattgaattaagatttatcttaattagttaaacagactgggtaaactattataaaatccctatcaatatctttaattcctactaataaaaaaatcatattataaattcttctta

SEQ ID NO: 46825 - DNA, 387 bp, Glycine max
  Clone ID: PAT_MRT3847_142285C.1
gggtgaggctgtttcccagctacaactatccactttttgatcgcttcaattttggagctcgatgtcgctatctgattgtcgagggaagattcctaacttctcttgtgcaaaggatccaacgtcgcataagattggttatgggccgagtcaaagcctggacggagctactacagggtgatgatgataaagatggcgctcccacatacaaatgcagtgtttatggaatgaaaatggagccatatgaataaaacgctgcatgtgaatggcctatgctattgatcagatgcgtcaggagttatgaactccagcaaggggaacacggatcactgactttgcgacgcatcgtgacacactaacttgcgccattcacatgctgtgtcaaactca

SEQ ID NO: 46826 - DNA, 195 bp, Glycine max
  unsure (1)..(195): unsure at all n locations
  Clone ID: PAT_MRT3847_142286C.1
gattaatgagagtaaatcagttatgaccattttggtgggatcaaagaatcacactcatttcttaaactacaaccaactcttctttgaattgatgctcaggttatagaagaccttataggactaaccgagacagncctcatacttgaaaacattgacaggatcaacaatacatgcacatacttaacctttattccc

SEQ ID NO: 46827 - DNA, 554 bp, Glycine max
  Clone ID: PAT_MRT3847_142287C.1
gaaaacaaggagcggctcctggtcggcttcgctcgcttcatagtgtcgatttggtgacagttgtttctggctgcttgttttgccccagtcattcctttatacgtggcactgttgttgctgctgtgcctgcggctcctcgctcacctggtcttccgcgtcccaccgccctctctcccctttgctagtgtagaacccaggaactaacatattgttgtgtctgtgctactaggcggaccaccaatacaagcatgatgaatgttgttggttgatgtggccaccacacatttcaagtattattccagcaagtataataccaaggtggttcaacaatcagcatgtgggcaaggatagtttcataaacataaaagacgcatctcacattatgcaacatgacaataattgcataggcgttgcgtgtaaagggaatgggtcctccaaaactgaacgaaaattcatggagtatattcaccttcattttggtgtagttctagtcacggatgaatcggatcacatgctgctattctatctcaatcaattccatttcattaaaatca

SEQ ID NO: 46828 - DNA, 246 bp, Glycine max
  Clone ID: PAT_MRT3847_142288C.1
aatctaaaacatcggctgctgtaaacggacctaactacactgactggagtggtgaatctgctgtgtgactctggccggaccatcgtcgctacagttgactgtgatggtcattacttcctggcgcctcttctgttttgcctttgtcacgctgccacatttataaaactccttaatgaacatctggtacacccacattcatatgcattaaatactaaggctcctagacttgacaaagactatgaccta

SEQ ID NO: 46829 - DNA, 295 bp, Glycine max
  Clone ID: PAT_MRT3847_142289C.1
atatcattcaaatagtcgcaagaataaaattttattcatcgagacctgtacattttaaacgggaggaaaaattaatctatatccagcaacggccccaatctttggttcaactagcagactataaattgaccctgtcccgctcctgatctcgacaaaaacatggttacttatgtataaaaatggacacctcacctgaaaaatatgagacgggttcggtgacccatgccaatgccatgggggcggttggtagcaccattatatttttgggtggaacgagccctttcgccatttcata

SEQ ID NO: 46830 - DNA, 334 bp, Glycine max
  Clone ID: PAT_MRT3847_14228C.1
gttcatgcttcagctctgactgctttagacagttagacatatgcggacctaatgttgaagcaggcagaagttgactacttgacacactgtgcttatgaattccggcttggcatgtctgccaatgatggcaaggtaatcttgtttgcacgagtcagaaccactgctaacaaatcgggttctgatctctttacactatgcaactatgtatgtgtatcagatatcaatgaagggctgatcgtgggtatggagacactggatgcctcagtcaatctgaaggacagatgatgggctacagaggctgcaaatgacctcacttttgaccgagagaccgaca

SEQ ID NO: 46831 - DNA, 820 bp, Glycine max
  unsure (1)..(820): unsure at all n locations
  Clone ID: PAT_MRT3847_142290C.1
tacggctgccgagaagacgacagaagggaaggaaagacagtggagtctgcaaacatgatcaactgaataatgcttacccaaatggagctttgctgccaccttcagctagttgttccttgtcattatccatgacgatgggtaacaagcgtgcagttatatgtggagttacatacgggaaaaggaaattcaagctagaaggaaccattaatgatgttaataacatgaaaaatctacttcttgataactttaaattcccaattgggtgcatacgtgtccttacagaagaacagaaggatcccaatttaattccaacaaagaagaacatactggattccttaaattggctcgtgaaggactgccagtcagaggactcattagtcttctacttctcaggacatggtttgcaacaaccagaagatcgcaaaggagatgaaattgacgggcttgatgaaactatttgtcctgttgattttttgagagaaggaatgatcactgacaatgaaataaattctatcattgttcaaccactcaagcaaggtgtcacacttcatgctattattgatgcttgtcatagtggaacaacacttgatcttctgtatctttgcaaaaaagaaaaaggcagttggaaatggaaggataacaaaccacctcatagtaagaaactatgacaacacaaacaaatggtggacttgctatttgcccagttcttgtgaagatggtcagatggctgctgatactgcagcttttgatggaaacaggtttaacggtcttgtgacctatcttttctcacanatattagagataatcctgaaatacatat

SEQ ID NO: 46832 - DNA, 436 bp, Glycine max
  Clone ID: PAT_MRT3847_142291C.1
ttctagttcgcgagcgccgccctttttttttttttttgggtttttttttttttttttggggttttttttttttttttttttttttaaaaaatctcatttaaaaaaataaaagttttttttggatcatttatccctgccatcagggcttgcttgggaatttctgccggcctttttgcttagaaaggacctggtgaaggtcatctggccctctaaaattctaaagggccccccgggccttcaatcttggtttgggaaagggttcctctgcttttccctaaaaacctggcattggaaccttccccctttgcaagatatatcatccctgcttttcccggaaaccgccttttctttcaagggctttgctgccgcttgagcctcccttttttggcgaatagattcccccggttttttggttgcataaccctcccttttccct

SEQ ID NO: 46833 - DNA, 743 bp, Glycine max
  Clone ID: PAT_MRT3847_142292C.1
cgtaaaaaagcggattgctctgaactttcccaatgtatgaatgttaagcaagcatacaaagtgccaactttagtagtgacaatgaaagatacagattaatttcattccaaaacttgtaaattgcaaaaaaacagaaggatcccattttaattccaacaaagaagaacatactggattccttaaattggctcgtgaaggactgccagtcagaggactcattagtcttctacttctcaggacatggtttgcaacaaccagaagatcgcaaaggagatgaaattgacgggcttgatgaaactatttgtcctgttgattttttgagagaaggaatgatcactgacaatgaaataaattctatcattgttcaaccactcaagcaaggtgtcacacttcatgctattattgatgcttgtcatagtggaacaacacttgatcttctgtatctttgcaaaaaagaaaagtaagtacatattcaatgatttctttcatttgattttatgcttctattccaaacttactctcgccccttgaaagccaactaatttgtcccttttgcttgcttgcagaggcagttggaaatggaaggataacaaaccacctcatagtaaagaaactatgacaacacaaacaaatggtggacttgctatttgcctcagtgcttgtgaagatgtcagaggctgctatctgcagtaagaatctggataaatattttcatctcccctctctctggtgtaaaacaatgc

SEQ ID NO: 46834 - DNA, 234 bp, Glycine max
  Clone ID: PAT_MRT3847_142293C.1
cttttttctaatacccttgattggaagaagaggtttaacgttgctgtgggtacagcgaaaggtttggcttatttgcacgaagagtgtttggagtggattttgcattgcgatgtgaaccctcacaccattctccttgactcggatttccaacccaaggtgtcggacttcggctcgtcaaaacttttaaccccagacgagcgtggcacatctcctttctcaagaacccgagggact

SEQ ID NO: 46835 - DNA, 662 bp, Glycine max
  Clone ID: PAT_MRT3847_142294C.1
gcgagaagacgacagaaggggggagaggacatttctgatacgggagatactgatattacttaacagactagtatctaatccttcctattctgccactgtcttgcgcggtttaatgaccactagggatatggctggtttgaccattgatgttgcaagcagattatctcggaaagaaaagaaaaccgagcagcaggacagcatggtgaagcatataagagaaaccgaaattgttgaccttgctcgcctattcaagaaaagggtgttcgcatatttgggcgatgacttgtagtgaagtgtcctcttccactattcaaagtatttgtacatatgctcgcgtcgcgtgtatcattctactcaggtaggagttggtgctgaaatggtgggaagctgataggcagcaaagacacgcaggtctttttcttgacaagtttcaggagttgtgcctggctgagaaaattttgattggcatgagaaatgcttttttttttgttcaaaactgtgtaattaaaatatttgagttagtggtcattaagtgatcgatgacaggtttgggaaaatgatgtcccatttttattttctattttttttataggcatgtaccattttttttaatgagctgaaaatgtaaaatttatccatggccattaattttttttttcaac

SEQ ID NO: 46836 - DNA, 3295 bp, Glycine max
  Clone ID: PAT_MRT3847_142295C.1
tcatggagttttcactctctctcctgatccaacttcaagtttcttgaggaatgggatccccatgttgttcattaaatttaatatttctttagcttgccttccctttccagcagatttgtaaaaatgcacagctgcactcataatgaacctgtcactttttgttgattcacatatactttcaaaaaagttgattccttcttccacatatccacatttcaggtaaccattcagcattgttcgatgacatacaagatcaggaactaaaccaaaagttgatagatcctcataaaccctcttggcttcatgaatcaatccagcttttatgaaagcgtggagtaaaatattaaaatggacacaagatggtggaatgcctttgctttgcatagcatgtatggtttcctcggctttagaataattcaggctcctcgtatatgcttggacaagggaaagatacgtgaaagaatcaggcaaataaccttgcctctgcatggtatggaaaagtttctccgtttcatgaagaactccagcattagcatatacattgatcatgatattataactgacctttccgggttttatacctccttcctgcattttactgaacagctgtgatgcttcaagcatcaaaccagctttcccataatagccaatcaaattcatgtatgttttttcatccaaagggacactgcatgagctagcttggttgaacatctcaactgctctatccaacttttggtcttgtccatagacacttatcattgtgttgaatgtttcaattgatggagcaacaccggaggaaatcatgtgctcaaaaatgctggatgcaaaatgcaatttgcctgcttcaagcatggctttgataaaggtattgtaagccacagtgtcaagctccaagttttcttcaagactcctttggacaatattctctgcctcctgatgttttcttttccagggccatacctccattggtcaaagaatttacagcgatgctaattccaacagcacccaaatcacgtccttcccctgttgcttgcttgtataataaatatgctttctcttgtttaccacatttggcatatgcattgatcatagagttataaagcactttactagatgtgggagaatttatatattctgcaaaaatatcttcagcttgtttcagcatttgttgtttgccataatggctaattagagaagctacagtggcttcatccattctgcagccaagcttagttaattgatggttaagcaattctgctttactgatttctccttctttagacaagttgatgatgagctgactaacaatttttgatcccccagcagcataacccaacaacagtttcagtaatatttttgtcttgttgaagttgccatttgccagatataaactgagcatcagcccaagagctgtagcgttaaatttgtcaatgggctcaatggccacaagttcatcatcagattccatatcccccttatgttcacaaagaatccaataaaatgtcatgaagaatttgtcatttttaaaatattcagtcttaaccatctgatttgtcaactgctcagcttctggcagcattccctccttacaataaaccttcataactgttctataaagctccttgtcaaaatttgtctcattctcccttatttggacaatgaactccttggccttattcgtcaaattaagtcccatgtacagactgagcatatcattacaggagccagcatcaggtggtcctgtcttggagagagctagaaatgttccttcagcagatgctacatcttctttcatcacataacactgcagcagcacaatataagcaaatcgagagaaccatagattgctagacttcatgagttcaataacttccaaggccttgtctacatttcctgaagtaagatggacttgtgccattgccaaatatgttttctcactggtgagctgccctcggttctttgtctcttcaaatgttttgtgagcatcctcgtataaaccaagctttccataaattcttataagcaaaccatatatgacttcatcagtggaaattttattgcgtaccatttctgaaaaaagggagagggctctagggtaatcctcatatttgtaatacaaagatagaagagaagcacaagtgtaattactgggaattattcctcgaaacctcatgtcctcatacagtctttgcacttcatctctgttgccacttttagcatttaaatttataagcagactataagttaactcctcaggaacaactccataattcctcatctcatcaaaagtcttgaaagcatcttcgtgcagcccttctttgacgaatgagctgatggccactgtataagtaaaattattaggtatcaccccttttcctagcatatccttccacacatgtacaacctctctatggagtgatttcttttgcaaagaagacatcataaagttgaagacagcaacagaaagaattattcccctttcttttatagcagaataaaaagacagcatagccttatgacgtccccatctggcatacgaacaaagcatggtaccacaagcaacttcatctggctcacaacctacatcaagcatctccaagaagatctcctcagccagtttcagctttccaacttgcccatataggcgcaaaactattgtgtagacaattacacttggacggtagctcagctgttgaggcaccaaactatcaatacacagtatcaatctctgcaatttcatccaagcaaagaagtctctgacttgcctccaccccttctgctccttgagcacaacgcacatctccttgaagctgagcttgcccacaaacgaagccatcaccatcctcatgtcgtagtcgccgtcgactctctgagagagagagcgcactttcttaaccgcggcgaggacgtgtctgccgtacaattggccgttgcggtcatcctgcaggtaccgcaccatctgctcgggggtcctcttaatccacctcggggtctgagcctgcgggccctggttccgccgcaggatgctctggtacgccgcctttccctttatgatgcgcctcgcgttgtcgtcggacagcggcttcttcgggttccgactccgaggcttgggtcgggtggggtcgccggaagtcggggaccacgggtcgcgctggatggtgcagcgaatgaagatgggaactcgaggtttcttattcttcttgttctttatgtttggcgtaatggagtagggttgatgagaaggtggagggagaagtgaagtggagaagaggaagggggatttcaaacactccat

SEQ ID NO: 46837 - DNA, 1017 bp, Glycine max
  Clone ID: PAT_MRT3847_142296C.1
agataatattgacatatatggagagaatgtagtttcagacagcaataaattatattcagaggaagtgaagaaggataatatcattagccctaaaatgaagaatgtagctgtgaaatggaattcctgttctgagaaagagcatcagttatatatttcagaagctgaactgcaaatgcatcaagctaagacaccattgtggggaaaaactgggatatattttcattcagtgggtaaagaggctattctgatgatggatgaagaagctgcttccggaggggaatttgagattgacaagattccaactcgtgtaatacaagctaggtcaaaagacttggttccaatttttgattatattcagacctcaaaatttcaacaaataaggactcctgctgtgggtaacgtgttatatgaacagcttctgcgtcaaagttcctttgaaaatggaaggatttcaaccaggggttttttgagttctcctgattgcatacctaattccgaatttaaaagtatgattgaaggaagtgagtggggtgatagtttgctttcagcaaaaacaaaggctttcgtaaataaaaacaacacccttaaaccaaatacttggccagagattgcaaataatagaagagagaacttaaacatgaatgctcatcaaatctttgtaaatagtgacagaaaaggcctgaaactggagaatcactgcaaagaaaaaggagatgaatttgattgaaggtatgaaaaattcatcattttgcattggaggcttggttaactttgattattctggttgaagagatagagaagtttgagttgtaagtgcttgactgctatgccaaaatgtggatattatgttgggattcttcagttgaccttgtaaataacagacaaatgcatatcatgaaataattagttgtaacggatttagttcttctaaagtgaaaagatttagaaaagatgtgtaaagcgagaaagtaaggattcatcgttattctaatcattttacgcatttactcacgattc

SEQ ID NO: 46838 - DNA, 203 bp, Glycine max
  Clone ID: PAT_MRT3847_142297C.1
gctttggtgaaatgtgtaggagtttttgaggctttgattaacatgattaacgagcctgttgggagtggttccaccaaggcctgtttgtcaacgattttcaacttggttaataataaaagaggcgtgacgacttgtcaaaaaaaaaaaaaaaaaaaaaaacagaaaacaaaaatctaatatacagaaaaaacaaagaaataaac

SEQ ID NO: 46839 - DNA, 330 bp, Glycine max
  Clone ID: PAT_MRT3847_142298C.1
atttttaatgtgggaaacccaaacaatgaggttacagtttgtcttttttctggattgatcactgatttatattcaaatgcactgattggtgtgcaaaaaaatgaatctttgtttgctgggtgtctctgaaactatgatcttgagaaatcccacaaaggaaaccttagatacccggtcgttgctatactttgctgccgggattcttagagaaccgtttgttgacaaatgaaccagggtgatgatgtcttcacaacttcgccggagactcctgctgcagtacaatggaaattttcgcctgtttacagggaacttccggcttgaatggaactt

SEQ ID NO: 46840 - DNA, 637 bp, Glycine max
  Clone ID: PAT_MRT3847_142299C.1
ggctcgagaaaaaaagtaaaaaaatctctcaacaccttgagaaattttatctgttagtaatttgctactactattttacattctctttctctctacgttttattatagtcatggcatctcaagcagtttccttcaagtccttcgccgttgctcttcttgtggcgcttttcttcgccgccgccgcctccgctcaggacttgcctccggcggcggcgccgggacccgatgccggggccgccggagccgtttcgagctcggtcgccatgattggagcttccgtactgttgtcaatgctcgccatcttcaagcactgagtataatctgatggatccatcttgtgtgaagattattgattcgttctgcacactcagatctattgttgctgcttttataatacgttacgagtgatgattattaatttattattattatgattattatgagtttatctatgtataatagagagagagagagagagatcttacagcatttatataatgaaccatttattgtaggtgttagtgagaaataagaggaattttgatatcctcttttattatattgttatgatttcagtgtgtaatatacatattcattcaatgaatttatttaaaaaacaaaaaatatttatttacgt

SEQ ID NO: 46841 - DNA, 530 bp, Glycine max
  Clone ID: PAT_MRT3847_14229C.1
gttattactattttatcatgattgtataatatttttttgaaaatttaatttttaatatatttcttcccttttaatacaatattgcttttttaatattctgacaaacagtcatgttactcacaccattaatttcttgaattttatgcactatttcattttttaaaattgtaaatattatataaaaattaggttaaattgcaattgtggtctccctttaattccttatcctcgattttgttttttctattttcctccccattattttagtcctcagcagtcagcatttagaaagtccacaattttagttaaatcctcaattttgcatacatttattccttttctcttacattttaactaatttagatgtttatttgcggctagtactttagttaacgtttagttaaacggtgattgtttgtgaaactgtggattttctaaaatctagtgattaaaattacggaaaaagaaaatatgaagaccaaaatcgtagactaggaattaaagggggacgaagattgcaatttaggcta

SEQ ID NO: 46842 - DNA, 252 bp, Glycine max
  unsure (1)..(252): unsure at all n locations
  Clone ID: PAT_MRT3847_1422C.1
tcgggcacgcggtnnaaatcaagttatatgtcttctggttgtagacaggaggggcacaatacggattatctagatcatgttcttagagaatccacatgcgccacgatatttgcgacatggttcaagngtgataagacagtgaaaatctgggccatagagatgggagtctgtcaaggcancttatgttctttaccctcatatttacggagtaggtgtaaacagccattttctntggtgttgggtctcccatca

SEQ ID NO: 46843 - DNA, 392 bp, Glycine max
  Clone ID: PAT_MRT3847_142300C.1
acaaggaatatttcataaattatatataggggaattttcaaacattaggtgaaaatatattcatacctgtatacaacttcttatacaaccaattccataattaaaatgtacaaaaggtgtttcatacaaaaacttgaaaacactatacattgccaactatgaatagttactacaccttcatatccatttcatcttctaggcaacttaattttattcatactgtactttgaccttgaataagttaacgttgcaccataattctatactataattgtctcttcttttaaaccacaatttacatgtctttgttcattaccttcaaaattccttatatttaaacaaaggatgcttttttggcaccacattttatcttgtttaatggaattgaatta

SEQ ID NO: 46844 - DNA, 255 bp, Glycine max
  unsure (1)..(255): unsure at all n locations
  Clone ID: PAT_MRT3847_142301C.1
gtacggtaagctcnggaatttcaggctcgagactcgagctacgctttctaaagttcgcacatagatgatggttgaagcgaatggtttgcattgtgttgatgatcggaggattcctttgaggaagtttctttaagtgcagcacttaatggtgttgagggttggacatatggaagaatcctctgcacatcgaggtttctcagtgttcagcaaatgacanaagcnagagatgtctctatgtgaggatctgatcggaca

SEQ ID NO: 46845 - DNA, 490 bp, Glycine max
  Clone ID: PAT_MRT3847_142302C.1
gcacatagatggtgccttgcttttggctgatacttatcactaccaatcctgataatgcagatcgtagtattcctgctgcgctctttagatgcggagggcctcattctgggtggggcattgccgaatccatagtgcagattgaaccagacatgaattcagggatgcagattttgagtaccactaccaatggtgatatctgctcaagggaaagatctcgcactggttaaagttaatgtagcatgtgctgctgtaggctagacatcaagatacactccaactgcattgatggaatctggctagcataaagactcagggctaattgtggagtatttagacgatgcttatgttgctcataacgttaatcagccccaagagaaagattcgttagaaggaaatgttccctttgatattaaatctcgctctagataggaaaaaaggttcctctacaaaagcacagatctggatagaggataaaaccttcaaatatgat

SEQ ID NO: 46846 - DNA, 1561 bp, Glycine max
  Clone ID: PAT_MRT3847_142303C.1
atcttcccgcttcccttccatgcggtgtacgaacccatataccaaatgcgtggttgaggagcttttgatgagcacaagacatggcatcactctttctcagctcttttccagtcccaccatcttctcttcctcacaacacaactattacttctcttttttcttatcgatctttcattcttgtttccaacctcaacacccgtagtgcctagatacccattgttgtcagtggagtccccccatcctttgtttctgctccgggtcgcagaattcttgctgttcaatcttaatacctagaaacccattgttgtaggtggagacctcacatggctggtgtattgagctcttcgcagaaatatttatggactggtggagaaagtatgttggttgcaacttgggacagaatagaaagaggtgaaggtgaaattgctatcttgtccttgctacgatcattggataaacaggcaaaagcaaaaggtggagctgtgtttcaggtaaatggaaatcatgagaccatgaatgtggaaggggatttcagatatgttgactctgggggatttgatgagtgtaatgatttcttagaatatatcaatggttccgaagacaacgaatgtttgaacttttactgcttgggttgatgtctctgaaaggtggaaagaagatcgaacaatgtcaaaaagttattggggaccatggaatttattggagaggcaaaagggagtcattgccagatcaatcctctttaggcccggtgggcttcttgcacgtgagcttgcaaggcatgctgttgtacttatgctcaatgactgggtcttccgtcatgagagacttctccctcaccatgttgcatatggcctaaagaggatgaataaagaagtgtctgagtggatgcgaggtctagatgaggatgacaatatccacaaaaagcctttcttttcgagtcgggggtatgataacgttgtttggaatcgtttatactcaagtgacacactagatttagtggactatcaagacaaacaggtatgttccattcttgatgagacactgcaagcagttggtgctaaggcaatggtggttgggcatactcctcaaactataggtgtaaattgtaaatacaattgtagtatctggcgtgtagatgttggaatgtccagtggagttctgaattcaagaccagaggttctagaaattatagacgataaagcaagagttataaggtgcaaaagggacagacacagtgaacttcaagctgctgcatatacttaagagaaaaacaaatgattcaacaggaggtaggggcatccaactagtgaagtccaacattggcaaaaatatgcaatacccattgacctatgcaagtcacttgttactcgtgaagatagaggggaaacagtataccaattttggcaaccaaaaaaatcctgtgagagaaatttcaaggcagatactgaaacatagtgaaaatagggtatacaacaagaagggaaaggaggagggtaaataatgtaaatattgtatacttctgaatcagttgcattatcaaatattacattaaccagtccca

SEQ ID NO: 46847 - DNA, 449 bp, Glycine max
  Clone ID: PAT_MRT3847_142304C.1
gtgcacttcaggggccctcccaagacaaacccagtaaaaagaataaactaaggccaaaaatggggggggaacctccaaaaccaaaaacaaaacaggaaaaccaaaaaaaccctggacaataataggcagaaaaaaaaccggcttgaaaataaacgggaccataaaaaattcaataaaaaaatcttcaaaccgcttaaattcacacttggaaagcgggggacgggaaaataaggggtctaaaaacaaagaatcccaaagcctaatctgggaacaaagaaagcgagaaacgaaccaaccgtaaaaatggacccaaaccaaaaaaggcttttggaaacgcctcatggggggccaaacgacccaaaggaagcccaccgcacccaggggccacccggaaattcccgaccgggacctgaaggcccaccagctttccccaaaaagaggcggaataa

SEQ ID NO: 46848 - DNA, 408 bp, Glycine max
  Clone ID: PAT_MRT3847_142305C.1
cgagatcttccagctgctgccgcatgacacgcaggtcaacctgctctcggccacgatggcgaccgacgtgctcgaggtgacgaataagttcatgcgcgaccccgtgcgcatcctcgttaagcgcgacgagctcacgctcgagggcatcaagcagttctacattgccgtcgacaaggaggagtggaagctcgacacgctctgcgacctgtacgagacggtcaccatcacgcaggccgttatctttctgcaacacgcgccgcaaggtcgactggcttaccgacaagctgcacgcgcgcgagttcaccgtgtcggccatgcacggcgacatggagccaggccagcgcgaggtcatcatgcgcgagttccgctcgggcttgtctcgcgtcctcatcaccacggacctgtttg

SEQ ID NO: 46849 - DNA, 477 bp, Glycine max
  unsure (1)..(477): unsure at all n locations
  Clone ID: PAT_MRT3847_142306C.1
attttcttctggaaatctcgatcaccataatgctgcttttcttcaagctgatctgctggaggtagtggactntataaatgatgcaattgtatcaatggactcttttgttagtgcatacgaaccagcagctgttttcttctcttgcccagttgaaatgagttatgggaatgaggaactgctgagcctccttgcccgattgcatgattcacttattccatcattgcaaaagggattccgtatgatttttgctgacaaacaagatggcacagtatctaatatcttagtaagtttgaagatgttaaaaattagattggtaaagtttggttggcaactattgcacttgtgctatctaagtgatgaagtgttcaaagatagcatccctcttctagctgccacaaagatgtttcctgccaatgtagaggacccagtcatcagagctgatattcttgttcaaacatttagagagatcaattcagt

SEQ ID NO: 46850 - DNA, 479 bp, Glycine max
  Clone ID: PAT_MRT3847_142307C.1
gtaacaaccacctctgcaacacatagcagatataataaagagaatgagggcgccaaattcgcacgtgctcctcatagatctcccacttcatatcctccctccgtcccccacgcttccctagaaacggaatcccatgtacggcttcgccggagattcgccgcccctccgatcgcttctacggctcctctccatcgacgtctcgcccggaggacctgaacctcttcctggagctgctccctctgacgttgcggagggaactgtatctccacaccgaaatcggaggcctcatagaggtcgtcatggatttgggtagaaaacctctggcacggttcccttccggtgattgggtcatctccgaacaacccattgcgcaagaggatttacgccatgccatttcaaaggttggtgagttttctgatgacaccaggtcaggtattgatagggctttgcatcggataagtgcgattcggaatcggaaa

SEQ ID NO: 46851 - DNA, 255 bp, Glycine max
  Clone ID: PAT_MRT3847_142308C.1
gtcaagactgggatgtctgggaatgcagcactccaaaagagtgagtgggccttattggctcaagtggatttaacatacagctgcagtacagagcattttgaggcatgttagtggacaaaatcagaaccacattcctgggaatagatcttcccaatagaagtatgtggaactaataatgagatagaaatgtggagctctgaatgggcaaatcaaacttcatggcattagaaggtccttattgacgatgaccaacag

SEQ ID NO: 46852 - DNA, 299 bp, Glycine max
  unsure (1)..(299): unsure at all n locations
  Clone ID: PAT_MRT3847_142309C.1
ctgggccacacacgtgctacaatgggcaattnacaatgggagacacagagcgagaganaatcgtaacaaaagcggtaaccggaataagttgtctctacgatttgagccatggcaacaacaacacccttcaaaccgattcattcagaggcgtttgctncttcatgggcaattccttcagcantttggtttggacggncngtgggccggcnaanggnaacntttannagnttattccccnanttangggntccggncngttngtaacnggcaacngtaacggtnnaaggttngaggaggng

SEQ ID NO: 46853 - DNA, 171 bp, Glycine max
  Clone ID: PAT_MRT3847_14230C.1
tataacggaacctcgcctgagcacacacaaccggttcactgcaacagatgcgatgacatatcacaatggcgctaaataagcctttctggtctaaaatacatatcatgcaacatccctgggaacacaccatctttcatccaactcaaagcttggaaacaacattctggcact

SEQ ID NO: 46854 - DNA, 205 bp, Glycine max
  unsure (1)..(205): unsure at all n locations
  Clone ID: PAT_MRT3847_142310C.1
gaaaactacatccgattttcgcgaagcaacgcaacgacggcgatgggagcgtccacttcggcggagccgagagtgtcggcggagcagaaagaggcggaggccgtnacagnctccaccggagctctccccctgcttctgatagccttcttcaagctcgcttaatcccgagaccagcgccgttcctttagaaaatttaaagcaatgc

SEQ ID NO: 46855 - DNA, 171 bp, Glycine max
  Clone ID: PAT_MRT3847_142311C.1
ttatgattagatgaatatatttatattctttcttgactaagaagtaagatgagggagacggcttatctcacaatgatgggttcgcactggccgacgatgactatgtgactatcgacatggggtaacgagatgagccaccagagccagagattgaggaaggtgaagagggaa

SEQ ID NO: 46856 - DNA, 622 bp, Glycine max
  Clone ID: PAT_MRT3847_142312C.1
ataacaaaatataaaatatcattaacttggtgataatacgatcataaatgtctttcaatataaaattgcattaatgtacccataccataaacatgcaaccttgtagtattaaaaaataaagaaattaaatacgtgttggaaacatattcttcaaggattctctaaatcgttccatttgtagcgtactttgagcatccggttcttcccatgttgtaatactaggatcaacttcactttcatcttcatcactatctatattttcattatcttcatctagcgaatcaaattctccatcactcttgtggtttctttgaatgaagttatgtatagccatgcaagcaacaatgatttggtttttgtgtcttcaaagcaaaaggtggcatattacccaatatcttccatcttgctttacataaaccaaatgcacgttcaattgtacttcgaagactagaatgataataattaaaaacttcaactcttcccctgattctaggcccaattctaaattgcgggagatgatacctagttttcttgtacggtcctagaaaaccataaaagtagggtaaccagaatcaacaagataatatttaccttgaggagggatgtggaaaatgcaatgcag

SEQ ID NO: 46857 - DNA, 562 bp, Glycine max
  Clone ID: PAT_MRT3847_142313C.1
tacacagcaaggcacaaactatagtaacacaatacttatcatttacaccaaaaccatcacctcacactcacgaattttcaatactcaatatttattctttgtgcttactttttagagaagagttagctaggaaaggtagcatggatattcaaaatcaaagtgaggatcatgtccttagggaatattatttaaacaacaaacagtttttgaaaagaacttggcagtttgttctctcagtgtctgtgttttctgtttttgtttggtactcttctggcctttccatacatcctcagtccttcaatgcctacttctccacgtgccttttctactccatgatcactcacacccttgagaggaaatacatgtttctcatttgtaatggaatccttgcatttgtagccaaaacctcactcaggacgtcgaactcttcagattctgctgacagctttgaccaccttcaaaatctgtcagagacaaagacaacagcagtttctgacatggttgttgtccctttgggaagttttgaatccccagagaatgttcctcttatggttgaagaaca

SEQ ID NO: 46858 - DNA, 1412 bp, Glycine max
  Clone ID: PAT_MRT3847_142314C.1
cggctcgagacggctgcgagaagacgacagaagggggatgagaaacattttcatttccttcccaaattcacccgcacgtgagtgagagtttcggctcagagattgatttttgagctacgatttcacaccgcattgccaaacatgggtgcttcagagtctactctctcaagcggaaagacgccagatgacaaaatcaccaccataaccgagcggtcggaagcctctgaccctatcttggagcgccttaaatatctcaaaattacaccgcccatattgacctcacccccaacagaggggactttaactgatattttagtgaggaagccttcgtcgtcctcagtttcagctacagtcaatccgaaggttatactggagctcttctcaatataccatgattggcaggagaaaaaggcccaagagataagcataagacaggaggaaatagaaaacaaaatagaagttgcagatgctctagcgatcaaacttcttcagcgatataatcattcaacttctacaatgaagactgcctcacaacatctatccggagttcattcattgcaggtggaaattggagagctcatagggcgcttgtcaaaagatattagcaactgtgatgctttgtgcaagaggattgcaacagagggtccagaatctctcgtgtcatcaatcaaaccttttgcagttactacggctaatcaagaaacctactcaagttcatctagtttgcggatagtttcaaaaacaaatccaccttcagcagaagaatagttagaccaacaggattgattcttgctcatattttcagaagcttcctgcattcttatcgaatgaggtgctcgatagtctgaagaacggttggatcacattcacttgatagactaattttttattgggaccatgttttggagggcatgaaacttctcattaattgggaccaagtcatggcaaccacagagcaacccggtcatgttacaatgcttctatgaaaaggagctatgatgcccatcaccgacacgcacatattgggcttggttgctaatttgaggcaaaataatgaaaggacttgataacgggcatgtgatcagatctaaagagataacttttgtctttttttgggtggttttttttttacaagttcacgtcattgttttcgacgatctcagttgcagaatattgcggtaatttcagtataaaatgagcacgtgatcgtgtgatgctcatcaccgacacgcacatattgagtttggttgctatcttgaggcaaaaaaatgaaaggacgtgtgatcagatctaaagcatttgtcattttttgggtggggtttttttttttataagttcacgtcattgttttcgacgatctgagttgcacaatattgcggtaatttcagtataaaatgagcacgtggtcgtgt

SEQ ID NO: 46859 - DNA, 764 bp, Glycine max
  Clone ID: PAT_MRT3847_142315C.1
cgagcccagggcttcatcgtaacctgcgaactccactctccgcttccactgctacctttctcttctttttcctttttgttctctcaaccttcacttaaacgaataacctagaagacaagttaaaaaaaaaaaactaaaaccttcgatctttgttgttgttgttgttgtttttgaatttcgaccaccgcgtgcgccaccgtgcgcggcctgcgatgttgccggcgccaccgggagctacaacaacaaccgtcgtggtgagaatctcgcgctacagatcgcgcggcgagcattgataaagaagaaaaaaaccacgtgggtcccacaccgatggaagctcagaagaaaacccaaacccaaaccaaactcacccgaacccaatcctctctgcttcggtgttcctctcccaccaccaccacgcgttcttccgttcatagcctctcttcggtcaacgaagacttttttccagaagaagaaaagtcctcctccgatacgagcagcaagagaaagaagaagaataataaaccaattagacttagacccggttcgatccggttctcgttggctggaccggttcttgggttcttcaccgcgtgcacgttcttctcctacttcctctacctcggttcacgcgccgccgcggcaacctccgagaacgtgttggcggtgctgtgttcctcgcggcgacgctctattttctgaaccggaacaagtcactgatccagcgaactttctcggtcctcaagcacgcgtgggatggaaacctg

SEQ ID NO: 46860 - DNA, 200 bp, Glycine max
  Clone ID: PAT_MRT3847_142316C.1
atgaatgcacgcgcacgcgagcttaagaattgggattggctccacagcgcgactgaatcgggtgtgcattatctcacactacagcagtctcgcttttaaatcagacccatccacgtggtattacaatatccttggccaaaatcgcgggctccacacttactgatagtccacaccatacgattgttcctgaatggattcat

SEQ ID NO: 46861 - DNA, 273 bp, Glycine max
  Clone ID: PAT_MRT3847_142317C.1
agggaacatatacacaaattacatagcctcagtacacacagacatactcattcagaatgactgtttccattgccaagttcgacgcccttgctctatgtttgttccttcacttggccttcaacacaaaacccctcctaacaccagaaccaaagctagtggatgataagcatcggaatccttatcagccaagagtaagatactacgtgtagctacattgggctgatgacagaggcctcacactaggccaaacaaagaacaatacatgccctcatt

SEQ ID NO: 46862 - DNA, 424 bp, Glycine max
  Clone ID: PAT_MRT3847_142318C.1
aacctttgggctgatttatgtgcttgcatggtcgtgagaagaccatagaaggggagcacgagaagaatccggttgagctctcacggagatattgccggtcactctcagtcaacgtcaccgacctagataagaacactaccgacctcagaacccgtaggacttcgcaaaccggctcacccctcgggcatttccccgccatcacaggcctcagccggattgcgacatacgatcaagattacggaccaacagcgtagagccatccctcatagcaccgtccggaacagaaacgctgcgttgatacacatcacgacacttatggctggttgacgcacacccagattgaaccccaacgaggctcccccaacacctatccaaaccacccgcagccgacgccccaaacgccccgaccgcgaagccacccacc

SEQ ID NO: 46863 - DNA, 414 bp, Glycine max
  Clone ID: PAT_MRT3847_142319C.1
ttctactttttctcataatacacgtaacattattattaattactgcttcatttgttacctctcacataatttcttgctgcccaggttattataatatagcacatggcaaacaaagatcttccacttcattaaagttcttcactttaactccctggctccagtttcatcccttttccatcttcacatttgttttctctttttcgcataaaactgctttgcttcttaatttgtcaaaataaaagacggtacttttgtgaacctgaaatgtgataaaaagcgctttttttgcctgttaaaagttatgcccaaacaaactgacaccaacattagagctgcaagtgcaaggtctggtagctttccctgtatgaaatattttacttgaatcctttttttaaaagcaaaggggaatttttt

SEQ ID NO: 46864 - DNA, 310 bp, Glycine max
  Clone ID: PAT_MRT3847_14231C.1
catataactatcatcacatctatcatctctgaacccaaattaccaaatcacctcattactatcacaacatgctttcatagcattctgctccagattacaacaatagatgtttaaaaaaatctacaaaggcattccgctatatcggacaaatcgttcctctaattgtctcataaatagacatttcttctccttttttgatgatgaccttctttgatgttccaatgtattctatcttcctggccaaagtgccttacatctgtcatacatctgcacaatcttattgataaagatattaagggcataacacaac

SEQ ID NO: 46865 - DNA, 1609 bp, Glycine max
  Clone ID: PAT_MRT3847_142320C.1
tttttttttttttttttttttggccacaaagatgtatataatatattacctgggataatgtaacatccagcaagcatgttcatacaagaaagagggggcaatcagaaaacataaacagaaaacataaatactactacaaatgtcaaatctgcttagaactgaaatgtccaatattcattctgatatgctggggacttttatgtccaaaatatctcgataaattaagaggaggggtgggggctaaagaagacaaggatttcttaaaatgagacaaacattatcactcaagaaatttctgaacagaaaatctgacatcaaataccatgctgctatccaacaagctagggagatttcatatcaactttgaagtaaggtcccttccggtactcatggaactattacaaaaagaggcatgtctacactgactggtttcccatcctcagctaatacctcagctattgttcctgactgatcagcctcaatttcattcatcagtttcatagcctcgataatgcaaataacctggcctttcttcactttatctcccaccttgacaaatgcaggttcaccaggtgctggactcctatagaaggttcctgccattggacatttcagtggtgggtgagaagatgtgcttgcttttccgggggaaggcaaggcaggagctgcttttggaggtgcagagctagcaggagcagcttctgctggtagcggcgaagacggagaaggaaaagtggcatagtgcattggtggtggtgctggggctataattggtggaggctgcaatgcttctttttttcttatcatgagctcacagtctgattgcttaagttgaagttccacaatatctctcgaatccacaagttttacaaggtctgaaacttgagacatgaatgcaataattgaagcttcatctgggatagtagtatcagagagttttccattatgcacttggttttcttttgatgaagcaacagtaggtccattgaccgttacaggggcagagttggaattttcaactttagtagccttcagaacagaaaattgcttcctgttaaggcactgaatccttgatgcagcagattcagcagacaaagatccgaatgaaagagaaggcttcaagatcaacccactttgaaatgagaccttttgagaattcaaccccaaagggagagaagacgaagaagaagttgtaggacacttggggcatgggaccgagaaggaggccatttgcaaaaccaaccccacgaaccaaaaaaactagactttccttcttctcttcccaaaggggtgcttgatctgcaaagaatggtgagaatggcaatgtgggtcggtgagaatataagccaaagaggcgttgagatcgaagagagtgtgcgtgtgaggaatctgagaagacaccgaaaaagggtaaaaaaacgcaatgagggtgaatggagaatacaaagaagaattggaacacagtggtttggttttagacttttagtttagatttttacaagtgtggcttcgatgattacgatgcaagtggtgcattaaccatcaatgtgacacagttttaactaacttgcaacaaacaacaacaaaaaatgcatgtttttatggcttg

SEQ ID NO: 46866 - DNA, 241 bp, Glycine max
  unsure (1)..(241): unsure at all n locations
  Clone ID: PAT_MRT3847_142321C.1
ctttgttgngaggctcaccaatttttttttggtgcncgggatgtttcttggntngaagctcttggctgtccgggttttcaagcctgccctggcgatcatccactcgctccctgccctgnacccnnttcaggtcattgtcggtgccgtcctccttngcggcccccgtgntgntgcccctcgcnttggttctgctggcgtggtgaggcgccaggctggtgctttctctccccttcgtcgtgtt

SEQ ID NO: 46867 - DNA, 215 bp, Glycine max
  Clone ID: PAT_MRT3847_142322C.1
ccgggacgacccacgcccccggtttgcgattactaaacgacgagagcaccgacaggcaaaggagaaaagacaaggcgggaaacggcccaagcaggacgagggccaggaaggtgaggcacgtgcagccaaaaaggagggagagaccagagccaagggcccagcggggaaagaagagaaagccgggcggaccccagacagcaggaagcaagggaaga

SEQ ID NO: 46868 - DNA, 848 bp, Glycine max
  Clone ID: PAT_MRT3847_142323C.1
ccacgcgtccggactgattgcgctgcgctagaatacatagattcggctcttcccttcaccaaacaggtgacgcacgacaagacaaacagatcataaaatattgtatttgtattttggtactaatccagttcctcgtgggaaacttgaagatgatgatgatcatccacaacaaacaaaacctctaatttgatttttcggtttcattcgtatgtattgatggacccggagcagacgttcatacgcgtgcaggagaggttttcgcagatgctgactcccaaagtcagagttgctttggagtatctctacctattcatcgccataaccttgttctgcattctcgttgttatgcatgccaattacgttcaacagcctggatgttcaagtgagctatctggagtcgtgacatcagaagcccaacttattcagattaagataaccagtgccggcctgtggtctcataatgattctgaatcaaacagaatagatccccctgaaaccaaaattgtaaaagataaaatggagatttctgatgtcagtggagataaattgacatttttggcttccaagctttgggggaactggatcggttcaggtgctaggagaggaaaattggtattgaagttttggaaaactcagactgagtttcttgaacatcaagctgaaacctctacaagtaatcaaaacaccaggtctgtgggtgaggatgctgtcatcaaaattgataaagaggacccaccaaaaagttttactttatcagccaaagagacattaaaagcagcaattatacatttttgtaaaaaagtggtattaggcgcattctcatttcatttggaggggcacaccatgca

SEQ ID NO: 46869 - DNA, 739 bp, Glycine max
  Clone ID: PAT_MRT3847_142324C.1
gacgacaacagataataaaatattgattttgactgtactttatcttggtactaatccaattcctcgagggaaacgtgaagatgatcatccacaaccacagcatcatttccaaacaaaaccaaatttgatttcccgtttcattggtattgatggatccggagcagactttcatacgcgtgcaggagaggttttctcagatgctgacgcccaaagtcagagttgctttggagtatctctacctgttcatcgccataaccttattctgcattctcgttgttatgcacgccaattacgttcaacagcctgggtgttcaagtgagctatccggagtagtgacatcagaagcccaacttattcagattaagataaccagtgccggcctgtggtctcataatgattctgaatcaaacagaatagatccccctgaaacagaaattgtaaaagacaaaatggagatttctgatgtcagtggagataaattgccatttttggcttccaagctttggtggaactggattggttcaggtgctaggagaggaaaattggtattcaagttttggaaaactgacactgagtttcttgaacatcaagctgaaacctctacaagtaatcaaaacaccaggccagtgggtgaagatgctgtcatcaaaattgataaagaggacccaccaaaaagttttactttatcagccaaagagacattaaaagcagcaattatacattttggtaaaaagtggta

SEQ ID NO: 46870 - DNA, 477 bp, Glycine max
  Clone ID: PAT_MRT3847_142325C.1
atttcttgttttttactgcacagcgcacgaaattcgagcatattggtattccatctcaacactacttattcataccttattatttttagcaaccatatcttgtactaaacgctcgcttactccccaacaaaaccattataactagttgcgctaccctggctaaatgagcgttgcccaaggttacaaggggcccaccttcaaatacaaaccactgtaatgcaagaggcgctaactcgccggccctgaccggaaaagacttaacgcctaactgtgatcttccaacctaattccccacaaagcaagcacccttctgggacgccaccctacgttcttaagcccacaccccccaacccctgatttggcctgcgccatcaaggcctgggcgcaaattatacacgcgggacctttgggcttgtacttccctaggcccacactcggatttaggtgaaccatgagaggacgtgattgtaacccacg

SEQ ID NO: 46871 - DNA, 1699 bp, Glycine max
  Clone ID: PAT_MRT3847_142326C.1
gaaaaaacacattgaaaagccctctctcccaaaaatttggaaccctaatatgcaaattaacttatcatcaaggctagtacagatacaaagtcctggactcaatcccatcttcaattcccatcttagctacttctcaaaccctcttatcatcacaagtcacagctgcaaagaaagtactagtaaccattctctctctctccttccacgcaataatcaataatcaatcaacctttatgatacaaaaatccccaatccccaaccgttaatttttcaattttttatttttattttttggtttttcttctaatggcgacggatgcaagggcgaagttccaaaacccggaattccggcccgatttccacgcggacttaacggtgtcaactcacgacggcctccacttctggcagttcatgatcgccggatccatcgcgggctgcgtcgagcacatggccatgttccccgttgacaccgtcaagacccgcatgcaagccataggctcctgccccgtcaaatccgtaacggtccgtcacgccctcaagtccattctccaatcggagggcccgtcggccctctaccgtggcatcggtgctatgggcctcggcgccgggcccgcccacgccgtctacttctccgtctacgagacctgcaagaagaaattctccgagggcagccccagcaacgccgcggcgcacgctgcgttccccgtctgcgccaccgtggccagtgacgcggtgcccactccgatggacatggtgacgccttggctgcagctggggagaggggcacgagtgaccgcgggtttcgcgcgatcattgggtaccatagtaccaaacttttcatatcaccaccgttccgagcaatacacagtactccgctcaaccccacgacacgtaccaccccgagccactaccccacccgtaggcccgacgagagactgagtatgcaagcaactgctagggccactgctggggctgtggctgctcctgttaccaagctacttgatgttctccacccttaattgccgtctaaacgtcactgcggtttcgagatgtttaagattgtgatagattgaggactggttccattggcgaagttaataaaagattagttacaaaagactgatagcgagggtggattcgcagggggcttctttcatgccccttccgtggcccttcgcctgtctatatatgaagttcgaaagtcgtttgtccaagctttcaaccagctgaaaatcagcggcactgttaccgaaacaaaacagtttgaatatacataattcttcggattcgatatagatgattctgtatagatgattctgtctgtcaaaattgataaaatgctacaaacgggggtgtgagcaagcaagccttttcaagttctgcgttctaaccccaaataaatatacagaaagcatcggtttaactacgactggagaaattgtttcttgtacacattgtcagttttacttatgatttttcccccgctttagctttttgctagtttcatttagacagaacattatcccatggaaacaccactacgccacatgaaatttttgccatagtttcatgcagttgtaagttttaattacgttaaagattattttgatattctgaaatttaagagatttcatttcctggccttcctggcttaaaaaaaaaaaaaaaaaaaaaaaaaaaaaaaaaaaaaaaaaaaaaa

SEQ ID NO: 46872 - DNA, 512 bp, Glycine max
  unsure (1)..(512): unsure at all n locations
  Clone ID: PAT_MRT3847_142327C.1
ccgaattcggcacgaggggctttgtctatcgcaacaacctctcctctcacagtgataaatttctttctcctcgtagcaacatctctcggctgaatatctccattggaatcttctattcggttagagcttccatgatctgttttccgttaaggctagatagttcatttcatcgcattttgcttggttagaaatggagaactaaagttcaatttctcaacattcgaaggtctaaagacacgcgggagaagttgcagattgggatgacttaaccaatttatatgttccttcaaaatggaaagcatttgtttcaaaggaagaaatctgtcacactggataatctctctggagataagtgatgttcgaacaagctttgacatgtttactcctaagaacaagggaatgcagaatatcaaagataagagtctntataccttctgcttgttggacttgagtttcaatcttctccatcagaccagattccttccatattgagatagctntgtcacagccaa

SEQ ID NO: 46873 - DNA, 228 bp, Glycine max
  unsure (1)..(228): unsure at all n locations
  Clone ID: PAT_MRT3847_142328C.1
atccattcatcaaaacatattaataccttacaccaaaaaatnaacccgccctttaacaaatctccacaccaacantacacataaatacttccataacattcaaaatacactttatatatccaaaacaaaacccattatgcttcatcatctaatacatcattacttatctcttaacacactttattatccaacatacttaattccaaacccactatactaccctattaa

SEQ ID NO: 46874 - DNA, 340 bp, Glycine max
  Clone ID: PAT_MRT3847_142329C.1
cccacgcgtccgcccacgcgtgcgactctgaagtaagggtatttgtttttcttttttcttattttggatattacgtggggaactcctgaacagaagcctgggtctttggggagtgaaagcaggtggggcgctggtgacaggaaacacagctgtgggtggaggggagaagaggctgagtgagcttgggtgcgggcaggagctgggaagagaaatgacgactgggtgtgtgggctgggggggtggccatggaggtggggcagagtgggggccgtggtgtggatggggctgggctggggtggggaccgtgggcggggtgggtggggtaggggctggggggtgt

SEQ ID NO: 46875 - DNA, 287 bp, Glycine max
  Clone ID: PAT_MRT3847_14232C.1
ccggagtaatacattaagtttttgatttaaaatgaaagatgcctttttaagggtgggcccgggggaagagctttgtcacttaaaaaaaaaaaaaaacagaaaacaaacaaaacatgggtaaaacaaaaaaaaaaaaataaaaaaaagggcgaaccgcctcgaggagcaaacccaaaaaacgcgggccggaaacgggaagccttttaaaaggcgaaaccaaaaacgaaacaaggggccggtgttatgaaacgaaaaaactggaaaccgggggaaattggcaacccgaa

SEQ ID NO: 46876 - DNA, 405 bp, Glycine max
  Clone ID: PAT_MRT3847_142330C.1
cgacatgtgatgaaagggaaagactacttgaaaacacaggcctattggttcaaagctagaaccatgctcactgcttgcagggcgcccatcaagcctacagttaaattgactgaaggtaatggaatcagtggcggacgaacacttttctgaatcatgccactgatgttcgtatacagcctctcaaccaacttctttttggagaattcggccacaactctatacctgcccgacttgcccatctctttcagccgtgcctcaccttggccatgttcgagcgcattgcgcatgacctcggtccaatactgtaccttggtgacgtctggcacccaacctgtctggccgcttatgactgtttcagtgggtgcaccttcattagcagctaacaccggtgcgcctaccaacatg

SEQ ID NO: 46877 - DNA, 514 bp, Glycine max
  Clone ID: PAT_MRT3847_142331C.1
atctaagggggaaaaaaaaaaaaaaatgcttttttgattgaaaatcccttaatttggaagggataataataataataatgattgggggggatagggacaaattttgctaacattttggacacaaattctttcccgcaaaaaaacggggaaggggattgattgctctaatccccggtcaaaaagatcccccttgaaatcaagcctcgaaggcccccatcaatttggtcaacttcttgggggtaattctctgggcgaaaaaactcttcccggagtcatcactttgctgcaagggggaaaaggcccccggcgttaacttgggggcgaactgaacggggtcgtcgggggggttgataatgggattgaaacacaaataacgaccgtgggaggagacatcctcgtaaacccaaatgggggcgttgaccaagaagcccaaattaagggtgacaaacaccccatcctcgtacatttttgggggtccttttatgtaagggtgtttgacggaaaaaacatgccc

SEQ ID NO: 46878 - DNA, 464 bp, Glycine max
  Clone ID: PAT_MRT3847_142332C.1
ctcgtcttttgggcaccattcctcagtccatttcacagcacactgtctggaatcaaatggctacagtgcgaacaccatatgattttgactctagcaacagagttgtgtcagcattctattgatcttctcggtggaggaatcttagtggacaaactggagattggatcacacttatacacaactctccaatcagcaacttgttgagagatgctgcctggaagaaatgctgtgtaatcgtcaagattgtgatgtccgggaatgcagcagtccaaggagtgattgggcctcactggtacatgtgtgtttaacaaacagcaacagtacagagcattttgatgcctgtaagtgggcaaaatcagggccacattcctgcgaattgatcttcccaatagaggtatgtgcgccgaataatggatctgaaatgtcgagatctgactgggcaaatcaaacttcatggcatttga

SEQ ID NO: 46879 - DNA, 327 bp, Glycine max
  Clone ID: PAT_MRT3847_142334C.1
attcacgcgaagatagtatacaccttgatcaggcctgatggaaccaggaaggcctatgtcaggttgtcacctgattatcacgccttgtatgcggtcaacaagattggaattatctaaactaatatatggtcttaccaaagtagattcgtgtttagatggtagtttgctatggagtgtagaggggagacatttgaagcaacattaagttatttaaaaatgctcggttgggtatctgctgtattctagatcaatcggaattatatttactcatgttacattaccaaaaggacatctgaaggccacaaaccctatatgggactcgttgat

SEQ ID NO: 46880 - DNA, 177 bp, Glycine max
  Clone ID: PAT_MRT3847_142335C.1
tgggctcgtagagcatatcttccgactcaaagcttattgcctctataggatattcctttcatacttcctctatcttgtatactaaatctatctatttgctgattatacctgatggacgctattaaatcccatatatattacccaaccttacatgacattcttaactatcacgactct

SEQ ID NO: 46881 - DNA, 204 bp, Glycine max
  Clone ID: PAT_MRT3847_142336C.1
ttttcagcccggctgctttattttttttaagaaacacatagatttatcgaaattggagcatccatcactaaggtcagcatgacgctagggattcgggagaaggtaacctatgcccctcgccctcaaaaagaaggtcacgaaactacaccccttaggagacaagacggccctcactgagtcgaaaaaaatgagcctgcaaaaacc

SEQ ID NO: 46882 - DNA, 571 bp, Glycine max
  Clone ID: PAT_MRT3847_142337C.1
cggacgcgtggggcacaacaacacaccatcaacaaaaatgatgcgtctaagctcgtattttgtcgtagccattgctcttctcttttcatttacaccttcttcgtcagcaaatactcatgaaaactttgttcaatgtctttacaattatccccataataacaatgtcacctcaatctccaacgtcgtttacacccaagccaactcttcatactcctctatacttgacttttccattcaaaaccttaggttctccaacgcaagctcaaaaccccttgtgattgtgacacctctcactgtttcccacattcaagccaccataatctgttcccaacgctatggcatgcagattcgaacccgaagtggaggccacgattacgagggtctctcctacgttgccaaggatccatttgtcgtccttgacctcataaaccttcgaaaaatcgaagtggacgcagaaaacagcactgcatgggttctagctggtgcaaccattggtgaactttactacagcattagccagaaaagcaaaacactagggtttccagcaagtgtgtgcccccctgtgggaact

SEQ ID NO: 46883 - DNA, 206 bp, Glycine max
  Clone ID: PAT_MRT3847_142338C.1
cttaagtgaagaattgggtcttagttaacgtgttgattaaatagtgattttggtgatagaaaccttaaaacaatttaatgtgatgataaattacaagcacatgtgagtagtgtggtcacagctatcatggtctctcgactctgctttctccacaatgttaatagtattatgatagtgatcgttgccgtgaatggtaatttcaagtt

SEQ ID NO: 46884 - DNA, 665 bp, Glycine max
  unsure (1)..(665): unsure at all n locations
  Clone ID: PAT_MRT3847_142339C.1
cctnanntaaccaactttctcaaacgatnngaattccttaaaaaacttttccccgccccancgtnntaataaatcctcgtttctccctcccccccnttncccccttttttttttttttccacgaacccttcntttggggggggggacnttnnancaaatcacctttccccaacccctccnnngacccgcttccccccccaaccgtccctctccccttnaaacanacccggacggtcctcgntggccccctctacatcccccgganatgcccctgttccccccccccctttctcccccnccctttcccccccccctttcnnnttttcgcaccccttctccccntntncccnncttctcccccccccccccnncccttcctccttttccccctcccccntcnntcccccccctttcccctccctcccccttctccccccgnnttccctccccctcccccttccccccccntcccncctccccccntttccccccgccccccccccctttcnncccctttttccccttnccctgcnttccccctcccccccnanngccctccccacctcgttgccccccgtttctcccccggccataccccccccctccgaatctccttttccccctaccccccctttccctccccgcctccncccttccccccttcc

SEQ ID NO: 46885 - DNA, 344 bp, Glycine max
  Clone ID: PAT_MRT3847_14233C.1
cgggccgaccgacgcgtccggtccaggcaagccctactcaaccaccacacttacttctcgttcacgctacccctttctgcggttgttttacctttcaagttttaaaggtctaaagatggcagagacatttctatttacctcatagtctgtgaactatgtacaccctgactagcttctcgaccaaatttccgatgctgtcctcgacgcttgcctcgtgcatgtctcatacatgtatgtatcctgtgaatctttcacaattatctactttgtttttgtcttttttgtattttttacatctttcttactatttcttattatattaatgtatttttatcttatttatt

SEQ ID NO: 46886 - DNA, 202 bp, Glycine max
  Clone ID: PAT_MRT3847_142340C.1
aattcggctcgagggtatgtttatttattttgacattcccaatcggaatttccacacttttctttatatacattgggggtttgttatatcatggccaaggaattccttaatgctaatgaaataatttcgacatactcaggtgatttgtccactttgtgggactgatcaagacgttcaacaaaactgtataaatataggtgtt

SEQ ID NO: 46887 - DNA, 389 bp, Glycine max
  Clone ID: PAT_MRT3847_142341C.1
tgcggtccggtccggtattccttggcttcccacgcgttcatcatgacctggggccacacgtaactcagcgggtctgctttagtgactgctcgcagaccgccctatggaaagagggtgcctacggcgccacccactcccatgggcggtgcccagcctgtaccgccgtctgtgttaagatcgaattcgggaatgctaggagctcaagggggtcccatgccggcacagttgggtctgccttgagtcgattaaccacgcactcagttcaacaacatgcatatcctaggacacatgcccaatgtgacttccatactgcatcagtctttgccacaaggagctccgaatcccgggctctctgtcctggaaacagccagcgaggagcaattgattct

SEQ ID NO: 46888 - DNA, 127 bp, Glycine max
  unsure (1)..(127): unsure at all n locations
  Clone ID: PAT_MRT3847_142342C.1
gatggttctcaagtcactggttcntcgcngcgcgtcactagttctccgatctggatttgagggtgnctgtttgggtgggttaagattgctgngntggagttggnttggcaagtgaaggatgganttt

SEQ ID NO: 46889 - DNA, 532 bp, Glycine max
  Clone ID: PAT_MRT3847_142343C.1
tttttttttttttttttttttttttttttttttttgtactctttttttttctttttttttttttttgggacgcacgggggggcccaccggggaaccccgggccggacccgggggcgaacccggaaacccgggaccgagcccgggagaccccggggtacccctgaggagagccgaatccaaactggggggaaacccggtaaagttttccccaggagaaaagcgggacgcctaaaaagtcaacccaggggggccaaccggagagaacaaaaggcaaatcaatgggggggccaaaagagtggccccaatccaaataaagaaaccctgccctaccacgccccattaaaaagacgggaaaacgcgcgggcagaggggattaaggaatgggccccccgggggggaaagggggtcaccattaagaccgccaagggggaatttccttttcaccaacgggacgggaaaaaggtgaaggacccggaccacccgggcctgaaagaggaggaaaaaagcccccccgctggtgggcccccgcggg

SEQ ID NO: 46890 - DNA, 1885 bp, Glycine max
  Clone ID: PAT_MRT3847_142344C.1
tcgacgcggctcgagtttctttcatatactaccagtcacatttcttcacacaaaaaagcagagtctgcagcactcaaacgaaacgacagtgaccaaaacagaaaaacgacattaccgagagagcgacgatgccggaagaaacgacgtcgatcgactacgtgatggaggctgcatctgggccccacttctccggcctgagacttgacggccgggtcccgtcctccgccaccgccgcgtcctcctctcccgattcaaccctaaccctcgattcccttcccaatcaacccttcgtcataggagtttctggaggtactgcctcgggcaaaaccaccgtctgcgatatgatcattcagcaactccacgatcaccgcgttgtcctcgtaaatcaggactcgttttatcgcgggttgaatcctgaagagttggaacgtgttcacgagtacaatttcgaccaccctgatgcttttgacacggagcagttgttagagtgcacgatgaagctcatcagtggccagggagtgcatgttcccatttatgacttcaagaagcaccaacgctcttccgatagttttcgccaggtgaatgcctctgatgtgattatattggaggggattcttgtgttccatgatcagcgcgtgcgggatctgatgaacatgaagatctttgttgacacagatgctgatgtgagacttgctcgtagaattaggcgtgacacaatggagagaggcagggatataaactctgttcttgaacagtatgcaaaatttgttaagcctgcatttgatgattttgttctaccatcaaaaaagtacgctgacgtgatcattcctcgtggaggtgataatcatgttgccattgatttgattgtgcaacatatccgtacaaagctcggccaacatgatctatgcaaaatatatccaaatgcctatgttattcagtctacattccagatcaggggaatgcatacgttgattcgtgaccgagacatatcaaagcatgattttgtattttattcagatcgacttatacgcctggttgttgagcatggtctaggtcatctgcctttcaccgaaaagcaagtggttactcccacaggatctgtttatactggagttgatttctgcaaaaaattgtgtggtgtttcaattgttcgaagtggtgagagcatggaaaatgcacttcgtgcatgttgcaaaggcattaaaattggtaaaattctgattcaccgggatggagacaatggaaaacagcttatatatgagaagctccccaaggatatttcagaacggcatgtcttgcttcttgaccctgtcctggccacaggtaactctgccaaccaagcaattgaattactcattcagaaaggagtaccagaaagtcacattatattcttgaatctcatttctgctcctgagggaatccactgcgtgtgtaaaaggtttccatcattgaagattgtcacgtctgagattgacattgaaataaacgaagagtatcgtgttatcccaggattgggggaatttggtgatcgatactttggtaccgatgattgatcctgctgtttgtgtgtcttaaggtgcagacacctcttgggtagcagctgccttgattaagaatatgagaatcagctaactacattgtattcagatattaaggattctgcaaaaatcagcatgattgtgatttgaggcaggccgattacaattatcaatgcaaacctactccaaggttgatatgcacgaataaatattaaatgtagagatcattcttagcaagatgatgatacctgacacaattctaccaatcttgttctccaaagttggttatgtggaaaatatttcctagttatcaatgcaatctataaccaaccagatcaatcgtcaat

SEQ ID NO: 46891 - DNA, 508 bp, Glycine max
  Clone ID: PAT_MRT3847_142345C.1
ggaaggtttcccgtcatcactgtatgacgtcctccttctttgggggggggggggggacaaaggtgtaagtaccaaaggcggtatagagaacctaaagaaatgatattaggggttctaggcacaccaccagaccaaacagacatgaaaaaccaaggcggggggagaaagaataggacaaacgcaaggaaagggcacgagaggcaatagaagtcgttaccgcgaccccgccgaaactatggtatgggataagtcgttcagtgatgataaggcatggcctaggccctaattgttgtctgcagggggggagtatacccaacagtaaaggacacttggaaaagggcttagataaacacagcgtgctaccgctgccaaaaccggaaacaagtgaaggcaattaaccaggtgttgacgaatcggggacggataagcaaggtacgacagtaaccaaggtgcaaacggtggtaggtgtgggaataattgggtgcatgcgcggtgggcctaatgaaat

SEQ ID NO: 46892 - DNA, 1562 bp, Glycine max
  Clone ID: PAT_MRT3847_142346C.1
gaatttaggttgctctatgctaagaatgatctgtacatttaatatttattcgtgcatatcaaccttggagtaggtttgcattgataattgtaatcggcctgcctcaaatcacaatcatgctgatttttgcagactgttcagtcctcttttaaatggcactttgcactttgcattatgtttttatccttttcttattttgaactctttaatgagtttatttggtgttggtacttggttattgtatgaactcatgaaacttttttaacttttttagtttatttgaatgcaatccattgtttttttcaatttcaatgagtttatttggtgttggtacttggttatttataattatacatatatgtatatttttttttgtccaccatgacatcctccattttccgctacgccatccgccatatttttatggcggatttttggctttccgtcatgaaccgccatccgccattaacaacattggattattctcagtttctaactcctgtgcaactttgaaatgtatccaaaaattcatatacaacaacaaaagccttatcctactagatgaggtcagctatctacatggatcacacattataatttggcatgtatccaattcaaataaaaacatgaataatctccatgtgatgttttatcaaaatacttctttaagttctttctaggtcataaatcataatgaaaccaggtgctttagttacattaaaataataattcctacaattcaaaaaatgtaaaacttgaggataattttttcttttcaattccaccaataataaaaaattataaagtaaagggtttgtaaaggttcattaagtaaggtaatccagtctatttgtgttcagttgtaaggatgtgccactggatcttccccaaattttaaatcataaaaggtggaaaataaaataaaataataaaattggcaaactaagtttaaagatacctggaatgtagactgaataacataggcatttggatatattttgcatagatcatgttggccgagctttgtacggatatgttgcacaatcaaatcaatggcaacatgattatcacctccacgaggaatgatcacgtcagcgtacttttttgatggtagaacaaaatcatcaaatgcaggcttaacaaattttgcatactgttcaagaacagagtttatatccctgcctctctccattgtgtcacgcctaattctacgagcaagtctcacatcagcatctgtgtcaacaaagatcttcatgttcatcagatcccgcacgcgctgatcgtggaacacaagaatcccctccaatataatcacatcagaagcattcacctgaaccaaaagcaccacatcaactaaaaagaaatcccagtaagtggtaacaaaacgacattgtttagtttaaacctggcgaaaactatcggaagagcgttggtgcttcttgaagtcgtaaatgggaacatgcacgccctggccactgataagcttcatcgtgcactctaacaactgctccgtgtcaaaagcatcagggtggtcgaaattgtactcgtgaacgcgttccaac

SEQ ID NO: 46893 - DNA, 220 bp, Glycine max
  Clone ID: PAT_MRT3847_142347C.1
gagaggaattttgcccgggcagctaggggcccttcacataaaatcttattttattgttttataccaaggaaaagtaaccttagttattaccaccactaaccttgatcttgtgaaaagaaattataaagaaccttcttaaataattgggaaacaaaaacaaaggatggaatctttttaagattaattgtttcaactcttgaggtgcttttaccctttaaaa

SEQ ID NO: 46894 - DNA, 262 bp, Glycine max
  Clone ID: PAT_MRT3847_142348C.1
gactacacgcttcacgatgaacaggaataagagaggccacgtgactgccggccatgggcgaattgggaagcaccagatgcaccctggagggcgctgtaatgccggaggcatgctccaccgccggatgctctttaacaagttccgccctgggttgtttggcaaggtcagaatgcgctgttttcgcaagctcctgagcagattctactctccggtccttatcatctacaagctgtggttcctggtttcgcaagaggtgatggac

SEQ ID NO: 46895 - DNA, 430 bp, Glycine max
  Clone ID: PAT_MRT3847_142349C.1
aaatcataatgggaattgtgttgttagtggttctgacttctttcagctttgaaattcattttttttatctgacaaatgcaattattgcaggatccaacctgttgatgttattgatgttgctgctgcactcacttcactcttgaaggatgatggcactagcatgggaaaaatttatgaactgggtggtccagagatctttactgtgcatgaattggtaaactctttatctctttattgttttgcaatttagaattttatatttcatatcttggcaaaacaagaggttctatttgttggggaaaagttggaagaagaaattgttgaaatgatgtaaaatctgtgttaattgcaggcagacgttatgtttgatacaattcgagaatggcctcgatatgtgaaggtgcctttccccattgcaaaggtgtgttaa

SEQ ID NO: 46896 - DNA, 346 bp, Glycine max
  unsure (1)..(346): unsure at all n locations
  Clone ID: PAT_MRT3847_14234C.1
aggacaaagttaatatagttgaaagtgctggatgaaggnttataatttgttatgagnatgggttttggtgaaggtgatgnaaagagagtattgagaatgaaaaatgaatatgttgagggtgtgattgattatgttggtgaggagaagataaagaaattgtgaaagagggaagaggatatttggaggagaaatgaaattaaggaaaaaaagggatatgggatgagantattaaagaaagntgtggatttagagagattgaaggaattggtatgtattgaatttgaaagggagtttgttggtgaaggaattagaagaaatgaaaatgaaatttaaaaaggattggatg

SEQ ID NO: 46897 - DNA, 246 bp, Glycine max
  Clone ID: PAT_MRT3847_142350C.1
gccaatatgtctgagtccacccggaacgtatcgctgactctgcgccattgattcaatcaccactgctccggaccaaagaggaggcgggagtcattgcgcgccgcgcgcactactgtctcatattttagtaagttccggcttcaatctctctgcctaccaagacctcaactaattcggagtggctcgaggacctgcagcaaagcgctcagacgtcattgggatacctatgcacagggagcgcattct

SEQ ID NO: 46898 - DNA, 126 bp, Glycine max
  Clone ID: PAT_MRT3847_142351C.1
gagacgactatagtatctctggtggatatcaaggtgcccccctatgtcatttttggggcagcattcactcggcgacatgttgcataggcaatacctgtgttctccctggaaaaagctccttaagct

SEQ ID NO: 46899 - DNA, 579 bp, Glycine max
  Clone ID: PAT_MRT3847_142352C.1
agactaaatggtaaataatttcttttgtattcaggacaaaagttgaacatacggggttacaccataaaaaatatatgaagaaaaatatagtaaaggaggcaaaagaaccactgcataacacatcataaatgagatattccagaaacataatgattctagctatgacttcttattagccttttttctatttctttctctgccttttcaaacttgaaccaccatcaagaggaggaggaccagcagaacaatattgtagacacgcatccgaaaacttggtaggcgaaaattcttgttttgaatcttttgatatctgaaattctttacacctggaaaccttcctagaagacttaagaaattcaacttcagtttcatcattattatcagccacggaacctgcaaattcctccttgtgacccaatccaacagagaggtatgtcctgtctttgctgtcggtgtcacagcactaggaaagataccttgcaagccctttcctttgatttcatttaaaagtttagattttgaattaatcatctcaacgagaattgattctgagtcagaattacatgcatttaatactta

SEQ ID NO: 46900 - DNA, 293 bp, Glycine max
  Clone ID: PAT_MRT3847_142353C.1
cttaatgtcttgggtggcataaaagtcttcatggataaacaagtaggcactgttggccaaaggagagaacaaattctttgtcagataaagggggttcgacacctacatcattcaaattatgaaaaagaaaatgtggactctactacaatcttcatgagacgtgagcgcatgacaacaggaatctaatttgaaacacaatttccccagtttgaggatgcctagggggcgggaaaaccaaaaatgagctaaagatgaggaattgtggctctccgaagcacaacaagggtttggaa

SEQ ID NO: 46901 - DNA, 1038 bp, Glycine max
  Clone ID: PAT_MRT3847_142354C.1
aaccccggtcatggaagggaagtgagaagtggaccgacgcgcccagtttgagcgccgccgttaatggcggaattccggtgactcgccgtcgctggtgttagaaagtggttttgattacatgagagaagaaagaagaagatcatggatagaaccagagaatccagaagatcatccatgaccacctccaccaacggatttcccaaacgcagacatcgaactattgctctcagagactcttccgaggaaggagctgtggaattgagagaaggtacgagtaagagaggaaggaatcgagatagagatagggattcggcgaacaggagtaagaggaggataggctctcactcgcaaagcaccgaagagagcggcggaaacgagcaagatgacgacgttttagacgttggtggttctaagatccggtctcttaataatacgacgacatcggtcgcctccgatcaaatccatcgccggagcttcacgtcagcgaaaccgccggcggtcaagataacggaggagatgatcggcgtgagcgttccgaggaaggctcgttcagcctctgcgaaaaggtcttacgaaaggtggatttccgcaagcagcggcggggaggagctgaatttccggcagcgatcgaattcccccggaggacagagtgttgaaccgacctcaccttcttcttcgaatggttctctcagcgggcggatgaaagagattgaacctgtttctaagacatccaaatcgtcttcatcagacatcgagattgagatagctgagcttttgtacgggttgaagacttcgaagaaccacgagtcttctataaagctagaagcaagcgtcagtccctctgatgatgctgagaagaagaaaatggaagacaacaacaattcttccaccctgttttcaaataattcaactgaagagttaagcaggattcagattgagcaacctgctgatgtggactatcatgttggtccatcaatagaggcccccaaagagaacattgggggtgctttagccgatgggagaacgggttcccctact

SEQ ID NO: 46902 - DNA, 142 bp, Glycine max
  Clone ID: PAT_MRT3847_142355C.1
gtggttcccttcaaataaggaggttctgttcgtaatttgacaccaacgaatacgaagaggtagaactaagaactaagaagaaaaaaagttggtcctgaatatcaatattaagcagtgtgagggcattggtggtgtatagagc

SEQ ID NO: 46903 - DNA, 253 bp, Glycine max
  unsure (1)..(253): unsure at all n locations
  Clone ID: PAT_MRT3847_142356C.1
acctacctctttttcttctctctcaacaacttcnncttnttcctcctcnatccatgtctnacttcaagggcaagtnccatgangagcttattgccaatgctgcgtacattggcnctcctggaaagggtattctngcngctgatgagtcancagggncanttngcaancgtntgnccacaatnagtgnagagncacatngnatccaacaggcgagctcttanggagtgctnttcactgctcctggtagtgnnca

SEQ ID NO: 46904 - DNA, 440 bp, Glycine max
  Clone ID: PAT_MRT3847_142357C.1
gggttgttgaaaggggggggtttattaagagaattttttggggggggggggggtgcctgccgaaggaaggggagagctaacagagcgggagggggcagctaatagggagggaacggaggggccgcagggggggcccgggattgtggggcgccaacggttgccgggggggaagggaaacccggggggggaggaaacggaaaagcccggggaaaagaaaaaccccttggacatacggcggacaggggggggctggacccagaaacggcaccaccggcctgtccccgctttttgaaagcgggggattcttcaggccgcctatccttttttggggggggcggcgtgcccacaaacttggggggggatgcccccttggaggggggggcgggtcctaccggcgcccgcgggggagggcccccctggaaaagggcccccgtgggctc

SEQ ID NO: 46905 - DNA, 261 bp, Glycine max
  Clone ID: PAT_MRT3847_142359C.1
aatcggctcgagacggctgcagaagacgacagaaatggctaaaataaactatacttgtttgttgtccatgataggattctttctgattcccttttaaccttgttgagacttctaatatcctcaggtttttttggggggagaattggggggaaaaatggttatatgaatccgtgtttgtgccttgatcttatttttattatctttgtttaatggttctgagtttctgttcttaccgtgatttttacacttttccaattatat

SEQ ID NO: 46906 - DNA, 490 bp, Glycine max
  Clone ID: PAT_MRT3847_14235C.1
ttgagtggtaatattcaatgacttttttttcctgtggacctgctaatgcttcttaaacctactagtacaacttcaacagtcaaacacaggtatctcaactggatacaaatggattctatctgaccatgcattccttacattaggatcaatatcagagaggcacttccagactgcactgttacacttgaatccacttccaaaggcaatttgccagaccctgtctcctttctttactcttccttttgcctccaaatagcagagctcataccacacagaagaagatgaagtattgccaaatctgtataatgccatccttgaggcttcaccgtctttcttgtgcagcttcagactctcctctatggcatctacgactgacttaccaccagcatgtatgcagaaatgctcaaaagccttcctgaaatttggaacatacatttccttgttcccccttgcccacattttcctggaaatcactgaccatccatagcgc

SEQ ID NO: 46907 - DNA, 431 bp, Glycine max
  unsure (1)..(431): unsure at all n locations
  Clone ID: PAT_MRT3847_142360C.1
tctgtccagttacaacataccgttggtggctgatgttcattttgctccctctgttgctttgcgggtagctgaatgctttgataagattcgtgtaaactctggaaattttggtaagcatctcttcttaattcattagtcttatgtttttttctatcatttttttttcatgtgttggctttcattctgattccaagatgttggtcttctacagctgatagacgggctcaatttgaaacattagagtacacagaagaagactatcagaaagaacttgagcatattgaaaaggttaaatcatccatctgttagttttataactcaaatttcagtgaagagcatgctgtatgctaatttatcagtacttcttttgaggtccctcttctgtcatacacatatacatncctncttagtccttactgaagatgtgggaa

SEQ ID NO: 46908 - DNA, 335 bp, Glycine max
  Clone ID: PAT_MRT3847_142361C.1
gtgaaatacggccatcacttgttgaagcaattgaacccaagactatgcttcttcacgatggtgtttagatgaacttgtgacaatacttgagtgcagagagaaatatggacagattataattcctgttttctactatgtgaagcccacagatgtacgacatcaaatggggagttatgaaaatgcatttgctgagcatgaaaaagaatataagaccaaggtggacaattggagataggctttgaaaaaatctgttgatttatcaggaattgtaccatcaacatttcactaagctctttttttccaataaatattcaacattcttaaaaaaaaaaaaa

SEQ ID NO: 46909 - DNA, 359 bp, Glycine max
  Clone ID: PAT_MRT3847_142362C.1
gtccatctcaagaaaaattatacggggatttccgctgagattaagcataccaacaagccttacatctatgcgtcacctccccctccttaccactattagctagcatagctctgtggcgtctgtttatatgtgccacgtttaaatgaacgcgcttgaaaaggaagaagaatcgcttcgcgatgcacgaaagaaaagaattggcagcaaagtttcggcgttttgtcttttataaaaaaaatgttaaatcattataattttctttgatagggatcggttttttgccttttttcttttgattatgaatatcgctgtattttaacagttgtaaagaactgcgccctcgctggatgatcatgtaa

SEQ ID NO: 46910 - DNA, 121 bp, Glycine max
  Clone ID: PAT_MRT3847_142363C.1
attaaccgaagggcttcacacccggaactgtatactttttaaatactctcgaaacacgtccatttcacacttttatgcctcagttattctggcaacctgtattaagacacccctttgatgg

SEQ ID NO: 46911 - DNA, 375 bp, Glycine max
  Clone ID: PAT_MRT3847_142364C.1
aatatggaattgggtcacttttataaaacttaattagcagttagcccatacccgttacactgagggtgaggaataaagacaccgctagctactgtaatgcatactgcacaaattttacttagatgaatgatcagtttctttataagctaaaacaattaggtgttaactttacaaactttctttttactttttttcaaagctaaatactaaatgatttatctaaaagaactcatcatttatttctatttcttcagttattaacagatctataagtctagtctaatactaaagatactttactgaatgctgcatcaggatggctataaatatcatactttgataaaaaattgttgcattgtgtgctcactttggtat

SEQ ID NO: 46912 - DNA, 225 bp, Glycine max
  unsure (1)..(225): unsure at all n locations
  Clone ID: PAT_MRT3847_142365C.1
tcttatccgactcagtcaaccgtaataaacgattagatcttgttgttgtatccgtttaggatgattgttccacaatgcttcatatacatcaccactgatttgtgagcacgataatgtttcggattctggttctgattttcgactctcgtgaagatgttgggttcatgtgcactaattatgngggaaggaagtttgcacgtaggagtctgcggttgatggaagtcg

SEQ ID NO: 46913 - DNA, 158 bp, Glycine max
  Clone ID: PAT_MRT3847_142366C.1
ctgtggcttaatctgctcttggggatgcaacacttattgaagacgctaaccgggaagactatgactttggatgtggagagcaacgttacgaccaaatacgacaaggcgaagatgaacgataaggaaagggtatcagccactcatcaggaaaggatctt

SEQ ID NO: 46914 - DNA, 490 bp, Glycine max
  unsure (1)..(490): unsure at all n locations
  Clone ID: PAT_MRT3847_142367C.1
ccacgcgtccggtcatgacttggttttgcaaatcatttcctatcaaatcaaggattacatgcgtgatcgtggatcaatatgactttttcttgggaatggtttgttttcttgtggggaatgtggctttgagtgttcttggccttttccttttctgtttttgtttagtgtgaggcaaataagtcaccggcgcataggattttggttggcaatcaaagggagaggaccactttaggtcgtggtttcctttcttttcttatttacttggnggcaattttgtattgttcagatattgtctggtccaaagacctttctgtacatttctttttcttccgatgtttgatcgggaattttctttctttttttttgctttttccccctcttatgattgggaattttctttcttttttgctttctctcactctttgattgggaattttctccttttgctttggtttcttttgagggcaaggtttattgtgagttgggactt

SEQ ID NO: 46915 - DNA, 105 bp, Glycine max
  Clone ID: PAT_MRT3847_142368C.1
ctcgtacatcagctcattattctgctcgagctaacactagagcaatggactcgtaagcttactcactaagaaactaaaggtttctaatttatttcgttcaattct

SEQ ID NO: 46916 - DNA, 2289 bp, Glycine max
  unsure (1)..(2289): unsure at all n locations
  Clone ID: PAT_MRT3847_142369C.1
gcgttcnnttgctcgtactgcgaacataagagtaattgggaatgatcagctcgagccgcacaaacttcctctgaagcattccacttccatggccgatccaaactccaatcctaaccactctaacgctcacgtgaaccgttccagacactacaccactcacgtgaccttccgtctcctctgtcacgcgtcgcgcgtgggcgccatcatcggcaagtccggcgtgctcatcaagtcgctccaggaggccaccggcgccaagatacggatcgtggacgcgccgccggactcccctgaccgagtcatcctcgttagcgccccctccgtcaccgaagacggtgagctctccacggcgcaggaggcgctgctcaaggtcttcgaccgggttctcgacgtcgccgccggcaccgaagtcggcgacctcgtggtctcttgccggcttctggccgaaacttcgcaggtcggcgccgtcatcggcaaggccgggaaggtcgtggagaagatcaggatggacaccggatgtaagattagggttttgaatgaaggtttgccggccggcactgctccctccgatgaaatcgatgagatagaaggccagctgacatctgtaaagaaggcactcattgctgtctctcatcggcttcaagattgtcctcctcctgatagaacaaagatgacaggaagcagacattatgaagtggttcagtctgagacattttcagttccacttgagtctttaactaatctgcatatagatcatcatctgcaaaggagctctacattatccactttatccaataggtctaatggcaatgcctctggagctcataaattatcagctgaagttaatagagtctcagccctggatccaaaagcatatcagcaggaagttacctttagaattatttgttccaatgatagggttggtgccgtaattggaaaaggtggcagtattgtaagagctcttcagaacgaatcaggggctattataagtgttggtccttcattagttgagtgcgaggatcgactagttactattactgcttcagagaatcctgaatcaacatattcccctgcacagaaggctgttgtgcttgttttctccaagtctgttgaggctggtgttgagaaggggctagacttgggatcaaaaaaggagccatatgttactgcacgacttgtagtcccatcaaaccaagtgggttgtttgttagggaaaggaggggcaatagtctcagaaatgcggaaagccacaggggctaacataagagtaattgggaatgatcaggttccaatgtgtgtatcagataatgaccaattggtacagatatcaggagtgttttcaaatgttcaagctgcaatacataatgcaactggtagactgcgagatcatctttttgtcagtacgcaaaacagtggtggagcaaggagcctttcctctgttctagctggaggccaaccaactcttgctatttctcatagtctcaatagacattctttgccaggattacaggcaccacagacagtggctgggataaattccagaggcaccaatggtgttagtcggggattgatttctcgaaaaggtggcttagaacttatcagtgggagtaaaactgccattgttactaatacaactgtgcaaattgtggttcctgatgatgttattggctctgtatatggggaaaatggtagcaatctggctcgcctgagacaaatatcaggggctaaggttattgtccacgaacctcgtcctggaacaagtgataggactattatcatatccggtacacccgatgaaactcgagcagcacagagccttctccaagcatttattcttgctggatcatcgtgacaatatcctctcactgatgacccattaattctcaactagtttttaccattttttaaaatcctttttgtcctacctgaaagcatgtacaatataggaaaatatccacaccatttgccattccctgttagtaatcttggtgtctactgtcactctaatgtgtcattgtcactcttatttatttaaatttcagaaaaattctctaacaaaatagattgttgtagacaaaaagttatttacatgtggatgacaataggcatacaagagttgcaatagacattcccttaatggaccggtaaatcaattcacaccataggttgttcgatgggaacgacagtgtacttatttaacaatagtcacttgattcttttgggtaatactgtaatagcaagttaaattcatcagatttagcatttttgttaccagttagttcctttttg

SEQ ID NO: 46917 - DNA, 239 bp, Glycine max
  Clone ID: PAT_MRT3847_14236C.1
ctattatgattcaatttagaactcacaaaccttactttctcgtgtgaagggaacaaaggggtattctatctcgtaaaataccataagacatctgtccgataatctaaaccggtattactgataaacacatagcgaggacgcttgttaatcccacatgcgaagcaactatcctatgatccgcagtccaattaaccacaatactcgagcaacagcttggcactttctatcatcttccacat

SEQ ID NO: 46918 - DNA, 168 bp, Glycine max
  Clone ID: PAT_MRT3847_142370C.1
gacccccccctagggagccatcaaaaggatgaggggctcttaaacaccgctgcctattataccagagggggtgactcttgccatggactaccgttacacatcatcctcttgagaaagtcccaaaataaggccgcacccaacttgacgtttcattgggaaattccaaaa

SEQ ID NO: 46919 - DNA, 175 bp, Glycine max
  Clone ID: PAT_MRT3847_142371C.1
agtgaaagcatgttttatgtgccattttaaaagtccgagaagctgactcattatgcactcattctttgggtcaatttgtttcaaagctacaaaatttcctaagggactttggggcacaaatattttcatgtaggccaatccctctcgatgggtttaatcctccccaaaaattttt

SEQ ID NO: 46920 - DNA, 884 bp, Glycine max
  Clone ID: PAT_MRT3847_142372C.1
ccacgcgtccgcggacgcgtgggtcgacatgtttcacatctgtttggactgtttccggggcacacaattagtgttgagaacactccagacctctgtaaagctgtggaagttagtctaattaaaagaggagatgacggtccagggtggtcaacaacttggaaagcttgactgtgggcacatcttcacaatagtgagcacgcatatcgcatgataaaacacttgattgtcttggtggaacctgatcatggatttggtttggaaggaggacttttcagcaaccttttcacagcacatccccctttccagattgatgcaaactttggtttttcagcagcaattgcagaaatgcttgttcaaagcacaacgaaggacctctacttgcttcccgcattgccacgtgataaatgggcgaatggctgtgtgaaaggattaaaagctcgtggtggggtgacagtcaacatttgctggaaagaaggagatctgcttgaatttgggctttggacagaaaaccagaattccaaagtgagactacattatagaggaaatgtggttttagcaagtttatcacccggcagagtttactcatatgataaccagttgaagtgtgcgaagacatactcccttagtgaagtgaatccttgaatcttttgcaataaatcttctgaagaacatacattgatttttgcaatgtttgatgtagttttgtggaacaagatacatttatcttgtttcctaatgttattcttccatagtcatttagccacggagaatgtaatttgctaatttaatggagaactttttcatggatacatttgttttacgttttgctgtgtaagactcgtgtaatgttattgtcattttgttatggcataaatatgtttttg

SEQ ID NO: 46921 - DNA, 2946 bp, Glycine max
  Clone ID: PAT_MRT3847_142373C.1
gtatcatcacctctcttctgagagatgttagtttgggaggaaaccattccaacttcagcaagagtcaaatcttttcaaactgatgaagatccttcctttgtggagcttttgtttcaatatggtcgatatcttctaatctcttgttcgcgtcctggaacccaggtggcaaacctacaaggtatctggaacaaagatgttgagcctgcatgggatggtgctcctcacttgaacattaatcttcaaatgaattattggccatcccttgcttgcaacctacacgagtgtcaagagcccttatttgatttcaattcctctttgtcagtcattggtaaaaaaactgcaaaggtgaactatgaagcaaatggttgggttgcacatcaagtttctgacatatggggtaaaacatcaccagatcgaggtgaggctgtttgggctttatggccaatgggtggagcttggctttgtacccatttatgggagcattatacttatacaatggacaaagattttcttaaaaataaagcatatcctttgttggaaggatgtacatcatttttgttggattggttgattgaaggccgtggtggattattggaaactaacccatcaacttcaccagagcacatgttcactgcaccagacggaaaaactgctagtgtgagctactcatcaaccatggacatttcaatcataaaagaagttttctctatgatcatttctgctgctgaggttttgggaaggcataatgatactattatcaaaagagtcaccaagtatcagtctaaacttcctccgacaaaagttgctagagatggttccattatggaatgggcagaagattttgtggacccagatgtacatcatcgacatgtttcacacctttttggactgtttccaggacatacaattagtgttgagaaaactccagacctctgtaaagctgtggaagttagtctaattaaaagaggagatgatggtccagggtggtcaacaacttggaaagcttcactgtgggcacatcttcacaatagtgagcacgcatatcgcatgataaaacacttgattgtcttggtggagcctgatcatgaaagggattttgaaggtggactttacagcaacctgttcacagcacatcccccttttcagattgatgcaaactttggtttttctggagcaattgcagaaatgcttgttcaaagcacaacgaaggacctctacttgcttcctgcattgccacgcgacaaatgggcgaatggttgtgtgaaaggattaaaagctcgtggtggggtgacagtcaatatttgctggaaagaaggagatctgcttgaatttggcctttggacagaaaaccagaattcccaacttagactacattatagaggaaatgtggtcttaacaagtttatcgcccggcagagtttactcatataataaccttctgaagtgtgtgaaggcatactcccttaacgaagtgaatccttgaatcttttctataaatcttctgaggaacatgaattgctttttgcaatttgtcatagggtattagggttcaatgttggatgtagtttggtggttcaagatacatttatcttgattcctaagttaattcttccagagtcacatttatagccacggaggatgtaatttactaatttaagggagaactttttcagttgatgcatttgttttaagttttgtggtgtaaaacccgtgtaatattattgtcatttattattcaacttcatacaaatggatcaaccagatgttgaatgtgaaactttattattaatataagggctaatggctgtgtgaaaggagtaaaagctcgtggtggggtggcattctacgtttgctggaaagaaggagatctgcttgaatttgggctttggacagaaaaccagaattccaaagtgagactacattatagaggaaatgtggttttagcaagtttatcacccggcagagtttactcatatgataaccagttgaagtgtgcgaagacatactcccttagtgaagtgaatccttgaatcttttgcaataaatcttctgaagaacatacattgatttttgcaatgtttgatgtagttttgtggaacaagatacatttatcttgtttcctaatgttattcttccatagtcatttagccacggagaatgtaatttgctaatttaatggagaactttttcatggatacatttgttttacgttttgctgtgtaagactcgtgtaatgttattgtcattttgttatggcataaatatgtttttgacattgttcttcaattgacagtttttttttttgatatatcgcatgataaaacacttgattgtcttggtggagcctgatcatgaaagggatttcgaaggaggactttacagcaacctgttcacagcacatccccctttccagattgatgcaaactttggtttttcaggagcagttgcagaaatgcttgttcaaagcacaatgaaggacctgtacttgcttcccgcattgccacacgataaatgggcgaatggttgtgtgaaaggattaaaagctcgtggtggggtgacagtcaacatttgctggaaagaaggagatctgcttgaatttgggctttggacagaaaaccagaattccaaagtgagactacattatagaggaaatgtggtctcagcaagtttatcacccggcagagtttattcatatcgtgaccagttgaagtgtgcgaagacatactcccttagtgaagtgaatccttgaatcttttgcaataaatcttctgaagaacatacattgctttttgcaatgtttgatgtagttttgtggaacaagatacatttatcttgtttcctaatattattcttccagagtcatttagtcaccgagaatgtaatttttactaatttaacggataagttgttttattgaagcatttgttctacggtctgcggtgtacgt

SEQ ID NO: 46922 - DNA, 753 bp, Glycine max
  unsure (1)..(753): unsure at all n locations
  Clone ID: PAT_MRT3847_142374C.1
gtttccggggcacacaattagtgttgagaacactccagacctctgtaaagctgtggaagttagtctaattaaaagaggagatgacggtccagggtggtcaacaacttggaaagcttcactgtgggcacatcttcacaatagtgagcacgcatatcgcatgataaaacacttgattgtcttggtggaacctgatcatggatttggtttggaaggaggacttttcagcaaccttttcacagcacatccccctttccagattgatgcaaactttggaaataggaacctagcctgtgatgagactgttgctttagcattaacaacttggtgacatgctaataattctgaattagcttggctgagaaaaaacattgtttggagtcagtttttcagcagcaattgcagaaatgcttgttcaaagcacaacgaaggacctctacttgcttcccgcattgccacgtgataaatgggcgaatggctgtgtgaaaggattaaaagctcgtggtggggtgacagtcaacatttgctggaaagaaggagatctgcttgaatttgggctttggacagaaaaccagaattccaaagtgagactacattatagaggaaatgtggttttagcaagtttatcacccggcagagtttactcatatgataaccagttngaagtgtgcgaagacatactcccttagtgaagtgaatccttgaatcttttgcaataaatcttctgaagacatacattgatttttggcatgtttg

SEQ ID NO: 46923 - DNA, 161 bp, Glycine max
  Clone ID: PAT_MRT3847_142375C.1
gtgattacatgaatggtgaccttttaaacgccattctgccttttttccggcggagaacacacccttttgtgacgatagaatacacatttccaatggtcaaggatcagccattttgaaagacaggtgagtgcgccaatctttgtcactctgagaagggtgcc

SEQ ID NO: 46924 - DNA, 421 bp, Glycine max
  unsure (1)..(421): unsure at all n locations
  Clone ID: PAT_MRT3847_142376C.1
ggaagaaaagaaaagaaaagaagcagagtggtaaacaaagagaaacaacaaaacccagaatctagagactaataacggctcttgctttgtgaatagcataccatagcaacaacaacaacacagaacacacaaagaaaaaagtacttcccccaaaatcatatattatatattatatgtacatatagatatacatagttttgtgtatattgagattgttgttctctctttcttctatttattcatgtgaaagagagagagagagagagatcttgtgattcttgtcctcctacaatggtcactntgtagcgggactaggtaatctatgcaacaaaattcacttggactcttctcatcgaccgatatttcaactatttttttcctgtcccgttaacgtttcgaataagagcttctttttcccctt

SEQ ID NO: 46925 - DNA, 327 bp, Glycine max
  Clone ID: PAT_MRT3847_142377C.1
gggttggggaaggacaaaatatcggtgtaattattggtgtacaactaacactgcccaagccaccacgagaagattctttcactggtacaattcaaaaaactgttttgaagtgttccttcacacagctattacaacttttagatctttaataattattttaattcccttttattgagacaacattcatgggcgtaattttaccgggttatgaaaaacttaacaaacagcccctgagagcttgaaggagtcagatcaaacacactttctggggcatttattacatgccatcgaacactgaagttccattttttcttacaactttttttt

SEQ ID NO: 46926 - DNA, 336 bp, Glycine max
  Clone ID: PAT_MRT3847_142378C.1
gttcttatcatcctcagctgattttattcgtaccggcaactgtgagccacggaccgtggatagaactggcctatgttcatggggaataacgcaggtcagacgaaggctattgatacctttgacaccaaagattgcttggacatgcactgatattcatgccttgacgagctacatgctggctcaaccctagaacgtacggctgaacgtaccgagattgcttctgacggactcacgcataaagggaaagagggctacttgtctgaccttggaagggaggacgattatgcattgcggatcataaatgcgagagctgaacatctgcaacggaagaatgga

SEQ ID NO: 46927 - DNA, 403 bp, Glycine max
  unsure (1)..(403): unsure at all n locations
  Clone ID: PAT_MRT3847_142379C.1
ggaaaagcgagagtcaagacgatatancaattnanaagtacgcgtgcacacgctcgtaatctcggtattgccctactgaattcacagtatagtattgaatatgatgaaactgttgggtgcaaggccgggcaccacatactcactgagggaagtgttatctacttgggcaaaccatatcttgttgacgaccgaagtgtactctgcctttcggacaccataggtattcttagggccgccgatgacggctatattatagctagaggacacctatgtgacgtaactaacacggtttgacgagatgaccgatttgacccatctggcgtctaccaaaacacaaaaactaagggtgcccttaatattatagaacttaggaacgggagaaaaaacctagtcgctctggtgg

SEQ ID NO: 46928 - DNA, 339 bp, Glycine max
  unsure (1)..(339): unsure at all n locations
  Clone ID: PAT_MRT3847_14237C.1
aaggggtgtggggttttttttttttgngggggaaggggagggattaaaaccaccacaaaaaaaatggagggggggtaaaatcaaaaccaaaatggaaaaaaaaaattttcctcaaaaaaaaaaaaagttccttttccttaatgggcaccacggccccaaaaaaatttaaacctggggagaagcccgccaaaaaaaaagctgggaccctcggaaagggaccccaaacaaaattctctggggggaaaaaccctctggggagaaaacggctttggttgagaacaccaaaccgaaaggttggggggcaaaaccgcctttccccaaaaaaaaaaagtttccggg

SEQ ID NO: 46929 - DNA, 402 bp, Glycine max
  Clone ID: PAT_MRT3847_142380C.1
attaatttttatttttttttttttttatttattatttttggattgggtttttttttttaaaattgggaaaaaaaaaaaaattgaaaaaaggctttttttttctgatttttttttgggaaaaaaataaaatactatataaatctttttagagaggtaattttacccgagcctggttaaaggattaaaagcaacattttttttcttaaaagaaccaattttgatccaaatttcaacaaaattaaaatgaaatgtctgagtgactgtgttaaaaaattccaattttggggccatattataataggtaattgaaaaaaaaatttcggctggatggggtgttaatatgaaaaatttcaagaaaaaagggtttttaaaaaaaaaaaaaaattttatttgctaagcgtt

SEQ ID NO: 46930 - DNA, 210 bp, Glycine max
  Clone ID: PAT_MRT3847_142381C.1
gactattaccggaggaataaaccagatattcaaggccagcatcgaccaaacaattaaatcttgaatgaccccaaagacccctgagccaacagggattattgctcaatctttaatgaaccggaatcacacaagaagttgggccgcccgactttggtggcatctggtccgtacagtctattatttgagagaacttgagcctaacatgcctac

SEQ ID NO: 46931 - DNA, 267 bp, Glycine max
  Clone ID: PAT_MRT3847_142382C.1
ctccatgaggggcgggccttttttttttttttttttttaggcgctgatgagagcagcagagatggtaattacttcctcagctctccccttatgcagtctacttccaaaaagtgcaagagcaacaaacaaagcccccctctaagcccgtcctttgctcttacaacatcatatgccccatatgcgcgatcattatatacactcgggcgatatctcaactcagctcaaacaaacgccattccagggccactctccatgggtggacgaata

SEQ ID NO: 46932 - DNA, 393 bp, Glycine max
  Clone ID: PAT_MRT3847_142383C.1
gcaaggaaactgacgaaagcgcagaagaagatagcatacgatgcgaagctgtgcaagcttctggacaactacacccaaattctggtggtgggctgcggacaacgtccgatcgaaccagcttcagaacattcgacacggtctgcgtggcgactcggtcattctgatgggaaaagacaccatgatgaagcgaacctataagatccatgccccggaacaccgggcaacacccccatcctcaacctctattccccttcttcagggtaacgtggggctgattttcaccaaaggtgacgtcaaggaggttaaggaagtggtttccaagtacaaggtacgtagttatcaccgcgtttttgttttacccaaaataaggttactggttttaactaaaaacat

SEQ ID NO: 46933 - DNA, 118 bp, Glycine max
  unsure (1)..(118): unsure at all n locations
  Clone ID: PAT_MRT3847_142384C.1
tctagctatagactatgacatgcactcctcccttacctcggaatggaattcggacncggtccctggcagccgtccaacttttcctaatatggatcggattaaaacctggccgtaaaca

SEQ ID NO: 46934 - DNA, 305 bp, Glycine max
  Clone ID: PAT_MRT3847_142385C.1
attattttaatgctgaaactgcagtaagtaatattttaggtgcgcctataaaaggtggaaggcccatttgattgggtacattaccgagtaccattgagcaaagtgaaccaaacatgaatacaaggttgcagttatggagtaccccatccagtggggattcttttcaacgaaaagaactgttaatggtaaaagctaatgcatcatgagctgctgttgggttgacagaaagttagcacttcaacttcattgatggaatattttttgccaaaacacaaagggttaattgtggtatactacggaaggat

SEQ ID NO: 46935 - DNA, 434 bp, Glycine max
  Clone ID: PAT_MRT3847_142386C.1
ggctcgaggttgcatgtgcctgtcgatgcttgcaggatgctcgatggtgccacctatctcaagctgcttggcgtccgtactagcaaatgacaccgggattgccatttctatagcgagctatggattgacttgcccgagttcgtgtcatatcggtaggcatcttctttagtctctgcagcagatcttctgaatgggatactgatggttttcgcatggttgagatggaaaattctccatattgcgtgtcagcatgaatcttataatgacagcagtcgtgtatagccatatatctgaacactttttgttgatgctcgacaccgattgcgtctaattatgcatgtatggcatgttagatcactgtgctgctagtgctcaatcgtatcacatggttgcccgctcgtgctaattgaactgctcatcctttaatgggctag

SEQ ID NO: 46936 - DNA, 748 bp, Glycine max
  unsure (1)..(748): unsure at all n locations
  Clone ID: PAT_MRT3847_142387C.1
tccctactcttttactttccgctgttcatttaattttcgcttttactttctgttaagtttctcttctaccacgcgtccgcttaacaaaaaaagtaaaagccttaaaagagtaattttttaattagtaaaggtttagaaataattaattcaactcccccttcttaattattctgaggtcactcgatctaacaattgggactaccatttaaaaaaattattcaattttttcccttccttttgactttatttctataaaaaaaattaattcttaaatgattagaatgaatcagaagattaaattgaatgaaaaataaacaacaaaagtaaatctttataagataaataattaaaataactaaaatataaaataaaaaaaaaacaaattaaattttaaaaataattataaaagagacataagttaagatcgagttacctatatgacaatgagtttgtttcaattgtttacaaatgaatagtatatccctaatgctttggtcggcaactggaggattttgaaaactcatgttgtctataattttgaatcttcctatatatttttaataagattagatgtcttatgcatcccctaggcgtattaatgtacccctccagaatacccacatataagtcaaccttagtgtagtgaagttgtttgaggtaatctaacaataacagtcttatcccaccaagagatagtctatnttaaaaggactaaaaatattattatnctttaaatcattgggcctgc

SEQ ID NO: 46937 - DNA, 205 bp, Glycine max
  Clone ID: PAT_MRT3847_142388C.1
aaataattactaatactaactttatgtgcttagtcagattttactgttcatctcctccttttgttctagagctccaccagcaagcatatactctctgagtcttccacaaaggcgcaccaaagcatctgatccagttctatatgccatatcctcaaccttagcaaacctagataaagtgatactgtccgcaagtacaaactcgcat

SEQ ID NO: 46938 - DNA, 214 bp, Glycine max
  Clone ID: PAT_MRT3847_142389C.1
tagaaaattctgtgatgtcgagatactttcagttggaccagacaaagaggaaccaacgaaagaggataataacccagaagccaagatagatccaaacgacgaatatgctgaacttctgaaggtggatgaagccaattattatcagactatacatgtgcaatacccttattactatagcagtactgcggaagataatacgaccggctgtgttatt

SEQ ID NO: 46939 - DNA, 371 bp, Glycine max
  unsure (1)..(371): unsure at all n locations
  Clone ID: PAT_MRT3847_14238C.1
aaagaccacaaattttgacctctccgagtcgcataaaaagaaaagagcgatgcntagttttacttcagccttatccactttaagctttcccttctctaccctatctttcacgtatcgaaaccttaaatttaccatcacgtctgagcaatctccttgttaaaaccttttctcttagtgagccaatttttatgtctcaattataccatcaaattcctactgccttccatccttttgctgatgcaaatgctcatgactcgtttgctgcttcaaaggagtatgtgcatattcctgtacagcagcgaaatcgtattaaaagcctgacaacctttcaggtattgaaaaatgaattcatctataacaagatactttaa

SEQ ID NO: 46940 - DNA, 346 bp, Glycine max
  Clone ID: PAT_MRT3847_142390C.1
gggccggaaaaccaaaagggccccccggggcccccaaaaaagggccccaggggacccgaaatccaaaggggaacccaaaataattttttaaaaaaaaaaacacaaaaccccaagtggggggccggaagaggggaaggaaaaaaggggcccccaaaaaaccattgggggggccccggggcccctttgggcctgggaaaccctttaaaaggaaatttggcaaaaagcccaaagaaaagggcccctgggcccaacccagtaaaaatttttgggaagggaaaaaaaaagggggcccatttacaaaaaaaccttgccaagccctaaaccaaattctggggggccccccctt

SEQ ID NO: 46941 - DNA, 477 bp, Glycine max
  Clone ID: PAT_MRT3847_142391C.1
tagagttggatgctttactttcgttgtcaggtttatgtgaatcttgtagtgtgaatagatttcacactgtttctgttctctctagtttcctatctttttttaacactccttggaatttataatgatggcatgcaaagtattctccctgctatcttagcagaaagaataatattaaatgagtttgaataatttgaggactaaatcatacacccaaattaaatcaggggtcaaaattaccagctagatatgttaatattgccatgctgctcttttatttttaaaaagagatctgagattcatttaatgaaaaaatcttagatttgtttctgatgttcctagaatgtcaatatttgttagtatggaagcttgctttgattctctcagtagtgaatggggagctgttccttttgataaaaggtttctttaagatatcagtggaaccaaacctttttcttgcttattgaaaacagtgtcatg

SEQ ID NO: 46942 - DNA, 398 bp, Glycine max
  Clone ID: PAT_MRT3847_142392C.1
ctcgagccgaaaagaacttttcattcattttcatgtcttttctttctttcatgctgtagtcttttaagcatttgatttgatttttaaataaattgctgagcttttccacagctttataaccgctaccctaatcttcatgtttactcatatgggccactcccatgtctggatttagttgtggcaaatgcatgttcagaatttgttacaagcattatatttggaaatgaattttcatcgcgcctttcaactgtgcggctaagggcagctgcaatcacatcactatcacaagatcctaaagcagatagtgccatgattttcaaacttgcccataggtttctagatgtaagcaaatatcagagaaataagtccaaggcagaggatgaacctgagtatcattc

SEQ ID NO: 46943 - DNA, 396 bp, Glycine max
  Clone ID: PAT_MRT3847_142393C.1
tttgtttttttttttttttttttttttttttttttttttttttttttttttttttttttttttttttttttgtttttttttgggaacgggccactagaaccccctttttttgcacatttttgtttggttcaaaaaaaaaaaaaagttaaaggggggggaaaacccccttgagggtaaaaaacttttccccaaaaaaaccctgttcttttatgggaacaaaggggggggtgccagaaccccccctttgatgaaatgtcggcataaaaatatgatcctttaacccctggtgggaaaaaatggttatgtttatttgcacactcccctcaaatttaaccccttgaccggccccccttggggggaaaaaaaaaaaaccctaaaaccttttaaagccccctt

SEQ ID NO: 46944 - DNA, 353 bp, Glycine max
  Clone ID: PAT_MRT3847_142394C.1
gggggatgcttttttttttttttttttttttttgaagtgtgttattgatttgttctttaaattgtttggcctaaaaaaagggaaaaaacgattggcccggtcaacgggtgggaggaccaaggaggaaaaccccacttgaggggcttcctcattaaaggggggggggggccaccgtaaattcctcccgacaaaacccgaatattatgcgggtccagggccaggacttccctacaaaggtgtattttagcctgcgctgaccccccaggaaccaagggggtaaccgtcggcaaatttccaaaacgccggggggccaaaaaagataccccttggaaaaattatagacggcggggggg

SEQ ID NO: 46945 - DNA, 434 bp, Glycine max
  unsure (1)..(434): unsure at all n locations
  Clone ID: PAT_MRT3847_142395C.1
tttgtttttttgtttttttttttttgnnaannacttgggttttttttattttgttcggggtcttaatgtgaatttcttggtgggttccttctcaaaaaaagggtttaaaaaaaaccaaaaaccccaatgggacccccccccccttaaaaaaacccgggggggccccccaccccccaggggggggccaaacccaggtggaaccaaacaaggtcccccaaagggcccccccagcatccaaaaaaaaaggggggggggggttcccccacccgggggccccaaacaaaaaatgggctaaggcccggttctttggccctttaaaggggccctttccccccccaaacccccaatttttccctttggggacccggggccctgaaactccccccgggggaaccacaaaattggttaatcaaaggaaccgcccccgggggccc

SEQ ID NO: 46946 - DNA, 545 bp, Glycine max
  Clone ID: PAT_MRT3847_142396C.1
aggtttcctgtcatcactgtatgacgtcctccttctttgggggggggggggggacctaacaagggtgcagggcccagggcggaagcagggttaagtaaatgaggagcgtaaccatgaaacctgattatgttaaaactaggaaaaaaaaaacgtgagcggctagatgggggtgaaacgtaaaggtgggtactggggggggggggtgaaaagctcggagtacgcgggggggaggaaaataataatcgttatacaacacgtagcgtagcagaacacatagcggtaaaaagtatgtaggtgcccgaaacgtgcatgagtatgtgcgtacgcgcgtgagtatgtggttgcacgcagtacataatggcagtatacgcgacgtattgcgttttatagacacagttaacgaggccacgtgcgcacagacagttataggtttggcgacggcgcgctagtaaggctgccatttacgcggtgacttacggtaggcaatgttacggctgctttgggaagacgacgatagcaaagaaggaaggaccatgaggggggag

SEQ ID NO: 46947 - DNA, 282 bp, Glycine max
  Clone ID: PAT_MRT3847_142397C.1
aggttccagagtactattcttttactttacatttgatcaaaagcaacacaagaaccataactctataaaaacccaccatcacatacaccagcgcaaagcacaaaaccaaccatgaaccaaccgcatcaaactgcatggtccttttttttttcccctgaaaggaaaaaacctaaaccaaaaccaaaaacttcattcccaaccccccccagggtggagcaatacaccgagttatatgcgagagagccctgctaggaccccgagcaacactgaccattttagccc

SEQ ID NO: 46948 - DNA, 329 bp, Glycine max
  Clone ID: PAT_MRT3847_142398C.1
cgggtgacagagggcgagaagttgtcagcgtcaggaagatagcattagcgctatccgcgggtcggatcggtgagactgttgatagcatcatatatgttcagatccgacaggtcctcacacaagctgtgcgcctaggcatgattgttacgactgcactgatactatgtatggcattgatgtgcgtatctggcactggatcttacggtgttggcgatctttctagaagcatctagcccatattcaagctgcgagacatgatggtcttgcacatgagtaaagatcctattatgccactagagattgtcgagcataatgtacatcgacgttag

SEQ ID NO: 46949 - DNA, 703 bp, Glycine max
  unsure (1)..(703): unsure at all n locations
  Clone ID: PAT_MRT3847_142399C.1
ttggtnncaaaannttggcaggnatattccctcggtctcgcatatttttgggtatctggtggtattggccacctgaataaatttcttaccagaaaggggaaaccaaaatttgggataaacttttggtgaaatttttaaaaatattgaataaagaaaaattgttccaaaaagaacccaaaaaaaagggagattgggatttagccaaactcaaactggtgaaggacttgggggaaattggactaaaggaacctaaaatccccccctggccgttatgaactttttatggtttccttttttcactataactcccttttttacaacaggaatcacatttggattttttattggaaatagaccaagtgccccaaccaccggaagtttggtcaccatgaatttggcccacgcatcttggaccactctttttgacttaacatttaaaggacttggaaccccatttaataacaatatctttggacttttaaatatgggacgaaccattggttcccggtggttttggccnnncaaaaaatggggttntctctcttccctataagaacataaccctggtggaagnnnntnaaggaattatnngccttgggcctttctggtgganctnnnaattctggtttaataacaacaccttccttttcctaagccatnttgggaccgataggttcntnggacaaaactgggnnntgggtta

SEQ ID NO: 46950 - DNA, 410 bp, Glycine max
  Clone ID: PAT_MRT3847_14239C.1
acagccgtccggcggtttaaacctggagagaatcctcttccttctttttaagctatccctctttggaaaaatttagatctggtttttcttggatctacgtaccgcttttagggcccggatctgattggatctgaaccagatttacaccccgaggggggtttgggccgggcttttattagatctgatgcatgggggctaaaatttacttgccaggggggggcgattaatttcctgtagatattcgatgggaggaacgcaattccagccgtttccgttggttcgatcgttccagacgctggattgggatatttctggatggttttataagcagcatgtcttcttccggctttagtggtggcggatttcggttgtgtgaaaataagcgtttgattggaagttttgggttggaa

SEQ ID NO: 46951 - DNA, 313 bp, Glycine max
  Clone ID: PAT_MRT3847_1423C.1
gaagaagtttgagactctttcctacctgccaaaccttgatgatgcacaattggcaaatgaagtataataccttcttaggaagggatggattcatagcttggaatacgagtaggagcacgggttcgtgtaccgagaccacaccaggtaaccacaatactacaatggacactactgtaccatgtggaacctgcctatgtttggtagcactgatgcttctcaggtgttgaacgagctccaaaaggctaagactgcatacccaaacggtttcatacgtgtcatgggataccacaaccttccccaagtgcagagcatg

SEQ ID NO: 46952 - DNA, 855 bp, Glycine max
  Clone ID: PAT_MRT3847_142400C.1
cacatgttcatcaccattaacattaacctagaaaggtgtcccaggaatggcacgtgtcaaggtgtatttggacagaaattctccgcaagcatgaacaatgaatcatttgtgcaccccgttggaaaagggtactctatgttggaagcatcgttttataatgtgagtggtgtgtatactactgatttccctgacaagcctccaatcatatttgatttcacaaaccctaaaattgctttggatacgaagtatttgtttacgccgccaaaatcgaccaaggtgaagaaactcaagttcaattcgaccgtggaggttgtgtttcaaaatacacaaattatgaatgcgcaaagccaccccatgcaccttcatgggtttagtttccatgttttggctcaagattttgggaatttcaattacaccaaagataaatacaagtttaatttggtgaatccaatatttcgcaacacgattgctgtgccagctggaggatgggctgttataagattcaaagctaacaatccagggatgtggtttgtgcattgccatgtggatgatcatcagttatggggactagacatggttttcgaggttgagaatggaccaactccttcaacttctctccctccaccacctgctgatctacctaaatgttagctatatattttcctggagaatgcaatcacaaaatcacatgtcaatattaatttcccctcttctttttcagtgtatttagtaagccatttttttaaatttcaagcaataaattaataatagtttcacttaaacccaacatcaagcaagataagtaaaccagaattatctgtaaattcttgctataattaataaaaggagcttact

SEQ ID NO: 46953 - DNA, 1137 bp, Glycine max
  Clone ID: PAT_MRT3847_142401C.1
gaagctttgagggatcaaagaagaaatagcaatatggagacaagcaaatttttggagggacaaaatcctgcaaaacatgctgcacttaaagtgcatgcatatgctttgaggtttttagatgctaatagatctcagggaatttcctctcaagcagaagcaccaacaacacctgaaaagatatttgactcaagcactgtagatatgtcatgggatgagcatcttaatgaagaaaatcttttctatgaagttcctcctactgcaatggaaacatatagaaaagctatcgaatctcatttcctacagttcgagaaaactgggagtagcattcatgaggaaattgaaatgtctgtgtatgatactgcagcagagtttgggtctcaagagaatgcatatgatgaggaagaaggagaaaccgacacttattacatgcccagtgtctatgagggcaacaaatcatcaaaatctgcgcagaagaaacataaaaatttgaaggcttacactcctaggtgtggtgatgctggtgctgatttgccttatgtacactatgcaactggaaatcaaccatccatgctgtttggaaaaagacctgctagtgtaaatgttgggtcaataccaacaaagcgcatgcgtactgctactaggcatagagttgtaagtcctttcaccgtcaacatggggacagtacaggctcaagctaataaggcggatgcttcaagtggcgataccaattcctttcatgatgaccagagtactttacattgttggtcccctgattcagaaaagtactgaagtggagtcagttgcagattatgaaaaacagttatcttatgaatgtgttgaaacatttgttaaaccaaataagaagaagaatggtgctacatatgatcagggatggcagttggattctgttgttctaaatgaacagaaggatcagtccaagaagagagcggatagtcatcactttgaatctaatggaagtttgtgtgggcaacctaatgctaagaagccaaagataataaggcagtcacttgataatactttcgacaacattgctcctatgactaactctattccttcccctgctgcgtcacaaatgagtaacatgtcaaatcctaataatttattaagatcattagt

SEQ ID NO: 46954 - DNA, 2556 bp, Glycine max
  Clone ID: PAT_MRT3847_142402C.1
ctcacaatcagattgacccgcgaacttgtttattcatctaccgtcgggagggaggggatgaccacggcgccccgtgcgcccggcctcctcgtcctcgcgacaaacacaaaccccggcgcttcgtgcgccaaggaactcaaatctgttaagtgcgactcccgggggcccggagacggtgtcccgcgggagtcgtcacgacacaacatttacatacaatgactctcggcaacggatatctcggctcttgcatcgatgaagaacgtagcgaaatgcgatacttggtgtgaattgcagaatcccgtgaaccatcgagtctttgaacgcaagttgcgcccgaagccattaggccgagggcacgcctgcctgggtgtcacacatcgtttccccaacgcaaacatgtaacaatgttgctgcgcggggtgtatgctgacctcccgcgagcacccgcctcgtggttggttgaaatctgggttcatggccgacttcgccgtgataaaatggtggatgagccacgctcgagaccaatcacgtgcgagccggtcagttctggaccgatcgacgaccctttgcgtgcaggcacgctcccaacgcgacctcaggtcaggcggggctacccgctgagtttaagcatatcaataagcggaggaaaagaaactaacaaggattcccttagtaacggcgagcgaaccgggaaaagcccaccatgaaaatcggtcgccctcggcgtccgaattgtagtctggagaagcgtcctcagtggcggaccgggcccaagtcccctggaagggggcgccagagagggtgagagccccgtcgtgcccggaccctgtcgcaccacgaggcgctgtcggcgagtcgggttgtttgggaatgcagccccaatcgggcggtaaattccgtccaaggctaaatactggcgagagaccgatagcgaacaagtaccgcgagggaaagatgaaaaggactttgtggtggcatgctcactcaggagttttacgtgccacggttcatggtgctttcatcattcaccctcgttcgggtctgtttccttttcccaaaccccacaaacaagtaccaataatattaggtgattggtatgacggtaatattgttgatatttatcagcaagtactccttctcggggatgtaaggccctctgctgcctacaccatcaatggtttgcctggtgatctctacaattgctctagaaatcagatgttcaagctaaaggtaaagccagggaagacctacttgctaagaatgatcaacgctgcattcaataacaaccttttcgtcaagatagccaaccacagcttcacagttgttgccatggacgcttcctacatcgaaccctatgtgaccgacatcatcaccatcgcccctggccaaactgctgacgtgctcttcaaagccgaccaacccagaggctcatattacatggcagcctctccttacgttgtgggccagccagaagccctattcgacaccacgacaactcgcggcattgtcgcttacgaaggctacaagacatcatcaaaaaattattcaaagcccattgtgccactactcccacacttcaacgacaccccaattgctcacaaattttttagcaacatcacgagcttgatgggggccccacattgggtcccggtcccacttgaggtggatgagcacatgttcatcaccattaacataaaccttgaaaggtgtcccaagaatggcacgtgtcaaggtgtgtttggacagaaattctccgcaagcatgaacaacgaatcatttgtgcaccccgttggaaaaggatactctatgttggaagcatcgttttacaatgtgagtggtgtgtatactactgatttccctgacaagcctccaatcatattcgatttcacggaccccaaaattgctttggataccaagtatttgtttacgccgccaaaatcgaccaaggtgaagaaactcaagttcaattccaccgtggaggttgtgtttcaaaatacccaaattatgaacgcgcaaagccaccccatgcaccttcatggttttagtttccatgttttggctcaagattttgggaatttcgattacaccaaagataaacacaagtttaatttggtgaacccaatatttcgcaacacgattgctgtgccagcgggaggatgggctgttatcagattccaagcaaacaatccagggatgtggtttgtgcattgccatgtggatgatcatcagctatggggactagacatggttttcgaggttgaaaatggaccaactccttcaacttctctacctccaccacctgctgatctacctaaatgttagctatatatatgtgcctgcagaatgcaatcacaaatcacaagtcaataccaatttcctcctccttttcttttttcaatgcacttaataagccaattttttttaatttcaagcagtaaataatagcttcacttaaacacaacatcaagcaagataagtaaaccagaattatttgtaaaatcttgctataattaattaataaaagtaccttactgctaaaaaaaaaaaaaaaaaaaa

SEQ ID NO: 46955 - DNA, 140 bp, Glycine max
  Clone ID: PAT_MRT3847_142403C.1
acataacatactcaaacatatactcaaatctcctcaccaattgcctcaacgaaccctacaactccaaatacctctctcattaaaacctccattacattctcttcaaatctttctacacccatcctaaaaaacctactatt

SEQ ID NO: 46956 - DNA, 499 bp, Glycine max
  unsure (1)..(499): unsure at all n locations
  Clone ID: PAT_MRT3847_142404C.1
tggaaaaactattttataatagaaaaaatttcattttaaaagaattttttttnnnnnntttttctattgcaaaatagatgttttaaaagtgtatatatgtattatagaatacttatttcataataaaaaaatcatattatataataacttttctggaataatttttctagaaaaaaagaattctattatagaataattattttgaaaatatatatgtattatgaaataattatttcataatagaaaacatcacattccaaaatatgtggaatagttattcagaaaggaatttttttttctattatgnnnnnnttgctttgaaagtacatgtatatattataaaacaactattttgaaatataattttttttattatgaaatagatattccatgatatatatacacttttaaaatatttattccataataaaaaaattctaaatatatacttccaaaacaacaactatttcataagcttttacatcaatgattttctttc

SEQ ID NO: 46957 - DNA, 441 bp, Glycine max
  Clone ID: PAT_MRT3847_142405C.1
tacggctgcgagaagacgacagaagggggtatcctaagagtgcatctattagcttagttgggtattccgattcaaattatgcaggttgtaaagttcataggaagagttctagtggtacttgtcatttgcttgggagtgctttggtttcttggcactcttagaaacaaccaaccaaccaactagctggcatcatttcattagagatcaagtgcttaaaggagatcgtgtattacagtttctagatataaccaaccaactagctgacatctttacaaaacccttgcatagggatagattctacaccattagaaatgaagtacacattttagatgaagattatctagtataacatgcacatgcatttgtgttgtcataccctaatttcgtccggagattattacttgatgacatgcaacctttggttagccgctttgagatact

SEQ ID NO: 46958 - DNA, 292 bp, Glycine max
  Clone ID: PAT_MRT3847_142406C.1
cttcataaaaaatacagctagagagcacatgggaaccactatggactcaagcaaattttcttctttctcatattgcagttcaagaagaatagctgcaacaatcaatgtgccgaagattaaggtaaccaaagtctccactccaaggcctcccaacaaaaacttggtggcagaattgaattatctaaataattacatttcagccaccggcacaactcatgcaaaagagaatccttactgctccaatctcagcgccaagagttccacagcacctagaacacgcacaccaaattcc

SEQ ID NO: 46959 - DNA, 330 bp, Glycine max
  Clone ID: PAT_MRT3847_142407C.1
tagggatacattcctggtcgagaatgctgttagatgggagggatgatggcgatactgatgcaagggcttttcctcatgctcttcatggttttctgtgaggcgtcatccaccaatacaaaagacgccgcacatgtactgtatgatgccatatattccggctgaagctattgatgcggcaacctacttcatggctgagtctgctattctatccataggcttggctgcaatacttgacattgaggagttgatggctatcctggacacagatgcggtcacccaggccatagaggaggttaccctgatcgttggaaatgatactgtatggatcgc

SEQ ID NO: 46960 - DNA, 138 bp, Glycine max
  unsure (1)..(138): unsure at all n locations
  Clone ID: PAT_MRT3847_142408C.1
gcacaaggggccctcactctctccatcggatcgaacacaacgtacaccacagcgcagaaagagcacaaggagagaggatgccgagcccactgaatcggaagagagagaaaagcantactggatccacgaggagaacac

SEQ ID NO: 46961 - DNA, 242 bp, Glycine max
  Clone ID: PAT_MRT3847_142409C.1
gaaccaatcaacattctactacagcctctctcaaactcagtctctgaaccgtgagaccttgattacgttcttccctccattttggaaccacagctctgccacagttccaatccattaccactcccaaggctgccctagctctagcacctcatcctccggccttcaacggcacttctagtgctacatggtgcgtttgccaagatcgaagccaatcgattcagtccaagacgttagactaagcc

SEQ ID NO: 46962 - DNA, 235 bp, Glycine max
  Clone ID: PAT_MRT3847_14240C.1
gagagaatagaataaatcacatttataagaaatccaacaaataactacctcaggttttttgttccttttctgagggaagccaagttttaaaaaggcacatgaacggtgagatctctaaattttcgggatttactttttaaaaacaggccacccttgcgtgcaaacaactaatggtagcaccttttgcccctctttaaaaaatgcagacattgggtggttttttatatccagaaaa

SEQ ID NO: 46963 - DNA, 522 bp, Glycine max
  Clone ID: PAT_MRT3847_142410C.1
aacatacttaattcctctgtttaattacatactgcagaattcgcctttcataagttctttcttgtactttttcaacatcgatcgtcggagaacgttactcaaatgaactcttcttttaacttcgttttccttgtaagttataatcatatatatacacacacgaagcgtcttagttcatgtagtagtataaattaatttaattactttgggaatagaacactttagtaaagatttttttcttaaaattcaatatttgatacaaaccaatacatggttatataaaatattagcatatcgactaattatttttaaaactatattaagccattaataaataaaaaatttatgatatggctagtattttatgactgaatatcttgctattgtaggcaaattcctgttaaatactgctgcgtatgacttaagagatcgatgtgcacctgcataactatggtgggtcattaatttgaaccaattattattactgtgagagaaactcctatgagacttcatggatacccg

SEQ ID NO: 46964 - DNA, 2215 bp, Glycine max
  Clone ID: PAT_MRT3847_142411C.1
ggggtacatcaaattctttatttatgagatgaagtacactggggaagctttgggaagagatcttgagaacgtcagggagtactacgggagtacagcagcaaggggacgacaatggggaaggggcacatcaaattctttatttataacatggagtactctgtggaaactttggaaagagatcttaagaacacgaggaaatactacgggagtggaaaaacaaaggaagcaccatggagagaatcacagcttaaagggttgcacaattttctcgtggaaaaagaggaagaaattgtgacggccctcaagcatgatttggggaagcattacgtggaggcttttagagacgagcttggaacattaatgaagaccttaaacttggcaaccaagtctttgaaaaattggatggcggggaaagaggcaaagctgccacgaatagcactgctctcaagtgcagaaatagttcctgagccacttggtcttgttctcataatctcatcatggaactttccctttggactttccttggagccactgatcggagcagtagctgctgggaacagtgtggttctaaagccttcagagttgtcccctacttgctcttctcttttagccactttcctcccaacttacttggacaataatgccattaaggtcatccaaggtggaccagaagtggggaagctactcttgcagcaaagatgggacaagattttcttcacaggaagcgcaagggtggggcggattgttatgtctgcagcagctgtgcatctgacgcctgtgactttggagttaggtggaaaatgtccagcactaattgactctctttcttcttcttgggacaaagaggtggctgtgaagcgaattttggtggcaaaatttgggtcttgtgctgggcaagcatgcattgcaatcgattatgtccttgtggagaagagtttcagttctacattggtgacactaatgaaggaatggattaagaaaatgtttggagaaaaccccaaagcgtccaacagcattgcaaggatagttaataaaaatcatttcatgagactccagaaccttctcactgagccaagggtcaaagaatcggtggtttatggtggttcaatggacgaaaatgacttatttattgaaccgacaatattgctggatccgccacttgattcagcagtcatggctgaggaaatctttggccctgtacttccaataatcaccctggagaagattgaagacagtgttgagttcataagctcgaggcctaaagctttagctatttatgccttcacgaaaaaccaaactctgcagagaagaatggtatctgaaacatcatcaggaagtcttgtattcaacgatgcaattctacaatacgtagcggataccctaccatttggaggagttggtgaatgtgggtttggcaagtaccatggaaagttctcctttgatgcgttcagtcaccataaggctgtggctagaagaagttacttgactgatttttggtttaggttccctccatggactcttgataagctccaactacttgaggtgtcttacaatttagactaccttggaatacttctagttctgctcggcttaaagaaatcaaaacggtcactatttcaggcttgtaactgatgtgcattatgttccttcacttatctatttcaagtgagcccctaataaggattggtgattccaagctagtgttaatttctaggtttatgatgcttaaataagtgtgttctatttgattctgtatgtgttatatgcctagttagacttgggtaaggcaaggtttgtatcaaggatctttgattctacttctattactattactttatactgaaaataccccaaagaagtaaaataaataaaaaataaataaggagaaggattttgtggatccgtatataccactagattcagagaagaaatcagccacagagacgtgtggaacaccagaaaaggacatgacagcacgcaagcttcactagcaaatgccctttatcttcaatttgtaatggtacgatgcgatttatgctaaggactattcccaacagcaatgcagttcaaaatcaatacaatagcacaagctattaactatccggaattgcagaggtgtattaggtcccagtgagcaattagaaccggagtcctaatgatacgagacaaatcccacataaattaaattttggatcaaaaacaaaaaaataaaggg

SEQ ID NO: 46965 - DNA, 641 bp, Glycine max
  Clone ID: PAT_MRT3847_142412C.1
acgccgcgtaagctcggaattcggctcgagcttccaataatcaccctggagaagattgaagacagtgttgagttcataagctcgaggcctaaagctttagctatttatgccttcacgaaaaaccaaactctgcagagaagaatggtatctgaaacatcatcaggaagtcttgtattcaacgatgcaattctacaatacgtagcggataccctaccatttggaggagttggtgaatgtgggtttgtatcaaggatctttgattctacttctattactattactttatactgaaaataccacaaagaagtaaaataaataaaaaataaataaggagaaggattttgtggatccgtatataccactagattcagagaagaaatcagccacagagacgtgtggaacaccagaaaaggacatgacagcacgcaagcttcactagcaaatgccctttatcttcaatttgtaatggtacgatgcgatttatgctaaggactattcccaacagcaatgcagttcaaaatcaatacaatagcacaagctattaactatccggaattgcagacatgtattaggtccactgtgtttattatctcatgtgtctaatgataagaaataaataacaaataaattaaattttcgat

SEQ ID NO: 46966 - DNA, 588 bp, Glycine max
  Clone ID: PAT_MRT3847_142413C.1
ccccgacgaatctatatataccgtcaggcatgcatattggcttcgatagtttccaatttcacatcctcttattgttaaaccctttgtttgcacaagaaaagagttacttcatcatcatcatcaacatgagtcgcttcaacaatcagcaagaatcccctgtatcatatcctccagcactgtatgttagtgccccaccacctatgggttatccttccaaaggtgatcctacagctgtagggtacccccaacaaagagttccagaagaaaccacaagcaggggtgatggattttggaagggatgttgtgctgctttatgctgctgctgggtcctggattgttgcttctgattgaatcatagcacagatttgtgtttgtcaccatgttttctttttcacattgccagtttcctatttgtattctttgtagtttagaagaataaggatctttgtcctcttggacagcttgtattttatccatttggttgatgctgttctttttccttgtactttgaatttttttatgatgtatttagttattattataagatttatttttttattaataagagtaaagttatcattaaaaaaa

SEQ ID NO: 46967 - DNA, 191 bp, Glycine max
  Clone ID: PAT_MRT3847_142414C.1
ggtttttgcaaagtcacaaagagttggggtgtctgttatatcggaataatgtctcacgtctttgcaaaagatactcacatttgcgagctgtgttcaaggccatgcaacggtggcagagcccttggtgggcacatacaacgctcaccttgcttatcttcctgttactctaccttcaaagcttaactcttgct

SEQ ID NO: 46968 - DNA, 714 bp, Glycine max
  unsure (1)..(714): unsure at all n locations
  Clone ID: PAT_MRT3847_142415C.1
gaaaaaccagactctgcagagaagattggtatctgaaacatcatccggaagtcttgtattcaacgatgcaattctacaatacgtagcggataccctaccatttggaggagttggtgaatgtgggtttggcaagtaccatggaaagttctcctttgatgcgttcagtcaccataaggctgtggctagaagaagttacttgactgatttttggttcaggttccctccatggactcttaataagctccaactacttgaggtgtcttacaatttagactaccttggaatacttctagttctgctcggcttaaagaaatcaaaacggtcactatttcaggcttgtaattgagttgcattatgctgcttcacttatctatttcaagtgagtccctaataaggattggtgattccaagcttgtgtgaattcctaggtttatgatgcttaaataaatgcatatctggtttagcttttggcatttgtgatccacgtccaacctgaagcatctaaatgttgcttctgcatcttcttaaactttttatgcggaaatggggaggaacgcgctgaagcaaacacactatatttgattatgtatgtcttatatgtctagttagacttgggtaaggcaaggtttggatgaaggatgtttgattctacttctattactatgtactttatactgaanagataataaaagaagtcaaattagtaaatgaata

SEQ ID NO: 46969 - DNA, 489 bp, Glycine max
  Clone ID: PAT_MRT3847_142416C.1
aaacaccagcaagcacgcgtgctgcacgcgtgcattcggtcggaggagagagatagctagaacaaacgacagttcatgaaatttgcctctctagcgccgttgatcccaaatatactagggataggcattcacatgccacaacggccgggctctctagcaacgcggacatgatgaatcatcacttcacgtggctaacatgaaaagcgcataaaagatggaccaggacacgactggatgccaagctacgagagaaggtcctatattgtgcatcaacgactgaggatgtatgggaagccgcagctaccttgagcatgtggacgtaacagccacacaaacatgatgctgaggcaggagcaagcaaagcttgctgacatatcgatgggcaatattgtgaacggatcttaaagcctcattgggaacgaacccgctcgcgatgccactgtgggtgtcccatgcaatgcaggaggagggaagaatacatccgctcaa

SEQ ID NO: 46970 - DNA, 449 bp, Glycine max
  Clone ID: PAT_MRT3847_142417C.1
acgagattttgtctcaagtcaaatatgattttagcaaaaaaaggaaatatattttgttattgttaagtaatattgattttccaaagttcaataatttgactagaagttaaaaaaaaaaaaaaaacagcttgctcggtcatatctgaggatcatgtggcctttgagcaaatagtggaaccaccacaaagtgaggctgcatgggttgaagtgccatattagctgcctttgttgtgggtttggtcacttagattgtggtgtacgtaaataaactgatcacatggctgtggattgggttggttaagtctcaatcgaggaccttgactttgaaatttgaacatttcaaattgatcagaaaatggtccaaatacatctcatttttttatctgagccgtagaaagagagaaatgaaaagaaacaaataaaaggagcagagaatgatagatgtgatt

SEQ ID NO: 46971 - DNA, 481 bp, Glycine max
  Clone ID: PAT_MRT3847_142418C.1
gcacgaggattccaacaacctttttcttataaatgacttcaaccactttctattatttgtttaacatcagctgggtcgaacattggaaatgtgttcgtgaagggaagaaaatcacgtcaaatgaactcatgatgcaaaagctataagttatagcttccatttattggtcaaatcttggaatgacattaggaaaggaacacaagaatatctgaacttatctggctttgcatattatggtctatggacacataggaactggatttccttaaatgcatatcaagtgaatcaaacggaggtggtggaattgattaaagttagaagctagctgtggataaaagccaaacttgaaaagcatcaatgtcttactatgactctattgcaaaaataaatccagaaatgtgatgatcttcttattgcaaaaataaatccagaaatgtgctgatcctcttattgcaaaaataggactgcatcttgatgtaaa

SEQ ID NO: 46972 - DNA, 1025 bp, Glycine max
  Clone ID: PAT_MRT3847_142419C.1
tctcttgcatctttggcccaatcttcgtggagtctgctatccaatgcccttggggggtaggattgcatcagttgccttacccctcttgcgtgcgagaggttcgttcttttcttggtcatgcagggtttataggcgctttatcaaggattttagcaaagtggcccttccactatccaatctactgcaaaagaatgtggagtttgattttgatgaccggtgcaaagaggcttttgattgcctcaagcgtgcggtgactaccacccctatcattcaggcacctgattggacagcctcatttgagctaatgtgcgatgcatccaattacgcattgggggttgtccttgctcaaaagattgataagctgcctcgggtgatctactacgcttccaaaactttggatgcttctcaagcaaattacactaccacagagaaggagctattagtgataattttttatcttgagaaatttcattcatatttacttggtactcggcgttattgtttatactgaccatgcagctctgatcatcaaataacaatcatcaacacatatcatggtaattatttacttaattcaattattctaacatgtcaaaacattttttattttttaacagaatctaatcatcttagaaacaaaacataagcaattcaagcattaatcaattcagacaaaattcaattaatcatacatatttaaaattaaaactaaatatagttatttaaacattgtaaacacaatcaaaaaatttcaacaattattttctattagctacaaaaataaattaactgaaaatattactcataccttaattcatagagatgacttagatgttacccattttgagattatactgatattgttgtcgccatatgtaacatgtccactttcctgaacatccactatcgatgtaccacttcttcattacagattcttctttgttgttttcatgagattttgtcatgagacaaaagttgacttggtcttcattatgatcttggaataacctgttcctgaaaacact

SEQ ID NO: 46973 - DNA, 249 bp, Glycine max
  Clone ID: PAT_MRT3847_14241C.1
agatgacaagttgaagttgcgcaacagcgattgggcggagaaacagtctcaacacacaaacacccagacacccacgttgtgttatgttatgtcttatgtctcctatattcatcatattaataattaaaccaatctaattaaataataataatttaacttcaccggaatcaacgctctccacttggcttcacaaatctgaaagaacacattaaccactcctctctttgttctcttctttccacacaacat

SEQ ID NO: 46974 - DNA, 1636 bp, Glycine max
  Clone ID: PAT_MRT3847_142420C.1
ttcaaaaatacgagaagtgatgacttcacatatgcgagagtctggtaaacaacttgttactgatcctgaaagattgaaagatcctgtcgaatatgtgcagaggctcttagatgagaaagataaatatgacaagatcataaacttggcattcgtcaatgacaagtctttccagaatgcattgaattcctcatttgaatatttcatcaacttgaaccctcgttctccagagttcatttcactatttgtagatgataaactccggaaaggtctaaaaggggttagtgaggatgatgtagaagttacccttgacaaggtgatgatgctattccgatacctgcaagaaaaagatgtttttgagaagtactacaaacagcatttggcaaagcggcttttgtctggaaaaacagtttctgatgatgcagagagaagtctcatagttaagctcaagacagaatgtggttaccaatttacatctaaattggagggaatgtttacagacatgaaaacctctcaggacacaatgcagggcttttatggctgccaccctgaactaagtgacggtcctacgcttactgtccaagttcttacaacagggtcttggccaactcagtctagtgttacgtgcaacttgccagcagaaatgtctgcgctgtgcgagaagtttcggtcattttaccttggcacccatactggcaggagattgtcctggcaaactaatatgggcacggcagacttgaaagcaacctttgggaaggggcagaagcatgagttgaatgtctctacttaccaaatgtgtgttctcatgctgtttaataatgctgatagactgagctacaaggagattgagcaagcaactgagattcctgcttcggatcttaaaagatgcctgcaatcattggctttagttaagggaagaaatgtccttagaaaggaacctatgggtaaagatattggtgatgatgatgcattctatgttaatgacaagttcagcagcaagctgtacaaggttaaaataggaactgtcgttgcacaaaaggaatctgaacctgagaagcaggaaacccgacagagagtcgaggaagacaggaagccccagattgaagcagcaatagtgaggatcttgaaatccaggaagcaacttgatcataacaatcttatagccgaggtcacgaagcagttgcaatcgcgtttcctggcaaatcccacggaggtaaagaaacggatagagtctctcattgagcgggactttttggagagggatgatagtgacagaagattgtaccgatatcttgcttagaattggagaactagtttgcttcagtgattacaatgtatctttatgaaccaggtaataaatttacctttaaatagctccattgattttattgtacattaatttgttttccaattctttgtgatgtttcatcatttagtatctgtatgactgtattcccaagcaaattagggtccttgccacccatgtttgtaggatgtcaatgtgaggaagtcttgtattcaaatgaagtaaaccatgatttttttgtatcacagagattgatatgacattaatttagtcgctggtagatggggagacatcaattcacttgtctatggaaaatgcggttgtggcactatc

SEQ ID NO: 46975 - DNA, 258 bp, Glycine max
  unsure (1)..(258): unsure at all n locations
  Clone ID: PAT_MRT3847_142421C.1
angngnacaggtatctgtnccttcatcttccccaactctccatcncataccnnnnanntgntnncctatcttttcnccttnatccaccaaagccanggtttnctctntcaatnttcatttncatgccnctcagattcangggattatgntttctctgtcgcacaaaccctttngctncttcggtgtaaactcctattncttgttggaatcgaaaagggtcctttgnctgtncttgtctactgtngttgatgtctatta

SEQ ID NO: 46976 - DNA, 240 bp, Glycine max
  Clone ID: PAT_MRT3847_142422C.1
cactgtacatcgtagactgatcaaaaacccatctctgtctacctatgatagatctccaagattggctctaacagaaacgaggaatactgtgctttcttatgagatgcttctccacctaatcatagtgactatcatgaatcctgtgggtgtaccatacggtcatcacccttgtgcatgtgtatattcattcgagctgggaggatcataatgtcactcattggaaacttggggatcatagga

SEQ ID NO: 46977 - DNA, 213 bp, Glycine max
  Clone ID: PAT_MRT3847_142423C.1
tttctttggcctgtgctgagccctgaggggccacaggttggaacccaatgaacccgaatttccacccaaagcgacattcacaggaaaaagcctcggaaaagaaagagcgatgaggaaaaagcagaatcacaggctgaagcagcagcatcagcaaccaacaacaagctcttaagcaacaagctagtatacaacaacagtaacagtacccccaag

SEQ ID NO: 46978 - DNA, 819 bp, Glycine max
  Clone ID: PAT_MRT3847_142424C.1
ggaatcaaataagtgtatataacaaaaaatgagtagtcatatacacctgataaaaaaaatgagaactcggccataccggaaaatacatagatatttatcacagtgaccagttagatcgaagcactaaggcagctgttttcgatttcccatctattcccaatacaagacctggcttcaaacaaaaattattacccatgttaaattttagatacgattcagcctgaaaatgagcctcatttgccgaatttccaatcatcctcccactgagactcgttccccaaccaaatgaatcttcagacacatcagatatggttacacccaattgtaaatatttgggatttaatttgtccatctcgacccaacctccaatctttgtaaaatcatcaagttcagactctgccattaaagcaatagaaccagctggcacacgtgtctttgttcctattaatggcaatacttcaggtactgcctcagaaacttcatcttcatcttgcttggacacgagtagtggaattgtaagagctccaaatcttccaagtttctttgatgataaaggcatatggtgaagacccagaatagacagttttgatcctctagaaaattgatacacaagctgcccaaaagtgctagatctattatctgttatactagaactaggtggcatacccagaccagttacaatttgagccaatgaagcagtaacatttgactttctcacagttatgccaaaagcagtaccattgtgcaggttgagaagaggtggcccaaaataggaaaaatctgtaagcccttttccaacctgatgaaaggaattagaag

SEQ ID NO: 46979 - DNA, 539 bp, Glycine max
  Clone ID: PAT_MRT3847_142425C.1
tcttttccttctaaccgctgtttccgcatctcgcttccttcccaaactgtagattcgtttttttctctctctatttcttccttttatttttatgccttctctctcttcagttttgtttctccaatgtgactggtgttgttttgtgtttttcgtgtgcgtcgttcgttaattttgttttgtgtattcggatcgagatttttcgcgttcggttgcggggatcttcggtttaggtttgtttagggattttgttttctgtttctgttgctgatgagtttttcgttggatttgtggtgttctgtgagattggcggactttttatttttatttttatattccttcaatttttttttttttggaaaaaatgaatatttatttatggacggaatggatttgcttttttctgtctctaaattcttgtttaaacggtggtgcgactctcctatttagttctgtttttatgaagcctgttcactgcaattttgcttttgaaaaaaagggaaaactatatatacatatatataaatctatatatatatata

SEQ ID NO: 46980 - DNA, 470 bp, Glycine max
  Clone ID: PAT_MRT3847_142426C.1
attgactcttctgttcgggaactcttttttctctcaacctcactcttcgggatagatgaatggaagaacactcttgagaaccgtcatccccaaaccacaacaacaccaccaccattgtcgtggtttctcaacatacgacataggaacatgcatttccaccctccaatcatgtgcgcacaatgcaaacctctccaaaggcaaggaacttcacacccacttgctcaaaaacgcgttcttcaaatcccccatcgccatcaccaacctcatcaacatgtactccaagtgctccctcatcaaccattccctcagagtcttcaacttccccacccatcacaacaaaaacatctttgcctacaacgcgctcatcgctggcttccttgcaaacgcgtttccccaacgtgcccttgctcttgataaccaaatgaggcatctaggtattgctcttgacaagttcactttcccgtgtgtca

SEQ ID NO: 46981 - DNA, 482 bp, Glycine max
  Clone ID: PAT_MRT3847_142427C.1
cacacatgacaggagagatcatcatggaaggatcgggcaaaagatagaggggacaatggtggggacaccgaagaatgtgccggactttgacgccatatcctacgccataaaatgcagtggtaaagacaccgccaccgccctcgtgagcaaaggcttggacacatgatgggatgcatttgatgatgcaactgactctgttagtgacatcattggcctgaagattatcatggatactatgactgatggtaatacagaaggaaaaggtgaaagcaaagcctattacgaaaaacatctggagaccttgcctacgaccttagcaacgcaggaagcatgggatgttaacttcgattggaacgctaactgggaaactacatgagcattttacataacattctacatgactgacgatttgactctcgagagtgttctactcaatgacattccaaacgatggtaccatcaacggaacctgtaactcatggg

SEQ ID NO: 46982 - DNA, 279 bp, Glycine max
  Clone ID: PAT_MRT3847_142428C.1
caagagggagttgctcatgtcggtgaatttgttttctggtgcctatgcttctctgcccacaaaaactaatttggtggaaactcccaaggaatggcaactggattgtacctttttgcaaaattccttgggtgccgactcccaactgtcgagagtttggtgggcacagaccatgagggttatgaccctcttccttggtggaattcaaaaacatgccactcccatgatgcccctagatgaagaaattctttataaggttgcacaagatatggctgaggaatg

SEQ ID NO: 46983 - DNA, 584 bp, Glycine max
  Clone ID: PAT_MRT3847_142429C.1
attctctaagaatcaaatactttctattcaatttctttgaaattcacaccaaaatagaattaattaagcgcaatgggtttcagtttgcgtggtgttcaaagacgtgtggatgtcccaaagggctgtgtagcagtgtatgtgggagaaaatcaaaagaagcgctttgtgattcccatatcatacttgaaccaaccttcatttattgagttgttgaatcaaagcaagaatttggatttgatcatccaatgggtggcctcacgattccttgcagagaagatgtgttcctaggtgtcacttctcgcttgcataggcgataaattaaggaactcaacacagatatcatatgcaagtgtcaatattgatcgaccaattagttttgtagaaatgacaaagtctaaccgtgtatactcactctttcttctttccattttgttcctcccaggaaacggaaagatgtactctaacatagaatagagttataggaatacaaagaaagattattaatttttcttctatgaagagtttggtttctttttgttttaacttttcttttggtaatagtatttttattttcccgttagttt

SEQ ID NO: 46984 - DNA, 361 bp, Glycine max
  Clone ID: PAT_MRT3847_14242C.1
gttcctgcacatttggtgttcctttggctgagtctgtgccttcatcaacgccccaaaaagaacaaaagacaatgttttttgttccaaaaccaaactgggctggctctgctttcttcgtcgaaaggtgtaaaaaagatccttttggaaggaagctagggggggttttccgaaaaactcgtttaatctcggggggggggttgttttgctccctatagagagaaaaaaaaactctttcttctcattgggggaggaaagaaaaaagaagtcccttctttggtgggccccccaagcccaaaagtttttgaaaaaagaaaaaccgccccctcttttggtgtgacgaaaaaaaaaggggccccccccc

SEQ ID NO: 46985 - DNA, 365 bp, Glycine max
  Clone ID: PAT_MRT3847_142430C.1
ggctcgaggtggccttgctctcccttctgaccgcatgcacctatctatggatgttcaccggtggtttcaaccagcggcgtcgcccgtgacagaaatggctggcgctgctctctatagccattttcctctaggtccaagctctctacttttttgaaccaaacccaaatgccttctcacccctttgaccggttctggttcctcttaaccccctcttgctctgctctccttcttgagaaaatgcacggatgtgatcagctcttgaccatcatggacgatggagcgcgtgccattgcactctaaggaatgggtccatggtggacccacaccagaccccctgatcagagccgcgcactcatactaggact

SEQ ID NO: 46986 - DNA, 935 bp, Glycine max
  Clone ID: PAT_MRT3847_142431C.1
cgctcgagccgaatcggctcgaacatttaagtccaattctctcaaacactacaatcaaacaatggccaaggtttaccctcagatcatacccacatctccagatcagactcagtgtctcacctccaaaagagaaacatacactctatggttgaaatcacttgtcttccactccaatggatgcactgtctatgactctaatggtgacatcgtttaccgagttgacaactatgacagaaagggtagaagagaagttaatctcatggatctacgaggcaaagttctctgcaccataaagaagaggttactagctcttggatgctgggaaggccacaggtgcatgagttccgattttggtacacaggaacaaccatggtttcaagttaaaagatgtaatcaaatgatcaaagggaaagtagcttgccaaatttctgtggggtgccaaaaatacagcctagtaagaataagtggcaaaacagaagcatttaagatcgtaaacatggatggacaaatagttgcggaggcaaagcaaaaacactcaccctcaggagttgtactgagtaacgatgttctaacgttggatttggctgcaggcacagatcattcccttataatagctcttgtcacagtatatggattgatatgcggtataatgtaaagaaacaaatgctggttgctccattctccattccgtatgagatatgattcacacaatttattcggtgactgactcttatgttattcacaatcacatggttcactttgtaaattttctgagtgacaagttttgtaatcagatttttgcttaatttgtttgtataaagattttgagattcgtcaggatatcgtagagatatatctatgtatacatatatatttgtttacagaggaaacaagatacaatttattatacattcgatctttggaattttaccaaa

SEQ ID NO: 46987 - DNA, 480 bp, Glycine max
  Clone ID: PAT_MRT3847_142432C.1
atgacgacaatggtggctcaacgcatcatcatcgtcactttcttcacgcttcttcttcttcaacacctaaccttcgccaccgctactgcactttgccaattctcttttctcgacggaaacacgctctacaattacaccctctcttctcccattcgcaacttccctcacggcatcctcagcgaagatggattttacaaagtggcagtaaatgataccacactttggtttcagctttgcgatggaatgattttcaatcacgatcctccaatatgtgctgactgctgggattgtggagggccaaaacattgtgggatgaagtgcaatgcacttgtggcaaacaacgttggagatgacaggggtgttagggtcagtctgggtggaggaactgcaaatggaggagttgtgcgagggagagttgtaggctggggggagggaagctcactggttggggtgtggcagttggtggtggagactgagtga

SEQ ID NO: 46988 - DNA, 1195 bp, Glycine max
  Clone ID: PAT_MRT3847_142433C.1
cgcttctccctgcttcttcgctctcggcctccagtatccggcctgcgttctctcccgtccttcagcggtgtctattttgtcccttcgcaaccttattgtctgtatctcaacgccttttcttcgcaaaccctgaactatcgccaccggaaatttcactacggcaattcttgtgtctatgcttaaaaccaatccgcattgaatggaattgtacagcctgtcgtatgttccctcacgaaatagtaggccaactcaccttacactaattcgtcatcgtctcatggctgctcgacctatcatcttcgtcaggtagtctatcttgccgcttccccacctccccttcgccaccgctactgcactttgccaattctcttttctcgacggaaaaacgctctacaattacaccctctcttctcccattcgcaactttcctcacggcatcctcagcgaagacggattttacaaagtggcagtaaacgataccacactttggtttcagctttgcgatggaatgattttcaatcatgatcctccaatatgtgctgactgctgggattgtggagggccaaaacgttgtgggatggagtgcaatgctcttgtggcaaacaacgttgggggttatcatgtatgcacagccataggacgtggccaaaaaatagatgttgacattattgataagaaaaatccccacactggtgtcattgttaaaatgtcgaacagtggccctaagtacaactgttctctagctgtgtctgttctttgcaatttaaatggagtgcaaggaccgcgaactctggagagattaggggcctgtgattatgttatcttgctggcatcctatcattctctctctctctcctccaagaatacgaacaatgacttggaaaaagttgaaaacaaagagcaatatgaaggtgatatgaatttaaaaccaaagacaactattatttactgttgtaattttctcaagcaggttactgagctaaagcacccatctggctgtgccatcattataaatgttcatggaggagggtgggggtggtttggcaccttactgatcattgttttgtgcctttttgctgcatatctcttggctggtatagtttaccgatttttcttcctcgggattcgtggtatagatgtatgttctctcctatccttttgttatttacttgtcttgtactctgtttcttggtag

SEQ ID NO: 46989 - DNA, 190 bp, Glycine max
  Clone ID: PAT_MRT3847_142434C.1
tcggagttcggctcgatctctagtcgggtctggcggctcgtggagagagttgtctgtggttgactctcttagactcaaaagcctgttgcgtgctttgcagtcgagcccgattatggccaacagtaacctccctcgaagaatcatcaaggaaacgcagcgtttgctcattgagccagcacctggaattggg

SEQ ID NO: 46990 - DNA, 364 bp, Glycine max
  Clone ID: PAT_MRT3847_142435C.1
tttgttttttttttttttttttttttttttgtttttttttccccagggggagcattccctttaaaaaaaaaaaaaggcagagaaactcccaagataaaacccccttggggatgcaaaggtgctacttggtggaggggcttaacggcccacaattaagagcaattttgggttcactaaccgctcctagttttttgacccggcaaacagtttaaacaactcgccccctccttgttcctgaaaccaaaggggggccaaagaaagatttccaccgacccttgcatggactacactttggcatcaacaggctggggcctttccgtccggtgcttaagtaaaagaaataaaaaacccccctacttaaggg

SEQ ID NO: 46991 - DNA, 502 bp, Glycine max
  Clone ID: PAT_MRT3847_142436C.1
caggcacacagaatctcaccgtcctgagtgcgagacctattgtagcttggagagattatgaggctgctataggcgagggccatgtaaagacttttgcatgaagtaccaaactcaagaggacactctcgtcctatcatgtggatctttaaccaatcctaaaggaatccatgaccgctgggcattctgaatcagcagtgttggttgctcgctcgcataaccttttgagatggagctacacaagcattgttccatctgctccaccagagctatgttgtataacacagatcacacggtctgagaggaagcacgcatatatggctgttggggttgcagactctggtgtagacctggcattgggaggtgacacatatgtcaactgcgaggacagaatggacacgctttcagacgatatagaatcgtgtgcgcgtgcgactgtgccacatatatgctcctaccactagctctagaaagcaacttaagggttcacggacagatagctgct

SEQ ID NO: 46992 - DNA, 210 bp, Glycine max
  unsure (1)..(210): unsure at all n locations
  Clone ID: PAT_MRT3847_142437C.1
aaaaaaaccttcaccaacaacttnataaaaccngtcccttctcttctcctttccnaaatcnatttgatcactcctgtattgngttttgttccttccttggttcgtnccctccacaaaccaaaaanccaacaaaagaacgttcattttnnattttcgtttcnaataaagagatggccggtggtntattcggagacattctttctcggaaga

SEQ ID NO: 46993 - DNA, 274 bp, Glycine max
  Clone ID: PAT_MRT3847_142438C.1
ggactttgaacatgtcggggatcgccctcagcagactcgcccaggagaggaaagcatggaggaaagaccacccatttggtttcgtggctgtcccaacaaaaaatcccgatggcacgatgaacctcatgaactgggagtgcgccattccgggaaagaaagggactccgtgggaaggaggcttgtttaaactacggatgcttttcaaagatgattatccatcttcgccaccaaaataaataacacagggcctaaataagcccgtgtatcctggaag

SEQ ID NO: 46994 - DNA, 321 bp, Glycine max
  unsure (1)..(321): unsure at all n locations
  Clone ID: PAT_MRT3847_142439C.1
gatgtngngtacgtaagctcggaattnggctcgagattttgtctcacncgcgaacctgaatacaaaggcttggggncaaagctagttcangccttgaattcntactctcttnacacactctccatggacttnanncaagacttgnactgtctcntatntgagcaacgcngnaagctngcngcngcagaggncatggaattggacntnganttngnnttcngcntccagttaaaggaagnatcgntgagtccntcnccgcccagcnctcctcctcctccgccgccgncgccgngatcatcgaanaacccgtcgtcgtcatcc

SEQ ID NO: 46995 - DNA, 452 bp, Glycine max
  Clone ID: PAT_MRT3847_14243C.1
tgagttcattgaagttatcaagggaattcatgaaaagggtacccaaagagttggaatttaatgaagcctcaaaagaacctaactccttgtaccaagaggttaggttcgcattcagagtacaccagtttgcaggtggctttgattcagagaccatacaagcattccaagaattgaagaagattgttagtgctagtaccaagctataggaaattgatcattactccaaaccaaacttgttaccaaaatggaccacaaatgtgtttcctatattgtcttcctcccataactgcgtgatgtttcacacttcgaaggtggaattgacaagcatgcatatgctcccatatttatgtactttttcaatgcattgcctatgtttgacatgtaggcttatgcttccctgattacgcaactatacctgaagagccaaacccacgatagaggtttttattttt

SEQ ID NO: 46996 - DNA, 384 bp, Glycine max
  Clone ID: PAT_MRT3847_142440C.1
accgcgatctataaccggacgcgtggtttgacttttgaattgcccacacgcacctgaaccggtaccagcattggctaaagctagacctatcacaagatggcgaacacatggacatagtgactgacagagtggcaaagtgagaggagcagaggtccactcaccaggcacaacatgaacatattctagggcggaataagtgccaaatgagggggcttacgcaaattaaatgcaatgcgatgacatggccgttactgacacataaagagacaagcaacatacgcctaaaccaaactgaccaagctcgaccagaggcggtttgagtattgcacgcaatgggggctttgaacttgagcaggcatgcgaagcccatccgctagaggttca

SEQ ID NO: 46997 - DNA, 348 bp, Glycine max
  Clone ID: PAT_MRT3847_142441C.1
ctttttcatgctttgatcgatggtgtgatcgacaggacttttgaggaggcatttgccgaacatgatgggaagcttgacggggagaatggcctggacctatggttgcggcttgcattccggctgacaaacctgacgattcatttgcttaatgatattaccactgcttttaccagtactgtttctaactcagaagttgacgatcctggaggcgaaccacggcgcccacgtcagtttcagtgttcttgacagggaatgggattggaacgggtcgtgaatgaagaccggaatgattgccggggattatgtgcagggtgggtatcggggtgaatttggggtttatttcaagtt

SEQ ID NO: 46998 - DNA, 504 bp, Glycine max
  Clone ID: PAT_MRT3847_142442C.1
ccacgcgtccgcccacgcgtccgtacggctgcgagaagacgacagaagggggagtcagtgtgtgacatttttttcttcatttctctcttacaattttttgcaatggcacaaacacaaacccagagaccctgttcaagcgtcctcgattctctgggggaagaaattgtgagaatcgtcgcacccgtttcaatatgcatgttcctggtcgtaatcctggtctcaattctcaacaccgattcttctctcttcgtcgcatcgatgagcatggtcaccatcgcgtacaacgaaacaacctcggactccacctgggacaagttcctaggagcccttctgaactccttagccttcgtcgtccttgtcaccttcgcaaccttcgtcttggtcctcctcttctacttccgatgcaccaggttcttaaaactctacatggctttctccactttcatcgtgctggtattcctcggcggcgaagtctcgatctttttgatccaaaagtttagtact

SEQ ID NO: 46999 - DNA, 241 bp, Glycine max
  Clone ID: PAT_MRT3847_142443C.1
cttgcttaaaatacatatatatgtaaagttatattttcttagaaacatggatgtttacagccattgctttcaaagagattattactgtgtattctccctgttttacaatatgttttcatgaagactatgttacaccagaggcttctgattatcaaagtgataaccagttttaactgccggtatgtaccagatttgtgaactaatttaaaaaaccacaaactatgaataaaatggggtttgc

SEQ ID NO: 47000 - DNA, 346 bp, Glycine max
  Clone ID: PAT_MRT3847_142444C.1
ctggtttgcaaaaagacagacggaggatggcggacctttttaccgggaacaaaagcaatggtcacttggtttaaagaaccctacagaaagatccgacggaggggaagtcgatcctctgaagggaaagaaaaccactcactgggctgagcacactctactaaagcacaattggtttgcactataaccttatatgctgaacactctgctactggatcacagacttcaggtcagatttaaacctttgctgattctttttcagccatatggattgatgccaggatcgagacagagaatagatggcttatagattgcagttcacgctcaggtggaaaccaacgtgggtaga

SEQ ID NO: 47001 - DNA, 401 bp, Glycine max
  Clone ID: PAT_MRT3847_142445C.1
tgaactcagtttgacaactggaaatgctggtggaagattagcatgtggtaccaaaaaaaaaaatataaattcgatcagttctattcttttcatattcacctattcatccattccaacatgatgttatttggtttactctttgcctcaatgttctaagatgaactattttctataacatcatgatcaattttcgttttatgataaaaaaaagtacaacgatttcctcacaaacttgtttcaataaataatgcgtgattttgaatgatttacggacaagctctatactaatttttgaaagtcctgcactttagtctgtgatagaaagctgggtcctgagctacatcatagatgaattatcaactaccaaattgaacagagacatgatttattgacatgccata

SEQ ID NO: 47002 - DNA, 475 bp, Glycine max
  unsure (1)..(475): unsure at all n locations
  Clone ID: PAT_MRT3847_142446C.1
ccnnaccattagatcataaaaacaaacctttttatagacaagttggataggataaattccctatccacccgactggattaaatcaaatcgtatgggaaacaacataaaatcaatctttacctgtactggactggctggcccaaaacaaaagaaaaaaaaatttcctttgctaggttccctaaaataaaaacaaaaataaccctccccttctatgccagggggggtgggntttgaactgaacagaaccccccgcactgtctttgcttgtccaaccttgaacttacccaataaaagctttccggttttgggttttgcgacccttttgaagcgaagagaaaggtttctttgatataataaaagagccctcccctccttataatagacgtgacgtgggttgaatcctgggaatggatctactaagctttttgttttaagaagttgatttgagaggatttccactgaaagctttttttta

SEQ ID NO: 47003 - DNA, 310 bp, Glycine max
  unsure (1)..(310): unsure at all n locations
  Clone ID: PAT_MRT3847_142447C.1
acgtattggactatttgaaaaaaaacgatttgctatgaactttgtcacgacggttgattccaggatgctgtctgcatattcaaaagttctaacaatgtgactgtagaggagttgccatctaatgttgctgatcngcagtcacattgtagaacttttgaatatcagacagcattcttgcatcatccaaagtcacaaagtttatggcaacaccttttcttccaaaacgcccacttcgtcctatgcgatgaagataattttcaggttgggttggcagatcatagtttataaccaaagacacctgctgtacatc

SEQ ID NO: 47004 - DNA, 211 bp, Glycine max
  Clone ID: PAT_MRT3847_142448C.1
caaacccaaagggcaagccccttaaggttgggtttttatttaaagcccatgggcttggttcctaaaaaaaaaaaaataaacatttttcttttattttccaactcttacctttaaaagggccaaaattttaggcccttttattcctaacccaaccttacttgggcccttttgggaatttttccccttggtaaaattaaaattaaaattaaaa

SEQ ID NO: 47005 - DNA, 205 bp, Glycine max
  Clone ID: PAT_MRT3847_142449C.1
aggcgtgcgtacacgtccgagaagacgacagagaggcatgcatctcaaccatgggggctaaggtttcaagatgcggtaacacctataatgcgcggaattatatacttacatcacgacttcttgatcttgctcattgaaagcggccgttatggatcatggctattgcttcgtgctttgtgcaattccaggattaaaatgaacccaa

SEQ ID NO: 47006 - DNA, 319 bp, Glycine max
  unsure (1)..(319): unsure at all n locations
  Clone ID: PAT_MRT3847_14244C.1
anttctcanncacgcgtacgtaatctcngaattcggctcgagagcnaaacgcatagaancgaaanatngnagaagagnaagnnaagnacgntttagatatttttgagagatggcatcgnctaanaagatcacccnnnagatttcggacgntnangccttcgaggtggaggagnctgtggcncnggagtctcagacggtcaatcacagtantcgntnactactncgcctacaggtggaancccncgncccantgtnaccagcaanagtccngcgagtgggtagcgagnnncnncaanatcggtntgctgtnagagtgtnt

SEQ ID NO: 47007 - DNA, 828 bp, Glycine max
  unsure (1)..(828): unsure at all n locations
  Clone ID: PAT_MRT3847_142450C.1
ccacgcgtccgcccacgcgtccgcccatgcgtccgcttaatgttggcaacaacaagcaagcgagttgcaataatttagcagttataaattctagtatgatgtctcatagctaaatattaactccaccaacacgattaaatgtggatccttatgtggagtgattgctattaagacattccgaaaaaatcaaagtcataatactcaatgatctctaaacttctagacttttgatatgaaaacatgtaatttcttgttctcttcaattaacgcataatgtgttttactactttctagtgttgcataccaagattaatcatatatcaccttaggagccccatacaaattattttatacatgcatatttgagatttaaataatgtgagtaatttaaatcatagtagtagcaacaacaattaaagaagagaatataaacatacaatgcaaaaataatctttatggtaaatttcaagagccaaacatgatacctagcgcaccattaatcctcaatctttggatcgaaaaagactaactgcaagtgatactctcaacgcattgatcaaacattggtgataagtcctgtcaaacaacggttgtcgttggacacttcattgctcacatgaaaaacttatatgataattactccggttaaataatgattgtctttgaacatttcattattcacatggaaaatcacactatgtataacaccacatgtttaccatcgcnacagtaattattctaccaaattgtgtcttgcttttggccgaacacaattcgtatgaataatttcatgcaacatccatgtaaattcatcaaatcaacttatgc

SEQ ID NO: 47008 - DNA, 380 bp, Glycine max
  Clone ID: PAT_MRT3847_142451C.1
tcgcggcgagacgagccgtttctaattaatgataggtgtcaagtggaagtgcagtgatgtatgcggctgaggcatcctaacagaccggtagacttgagcaaacttgaaatggctgcattgtggagatattggcgacattttaatctagtggatgcggtcccaaacccatcaaaagagcagctagtagatgttgttcagaggcatttcatgtcgcagcaaatggacgaattgcaggtgattgtgggattcgtccaagctgcaaagaggcttaagactgtgtgcaaatgagaagaaatgatattttgataaatgaaattgtctatgctaacaaagatagtgtatgtaatatccactttccttagtattatggtaatatttat

SEQ ID NO: 47009 - DNA, 361 bp, Glycine max
  Clone ID: PAT_MRT3847_142452C.1
ccacgcgtccgctctaatctgttttacaacaagtttgtgtaattttgtttgtgttctacaactatgtttaagtttagatttcgcatttatgttctgtgtttttgcatttctttccagtgcctataaactattcgttgaaattccccttgttgtttataagtgaatcaaagtcgagaccatattgaattgtatctttgagtcgacctaggttaatcatgtactacagaatttcatagtgttatttgttttaaattgattagacaattgttattaacaaccttgcaaaaacatacgtatgtgagtaatagcaccaaaatctactcactaaatgtctttgggtatgaaaactaaattactttag

SEQ ID NO: 47010 - DNA, 436 bp, Glycine max
  Clone ID: PAT_MRT3847_142453C.1
actgtccaggtcctgtcacccgacacagggagccaatgctcgcagaaaaacctagagtgcacatactagcctccctggggcggggtaaccctgcaattgacctataactaacaaaggcgcacctgctgtaaacaccaaccccaacgccgccttagcatgccccagccgcggaagcagctgttgcttggcaactggctacataggccgaggctaagccctaggctacccatacaccgcctaaaccaactggtacagagccgcggcctacagcagaaggggacggtaaggcggctgctgcggccgcacccgacagtgagtgataagaagagcaacctggggagtaccgagagcagtgtggttaagaggcctcaccgtctggtgagagggggaatactgctaggaccgaggttgcaagcaggcagattgcgttactggt

SEQ ID NO: 47011 - DNA, 1450 bp, Glycine max
  unsure (1)..(1450): unsure at all n locations
  Clone ID: PAT_MRT3847_142454C.1
ggattaaagaatttaataagatagttatgtgagtgtaattaaacaaccttttttaatataatttttaaaatactatattacttatagttaatagaaaaagatgagaattttagattgcagtagaaataatgagtcagtcaactggatcaaatgaaacaatagagttctctcgagttctttcgggtcactaaatgaattatttttactcatgtgaaaggaccttagaatattacgcaaaccctttgggttaaaataaaggtttaattaaatacgataatactttttattaatttttaaaaaaattctaattcaatatgcattattttaattttcactttatttcttacatgtatattttcacttatcatttttaactttccaaattcttggtgtagatttacattctacgtgttccatacgaaatagtgaaaatacaaatataccattagtggtctgattctagttgagttaattctttttgaggaagcaactttttttattttatcaggtctataataatatttttgttttaatatttttataatttaagcagacccattactgaaatgagtcggatcggagccccaaagagttggatccatttggtgggaaaccctaccaaaacctcggaaaagagaggattttggttaaaaccccttttcttgttccttccttccttcaatggcgaaaacgtacgcagcgggattgttgtctgccatagctgccgccactgcagctgcatctctgaatcagaacaatgcttatgcagatgggattttaccaccgaatccttctgaaattgaaccttccccggcgccgccgccgcctaaggttcgaaacgatcatccaaggaccacttctgctgggttcgatccagaggccctcgagagaggggtcaaggctctcagggaaatttctaaatcaccccatggcaaaaaggtctttgaagttatcaaaaagcaagaggagacaaaacaaactgaactttctgcaaaggttgctgagtttaggcaaatgaaagcacagcatgagactgaaagacaaaggattatatatgatgaacaaaaaaagctagcagcatcaggcacaaacaaaatcccaaatggccaaatatgaggatgagttggcgaggaagaggatgcaggcagaaaatgaataccatcgggccaggaaccaagaactagtgaaactgcaagaggaatcatcaatcagacaggagcaagctcgacgtgcaacagaagaacaaattcaagctcaaagaaggcaaactgaaagagagaaggctgagattgaacgcgaaacaatcagagtaagggctatggcagaagcagaaggaagagcacacgaagcanagctagcagaagatgttacaggcgaatgttggtttgatcgtgctaatgctgaacgagaaaaatgggttgctgccataaatactactttttgacatatc

SEQ ID NO: 47012 - DNA, 312 bp, Glycine max
  Clone ID: PAT_MRT3847_142455C.1
caaccccaaaaaaaaaaaataatcttcattaggtgcccctgaaaaaacttaaacacggggactttatttttggctacctcaccttccaaaatatataacaaataaaaaacactaaaatcgctccaacaaatcctcccctcaaaaaattaccgatgcgcattttttaaccaccacacatatcttggggccccccccaccccggggccaccataacattaaataaactgtaacaaaaaaaaataaccatacaaagttgaaacacatcttatcccccccatattaaaatgaaaactttataaaaaatatgaaaaa

SEQ ID NO: 47013 - DNA, 372 bp, Glycine max
  Clone ID: PAT_MRT3847_142456C.1
attcaatattttttattgcatattcttttataagtattgttggtatattgaaaacaccgtatcttctacaaacggtccaacccaataaatccattggacgccccacgctatgacaaagccgaagaacacagcaggaccgaaactcccagcaaaaaaatgccggttccagtgacagggagtgaaaccaagtgaaccatgaatactgtaaacccaatgagacacggggctaacacataaacatgagagtccctatcgtacctcttaggaccagtgtcgagaaaaaacggagtaaacaagaacaaaggtaccaatgaacacaacacccaaagcggtacccttgctggagccattgatgacagtgttaaccccacc

SEQ ID NO: 47014 - DNA, 262 bp, Glycine max
  Clone ID: PAT_MRT3847_142457C.1
cctggagcgagtcccagctcaaggaattctgtgataagaacggcatcgctgttcctcaaggcaccaagtccaacgaacttcgcgcattggttcgcaagcaccgagctgatattctcggcgacaacttgtctggtagtgctgcatccgcttacggtgctgctacttccaacgctcagaaccagtacgccaaggccactgatagcgcttctttggctgcccgagatgctttcaaccaagccgcaggaacttggtctgatagccg

SEQ ID NO: 47015 - DNA, 813 bp, Glycine max
  Clone ID: PAT_MRT3847_142458C.1
cggctcgagacggctgcgagaagactacagaaggggaccatttataattaatcattccgttactatataggcagggccaatccgacaccaattttattctgcatcacggagaactctggaggaatttgattgatggctgtaaactgtacttcctcaattcgaatcccaattcagaaatatggatcatttctcaagtaccccaacaaaaaattgatgtccaaacgcagctatgtcccaatgaaaaaggcatcggtactgaggatcacagcatccatcaagaacaaggtttatgaagatcactcccagggcataatctgctaccaagatgagtttggagaaatagtttgtgaagggtatgatgaagggccttgtttccaaagaattccagagacgaccaatcgtccaagagatgctcaaatcacgaagaatcttcttttacgacaaagttggattcagatagttaaaggagagaactcgaatgatggtctgcaaaaggacttgaactgtaatggctttaactcattctgctaataagcttagcaacatataatgtgtatcatcagaaattaagacttgattgtatgtgcagagggtcttgcgagttgtaacttttataatggcaatgcttttcttaattgcctttccttttcgactagttgttgtattatctgatagaaaatgaagatgacttcctatcactcttgcgagttgtaacttttataatggcaatgcttttcttaattgcccttccttttcgactagttgttgtattatctgatagaaaatgaagatgacttcctatcacaaagcaat

SEQ ID NO: 47016 - DNA, 711 bp, Glycine max
  Clone ID: PAT_MRT3847_142459C.1
atattccggcagggccaatccgacaccaattttattcttcctcacggagaactctggaggaatttgattgatggctgtaaactgtacttcctcaattcgaatcccaattcagaaatatggatcatttctcaagtaccccaacaaaaaattgatgtccaaacgcagctatgtcccaatgaaaaaggcatcggtactgaggatcacagcatccatcaagaacaaggtttatgaagatcactcccagggcataatctgctaccaagatgagtttggagaaatagtttgtgaagggtatgatgaagggccttgtttccaaagaattccagagacgaccaatcgtccaaggtacccaattttgtattgtatttaacatcatcaacaaaaaataaaataaaataatcagaggtttattactccaaatccaaattagtacttttaatacttatcttgtgctggcatgggttcagagatgctcaaatcacgaagaatcttcttttacgacaaagttggattcagatagttaaaggagagaactcgaatgatggtctgcaaaaggacttgaactgtaatggctttaactcattctgctaataagcttagcaacatataatgtgtatcatcagaaattaagacttgattgtatgtgcagagggtcttgcgagttgtaacttttataatggcaatgcttttcttaattgcctttccttttct

SEQ ID NO: 47017 - DNA, 652 bp, Glycine max
  unsure (1)..(652): unsure at all n locations
  Clone ID: PAT_MRT3847_14245C.1
ctttgagtgtgcaggttggagagaagtgtgaacagtgcagagaagacaagggagagtgcaagtaaaagatataggagttttcatatcccttgggagtggatgctggacacaggcctcattggtcagatgaagctgagttcattgaagttagcaagggaattcatgaaaagggtaaccaaagagttggaatctaatgaagtctcaaaagaagataacctcttggtacaaggagttaggttcgcattcagagtacaccaggtaggtagattacacatttgcactacctcagatattcacaaaaggaacattaatttaaatttgttcatgtcatgaaccaccaaaacattcagtttgcaggtggctttgattcagagaccatacaggcattccaagaattgaagaagattggtagtgctagtaccaagctataggaaatagatcattactccaaaccaaacttgttaccaaaatggaccacaaatgtgtttcctatattgtcttcttcccataactgcgtgatgtttcacacttcgcaggtggaattgacaagcatgcatatgctcccatatttatgtactntttcaatgcattgcctatgtttgacatgtangcttatgcttccctgattatgcaactatacctgaagagccaa

SEQ ID NO: 47018 - DNA, 516 bp, Glycine max
  Clone ID: PAT_MRT3847_142460C.1
tcctctagagcggccgcttttttttttttttttttttttttttttttgaaaggaaaattagggatggaaccggtttttctatttacaaacgcccatgtggttgagcaaaataaagaacttattaaatgtaacaaattttcaaaattagaaacacatatgccaagtttctttccacacatgtgctgacaaatcgttttaataaccacgaacaagaaatgcctacacacacccatgtttgaaccttttccccaaaattggcttgcttattaagccattttttcatgagactcacccttgcagaatggaaacacataccccatcccctgcctaaaatatcgccaccaaatagacaactactttctaacatgtgaccctaaccataaagcctctgccgataccttaccatattttcacatacacgctctgtggactcggtcaaatagcccgacgctctcttttgaggaggctaaaaggcaggatcagtggggttcaacagttatccaagccatcttgaag

SEQ ID NO: 47019 - DNA, 428 bp, Glycine max
  unsure (1)..(428): unsure at all n locations
  Clone ID: PAT_MRT3847_142461C.1
gaaaaggttctgatattcttgcagaagctattccccaatttatcaagagaattgttcctagggctaccaactgaacattctccttgataaattggggaatgttcagttggtagcaataggaacattttcctggaggacgtgggaaccactaattcgaaggggatcgccaccgcgtcgtggcgccagccggttctcccattactaagttttattgcacgcctggggagatccagcncatgagcncttccgtgagattatatcaccgcggcgcggannactgntnncaacccncctttnnnttatttaanntnnaccntntnntnnntnnnnnnnnnnntannnnnannnntnnnanaannnnnccnnnttttctnatnnnnnccnnnnnnnnnnaaanngntccnnnnntncccccttttttttttttt

SEQ ID NO: 47020 - DNA, 275 bp, Glycine max
  Clone ID: PAT_MRT3847_142462C.1
ggaatgttacatttttttttcatatgtttatttatttttatttacaggtattaaggtgcaacaaattacttgcttttgttaggagcaagaaagaaccccatgtatattccgtcaaacacaagggaacctgggaggcaacaatacaaggggggtaaatagaataacccgccgttaaaaaagacaaaaaacggggcatctagccgggggaaggggaagaagccttttattacgcgcccaccatatttcttgggcccaagagggaaaaaagggggggc

SEQ ID NO: 47021 - DNA, 304 bp, Glycine max
  unsure (1)..(304): unsure at all n locations
  Clone ID: PAT_MRT3847_142463C.1
cggacgcgtgggcggctgcgagaagacgacagaaggggaaactaagaagagtgagaaggtgattgacatgggtgttggttttgaagatcatactnncaaaacttttgaatcagtaattgaataaccaccttggttaaactttcttttataattgggtccaaaattctctttatgacattgcaaattggcttctcactttggctaaggttgtcccttctttgcaagcccttattatatatcgccccctttttagttttcaactttacgtacccacttctccttatttctaaattttttttcttgg

SEQ ID NO: 47022 - DNA, 438 bp, Glycine max
  Clone ID: PAT_MRT3847_142464C.1
gatcaataaactgtgaaatcaaatcaatcacacacgcacaccaggggagacggttgacataaagcctaccggcttatccacaccagggatgacccgactatacctattacattagacacaaaccgacgcaaaaaatgctaaagggaggaaacgtgtctacaccaaagagggagaccttatgaagccttacataaaaagcatcaaaagcacccttcacagccataagcttggctccatcaccatcaaaaacacatcctataggagcacacagagcaccaggctcactggcgcaaaacatagaagttggagaactgataaacatgatcctccacaagcgcctcaaaatgcaagggaggcgtgataaaaaaaggcacaccgctggtgcacacaaaccagaacccagtcccaacgttgctgagccagcacactgtcgcttgg

SEQ ID NO: 47023 - DNA, 291 bp, Glycine max
  unsure (1)..(291): unsure at all n locations
  Clone ID: PAT_MRT3847_142465C.1
acgaggttgagtactttgccacatcatatggtagaaccaaagtggcttcattctaaagaccggaagctgcttcaaaaagatgatttgaagaggaaagctcacattgttgtagcaaaagatgacagcgggaaatttaaaacaatcaccgctgcacttaaacaagtccctgataatagtgacaagaggactgtgatctatgtgaagaaaggagtttacgatgaaaatgtgagagtggagaaagactanaatggaaatgtcatgatcatntggtgatggtatgaatgccacaat

SEQ ID NO: 47024 - DNA, 422 bp, Glycine max
  Clone ID: PAT_MRT3847_142466C.1
ggctcgagatcatatacacacgctctgtgttgggttgtgtgctcgtgtgcattgtgttcttgatgcccgagattccagcgaagagagattgaccatgacctctgctgtgtgcgcattggtgcttgcggccctcgccgtggatgccgtgaggcccatggctgacagctgatgcgactcgcgctccacacagtgcgactcctgtcttccgggattcaatttacgatctgaccctactagtgctagttgtccacgctgagagccctaagccatgcgtcatgtggctaccttaaagaccctaccatgtagcagctgtgataactctcactaatgcctaataaacgcgtagatggttgtcgtgttgcctatccgactggttaagcacctatgatatatatatatcaaatgtgtcaacaatgtatata

SEQ ID NO: 47025 - DNA, 319 bp, Glycine max
  Clone ID: PAT_MRT3847_142467C.1
ggaggttccaaaaatggaaggcaagaccgaaagtcatgtgacatcggcagaagccattgtggaagggggggttcaaaaaactaggaaggatgctagcagcatatgccgggaagagtgaggcaaaagagaggctgacaatgtcactaatggcaagcatgaggagcacctgcaaggaattcttgaagggggagagagaagctgccaatgaccaatgagatgacaaactatgagatggagggagacgacaagggaagaactggatgaggaagtagaaggagaaaggagatagagggagacgaaaggtagaaatgcagagata

SEQ ID NO: 47026 - DNA, 470 bp, Glycine max
  unsure (1)..(470): unsure at all n locations
  Clone ID: PAT_MRT3847_142468C.1
tctcgagccggctcgagacggctgcgagaagacgacagaagggtgtctccattctttaggtcccggtgcttaatgtagagtttgaatgtcagcaaaatcttaactagtctacaaactttttgggcatggtccatctttttagttcttttttatatctagcgttacttacatttactatcacgtgaatttgatttctcacgtgtcactacttcttagtttgaccccaaagtgagcatctcctatccttaattatgctaagtttatactataggggcctgattaagcctaattaacatttgagaatatattagtcggtgcaagctagagaacaacaagcaagggatatgtcaataacaaatgtttagatgtgtcaaatattttgaaatgtcaagctggcagagacggtggggaaattgaggatctncgatcgattagtgaacacataagttataaatgaaccgaaatgactt

SEQ ID NO: 47027 - DNA, 350 bp, Glycine max
  Clone ID: PAT_MRT3847_142469C.1
ataaaactgatcttggacacatacaaatcctatttacgaacgcgcatgccaaggcgggggggattatggctaagagcagaccgctggttactgacagccactggtcccgatcgagtacactagatcaaatcattgtcgaaaagacactcgcaagagcgagagctgtgctacatgaactacaagtctgaaagccccaaatgctggccgttgtgcgaggaatagcagcactggtcgtgggcgggccatacgtagcagacgaattcgagaaagcacgattctaagactaaagcctgaacctgcccataataatgaaggagtttctgatgatgatgattgacgtggacatgata

SEQ ID NO: 47028 - DNA, 241 bp, Glycine max
  Clone ID: PAT_MRT3847_14246C.1
acattaaggatgaaaagttaatttggttttttttccggtgataatgagcaaccaggaaaacattccccaaggaaataaattaggggaaactggaatgaagcattggcaactattgtaaagccttggtttctgggtttaaagtcctagctaccaattaggacataaccaggggcatgtaacgcccagtccaagggaaaccggacagaactttatagatagacaacgtgtaagaactggggaa

SEQ ID NO: 47029 - DNA, 467 bp, Glycine max
  Clone ID: PAT_MRT3847_142470C.1
aaacacaatctcacccctttattttcagatgaggagagcgtagcatatacatttctctatgtttggttgctgtagctgctccagttatggttttgtaacctctctaagttcaattcttttgttgttagtggcaacccaaaaacttgggttccatacatgaacaacaaagactgttcacaaggattttgtagcttgtattgtccacagtggtgctatgtaatctaccctcctcctcctcctccctttgaatttcccagtgatgattcaagtccaaatttctcacctctagttattgcagtcattggagtcttagccagtgcttttcttctagtgagctactacaccataatatccaagtactgtgtgcacagagaatcttccaaagcgaagagcacgaagaaaacgttgaattggaagaaaatgatcacaacccttcacaccaccagcccttggatgccttaacaatt

SEQ ID NO: 47030 - DNA, 319 bp, Glycine max
  Clone ID: PAT_MRT3847_142471C.1
aaaaaagatgatcttttttttaaaacgacaaggtgcaagagcggggccttcacctacaataggccctccttctcctcccccctcttgccctagcctcgaacccgtcaatcgccaaaagacatttccgatactgttgctagagttcactaaaaatgggagtcaccattccatgtaatacttttccttcagaggcaaagaacccaaataccatgcttaaatttacaccttcaaagaccctacctctcctataacccacccatcttttttaaaaaacagcttccgcctcaaagagaataaacgccaaactctcctttcccct

SEQ ID NO: 47031 - DNA, 152 bp, Glycine max
  Clone ID: PAT_MRT3847_142472C.1
gttgtgaagggcgaggatctaaaaacatgttatctgacgagactttggaacatcacgctcctgacttttcaaaggttgcagtggtgacatcctgcaagtgacaagaggggaacattcattgctttagtggcactggggggatatatcaaagg

SEQ ID NO: 47032 - DNA, 220 bp, Glycine max
  Clone ID: PAT_MRT3847_142473C.1
tctaaaatttttttttattttttatttttttttttttattttttttaaagaaagaaaaataaaattggttttttttgttcaggtttttaaaaaggaccaggcttccctacagaaaattatactttaagctgcccaaaaaaaccacctaaagttcacgtggtgggacaaggtaaaacggaaaaaattgggaaacccttcttattacccacattccggttaa

SEQ ID NO: 47033 - DNA, 365 bp, Glycine max
  Clone ID: PAT_MRT3847_142474C.1
ggctttgaagactaattagttaccaaatccaaccaggtgacgattatcgattggtggtgtttgtgcgccgtcgctcttacccctggcgggactcagtgacgttcacgctgtcggtatcactgggggcttcatctacttgttgatatggttgtggcactacgacttggttgggggtattgtggccggtcagcgtggcattgtgacacatgattacggagcattcactgtgtcggcttgtacttttctcgttgctggggactactcaggggccttgaaccctgtccatttcgtctgcgacgccttggtgttgatttgctgtagatggggggattgttttactgggtgttgtaaatcattgtgatctt

SEQ ID NO: 47034 - DNA, 256 bp, Glycine max
  Clone ID: PAT_MRT3847_142475C.1
ctttttattttttttttcgttggaacggggccgcaaaaaattttaaaatggtggaggcaaccaaatgtttgaaaagcaccaattaattggcccatggaattgcctatatccccaatgagggtgtttgggacctttaaggggccccaaacttttgtgtttttttttacccaaggattaaaaaaaggtttaaggcaaatttacaattttgtgttttaaagttccttaggaaattaagtgccaatacaaaaggtttttt

SEQ ID NO: 47035 - DNA, 1196 bp, Glycine max
  unsure (1)..(1196): unsure at all n locations
  Clone ID: PAT_MRT3847_142476C.1
cccacgcgtccgtacggctgcgagaagcgacagaaggggactgacatatttacgtgtagtctcgctggttttcgttgcttcctttcttcgttgcgacgccaatggcttctacgggcgaaaaagcaatggatgtcgaagatgcagagaatgaagtttcagtttcatctgctattctcaattcgatagcatctcggcagaatgaagttctttctccagaagatcttgcttgggttgaatcctgcctagttaaagattctgatatttcagacactgattggatccctttgaaaaatgctttattagatattatcagctcccaacctcaatctttcagcactgaaggagaagacgttaaaattcctccctacattattagttctgaatatgctaatactgcaacaacttctgatgagaaacttaatctgcaatcttcaacttctgatgagaaacttattattctgcaatcttcaacttctgatgagaaacttattctgcaatcttcaacttctgatgggaaacacttatctgagccttcttcaacttataatgttaattcattactgatggcagtagagacaagcaccgatgaaattccagatgatgaaaagactggtactttgccatctatcaatccttttctgccaacttataaggaacacctgaaggaggagaatgaaaccattgattctggacttaatctggattcttcctcttatgagatggagcaccttgccgagaatatcttcaaaatctgggattttgatattcaatctgaggaaggtgaactggttaaacagttggacaaagccctatcagagaattcctttcaaacagtgccaccatcttttgatgattcattgaagttgaaggatagctcactcgatgatcttattgctggcattgctgacttatcattaaataaaaatgtctagagttctctgattttttaactctggtgaagattgttctgttaaattatgttactttcaagtattagcattagtatttagaagttaaaagccttttttgcttgttagttaaatttatttttattcggaacaatgacgaggccctgaggtatctttgcaatataggaccctcttctgctctaatacaaaaccacctgtgatatggattgtgaaaacaggacatacatgaaattagtgcttattttgcnnnnnnnnnnnnnnnnnnnn

SEQ ID NO: 47036 - DNA, 327 bp, Glycine max
  unsure (1)..(327): unsure at all n locations
  Clone ID: PAT_MRT3847_142477C.1
gacccacgcgcccggaagagcaaccgaaccaccaccacngnnnaggcanggccccncaacgcagnggggacacttggacaacccaacagncaggagcagacgngggcgccccaaacatttggcaaaagaacnggaacagnggcaaaaggaanngccccgaagaaaacaanggaagaaaanaccggaaggtagaaaggaaaatacattccgcgaaatttgttcttgttattggaagaacaagaatgaaaaaaaacgattttatttaaacctttttttttttacaataaacgtgaattcacatacccatagacttgtagagctaaattc

SEQ ID NO: 47037 - DNA, 223 bp, Glycine max
  Clone ID: PAT_MRT3847_142478C.1
ggagatgaggaaatcatgtggcttcttatacgtgctcctcctccttgtctgtgcttccctggtggtggtgcacacggagggaagagtgtgtgactcacagaaccacaggttccatggattgtggaatagagaccacatctgtgctttgggctgcgggatcgaaggttactcccgatgcatgagcaaatgcatccaccggcgctgcttaagcaacaggatttgt

SEQ ID NO: 47038 - DNA, 390 bp, Glycine max
  Clone ID: PAT_MRT3847_142479C.1
ccccggatatcaaaaaacttaaataaaggatgtgaagactgcatctatatagatggctaggaacaagcagtgcagtgtgtgatacattacatatgcacccggtcaagtttctcttaataatttccaagaatatcatgccttattatcatcaacgaaggaaggtaggatactttctgtacatttggcaaagtccccccttatgagcagattgttgggaatgctttgaagaagttgctatctaaacattatttatatacgtatccataaactttgatttggttgtaggttgcgcgaatgaattcttgggaaccagcaagccagatcatcagggcctaaagccgcaagattacaaggacaaccaattagattcttatgttatgatacctgatt

SEQ ID NO: 47039 - DNA, 680 bp, Glycine max
  Clone ID: PAT_MRT3847_14247C.1
tacggctgcgagaagacgacagaagggggttgaatgggccttgaaactgaagggtgtaaagtatgagtatattgaagaagatgtctacaacatgagcagtctagttatggagttgaacccggttcacaagaaggttccgattcttgttcatgcccagaaaccaatcgctgagtcattcaccattcttgaatacattgatgaaacatggaagcagtatccactattacctcaagatccttatcaaagagcacttgctcgcttttgggccaatttcggtgagcaaaagcttatgagagcagcacgaaaagcaatgacaaccagccgggatgaacgcgcaaaggctcttaaggaaacgagagaactaatggagagaatagaagaagagattaagggaaagaaatatttcggaggggacaatatagggttccttgacattgcactcggatggatctcttactggcttcctgttgtggaggaagttggatcgatgcacataatagacccattgaaatttccagccatcacttcatggatgaccaattttctcagccaccgtgtgatcaaagacaatttgcccccaagagataagatgcttgtttactaccgcaactttgttaattaaggtttagatggatgtctttgacaaattatgaatttaataaaattactagctcttttag

SEQ ID NO: 47040 - DNA, 801 bp, Glycine max
  Clone ID: PAT_MRT3847_142480C.1
agtcattggtagaaccggtggctgtaaccatccgggtcgctggtgtgcttaaagactggatattgatagctctttcaactgttatatcccagaatctacaataactgggttgaatatagttggctatgctattgcattgtgtggagttgtgatgtacaattacataaaggttaaggatgtccgtgcctctcaattgcctgttgaaagtataccggatcggatcacaaaggactggaaattcgagaagaagtcatccgatatatatgtgccagataacattggtgacaatgagggaagcagtggaggtaatggtactgcttctgatatgaaaattgatgaagaaacaccactaatttcatcatcaaggttatctcatattggacgaacacagttaaccaaccaatatgcaacaggaaagtgaaaaaccaaatactagattatttttagagtactcttttggagaaagaactaggaaggggaagctgagtctaatgcacccctattcctcattctttttaggcaatagattttataatgaaatcatatgcttgttctttgtaattacttgcttgtgtagaatgcatcatttctgagttattaccactctgaaacatggtttttgacaatagatgaggggacaaattggcctcttgtataaccaggtctcctggttgggaggcccagttatttaattatttcttaagttactgaatccaacatttaaatctaattagttttaatttttatgcttcaatctaaattttaacttcatgatataatgaaatagctactttttgttcg

SEQ ID NO: 47041 - DNA, 367 bp, Glycine max
  Clone ID: PAT_MRT3847_142481C.1
tcaaattccaattctgaaacgttttttgtgatattttattttggtcttaatcttattttccagtattgatgaaaaggaccatgggttatttgttttgcgtatcaataaaggttaattttattaaaaaaaaaaatactaaaaaaaaagaaaaaaataaaaataaaaataaaaaaaaaaatcaactataaaaataaataaaattttacatataaaaaaatataaaaaaagggcgggccctttttgaggttccaatttaacgtaccgtggattccgaattaatagttttctaatggggttcccaaatttaaattcatgggcctttttttaaaaatgtcaaggcttggaaaatcctctggggttcccaaat

SEQ ID NO: 47042 - DNA, 963 bp, Glycine max
  Clone ID: PAT_MRT3847_142482C.1
gattggaagaagtaggaaatcatgggtgggatagtttcctcccattttattctgaatacaggtgatgataggatgagagaaagtacttagtgacattataatcagagaaaagggttatacactgacagtgtaaatatttttacatagtcatccaattacaacctatcatggatacagctggccaggaaagatttagaagtcttattccaagctacatcagggactcatctgtagctgttattgtatatgatgttgcaagccggcagactttcctaaatactgctaagtggattgaagaggtgcgaacagaaagaggcagtgatgtcattattgttcttgttgggaacaaaactgatcttgttgagaaaagacaagtctctatagaggaaggagaagcaaaagcacgtgagctcaatgtcatgtttattgaaactagtgctaaggctgggtttaatataaaggccctatttcgaaaaattgctgcagcattacctggaatggaaacactatcttctgcaaaacaagaagacatggttgatgtaaacttaaagtctacaactggcagtgcgcagtctcaacctcagccaagtggatgtgcttgttaaatatactttatcatgtgcggtccacctttttgtgtcattccttttgttttatgcagatttttctagtcttctacatcattatatgaaaagatgaaagaatatataagcgatcggggtaggggttgatacaagttgtgtctagaaaatttctgttgttagttggttttgcccgtgatactgtgtactaaagtagtaaagctgcccaaccaaagattgaattatgttcattgtaaccctgtaaaacgtgttataagtttaaaatttaacttgttcatttggattgacatgtttgtgttgggaagaacaaatgtaatacagctccttggttagttggctattcattattatttcctttgag

SEQ ID NO: 47043 - DNA, 1317 bp, Glycine max
  Clone ID: PAT_MRT3847_142483C.1
tacggctgcgagaaacgacagaagggtacggctgcgaaagacgacagaagggggaagagagaaaagcaaaatcgaattatcatagaaagaagtgaattgaatttcattgacagagtcagagtgaagtgttgcgcaaatctgaggtgcgcattgcattgtggttgatttgtaagccttcgacgggattaccctgcattagttaaatccttctgctctgcgtcttcttgttcctctcgcccagaatccgagatcaaccctgacccctaaggccaggggtttttctcggcttcttcagattcctgaaatggcgtctgtttcagctttagccaagtacaagctcgtcttcttgggtgaccaatccgtgggcaaaaccagcatcatcactcgcttcatgtacgataaattcgataacacctatcaggctacaattggtattgattttctatcaaaaactatgtatctcgaagatcgaactgttcgactgcagttgtgggatacagctggccaggaaagatttagaagtcttattccaagctacattagggactcatctgtagctgttattgtatatgatgttgcaagccggcagactttcctaaatactgcaaagtggattgaagaggtgcgaacagagagaggcagtgatgtcattattgttcttgttgggaacaaaactgatcttgtcgagaaaagacaagtctctatagaggaaggggaagcaaaagcacgtgagctcaatgtcatgttcattgaaactagtgctaaggctgggtttaatataaaggccctatttcgaaaaattgctgcagcactacctggaatggaaacactatcttctgcaaaacaagaagacatggttgatgtaaacttaaagtctacaaatggcagtgctcagtctcaacctcagtcaagtggatgtgcttgttaagtatactttatcatgtgcggtccacctttttgtgtcatgctttttgttttatgcgggtttttctatagtcttctacagcattatatgaaaagatgaaagaatatataagcggatcagggtaggggttgataaaagttctgtctagacaatttctgttgttagttggttttttgcctataatgtgtactaatgaattttttttttttgaacggcataatgtagtaaaggtacccaacccaaaattgaattgtgttcattgtaccctgtaaaacgtgtgatatgtttaaaatttaacttgttcatctggattgacgtaaaaaaaaaaaaaaataaaagacaacaattaaaaaaaaaaaaaaaaaaaaaaactaaaaaaaaaaaaaaaaaaa

SEQ ID NO: 47044 - DNA, 1155 bp, Glycine max
  Clone ID: PAT_MRT3847_142484C.1
tacggctgcgagaagacgacagaagggggttttgaaataaaaaagaatactaattattaaatcctggtagacatgcactaaaaataaatctaaaatttcacttgcacccacccacacaccctggcatccatcgtaatcaaaacttaattcacatttttgtttgggttttttcatcacagtgcttttctttccttccttctgagattgctgaagagagaaaagcaaaatcgaaagaactgaattggatttcattggcggagtgaaagtgaagtgttgcgcaaatctgattggcaagaatggcgccagtgtcggctctcgcaaagtacaagctggtgttcttgggcgatcaatccgttgggaaaaccagcatcatcactcgcttcatgtacgacaaattcgacaacacttatcaggctacaatcggtatcgattttctgtcaaaaactatgtatcttgaagatcgaactgttcgactgcaattgtgggatacagctggccaggaaagatttagaagtcttattccaagctacattagggactcatctgttgctgtcattgtttatgatgttgcaagccgtcagactttcctaaacacatcaaagtggattgaagaggtgcgcagtgaaagaggcagcgatgttattgttgttcttgttgggaacaaaactgatcttgtggataaaaggcaagtctctacagaggaaggggaagcaaagtcccgagagctaaacgttatgtttattgaagctagtgcaaaagctggctttaatataaaggccctctttcgaaaaattgctgctgcattacccggaatggaaacattatctacaacaaaacaggaagatatggttgacgtgaacctgaggtcttctggtagccatgattcccaacctcagtcgggtggatgttcttgctgaatgaatgtgccttgtcctaaagttttgtatctttttgcttcatgctatttattttggaatgtgtttgtctcagatctgtaaagattcattagtccttttgacttaaacaactttatgtgagagaaactattgaaaacaagtggagaggtagcaatggaagaacaaatgtaatacagctcattggttagttggttattcattattatttactttgagaaaaaaaaaaaaaaaaggaggg

SEQ ID NO: 47045 - DNA, 424 bp, Glycine max
  Clone ID: PAT_MRT3847_142485C.1
aattgttgaaaaattccttgatgggaatcccgaggctataacccatgtcactgacaatcaccatgcatatatcgaccatggctgacaagtatcgacaaacgaaaattgatcgaatcatacagagaaaaggtgcaattgaatcattggatggccaaatctaagacaaatgatgtactattatgcatgaaagtgcaaggatcgatcactacaaaggggaacacttatctggagtggcattccaactacaaaatgagctgcgttggtatgatgaactaacgaagattgatttctaaacactacaacatgcactgagacatagattggcatacacgcaaagatatgttaaaaatggaacatgatggaaatcttcaagacgcaccaaaatggataaagggaacagctcaatcaagctctactggagcta

SEQ ID NO: 47046 - DNA, 447 bp, Glycine max
  Clone ID: PAT_MRT3847_142486C.1
cggaatgcggctagtgcttagccagttgcatgagacaaggagggccaagggaagggacatttacacaattttatctttatcagtgggcgtgggcatcatgtgcatctgcagatacagagagagtcacatacccagagaaggtgaagatgggacatggactgggattgtttggcctggagcagaactatggcttgatcggcatcggctactcacacacccatggaaacgggaccctgtggacccggaacctctcagactctatctctgatcacagatacaaggagacattaggcaacagtcgacgtgtgcactgtgcactgcagagccagggacagagccatcagtgatggcgctgaactctgagctatggcttatggctaatgactatacaactgagaagctgatcgtgcatatgatacatgatgctgctttagatactatgctcta

SEQ ID NO: 47047 - DNA, 331 bp, Glycine max
  unsure (1)..(331): unsure at all n locations
  Clone ID: PAT_MRT3847_142487C.1
ngttnanacaanatacnacnnnctcggaattcngntcnnagtatggatnngcattanccttagtagttntcnntggaagntcatggtgacaggtcccaggtctctacncnnacntcctnnnnganatctcncgatcttctgttcaacgattatcanaatgatcaacaagttcaccatcacnacttacacttccactngngnggaaatcacttcaactggagtcangaaaggtncntatatttggccgatgtcagcactanggtgnagnccnagaacatcangactgangtcaaantggncataactcagnnctgcgtacaaccattactgt

SEQ ID NO: 47048 - DNA, 473 bp, Glycine max
  Clone ID: PAT_MRT3847_142488C.1
cggacgcatgggtttaacactgcgcacatcagcttactgtatgaataagatggaatccatatctctcaatactagtgactacgcgcctgaagtaaatagggcctaaaaaactatgctattatcatcatagttacggatccaggcgcacaatgacatgcatgtatgctcatcacattcgatgactaaaggtgaaaacgtgctggctgcaggagcctgacatagccgcagtgagtgaaacatagtccctgagcatgatagggagggatttcacacagataccatgggaggacgctgggacatacccaaagagaggactgcaaacatgatggaccagaggagtgcactgtgagaaggtggaacgggagacgctcgacggggatggcctgagaaagattggccttcgaagtacagctgtgagccatagggtgaactggcacatatgctgcaagtgcatggatagaagctctaaggac

SEQ ID NO: 47049 - DNA, 326 bp, Glycine max
  Clone ID: PAT_MRT3847_142489C.1
accacgcgtacatccatacacgctatagcttttgctcatgcactatctactaactaccgagtactcttaaatatcgtggtggatacatccattgtatcttatacatgacctgcactacaataatccatatcactagctaaaaaatactatcactatattcggattattacattaatacatgtaaatcatcactgggcttatctattaactattgttttatatagtgaatgtccagaatgatatataatcactctaacttgtggacccttagctggacgaaactgtaattccctacatgctctacgatatatctactactatttact

SEQ ID NO: 47050 - DNA, 447 bp, Glycine max
  Clone ID: PAT_MRT3847_14248C.1
gctaagataaacatatcaaccaacaaagctaagaattcaaagagctacatcttttcaccatgaattgtccttcaaccaatatactgtaacatcagtggctgtgactgtgagtactacttagtgatatttcaccccaagagcaccagtttgggacatcaaaattttcaagtactcaatagtgccatcaatgactaacagtggctcctttcctttcgcaccaggaattaaattctcgagaactttcaacgattcacggatcttatcctttttaaatttgatatggtgagccactgaattatctactttagttttattaacagaatatgcccagccactagaattcttcgattcagcatcactgacacaatcacagggtttatttggtcttaccaaactatacctgtccacaggtgtcgatgatctattatagtcaccatcaaataactt

SEQ ID NO: 47051 - DNA, 390 bp, Glycine max
  Clone ID: PAT_MRT3847_142491C.1
acacgttgaaagaatcatatgctgtgacttccacagcacaaagattgtataagcagtgggacagcatgatatgcaagccacgactattggggtgatgcaacagcccaattgagcccggaacttagagaaattgatctcccataggtgcgattaatgctcaagattgtcgatgaggagctagtggatagtttctatggtgcaccactcattgtggagaccatgctggaatgaatcatgcgggcacagatctgaatggaggggcattgcaccaccttactactatatgtctaacttactcatcgatgtagaattacgcctgaggggatcaacggcaaactggacgatggatgttaatcaccatgccattagatgcgatgagcatcatgggga

SEQ ID NO: 47052 - DNA, 106 bp, Glycine max
  Clone ID: PAT_MRT3847_142492C.1
gctcgggctttgactccctcaactcagctcaacgacctctgcccttttgcgatcccatctctttagcatggcacaacaccaattacgttgtgcaatcaactatgtt

SEQ ID NO: 47053 - DNA, 1166 bp, Glycine max
  Clone ID: PAT_MRT3847_142493C.1
ccacgcgtccgaaatattattaaaaattgtaattgtatgtgaaacactaatttgatgtgttcattgcaattaccattagttgtctttctatttttcatataaagtattactgtttgcatttctgtttcttcatggataattattcttagtaccagatggctgaaaccgaatttccaagacctgaaccaccaaaaagctttggtgttgctcttggtttggggttcattagattattggttgcatagaaatgctaggaattactctggctggcagtctgctcttctattgagttcatttgggatcagtagtgttatactttttttagctttctttgtggttttctgatggttttgtcttcattacatcttaatgtgattgacttgctctgttgcatggttcttgattgtttttctgctttttatcattttatcctttcttttgttgtcttttttccacttgattatttctttcctcttcttttgtatctttctaaataaatcatttttctttcatctaaacaaaaaaatagaaaaaaaaacagatggcagtaatttttataaaaaatactagatgtagaattacttaatggttctaactcctaataggcctgatataatggtttttactcttaatattcctgctataatttgttggtagaattcggctcgagctggtccttcaggtccaccagtaacaactgttcctaatcagaattctgaactggttctaactcctaatgttcctgatataatggttacaccccctgaggatgaccatttaaggcatgtaattgatacaatggctttgtatgtcctggatggaggatgtgcttttgaacaagctattatggagaggggtcgtggcaatcctcttttcaatttcttgtttgttcttggctcaaaggaacatacctactacgtttggagactctactcatttgcccagggtgatactcttcaaagatggaggactgaaccttttatcatgataacgggtagtggaagatggattccgcccccattaccaatgtcaaaaagtccagagcatgaaaaggagcctggtcccacacatgctagatgaagaagcacgcgaatagagcctgaaagaacactgactgatgcacagagtgatgaattgaggatatgctgcgtgctttaacattagag

SEQ ID NO: 47054 - DNA, 2568 bp, Glycine max
  Clone ID: PAT_MRT3847_142494C.1
atgggttccaaggcgaagaagaagggttcaccggaggacattctggaaaccctaggagacttcacgagcaaagagaactgggacaacttcttcaccctccgcggcgattccttcgagtggtacgccgaatggccccatctcagggacccactcctctccctcctcaaaaccatccctctccctctcccgcttcagctcctcgtccccggctgcggcaactcccgcctctccgagcacctctacgacgccggccacaccgccatcaccaacatcgacttctccaaggtcgtcatcggagacatgctccgccgcaacgtccgcgaccgccccctcatgcgatggcgcgttatggacatgaccgtcatgcagttcgaggacgagagcttcggtgcggtcattgacaaaggtggactcgatgctttgatggagcccgagcttggccccaaattggggaaccagtacctatcagagaggataaatatcgctaattcgcaatatccagatctacttttctcaaagtttcgacttgggtggaaaatgagtgttgatgccatacctttaaagtcttctggtaaacctagccttcaaacgtttatggttgttgtggagaaggagctgtctactttagtgcatcagattacatcattgctccataattcttcacttcatagtaattcaaaacaggtcttattatcttctgtttatgttctcccccccccccccccccccccccaattgtgcaaggtttctggactccacgaggctcttcaaaatgagaatcaaattcgtgaaaaatactccagtggctctgatatattatattctgtggaagatctgcaagaggagttgacaaagctttctcaaggtcgacgattgcagctaactttggggggacaagggtactccactttttcttacagagctgtaattcttgatgctgaggaacaggctgacccatttacctatcactgtggggttttcattgtgcctaagactcgtgcacgtgaatggcttttctattctgaagaaggacagtggatggtggtcagaagctccaaagcagctcgtctcataatggtttacttggatgccagccattcagataccagcatggaggagattcagaaggatttgtctccgttggttacacagttggcacctgcagaaaatgggaatggagctaaaataccgtctgtatcttgtaccagttgcattttttttttctcacaaattcttgaatacaatgcctacagtttcatgatggcaagtgaggggatcaaggagcgaaacatcattcataaggtcacatcttcattaactggatcaattattgttgaagatgtaatttatgaaaatgttgatagtgaagtcagttgtatttttccttctggagagttgatgtttcgacgccttgtattcgagagagctgcaaatttggtgcagtctgaagctttgctaaaagatgaacagttgcctaccaaattggttagtgagacagggaagaagaaaaacaatgcatcttccaaatctaggaaaagtggatcttggagagacagtgttggagcaagcagtcagttgactgtctatcatggctatgtagctagttcttatcatacagggattatttcaggattcatgctaatatcttctcacatggaaaatgtggcatcaagtgggaaaatggcaagtcttggagcaggtttacttcccatgtttcttcacggatgtatcccctttttggaaattgagactgtggagttagaccccatgattgttgatattgcaagggactacttcagttttgttgaggataaacatgtaaaggtgcatatagctgatgggatccagtttgtccgggagattgacagttctggagcagctcagattcatggaaaaagtaatgatcctagctatacagataccgctttaaatgcaagttcagctgtgtctcatgctgatgtagaagtgacaaaagttgatataattattgttgatgttgactcttcagacccaagctcgggattgacatgccctgctccggattttttggatgagtcttttcttgagactgtaaaggatagactttcagaggatggtctctttgttgtcaatttggtgtcacggtcccaagccattaaagatatggctctctcaaaaatgaaaaaggttttcagccacctcttctgcctccagcttgacgaggacgtcaatgaggttcattttgccctcaaatctgagtcctgtattgaggatagctgtttctccgaagcttctcttaaacttgataaattgttggagttcaaacacccggagataggtcaaaacattatcaatgcgacaaaaaagatcagacgtttaaacgcattcaccctttatttcatatggttgtttgcttcaacgtttaagggttatggtcttatggataacattccctggaataattcgctgttaatactatcccgtaggaattttttttcgttaagatttgtttggctagaattaaataacttttactggaaactttttagaattcttggaagtgtaatgctattttctttatcttactaa

SEQ ID NO: 47055 - DNA, 410 bp, Glycine max
  Clone ID: PAT_MRT3847_142495C.1
aatataaactcattttttaaaagagcataaagaagaagtggagcaatacccattcaattttaaaagaaagagttactcaagaatagtatccccagctgtcagtgaagtatagagacaacaggtggccattcacaaacataaaaaagtctaagtatataagcctcataagcttcttgattaaaaacttcccagtgataaaattcaactgcttgagaggtgaatcaacattaagaatttaagaatggggccaggtaaggtggctcactcctgtaatcccagcactttgggaggccgaggcaggtggatcacctgaggtcgggagttcaagaccagcctggctgatgtggaaaaacctagtctccactaaaaatgaaaaaattaaacaaccaggtgtggtggcatgcccctgt

SEQ ID NO: 47056 - DNA, 2795 bp, Glycine max
  Clone ID: PAT_MRT3847_142496C.1
ccacgcggcccgcaaagagggcgaagaagaaatgggttccaaggcgaagaagaagggttcaccggaggacattctggaaaccctaggagacttcacgagcaaagagaactgggacaacttcttcaccctccgcggcgattccttcgagtggtacgccgaatggccccatctcagggacccactcctctccctcctcaaaaccatccctctccctctcccgcttcagctcctcgtccccggctgcggcaactcccgcctctccgagcacctctacgacgccggccacaccgccatcaccaacatcgacttctccaaggtcgtcatcggagacatgctccgccgcaacgtccgcgaccgccccctcatgcgatggcgcgttatggacatgaccgtcatgcagttcgaggacgagagcttcggtgcggtcattgacaaaggtggactcgatgctttgatggagcccgagcttggccccaaattggggaaccagtacctatcagaggtgaagagagttttaaagcctgggggaaagtttgtgtgccttaccttggctgaatctcatgtactaaatctacttttctcaaagtttcgacttgggtggaaaatgagtgttgatgccatacctttaaagtcttctggtaaacctagccttcaaacgtttatggttgttgtggagaaggagctgtctactttagtgcatcagattacatcattgctccataattcttcacttcatagtaattcaaaacaggtttctggactccacgaggctcttcaaaatgagaatcaaattcgtgaaaaatactccagtggctctgatatattatattctgtggaagatctgcaagaggagttgacaaagctttctcaaggtcgacgattgcagctaactttggggggacaagggtactccactttttcttacagagctgtaattcttgatgctgaggaacaggctgacccatttacctatcactgtggggttttcattgtgcctaagactcgtgcacgtgaatggcttttctattctgaagaaggacagtggatggtggtcagaagctctaaagcagctcgtctcataatggtttacttggatgccagccattcggataccagcatggaggagattcagaaggatttgtctccattggttacgcagttggcacctgcagaaaatgagaatggagctaaaatacctttcatgatggcaagtgaggggatcaaggagcgaaacatcattcacaaggtcacatcttcattaactggatcaattattgttgaagatgtaatttatgaaaatgttgatagtgaagtcagttgtatttttccttctagagagttggtgtttcgacgccttgtatttgagagagctgcaaatttggtgcagtctgaagctctgctaaaagatgaacagtcacctactaaattggttagtgagacaggcaggaagaaaaacaatgcatcttccaaatctagaaaaagtggatcttggagagacagtattggagcaagcagttcagttgactgtctatcatggctatgtagctagttcttatcatacagggattatttcaggattcatgctaatatcttctcacatggaaaatgtggcatcaagtgggaaaatggtaaaagcagtaataataggtcttggagctggtttactttccatgtttcttcacgggtgtatcccctttttggaaattgagactgtggagttagaccccatgattgttgatattgcaagggactacttcagttttgttgaggataaacgcctaaaggtgcatgtagctgatgggatccaatttgtccgagagattgacagttctggagcacctcagattcatggaaaaagtaatgatcctagtaatactgagtctgctctaaatgcaagttcaactgtgtctcatgctggtgtaaaagtgacaaaagttgatataattattgttgatgttgactcttcagacccaagctcgggattgacatgccctgctccggattttttggatgagtcttttcttgagactgtaaaggataaactttcagaggatggtctctttgttgtcaatttggtgtcacggtcttaagccattaaagatatggttctctttaaaatgaaaaactctttcttccacctcttctgcctccagcttgacgaggacgtcaatgaggttcattttgccctcaaatctgagtcctgtattgaggatagctgtttctccgaagcttctcttaaactttataaattgttggagtttctgagtcctgtattgaggatagctgttttcctgacgattctcttgaactgaattaattattggagtttaaacacccggagataggtcaaaacattatcaatgcgaccaaaaagataagacatttgaagtgaaacttgctctccttccttgccatagttatgagcatgatattcttcgtctgtgtgatgtgaatgcttgctatctcaaattcggaagtgatttcagccaaatgtttgtcattgatctgcggactgaactgtctagtactcatcaatagtacttaatggttgagtgatgtataaataaatgacttgtgagttgtgatgatattgtagcgcattcaccctttatttcatatgggtgtctgcttcaacgtttaagggttatggataacattccctggaataattcgctgtgaatactatcctctaggaattttccttcgttaagatttgtttgactggtctttaaaaaacttactggaaagtttacaattcttggaaaagtaatactattttcttctttatcttcccc

SEQ ID NO: 47057 - DNA, 356 bp, Glycine max
  Clone ID: PAT_MRT3847_142497C.1
aaacagcccaacttggtctaagaaaaatttcccgattcttattagtgaagaagctgaaaatatggcctactatatacacgagatatttcaatcgaatgtcttgatacccttgatacacattcaagatgtcaaagattttttgcccgtgcaaaaaaaaaaaaaaaaaaaaaaaaaaaaaaaaaaaaagggaaaacgctaaaaagaaaagaaaaatatcttttgcgggcatccagggtcctacaatggggcgtaggttaaaaggatccattcttctggccgctgtttgacaactggttgttttttaaaagggtgccaaattacaattgactggccatggtttacaaacccttttctgg

SEQ ID NO: 47058 - DNA, 207 bp, Glycine max
  Clone ID: PAT_MRT3847_142498C.1
aagaacaaaaatcttattttggtgtgaagcgattaaaatattccgattaatggagagggggaaggaagggccgaaaaaaatccatggttttgaattcttatatggaaagggctatggggtatcttattaaagggagggggataaagcattaatcttaatcaattcatatctatttatatatgaattaggtttttacggaaacaaatt

SEQ ID NO: 47059 - DNA, 347 bp, Glycine max
  Clone ID: PAT_MRT3847_142499C.1
ggcttgggtattagactttaaattttgaaatttgaaatcaagttcacatccccacaaaacaactgggttacacatataatggccccatgcattccatttatttaatatagtatataggaattgacttttgcatgaagcacaattgaaaaaattatttatccaacctaggcccgagcaagaggttcgcgattgggattctattgtgttcccacctaactattgctgaaccaaaattgcttttgaagggagtccataccttttttgcccacttgaaaagctttggcaaaaacttcatcaaagattggaggtttagatccaaacacaatatttgcatgggtaataactcc

SEQ ID NO: 47060 - DNA, 292 bp, Glycine max
  unsure (1)..(292): unsure at all n locations
  Clone ID: PAT_MRT3847_14249C.1
ctcttcttctcttgcggncagggttttagcncactttcttctagatntaaggaagatnggtaaggaaaaggttcanatnagtattgtggtcattggccatgtcncantcngggaaatncngtaccantggtcanctganttacanncttgggaggcatttgagnangcgggttatggngaggtttgatnaaggaagctgctganatngncaagaggtctttaagtntgcctgggtgctggacaaacttaaggctgaancgtganagagtnatcnccagtgntattgctttgc

SEQ ID NO: 47061 - DNA, 431 bp, Glycine max
  unsure (1)..(431): unsure at all n locations
  Clone ID: PAT_MRT3847_1424C.1
acaaaaattcccaaaatttatctaataataataaaaaaaaaaaggcccctggtctggggcttattttacaagaccccagaaaatataccgaacaaacaaccacaaaaggggaacatctgggatcaagttatttacagcaacataagaaagggcccgattaaaaaatcttattacaggggggaaccattggagacaacaaatggtttacgaaagcacccaaacaatgctttcaaaaaccaacatagaaaccaccaacgcttaagggagctctgctcaaaagaacacctcttgcgggggaaanagcataattcaatttgggcggaggcgggaccacctgcttaaacctcttggcatcagaaaagaactggaaccgaaacttctgaacctgctttaaattggtcctctgcggggtnccaaagaaaaaaacacaa

SEQ ID NO: 47062 - DNA, 1807 bp, Glycine max
  Clone ID: PAT_MRT3847_142500C.1
gttctaattagtagggcagaacatgtcccgtcaccaaggaggtaatgctgaagatatggcagatgaatttgaaatggaagatgtagaagacgacatggatgatgaatctattgatagagaaaggggtggtgtagagtctgacatagatgattatgatcactcgagtggtaagggagtagacactacagctgctcaggccagaagaggacaggatatccagggaattccttgggatagccttaacatcactagagaaagatatcggcaaactaggcttgagcaatacaagaattatgaaaatatccctggttcaggggacaagtcggggaaggattgtaagaataccaaaaaaggatactccttttatgacttcagaaaaaattcaagatcagtaaagtcttcaattcttcattttcagttgaggaatttggtatgggctacatcaaagcatgatgtataccttatttcacagttttcaataatgcattggtcctctttgacttgcaaaagttcagaagtacttaatgtttcgggacatgttgcaccatcagagagacatcctgaaagtttattagaaggttttactcacactcaagtcagtacacttgcagtgaaggagaagcttctagttgttggaggatttcagggtgaacttatttttaagcacctagatcgacctggtgttagcttttgcacgagaacaacttatgatgataatgctatcaccaatgccattgagatttatgattgtcctagtggtgcagttcatttcacagccgctaataatgatagtggagtgagagactttgatatggagaaatttcagctttctaagcatttttgttttccctggccagtgaatcatacttctctcagcccgaacggtaagctactactaattgttggagacaatcctgaatgtatgttagtggactcccaaaatggaaagacaattgttcccttatctgggcactttgattattcatttgcatcatcatggcatcctgatggtgtgacctttgccactggaaaccaggacaaaacctgccagatttgggacttgcggaatttatccaagtcagtggctgtgctgcagagcaaccttggagccatccgttcaatcaagtatacttcagatggccggtatatggctgttgcagagcctgcagattttgtacatgtgtatgatgtaaaaagtgggtatgagaatgaacaggaaattgatttcttcggtgagatatcaggcatatctttcagtccggacactgagtccctgttcattggggtctgggatcgcacttatggtagccttcttgagtatggccggcgacggtattatgcataccttgattcacttacttgaatattcaaggaacaaaaaatgacatggtagctgaggtgcactttaatagcctgctttaatatctgattgaggtaggttggtttatgtataaattgagtatcctgctactgttctcaatttgttttatactggtagggtgtgtttatatcagtctgtggaaagcgagagggagtgtacaggaggctagaaggcaatgatagtgcagatggggtggaaagtaaaaaatgctgagtatcagtatgttatttacagtgtctatctgtgcaaacagattatggagagaacatataaattatgatgttctttgatagggaaaatgagttttgctcattgaggatatttagtttccttttgttttcttgcaaaaataataatggacacttaaaatttggatgggttgtattatcaaattatacatgaataactaatgatgactaagctgtg

SEQ ID NO: 47063 - DNA, 350 bp, Glycine max
  Clone ID: PAT_MRT3847_142501C.1
acgctctacctctatctcttttcttcatttcctattctccctcaattctcaatcaacggagggggttggtaccatacatacagacgacacattcttctgtttctttcgactattattactctatcctgttcctcctcaacttgatcccaattccactattgattcaattctgatgcgattcccagcttgttagatccacaacacggattgatttcccagattttattttgaaaaaaatttttcctctgtcataactttcttacactttaggaggaaacaaaaaaatgttgttagctgaaattgaccctcacaaaaacaagactttgccttaaaatcaacaatcaaacgct

SEQ ID NO: 47064 - DNA, 739 bp, Glycine max
  Clone ID: PAT_MRT3847_142502C.1
taaagcgtccgtgccccatgccctctttctggaagaaaggaagagaaagtgagggaaaaaggttaggttgctggtggtggtggtggcatgttttttggattctaaaatctccctctttctctctttatacaaatccaaacgccatgatcatgaatttgatccgcaaatttggctaatcaagtgccttctcactcttttctttttctgtttcttcttcttctccctttctctctcacacaaacacaaacacacactctcatcaaaaccatttcccattacccagatctcctccgatctccgaccactctccggccacaaagccaccttccaaatccaccaaatgtgctaactttgccacttccaaccatcttctccacactcttcttataacaccaccttcttacacacacccttttcaatttgtgatcgacccagaaggctattcaacgttgttgggtcgaatctggtccaaagttgtgttctttgggaggtttgaggaggacccttttgaggcttgagatcgatgacgtcggggacgaggctacccacgtggaaggagagagagaacaacaagaagagagagaggagaagaagagccatagcggcgaagatcttcgcgggtctgaggatgtatgggaacttcaaactcccaaaacactgcgacaacaatgaagttctcaaagctctctgcaacgaagctgggtggaccgttgaacccgatggaaccacttaccgcaag

SEQ ID NO: 47065 - DNA, 499 bp, Glycine max
  Clone ID: PAT_MRT3847_142503C.1
tgatggtgcccttgctaaaggagaaaaagtggagttctttcatgatgagtttcgttgtccaatttatgtcaaggatcttgtaactatcatactaactttaactagccaatggatatcgggtacaggacttctagtacctaagctaatgtattggttggacgtatgttatgctgtgaaaaatttcttaatgatgctgattttcagtgacaccctttttaagcttgcaaaatttaataataaaatatttgcagaaattctctctatactataactgattgacaatcatgtatgacattttcttgtgtataattttggcattaaataataagtccctcttgttctttaattataatttcatatgctaatgaggtatctcaaatttgcattaatgaattctgcttttctgattcttgtcacagagggcaagcaaatgcaattgttacttaatgttggtggagctgatagggtgtcacgtttacaaatggctgaggctgttgca

SEQ ID NO: 47066 - DNA, 624 bp, Glycine max
  Clone ID: PAT_MRT3847_142504C.1
aagagatagagaaatggttagaagaagagaattttcaagagaggaatagaagaaagggtgtcatcattagaggatgggcaccacaagttgagatactgtcccatccttcaactggtgggttcttatctcattgtggttggaattcaacactggaagcagtttctgcagggattccaatgataacttggccaatgtctgctgagcagttcatcaatgagaagctcattgtgcaagtgctgaagattggtgtgaggattggggttgaagctcctgtagaccccatggagacacagaaagcattggtgaagaaagagtgtgtgaaaaaggctgttgaccagctcatggagcaaggtggggatggggaacagagaaggaacagagctagagagatcaaagaaatggctcagaaggcagttgaagatggtggatcatcagcttcaaattgcgaattatttattcaagacattggggcagttgaagatggtggatcatcagcttcaaaatagccatgagtccatcttttgggtttatttaataaataaattagtcatgggttcatatccgttggttttattttataaagtagagcaaatgcttttcctactacatttatgttctttctat

SEQ ID NO: 47067 - DNA, 1095 bp, Glycine max
  unsure (1)..(1095): unsure at all n locations
  Clone ID: PAT_MRT3847_142505C.1
gttggaacaatcttttatggagttggatcgagttaaagcccggaatttgcaagaagggctcgaggcgcttttatatcaggtttcatgacattcatgtccatagggggcttcccgtctttcatagaagaaatgaaggttttctacaaagaaagactgaacgggtattatggcgttggagtctacattctttcaaattttctgtcttcatttccctttgtggcagtgatgtccattgctacggggacaataacctattatatggttaggtttcgcacagaattttcacattatgtgtatatctgtctggatcttattggctgcattgcggttgtggagagctccatgatgattatagcttcactggttcccaacttcctcatgggattgataattggagcgggatatattggtgttatgatgatgactgctggctatttccgtcagatccctgatcttcccaagatcttctggcgttacccaatatcatacatcaactatggcgcatggggattgcagggagctttcaagaatgacatgattgggatggagtttgatcccttagaacccgggggcacaaaactgaaaggagaaatcatcctcaaaaccatgcttggcattcgagttgagatttcaaagtggtgggacttagcagcagtcatgatcatcctcgtattgcttagagttcttttctttgtcattctgaaattcaaggagagagctgcaccttttctttatagtatctacgccaggcaaactctgcaacgtatcaagaagcgaccttcgttcaggaaaggaccatctttcccttccaagccccaccaatcactgcatcccttgtcttcgcaagagggtctcaactcccctattcattagaaccatcatatcatatcatatgctgatatatttaattacaaacacaagaagaatcttccaaaaaacattcaagaatcacacacatcgatcatatatatatatatgacccgaatattatattgtatattggggaatactttgtcttgacaattcacatggataaaatatataaatataagaaaggggccttataatatgatggtttcaggtctgaacnnggtn

SEQ ID NO: 47068 - DNA, 458 bp, Glycine max
  Clone ID: PAT_MRT3847_142506C.1
aaaccctcgtaggccaatgaattgacatgccagcaacaaattacatcagccccacccaggatgttaatgtacacccagaaagctacagtcttctgcagaggtcgaataaaaacttatactagagctacctaatattgcaactgactcacgagattttcaaatcgattaaaaaaccgacgttcccattattcatacaccctagctttaagaaaagccatgtcctgtcccacaacaccgcctaaaaaaaagctaatcgagactgtactagagagaacagaaccccaccttcgacaaaaccttgggtaacgtgccggacacatgaggagcataactttgtacatagaaaaactaactacaatgtccatgcattgactctttgcagcgattctgaacgaaccctggactaaaattggagcaaaaactctcaagacacccttggatgctatcctagacaaaaa

SEQ ID NO: 47069 - DNA, 211 bp, Glycine max
  unsure (1)..(211): unsure at all n locations
  Clone ID: PAT_MRT3847_142507C.1
gtcacgcgatctgttgagtagacagngggctgtgaaaagatcgactgcacattgaaagtaggggagcttgaaaaggaagaggggagagagagtaggctgatagcaatcgagagctataggaattgaggaagctccagaactgcctaccccgcgtgcagccgtacaccatggtgaatgtgacgatagtgcccaggcatcacgccataataat

SEQ ID NO: 47070 - DNA, 549 bp, Glycine max
  Clone ID: PAT_MRT3847_142508C.1
atgatggtgatcgacaatggtggtagaggtggcggtgatagcgacaatggtggtagaggtggcattgatggtggtgacaatgtaaatgatggtgatagtgacaatgtggtggtggtgttgatggtggcaacgttggtggtggtggtgacggtggtattagtggtggcaatgacaaatgtggtattagtggtggtggttgtagcaatgtcggtggtaatggtggcaaaaagtggtgaggatgtggtggtgaatgtggtggcgatgacaaaagtggtattgttggtagtgattgtggtgttgatagtggtgttgatagtggcaccaagtggtagttgcaacaacattggtggtggatttggtagcacttatagtggtggtagtgataatgataatgatagtgacagtgacacgaatagtggtggtgatggtgatgacaatgatggaggttatattggtagtgacgacaatggtagtgtcgataatgacaatgatggtgatagtaattgtggtaaccgtgatgataacaaaaagtgtcatggtcaaatgtga

SEQ ID NO: 47071 - DNA, 236 bp, Glycine max
  unsure (1)..(236): unsure at all n locations
  Clone ID: PAT_MRT3847_142509C.1
cccccccttcttttnatantaaaacaaacaacaccttcataaacgctggagttttttaacttttttgctggttacaacacatnaacgaaaaaacaaccttttcatccacatctccataaaatcaacattataaaaaccatctaacccacaaatccaagcatcaaaagattttgaaaaaacaatgtattttctttcaaacaaaaaagcaaccactgctttctcaagtaacccatcaa

SEQ ID NO: 47072 - DNA, 246 bp, Glycine max
  Clone ID: PAT_MRT3847_14250C.1
ttttgattttctggatccgcgtttttgagattagtgtatgaatttaccgattggggttcaggtgaagttatcgatgaggcatgctctggtgtttgtgttaatcgtggcgatgtggaacttgcaaagggctgatggtatacgattagtgatagacatagacgagtgtttctcccatgatgtgaagtactaaggagacactgttcatgtctctttcattggtattaacgctgattttacctggcatta

SEQ ID NO: 47073 - DNA, 546 bp, Glycine max
  Clone ID: PAT_MRT3847_142510C.1
gttgtataattaacgagtgtataaatattgctgttcttttcttttttacgtgcccaaaattgcgttgagttgaatattacagaaatgtgaatgcaagtattatatacctaaacttaagttgtccttgcctttaaccccatcttctcaagtttaacacattggccactccttacaaataccctacggaagcctgccaatgttgcaaggatagccacccaatttcagttcacacgcaatttctctggcacaaaagcaaaaattggaaggtaaacagcttacacagtatcccccgttttccttctcaagcaaatgtaaacaactattttttgccacattcactagagtatgttttcagctgcaaaagggtccaaatatttttccttgaccctttattattccttcccttgtaacacaatatctaactaggccacaaagtcatagatcatatgcccttcaaattgacgcctaagctccttctcttgttgcaattgccgttgctgcacaccttcaacaccatgcctaagacccaaagtgagtgacactgat

SEQ ID NO: 47074 - DNA, 318 bp, Glycine max
  Clone ID: PAT_MRT3847_142511C.1
aggaaagataagaaattctacccggcacggaaaaaaaaaaaggctaacccctgagggcttaattcttggagaaatcctgcgttgttgttctttgggacacttttttcaaagagggggtttttaaaccgttttcattaaacttggggaattgggccatgaattcaaggttaacaaataaaaccctctttggggagcaagcacataaaaaccgcccctgggcattgaggattactaatgccacgtataaaaaggttcttgctttaggagcgttgcgaaaagttcctttttccaaggatttggtacaccagggaaacccca

SEQ ID NO: 47075 - DNA, 413 bp, Glycine max
  Clone ID: PAT_MRT3847_142512C.1
aacttctccttccgggagatcgaaaccactagtattctcaaaccttgcggttccattttttgcttacgggagaccgtcctcacttgcactctccatctttgctttcaatgcttatggccttgccgttaaaatcccaccattagatccgcatgcatccgatcctttaagatgccccaggaatccatcctccttgccaaaatccggctacccaatgtcatcaatgtcactaccaacgccaaggtcagcatcctctgcattataatattactggtcaaatgccttcgttatcatcctgtcatgctcctttggggcaaagtcctctacaatttttgccatatacaaggggatgatttcttgtccatggatgcatgcagtcttcattcatttgtttaaccttctcccggatctcctgc

SEQ ID NO: 47076 - DNA, 317 bp, Glycine max
  Clone ID: PAT_MRT3847_142513C.1
gaaaaacggtaaatagttccccccgttttttttttaaaaaacccgaaccaacctttagaggggggggaaaagggggggaacccaggtttttttttttaatgggggggggcctcaacatccccttgggaaatttccggggggaaggccttgggatcttttccataagggggggaaccaaccaaaacggtgggtcggaaaatttttttaagggggccgttgggggctttggccagggacctgggcctaataaccctagggattttgaggacgtttttgagcaaaatgtggccggggggcttgaggttttggggtttttg

SEQ ID NO: 47077 - DNA, 472 bp, Glycine max
  Clone ID: PAT_MRT3847_142515C.1
ccctcaaacaaatctcactttccggtcaataacatggaatccctaatcaaggggacttgggattggtcacaaatttatgattcagagattcttaccatgggcttgaaagggccaatgcccacccctattgaaaaaaaaggggcggtcattaaaaattggtgcatgatgctggggaatcttgcactcgttgaagctatacatggatcaacactggatattggctaaagaatttgataaatccaaccgaaattccaaagataaacccttgctccaacttgtgacatgttgaccctgatacaaaatattgttaggaggaactagtaacttttgaaatccaacaaattgccccaatgggacgcccttaaaaggggaaatctagttacgaaacaaattcatccttttccacaggaacattggtttgaaatgctaaacacaaagtgaaacattatataattccaaaactactgggaac

SEQ ID NO: 47078 - DNA, 511 bp, Glycine max
  Clone ID: PAT_MRT3847_142516C.1
tggctcggggaaggccaaattggagaagatgcatgagcaggttgacaagatcgcagacaacattctcagagagcatcaagaaaagcgcgaaagggcactacgagaaggcaaggttgacctagaggaggaggatcttgttgatgttcttttgagaatccaacaaagtgacaacctcgagatcaaaattagtaccacaaacatcaaagctgttatattggacgtatttactgctggaacggatacttcagcatcaacacttgaatgggctatggcagaaatgatgagaaacccaagagtgagggagaaagcacaggctgaagtaagacaagcatttagggaattgaaaataatccatgaaacagatgtagggaaacttacatacttaaagttggtgatcaaagagacattaaggttacacgctccttctcctttattggtccctagagaatgctctgaactaaccatcattgatggatatgaaaatccagtcattactaaagtcatgataaac

SEQ ID NO: 47079 - DNA, 612 bp, Glycine max
  Clone ID: PAT_MRT3847_142517C.1
caaaaggagagcatcttgtgtctgtggttcaagaaggtgtaatgagggaagttatttctgtaagtcagccatcaaatctaatctatgaatagctaaaaatgcgctgaaacttgtggtgttctttttagttttgtcttcattggttttccttatatagtgaatgatcgggtgaaccatacaataggtggtgcaccactatatcaccatcatatagtgcacctttatttttaatcaccggttcaaaattgtgattgacaagtaattgatgtgttagatttatttacaattaactagttttaaaatttacaaattggtccttttgttgtcgcgtttgtaccatctcctacaaagattcacgcctctgtcggctcttccatcaccacgagccttgatttctgttggcatccgcaacaaccatggctcatctcttcatttcaaaagttatagctttacttcatcaatcactatacaaccagaattgccaattcaaatgtaagaaaaatatacttttttttatggacaaatgatacatataacattacctaccagtatagtcttgcttcctaagtcttgggagaagacaaatgatgaattctgggtttgttttgggtc

SEQ ID NO: 47080 - DNA, 775 bp, Glycine max
  Clone ID: PAT_MRT3847_142518C.1
aaggacctaggttctgaattgaaacgggaggaaattgagcagctcatcttacaccttttactggcacggtttttgaaagaagaatttcagcatacaccttatgccacaaatgcttacattgctgtggggtcattggccaagcaaatattgcaagggaagaaatctgtgaaacttgagatttacactgaacagagaactaaagatggtgtaaggtcagcgaaacagtgtcttgggtcctctggtttggagctaaagcttgatgagctgagaaaagaactgtcctctgctcatggaggaatactcccacactctgtcttgtccactgaacaaatcatccaattagcttctcaaaaaccaaactcgctggaacagttggagaagctgattggaaaattgaggacagaaaagtatggaaatagaatactaaagcaaattgaaaaatattatgatttcgagccgactgataaacaagaaattgatgctagggccgcaaagaggttgaagagcaagaaaaatcttgttattattgaatagtgaagatgaagagtgatagctggtggtgtccctgcggcaatatatggtttatttgtatagcatggcactattgagtatattcattcttacaaaccgtgcttctggctcatcctaaagaggaaaaggaatctggatgacaaatggcagagggtcttgactgtccttatctataataacagttgataaaatcgaaagtagatttatgtagggctgttcaaataaactactcattccacgcatt

SEQ ID NO: 47081 - DNA, 241 bp, Glycine max
  Clone ID: PAT_MRT3847_142519C.1
gaaaaagttgctttaaatatttttttagtgtgtttgtctaagcttttaaaaaaaatcaaagtccgatattttttttactatttttgagtggctttctcaaaaaactactatgaagagccaagattattgtataaaatgtcttgaatatttgtgtatggttaaaagttataaaagcattctaaagtcgaacatagtacaaaaccataagccaaacgtaataaaatacattatagatgctttt

SEQ ID NO: 47082 - DNA, 301 bp, Glycine max
  Clone ID: PAT_MRT3847_14251C.1
gcacatctacgttaaaaccttttccggtataactattaccctacaagtccatagctacgacaccatctacaacgtcaaagctaaaaggaatgacaaggaaggaatccacgctgaccatcacaggctgatctttagagggcagacactcgaggactgactcacacttgctgactacgacatccataacgagtcaactgtgcacttgttgttgcgtcttcatggtggtgtgcacattttcgtgaagaatcttacaggtcagactattaagctctaagtgcagagctctgacaccatggacaat

SEQ ID NO: 47083 - DNA, 371 bp, Glycine max
  Clone ID: PAT_MRT3847_142520C.1
aaaaaaaaaaggccggcttgagggaaatgctaaaacaatggggtaacaggggggggaaaaaaatgggtgaaaaattctcccggaaacccccgggggaatcatttttggaccaaaagaattcaggcttgccccaggatacctaaaccctttttgggcccacctttaaatgtaaaaagggaaaagctttgcccttagcttacaaacccaagggggggggtgacaatcccaaccctgtaaatccccccaggggggatttaggggcatataacgtagtccagcccccataaaacgcaccaggggcatttaatggggcaggggggggttttcccaggattggcattactaaacccaaacccctgtggggggggggg

SEQ ID NO: 47084 - DNA, 251 bp, Glycine max
  Clone ID: PAT_MRT3847_142521C.1
caaatgattcgtctggagaagtgctcgcttgcagattggatactatgactgtgcaatattatcctgagtggggtccaattgattgtctagttcatcgacaaccaattcacatcactgcaggggattagttcagaaagcaagatgtcagcattgagtatgatgcatgtacgattccagatgattgtggtgccctagttgttgccaaggttggagatcacagacaaattgttggtgtccatgttgctggaagc

SEQ ID NO: 47085 - DNA, 245 bp, Glycine max
  Clone ID: PAT_MRT3847_142522C.1
ttttgttctagatcgagagagggcgacctgtagagtttattaagaagtttggaccaaaccgacaaagaactgtagcgctcaaaagcaaatcgcaccactaaggatcatatgatggagaagactaaactggggcaaaggaggcatattgtaagagatggaccacaaaacagacagggctaagggaagttgaaaatgtaccaatggcaggggaaaaaactgcaggcacatctaagaatgacgttaag

SEQ ID NO: 47086 - DNA, 562 bp, Glycine max
  Clone ID: PAT_MRT3847_142523C.1
ttgccgtgctacatgtgtaggagtgccgcctgcttgggggggggggggggcccgcaaaggcgcaagatgaaggttgcggacaagtatatataatcatgtgcatatgattaccggattcgatactagtaaaatatacaacaaaagaaacaagcgcacccgacgaaaatttgggtgtataccaacgttagtaagaagtgttaattatgcttggttatacttactaaatagttagggctggagtggtttgggaatttttttatccccaacgtatatacaagagaaaaaatctgtagcagaaatagtaaaacaaatcaaaacaaaagagaacaaggtaaaaattaacacacatatcttaaattagctagcacttgtaagctagtataaaattagggtaaataggataggctacaaactaaaccgaggtaggctggagcgggtctaagtagcgttacagcaaaaagaagatacacaaaggaaggcagtgagactgcggccttaggtgaaggtctgcgagtaacaagtatacaagatgtgccgcagggaagtggtaagtcaaaataca

SEQ ID NO: 47087 - DNA, 296 bp, Glycine max
  Clone ID: PAT_MRT3847_142524C.1
aaaaaaaaagaaaaaacaggggtctttttttcttttactattttatacaaatttttaaaggggaaaataaaaacaaagggaaatttttttaggaataataataaataaaaaaagctaaaaaagattctcaaaatgggggaaccattgttgttggggcaagtttgggtgttaaatctcgcggaagaaactgtccctgtgccataatcaaggacttggacatatgtatgatcatcttctgggcgaactccttgggcgggggggcccttttgaatccacccttggcggggaacccgggg

SEQ ID NO: 47088 - DNA, 420 bp, Glycine max
  Clone ID: PAT_MRT3847_142525C.1
ccaggtcaccagcgtccgtaagcgtcagacaacgatcagcgcagatatctgacaaagaatcgaacgttagctaaaagacaatacttcggtgacctcccgtattgttcataaccaaacttcttctgctcaacatgctgacgctctgatacaagctttcataggatggagggctgatgacaacgccactatagcattactgggtcacagatctgtgcatcacatgcaagaaatcagtgaagcttatgacgatatttaccacgaggatctcatcacatgccttgagtccgatatctctagtgactttgatagagctatgtaccggtggatgttgcattctgcagattgtgatactgttatggtgaatgtggaaatcaccagtggcagcacagactaccatgtgattgcagagattgcttgtat

SEQ ID NO: 47089 - DNA, 235 bp, Glycine max
  unsure (1)..(235): unsure at all n locations
  Clone ID: PAT_MRT3847_142526C.1
cctcctcctcttcgccgccgtggccaccgccgcgatggcggtggccgcatccgacaccaacaacatcctgatccatcaggtggtgccacatgttggcgaaaccaaagaagaagacaacctactaaaccccgatcaccactttgctagcttcaangccaatttccccaagacctaccccaccaaagaagagcacaatcatcgcttggacgtcttcaaatccaaccttcccaaaccc

SEQ ID NO: 47090 - DNA, 370 bp, Glycine max
  Clone ID: PAT_MRT3847_142527C.1
cgcggacgtcctttcgagcggctcgagcggtttcgagtttcctgttttcgtctgtgttcgtcatctgtccaggccatgggaacgaaaccctaattacagggcatacgatctactaattgactacaggccgcgccgtcaacgaggcgatcgcaagtatatattgatctgatgtcggcaatgacgttcagggagaccgcgcttaggaggatcggtgcccatcggattcccagaatcgattctaatactgtaactcatgaacatgcccgatgcagaacttggattggatgatatacgtgctgagcaggcttttagtacatcaaatgatatggatgccacacccatatactggagtcagcttttaatggatagc

SEQ ID NO: 47091 - DNA, 229 bp, Glycine max
  Clone ID: PAT_MRT3847_142528C.1
gtctttcaaacattgacaccgtactcggctcaatgacatggcaataaagaatgcccaattggctcaaggattgtgccttgttaatgcctaacgcatgaggataagagcctacacaaacacagtaaatggcgaaaggagatagccgtgcaccgactctgtcatctgctatgtcatcgcatacagtcttctcagccatgagtggaaacctaccacgatgatctaggctgct

SEQ ID NO: 47092 - DNA, 343 bp, Glycine max
  unsure (1)..(343): unsure at all n locations
  Clone ID: PAT_MRT3847_142529C.1
tcctctagagtggccgccctgtgtaatctttttttttacaaattatgatttatgtttgtatgtttaaatacccacatggcaaaatttaaaaatcacagaaacagattatgatttttatttgagcgttcgtgatgaacaaacttggaaaccccaaattactcttaacttggctcctccggggggtttccaaccaacncgccggcctataaaccaaaaaaacctcgccggggggggagcgggggcgaacaaattccgtgatcgaaatccaacttgggttgaaattccggcgaactggggagcgaattcttctcgctagaaactcaataggggaaattaaaggggc

SEQ ID NO: 47093 - DNA, 135 bp, Glycine max
  Clone ID: PAT_MRT3847_14252C.1
gcaaaacacaagttataaggcatgatctcaatccaatatggaagtcggtgtttgtgaatattcaacaagtgggaagcaaggacagtcctttggcagtagagtgctataacttcaatagcaatggaaaacatgatt

SEQ ID NO: 47094 - DNA, 571 bp, Glycine max
  Clone ID: PAT_MRT3847_142530C.1
gccacaggtgagcaattactgacggacatgttaacgacacacatgccatgttgaatatgtctgcaaagtgagctcttccctcaactttgcttgagtggcataactgaagcattcaatgcattaagccaactagatttctattacaccgaatttcctaacactatgtcgagcattggttgttccctttttggactatgaatggctgtaggatacctgttatcttctttggtatttagtgttgtgcaaaagggtactactacacggggaaaagatcgatgggtttcagataacacttaacaaggatcgtttcgacaactactactggcttcttgccacactcagtgctgctaatgaactgaattatctagcatgcagcaggatttatggaccaactgctgatcaaaaatcaaaggtaactgaagaaaatggctccaatgacgaagaattgtcattaatttaatccataactgaagggcagtttgataatatatctcaagttaggaaggaaatttaaacaacttcatcacatagactgcaactgatttagacgactttagcacttgcaatatca

SEQ ID NO: 47095 - DNA, 354 bp, Glycine max
  Clone ID: PAT_MRT3847_142531C.1
gccaaaccgccctgaatcgtacctatgaatggaagtggtttctaaggcggacaccttcattaaatgggaggctccatcatacctgagcaccgtagtgtgaaattcatgttgacattaattggcgtgggtgatatgatttctagagactttgctgtttcttatactgtgttgctgaaactgataatggcctatctgttatggattgaaacttgacaaatagattcctggaaactctaggattgaagatctcaggattatctatggtgtacattagcatataattacatgttgatgctgatacgttaggctttgcccacgtatgacccatgctttagttatccacttgcttaacct

SEQ ID NO: 47096 - DNA, 335 bp, Glycine max
  unsure (1)..(335): unsure at all n locations
  Clone ID: PAT_MRT3847_142532C.1
cntaaaatcgnngnacgcgtacgtaagctcggaattcggctcgagnagagagagagngagcagtttnanacanagagagangngtttnggattgaanggatntacgnnangnntctnnctgttnntcnttcgatccatnnctcattcctaancccgnnaatncaacnacntcagcctcacactcacatatacacatatctgaangngtatcgtccntcctatggcttnaaagcgnatcntcaaggagctcaaggacttgnagaaaganncancaacttcttgcanagctggtcnagtagntgaggacatgttccattggcaagcaanaataatgg

SEQ ID NO: 47097 - DNA, 283 bp, Glycine max
  unsure (1)..(283): unsure at all n locations
  Clone ID: PAT_MRT3847_142533C.1
gtggactttagccatccacagatgnaaaggcaatgcagaggcagacaaancaagagggtgcttcttcantttctctctncaacaactttcactcnnaagctccgtggccgnaanccttttacccctttcantttcatgctcctctagaacccacattctctgtcttccctnacctngcaaanccntctttctntgccgncactctctgcttcgttacngttccactcgcacgattcanatatgagggangcccaagtttcgggtngcngaagagtngtcggcg

SEQ ID NO: 47098 - DNA, 185 bp, Glycine max
  Clone ID: PAT_MRT3847_142534C.1
gcattcaaaatagaaaatgaacggcctgtgtcccaattcaaaaggggggactgttgcactgagctagcataataacgtttacattgtttacggatgctgaaataaggggataaatcaacactcttggtaaatagaaagcattcccttcctaatgcctacatataggatgagttgatatattaggc

SEQ ID NO: 47099 - DNA, 260 bp, Glycine max
  unsure (1)..(260): unsure at all n locations
  Clone ID: PAT_MRT3847_142535C.1
ctccgacgccggatttcaaccaaagcgcatgtaccaganaaaagaggcgcagacagccaaaaaaaagcagggcatatcggacgtgacggatccggcaggcacaaagacgtagtacgacgcccgggaataaagacggcccgaaacgcatggtagaaacgtactccgaatttcgtgagcttttttttttttgcaacattgggcactaggcagtcagcaaccacaaaagcccaaaagggcatcgccagaaaaaaaaaagcaag

SEQ ID NO: 47100 - DNA, 236 bp, Glycine max
  Clone ID: PAT_MRT3847_142536C.1
ttttttttttttttttttatggggcaaacaattcaatttatttgcctctttttctttttcacagtataaacacctagaaaatgggtacatcttacaagcctatttataattatgggtaaccaaatgcctagcatttctttttttcggggggaaattcttggttaacattttgatacaagcaggggggattttgaaaaaaatttttaaaaaaaggaaagaaaaaagagaggaaccag

SEQ ID NO: 47101 - DNA, 433 bp, Glycine max
  Clone ID: PAT_MRT3847_142537C.1
gaaacaccaaaacaggggggggctttaacaaccctagccccaaaaaatccttaaatggggggggatgggcccacttggcacaaagtttttaaaggaaatttccttgggacagggaccccttttccttaaagcaaaaaaattttttccttacaaggggggttccccccaaaacattgaaaaaaaaaagcccccctttaaatttttttttacaaaaaaaaggtcttcaaaaacattaaaaaaaggttatgcttttaacagccctaaaaggtttaaaaatccctaacgggcagggatggggacacttggcacaaagcttttaagggaaatttttttgacccaaaaaggccctttccttaaaacaaaaaaatttcttttttagaaggccttttcccccaaaacattggattaaaaaggcccaagtaagcccaggggg

SEQ ID NO: 47102 - DNA, 1681 bp, Glycine max
  Clone ID: PAT_MRT3847_142538C.1
aatgccagtgaaaaaccctttaaatccaagcaaacaaatcaacataggtgttccccaacaaggttggatcagcaagcaatagtactgaattctaacgagtgacatgagatcttgatcaaacagtacaaaaacagaccaatatcaaaccataaaatccagcaattgcacctttactaactgaataaaattggccacaatcacaaactgctctatcagtgtaaatcgatagtctaagaggacctttcagagcaaataaggtcatttccacagcatctacaacacatatatgtacatattgtgttgcagaataattatgaaacaaggaaaaaaataaaaataaaaagataaaagcctttgcttttatggccatccaatagtgcttaatatctcttgtagtccctcatgctctctgcctgactggatgttatagcagtaaacttgtctgttcatcatcatcacctagaatagatagaacttaagaccatgcaatctaaatcttcaggatttaatttaaccccacgaatacatcttggttaattacttgacagtgatgtgccaaccatcacatcttgtttgacatcacaaactttgattttttctctgcaggcttaagaatctgaaatgagcacatcaagttttcgtccacactcatcatcgcaccagcattgtcaaattcaccacaatagtttggagctgaaaatatcgtaacaagttgcctatcagcaaagaattcatacccatcctctacaacctgatgagcacgacaaatgaggtccaagtcatgctttgtcaagaactcagcgaccttatcagggccaaaggtgtaggacactcctctgtcattcataccccaacccttcacatccctaccaggatcagaccaaagcaaatcacaaagcaagccggtgtcgggaatcgcagtaggacgaggtagattcctgatttcatccaagtttgtgagttcaggggaaagaccaccatgcatgcacaatattttatcatctataagggctgccacaggaaggaagttaaaacagtcggtaaaggctttccaaagcctcacgttaaaccttcgcttacattcatcataaaacccataaatcctattaatggaagcacactcatgattccccctcaacaggaaaaagttttctggatatttgattttatacgcaagcaaaagacatatggtttctaagctctgcttcccacggtccacatagtcccccaaaaagagataattggcagtaggaggcaaacccccatattcaaatagccttaacaaatcactgtactgcccatgaatgtcaccacaaatcttgatgggggcttcgagttcaagcaaattgggctggttaatgaagatgtctctggaagcgacgcaaagttgcttgatctcagactcggagagctgaacctgctttccgggtcgggccaatcggacctccgttaggcgccggattatgtcatccagaaccgcctcatcaatcacttgtccttgtgtgctcatcgcatccgatcaaaaccttcttcttattcttcttctttgctctttctcagcaacaaaaaataagcacaagggtgaaccaaccaagagctttatttggtttggttctctttctctctctctgtctgtctgtgtttgttcgctcccccccaggagccgaccacaggcagccgc

SEQ ID NO: 47103 - DNA, 375 bp, Glycine max
  Clone ID: PAT_MRT3847_142539C.1
ttttttttgtttttttttctaagagttacaaagtaaattgataattagaatcgtaaagtctcagatcaaaagatgtgaaaataataaagtagtagtactagtattacaccagcaaaaagttcacatagtcttggtgcaacacattctgttagtggtgcatggctctggattggagactttttctcttttccgtttccctcgatgcccactttatagtatatgccttttgttttatgctctccaagaaataacaacaactttgtttaaaagctgaagttgccaaagacaaacagttattgctggtttaggaaacctgtgttgaagattgattttatatacaaatttgttacaagaaagcaataaatacattacacc

SEQ ID NO: 47104 - DNA, 768 bp, Glycine max
  Clone ID: PAT_MRT3847_14253C.1
ttccccttcttggtggtctcttgagtgtctggtactctgactttttccaggcccagactcaccttgttgctcccttcgaccaataccttcaccgattccctgcctacctccagcagctctccatggagtccaacggaaagaccatcacctctgatggatcttctgccaagtacaccactggccccattctcttcggcgagccttgcaccaacgctcagcactccttcttccagctcgtccaccaaggcaccaagctaatccccaccgacttcatcctcgccgccaagtcccacaaccctgtcagcgacaacctccaccagaagatgcttgcctccaactacttcgcccaggctgaggctctcatggtcggcaagacagacgatcaggtccgtgccgagggtactcccgaggagcttgttcctcacaagcgcttccttggaaaccgacccacgacctccatccttgtcggcggcgccattggtcccgccgagctgggtgccctgatcgtgtactacgagcacctcacctttaccgagggtgctatctgggacatcaacagctttgaccagtggggtgttgagctgggcaaggtcttggccaagaagattctcaaggagcttgatgaggcaggcaatggtgagggaccccatgcttctactggtggactgattggagcgttcaagaagtatggtaactaaaaggaggattgagtgttaatgtgtagcgagtggaccgatgttgataatgattaaggatagcatgaataag

SEQ ID NO: 47105 - DNA, 2468 bp, Glycine max
  Clone ID: PAT_MRT3847_142540C.1
ccacgcgtccgcttttcacaaacgcagttagtttgtttaattcgtcactctccgttcgaatctcagaagaaaccctagctagctctagcttcgatggcggtggcgggcggcgccgctcctctcggctcgtcggtgatctcgctggtgaaccggctccaggacatcttcagccgtgtggggagccactccgccatcgacctccctcaggttgcggtggtcggcagccagagcagcggcaagtccagcgtcctcgaagccctcgtcggccgcgacttcctccctcgcggcaacgacatctgcacgcgccgccccctcgtcctccagctcgtccaaaccaaacccccctcccaggaagagttcggcgagttcctccacttgcctggccgcaagttccacgacttctcccaaattcgcgccgaaattcaggctgagactgatagggaagctggagggaacaaaggtgtgtctgataaacagattcgtttgaagattttttcgccgaatgttctcgacattacgctcgtggatctccctggcatcaccaaggttcccgttggcgaccagccttcggatatcgaggctcgaatcagaaccatgatcatgtcttacatcaaaactccaacctgtgtcattctcgctgtgacgccggcgaattcggatttggcgaactcggatgctcttcagatggctggaattgccgatcctgatgggaacagaacgattggtgtcatcacgaagttggatatcatggatagaggcactgatgcgcggaatctgttgctaggaaaagttattcccctccgacttggttatgtcggtgttgtgaatcgtagtcaagaggatattctaatgaaccgaagtataaaggatgctcttgttgctgaagagaagtttttccgcactcatcctatatacagtggcctagcagatagttgccgtccgcctcaattggcaaagaagttgaacaagattcttgcacaacacatcaagtctgtgttaccagggctgagagcacgtataagcgcttcactagtcactattgcaaaggaacatgcaagctatggagaaatcacagagtccaaggctggacagggtgctcttctccttaatattctttcaaaatactgtgatgcattctcctccatggtagagggaaagaatgaggagatgtctacatctgagctgtctgggggtgcaagaattcattacatttttcaatccatctttgtgaagagcttagaggaggtggatccatgcgaagatttgactgatgatgatattcgcacagccatacagaatgcaactggacctaaatcagcactgtttgttcctgaagtcccgtttgaagtgcttgtacgcaggcagatatctcgactattggatccaagtcttcagtgcgctaggtttatatatgacgagttaatgaaaatcagccatcactgtatggtcactgaattgcagcggttccctttcttgagaaagcgcatggatgaagttattgggaactttttacgagaaggcctagaaccctcggagactatgataacacacgtcatagaaatggagatggactacatcaacacttcccacccaaattttattggtggaagtaaggcaatagaagctgcagtgcaacaaaccaggtcttctagagttggtttaccagtttctagggtgaaggatgcactggaatctgataagggaccagctactgagagaagtgggaagtctcgatctattcttgcaagacatgcaaatggagtagtggctgatcagggtgttcgtgctacatcagatgttgaaaaagtagtgacctctggaaacacaggtggatcaagttgggggatctcatccattttcggtggaggtgataaccgtgtgtctgtgaaggaaatgacagctagtaaaccacatactactgaaccaatgcataatgtgcagtcattctctacaattcatttgagagagcccccttctgtcttgagaccattggagagcaattcagagaccgaagctgttgaaatcacagtaacaaagttgcttttgaaatcatactatgacattgtcaggaaaaatgttgaggatcttgtccccaaagcaattatgcacttcttggtaaataacacaaagagagagcttcacaatgtcttcattgacaaacaaactagagaggatctgtttgaagagatgttgcaagaacctgaagaggtagccaagaaaagaaaaaactgtcgagaactgctccgagcttatcaacaggcttttaaagtgagtgcttataatactttaatcagcattgtctagctgaagttctggattattctatatgaagtttggttctcctttaaaggtagttctacgcctttgagttcctgtggaaatgctcatgaactttgttgctcacattggtctactcacctataaaaaaagggcagccttgtgctataaaactccgtttatgcatgggg

SEQ ID NO: 47106 - DNA, 316 bp, Glycine max
  unsure (1)..(316): unsure at all n locations
  Clone ID: PAT_MRT3847_142541C.1
ctgacacgtacgcggactcgtatgcggactcgttgacagacgcatgagcgtacacatgggcatacgcgtaagcgaactcgtatttgtgtaaacgaaaaatacatgttatataaatagttcatgcatggaatgctgatgattgggccacgcaaggtggtcgtgtaaaaacagattggagccacgcaccattgattgccacatatanaaactcagacatcaatactcgtgaatgtgacgtgttagctgttgtataggataatgataataaatgcactagccgtgagtttaaaacgtattgactggaaaaaccctaatt

SEQ ID NO: 47107 - DNA, 117 bp, Glycine max
  Clone ID: PAT_MRT3847_142542C.1
gccagacgaccgccgacgggtcggcacgaattttatgtaacaacacaatattctggacttgctcagacttccatcagtgatgggctgtcaaaaacaccacagagagaggaattaaag

SEQ ID NO: 47108 - DNA, 812 bp, Glycine max
  Clone ID: PAT_MRT3847_142543C.1
agcttttgctgagaatggacaaaagttgttgagtggtggtggtgatggtcaggtttacccctgggatctgagaacaatgacttgcctgcataaaggtgtagatgaaggttgcatcaatggcacagctctctgtacttcacccaagtgggactcattttgcagctggttcagacagtggaattgtgaatatttacaatagagaggaatttcttgggggtaagagaaagcctatcagaaccatagagaatttgactacaaaagtggattttatgagatttaatcatgactctcaaatattagcaatctgttcaggcatgaagaagagcagcttaaaattaatacatatcccatcgtattctgtgttctccaactggccaccgtcaaacacgaacctgcattatccccgctgtattgattttagtcctggtggtggattcatggctgtcggaaacgcgtcaggcaaagtgttattgtataagctgcaccattaccagcatgcctaaggtagatttaaattccgggcaggatttgacaattttgtttgtattattttgttggaagctttgagacttagatttatattttatcattattaattaatgaagcttcatgtgtttcttctttgaagttataagtaaccaagcttcatctattttatcatcaattttattaggatttaactatctttttctgatatttttttataacatttaaaattaatcttcatttaattatgttttgtttattataaactgagtattgtcatacttcaaaaaggttgattttaagtgggatggtttatatgatttgat

SEQ ID NO: 47109 - DNA, 337 bp, Glycine max
  Clone ID: PAT_MRT3847_142544C.1
agaaggcaatgggggggtacatataaaaatggtacgcacaacaaagcttttggacgggaaaaagttccccagccacacaaatcttgtttaaaaaaaaaagaaatattttatatcaatttattataaacggtaataacattcattatcaagggcattacgggtcccatcaggaacaaattatggaggaaggacatcaccgggttttctttactcttctggaggacttgcagcactaagatccacactcaggtgaataacctttccaggtatcaatggatacatggtgggaacattatccacgggcggctcaaagtgagggggggcatcataacttggt

SEQ ID NO: 47110 - DNA, 338 bp, Glycine max
  Clone ID: PAT_MRT3847_142545C.1
tgggacttcccacgccgcctatctttcgtgcggccacgcgtacgctaaagcacagtttgttagtggaaaaaccttcaaatgtgatctaattggggctggtgcacattctctagaagatatttccgtaaaagaagatcaagaaaaaccgaaacagattgatgccagattgagacaaagacctcacatcctgcaatgcaatgaggctgaagctaacaatgaaacaaatttgtttaacatagagattgcgcagtacttgggcctagaggtaacatggtggatcttaatatagttgaaccttatacagtacttcccaaaaacacagttggaggaaccattat

SEQ ID NO: 47111 - DNA, 496 bp, Glycine max
  Clone ID: PAT_MRT3847_142546C.1
tcgtgagtcatgtcaatcgctaatcctacaatttaaattatgcttttatgacaggtttggcctcagggttcacttgaagagcaggtgcagtctctagtgaagaattgggagatggaaatgttccacaaggtggacctgcaggatttcagatcaatagacccaaagaaatacactttcagcctgaacggaaggaagcctatgactctggaagagatgatgaagcttggtggagggtatataccaatgctgcaaacctctataccagagaaaatgaggccttacaatccctatgaagaaacagcagattcatcccataaggctttcacgacaacattcccacgtgggtttgctttggaaattctgcacgtgtattctggaccaccagtgatcgtgtacaagttcaggcactggggctacatggagggtcctttcaaacgccacgccccaactggagagaaaattcaattctatggaatggcaattttcacgttggatg

SEQ ID NO: 47112 - DNA, 575 bp, Glycine max
  Clone ID: PAT_MRT3847_142547C.1
gttgagaaaaaggagagtctaattgggtaattacattgtgaaattggagctatacattcagaagttggaggaaataactcataagtaactagaaaactatagttttaaccattgaccatgaagaaacaaccctagggctttatctatgctaacaaaggatgcctcatgcctagaaacactgatgctcctacccggatttttttggaagcaaccaggttcgaaacagaggcgggcatgataggctcatggaagaggtgttaatcgcttagaaagacgtgatatttaattgctacccccacttgttgaaaagctacccaaactgggcaagaagcaaattaaagtgcacttgaggcgcacatgagtgaatttccgctgaactaacttgacttggctctgtcccaacaccaactagagcttgttccttgacttgtcctaaaataaaggacgagcgctctgtctatgaaggtagaagatgataaattgaacgccatcaggaagaggaaccttctgtgagtgcctggcaaagcataaggaaccagtttcaacctagccaccgaaagcttctaccatggacc

SEQ ID NO: 47113 - DNA, 1764 bp, Glycine max
  unsure (1)..(1764): unsure at all n locations
  Clone ID: PAT_MRT3847_142548C.1
atttctttctgtgttaattaattaatttgtatagttcaatcaagagtgttaaatgcttgtggagtgcaagaaagaaattaaaaacggatcatcgtgagtcatgtcaatcgctcctacaatttaaattatgcttttatgacaggtttggcctcagggttcacttgaagagcaggtgcagtctctagtgaagaattgggagatttatttgttccacaaggtggacctgcaggatttcagatcaatagacccaaagaaatacactttcagcctgaacggtagtgtttgtcttgagaagcagaattgcaaactcattttttttgtatggtttgaatttcatacaattaattcctgaatattagttttatgattattaattaacaggaaggaagcctatgactctggaagagatgatgaagcttggtggagggtatataccaatgctgcaaacctctataccagagaaaatgaggccttacaatccctatgaagaaacagcagattcatcccataaggctttcacgacaacattcccacgtgggtttgctttggaaattctgcacgtgtattctggaccaccagtgatcgtgtacaagttcaggcactggggctacatggagggtcctttcaaacgccacgccccaactggagagaaaattcaattctatggaatggcaattttcacggtaacataacttccatccacagataatcataagcaaccattttcttaacattaatactaaaataattaatgttaagaaggtacaaaatggataaaataattattaagattttctcaataagacaacttttcacatttatgtacttcaaattcaagcatgtttcctatcaacttgataatctaagtgatattgaattgaatttcttctcgaatttaaaattttgtagataaaaaaagaaaatttttattaaaaataataagtcagattttttgataaaaattaattattaacaaaaagcaatgaatcctctaatatactgaagtatgttttgattaattaggctgatgtcaatataattatattacagctctttccagtcaacaattctatttatttttttattgtttggggtcatggtatgcatgcagttggatgagaattcaaaagtcgtgaaggtggagtttttttatgatccggcagaactgttgggaggtttcctgaaaggtcctgaggatggtagtgttgaaaatgctattgcaagctgtcctatactcaggaacaccggctagagctagcagcacaagttcaaggaagccttgaggaaaaggatggccataagtaaaaattaactgcagttgttgcatccaataatggcttcttgtttgaattttagttttttttacaattatgtttatataaataaaattgtactgatatttactacaagctacccaaatccaagcaaattaaggttgtaataccccccctcccatcatgtaatatataagcttggtcaaaaaaaaaaaaaaaaaaaaaaaaaaaaaaaaaaaaaaaaaaaaaaaaaaaaaaaaaaaaaaaaaaaacctgggggggggcccgggaccccaattccccctatagggagtngaataaccccccctcattggccgtggttttacaacgnngggactggaaaaaccctggggttccccaactaattggcctggcagaaaatccccttttcgccagctggcgtaatagcaaaaaggcccgcaccgatcgcccttccaaacagtggcggcaccctgaaaggggaaaatgg

SEQ ID NO: 47114 - DNA, 369 bp, Glycine max
  Clone ID: PAT_MRT3847_142549C.1
ccacgcgtccgcggacgcgagatcggacgcgactgtgcgagaggaccacagaacgttgcgcgttgggcgaatattaacgtttgaagtgtagctggaagctgcaggactggctcctaatataacacgtacagctatcagactccctaagtagatacggagaatctgaaagctctcaaggtcccagatggactacgagagagcgcatagatctagcactgcctaatagccgtgcatgctacgattgcgcagaccttgacgatcacctgcagctacggcatacaaaccgctgatcactcaccctactgatgctacttagaggccgcaatcgaactgacactgaccgatgccagcttaacccatggctagcat

SEQ ID NO: 47115 - DNA, 154 bp, Glycine max
  Clone ID: PAT_MRT3847_142550C.1
gcccgtctttttacaaaacagtgtgtggaaaaaccctggagtcacctaactaaatctccttgtaacacatccccctttcccaacttggcgtactacagaaaaggaccgtaccaatcgcccttcccactacttggccaacctgactggccattgg

SEQ ID NO: 47116 - DNA, 3475 bp, Glycine max
  Clone ID: PAT_MRT3847_142551C.1
ggaaggccggtcgaccacgcgtccgtataaataaaccttgtccaaacacgttgattctctccttaaacctcacaattcgtcctggcggtagcaaactcctttctttatttcctcaagatataaagataacctaaaatagcattatatttgctgaatgcaaaattaaaaattccttggaattgcaaccaatatgattgtaattacatctgacttgcattacatcaaattggatcaaacagtattagcatacattgacaatggagaaactcttaatctctagcatgtaaagcatttatggttgacttatgttcctcgatagcattttgtgaatgtcatcattgatgattatgcaaggggctctggctgcagtatgaaactcgtacagatgacattacagtcatcattgtgcatgtaaatggactaactgaatctgctgttggtcagtcagcaagttatggtgatgttttgcgaaaccctgtgcctcaagttgtagaggtgacaggttcagaatccccttccacctttggttggagcgctagaaaccatcgtgtaaggcatgacttgtcaagggcacgccttcgagcacttgaaaattccctagaaaatggtcaatcctgggttcctccatcttcagcccataggaagacatgggaagaagaagcacacatagagcaggcgttgcatgatcattttctcttccgaaaacttactgattctcagtgccatgttttattggattgcatgcaaagagtggaagtccaacctggggatattatagtcaaacagggtggtgaaggtgactgtttttatgttgttggtagtggagaatttgaggtctcggcgactcaggaagaaaaagatggggaggcacctagggttttgcagcactacacagctgaaaaactttcatgctttggagaacttgctctaatgtacaataaacccctacaggcttctgtatgtgctgttacaaaaggaactctttggtctttaaaacgagaagattttcgagggattttaatgtcagaattctctaacttgtcatcattgaagttgcttcggtctgtagatctcctctcaaggttgtcaattttacaactcagtcagatttctgactccctttctgaagtttccttctcaaatgggcagacaataatagacaaacctcaagcctgacatccaaagtgaggatgatgtacagagcggaaaagaactgtcaatagagaagcctgagggaagctattttggtgaatgggcccttcttggtgaaaatattggttccttgagtgctgttgctgtgggtgatgttgtatgtgctttactaacaaaggaaaaatttgaatctgttattggctccttacaaaagatttctcaggaagatcacaagtcaagggattattctagaaattatgaattttcatccctcgataaggtccagctctcagatttggagtggagaaagacactatattccactgactgctctgaaatagggcttgcaaattttagagattcagcagaaaatttgcttactttgaagagattttctaagccaaaggtgaaaaagctaggaaaggaatcacaagtctttaaagagagagatttgattatgggtatgggctcgttagcctgtataccacaggttttatgcacttgtgctgaccgcatgtatgctggaatactgctaaacactcgccttgcttgccctttgtcttccatactttcaagtccttttagtgaatcagcagcgcagttttgtgctgcttctgttgttattgccttggaagacttgcacaagaatggtgttctctacagaggtgtgtcacctgatgttttgatgttggaacaaactggacatatacagctggtggacttcagatttggaaaacagctttctggtgagagaacattcacaatttgtgggatggcagattcactggctccagagattgttttgggaaaaggccatggtttccctgctgactggtgggcgttgggagttttaatatattatatgttacgtggtgagatgccatttggatcatggagagaaaatgaacttgatacagttgccaaaattgcaaaaagaaagctacatcttcccgagacttttagccctgaagctgttgatctcatctccaagctacttgaagtggaagaaagcactagacttggtagccaaggtcctgattctgtcaagagtcacccatggtttaattgtattgaatgggaagggattagacaccacacctttcccgttccgcaggaaattatttctcgtataacacagtacttggaagttcattctgaggattgtagtactggttatctgggttctccattgcaggaggtaaaagaacttaatgtgcctgaatggcttgaggactggtagaagaatgacctttacattttgtcttctttttgaagtttggctttgcaccagtatttacctttgcttattcggacaaattgcaatccaagaatgcagttaaccagaaaatgcaaagagagcaatagatgctgaatattccctatagtttgaatcttttagttgcaaaatgggtagggtaggtttattatcttattcatctcctcccttttctaattttttttgggggtaattcctctcctctgtaaatattatatatgtgtaaatgattgaatttgttttcattttcaattgcaattcaagcaatttagttttgtcatggaacaatattcatattaacacacaaaatgtaatcttatttttgttcttccggggagagaaaatgaacttgatacagttgccaaaattgcaaaaaggaagctacatcttcccgagacttttagccctgaagctgttgatctcatctccaagctacttgaagtggaagaaaacactagacttggtagccaaggtcctgattctgtcaagaatcacccatggtttaatggtgttgaatgggaagggattagaaaccacacctttcccgttccacaggaaattatttctcgtataacacagcacttggaagttcattctgaggattgtagtactggttatctgggttccccattacaggaggtaaaagaacttaatgtgcctgaatggcttgaggactggtagaagaatcaccattacgttttgtcttctttttgaagtttggctctgcaccagtatttacctttgcttatttggacaaattgcaatccaagaatgcagttaaccagaaaatgcaaagagagcaatagatgcagaatttccctatagtttgaatattttagttgcaaaatgggtagggtaggtttattatcttcttcatctcctcccttttctaatttatttttgggggtaatttccctcctctgtaaatattatatatgtgtaaatgattgaatttcttttcattttcaattgcaattcaagcaatttagttttttcatggaataatattcatattagcacacaaaatgtaatcttatttttgttctt

SEQ ID NO: 47117 - DNA, 413 bp, Glycine max
  Clone ID: PAT_MRT3847_142552C.1
ggtggaaaaactgaggacacaatggtaaattgatcgcatgagaccgagtaataatttgaataaagagtggcctagggcgtactataacacccagctaggtaatattttactaatcttcaatcaggaacttgcgcagtaacatatgccctaatggtgtacaacctgggaatgtgcatagagcatgtaatgctggcatcttcgatgaatagtgcagtacgatctttgactacagtacgaacataacatgaacaactagcttaacagccgtcctatagccgcttcacgcctattgactcattcagcgtaacagctaacgcgagtacgatgacgagctcgagctgcttcctggattgatacatggtctggagagcctactccatcgtgtgatccacgataatgtacttcattggcag

SEQ ID NO: 47118 - DNA, 812 bp, Glycine max
  Clone ID: PAT_MRT3847_142553C.1
ggtggtaaaggtactggtttttatgttgttggaagtgcagaatttgaggtcttggcgactcagaaagaaaaagatggggaggtactaagggtttggcagcgctacacagctgaaatactttcaatgctttggagaacttgctctaatgtacaataaacccctccaggcttctgtacgtgctgttacaaaaggaacttcttttggtctttaaaacgagaagattttcgagggattttaatgtcagaattctctaacttgtcatcattgaagttgcttcggtctgtagatctcctttcaaggttgtcaattttacaactcagtcagatttctgactccctttctgaagtttccttctcaaatgggcagacaataatagacaaaaatgaagtccttgcattgtacattatccaaaagggacgagtgaaaatcactttggattctgatttattgtcttgtccaaatgcctacagcctcaagcctgacatccaaagtgaggatgatgtacagagcggaaaagaactgtcaatagagaagcctgagggaagctattttggtgaatgggcccttcttggtgaaaatattggttccttgagtgctgttgctgtgggtgatgttgtatgtgctttactaacaaaggaaaaatttgaatctgttattggctccttacaaaagatttctcaggaagatcacaagtcaagggattattctagaaattatgaattttcatccctcgataaggtccagctctcagatttggagtggagaaagacactatattccactgactgctctgaaatagggcttgcaaattt

SEQ ID NO: 47119 - DNA, 315 bp, Glycine max
  Clone ID: PAT_MRT3847_142554C.1
cgcgcgtgcatgcataatattaacgtgggtggaaagacacctatccatggaattgcaactgggccattttggacctgccccagcaatttaaattttaaacccaaatttaatgacactaacccactgttttgccgattaatttgaattggcgggaataaatcacgaatactgtgacggttctgcctcacggaaaaagggcctgttctacctccttatagaatgggtaatgtgaaaacaaaaagtggacaccattccccatattgagagcaacagagagacccctttttgggcttggaacttctctttgtgggaaat

SEQ ID NO: 47120 - DNA, 497 bp, Glycine max
  Clone ID: PAT_MRT3847_142555C.1
cccgcgtccgaaaaaaaaaaaaaaaaaaaaaaaaaaaaaaaaaaaaaaaaaaaaaaaaaaaaaaaaaaaaaaaaaaaaaaaaaaaaaaaaaaaaaaaaaaaaaaaaaaaaaaaaaaaaaaaaaaaaaaaaaaaaaaaaaggggggggccctttttaaaggacccaattttactaccccgggcttgcaaggtaaaagtttttttttagggcccccaaaattaaattcccgggccggggtttaaaaacggggggacgggaaaaaccctggggttcccaaattaaatccctttgaaaaaaatccccttttccccagtgggggaaaaagaaaaaaggccccccccgatcccctttccaaaaatttccccaccctaaagggcaaagggaacccccccttaaccggcccataaaccccggggggggggggggttccccccaggggaaccgttacatttgccagggccttagcgcccgttcttttggtttttttcccttctttt

SEQ ID NO: 47121 - DNA, 437 bp, Glycine max
  Clone ID: PAT_MRT3847_142556C.1
aaagatcttcatcaatatacgcaatctaaaaactgtatagaggaaaagacgagaaactttagggaggaaaagaagagagtgaagcggtgacatgaaatagaactctggatgtcccaccgaatgctacctgaggacttaaagcaaagaattagacgttttgaacattacaaatggcacgaaaatagcggtgttgactaggaggcattaattcgcaaccttactaaagatctcataagggacactaagcgtcacctttgcttagctttagttagaaaggtgccaatgtttggattaatggatcagcagttgatgcgtgcaatgtgcgatagactgaagacagtactttatgattagcatagctgcattgcctgtgaaggaaatccacttgatgagacgggatgcattatgagtggtaaaggttattctgcgacaacaaa

SEQ ID NO: 47122 - DNA, 357 bp, Glycine max
  Clone ID: PAT_MRT3847_142557C.1
cggacgccagggcgaccactctcaccgcaatctggttgttggctctgactgtgatggactggctgaagaaaaaggtcttgctagaccggctgagcaagggggccagactacatacagatgctgtcacatgttagattcaagctcctgatctgcggaagcaccacggtcattacagcacagacctagacctgctgcttctacaagagctttactgacccttccatggtaccttgtccccgcatcactccatggaccgtcaagatcataatcacactatcgacggtactacttggcatggagagggcacgccagcctgacgttgcagaccatggacgaccgcatcatgaacaacaaccc

SEQ ID NO: 47123 - DNA, 213 bp, Glycine max
  unsure (1)..(213): unsure at all n locations
  Clone ID: PAT_MRT3847_142558C.1
agcctccgccgttgggcattaccgccattgaagctcattcaagctttttttcatcgtcctcaaaattagattctntgtaaaactccgttttaactttgacgcaaccaaactctcgtccaattaagaagaaaaaacgaaaggcatgttcgttggactgttggtggggactgagatagatacgaaggctgctggctgctgcacaagctcaatcct

SEQ ID NO: 47124 - DNA, 394 bp, Glycine max
  Clone ID: PAT_MRT3847_142559C.1
atacaaaccagaaatttctaaattatcttcttttgctacattaattctaaccttgatatcaaggaaaatatcatttcccctaaatacaaaggtgcaactcggacgctatattcctgccatcattttcactccattaacttacacctaagaaaggctgtgcggccctttatttgaggaattgccttttagaagtgaaacttgcttcatacccaaccaaagccgaacttagagagctacgcagctccacgaatcgtctcgactaccccacccatatacttccgtgctgaccagggaaaagaacactttagtctttccaattgatgtggacccaggcgatgttagaatcacaggcaattctttttacttggggagcgtatataaataagagccaggg

SEQ ID NO: 47125 - DNA, 322 bp, Glycine max
  Clone ID: PAT_MRT3847_14255C.1
ccggcgaccacgcgtcgggcggaaattattttagcgaggaggcattaccagctttactgcagggataatacacagtgagcggaaaacttggcgactatatgatactcgccaagagataatatgaagagggaaccatgccgggtacaaataaagaaacactatttggtggacaagactggacatggtttgttttgccccgaagcaggcaaaggaggactacaaatattataatgtgactgtataatgaagcaacagaattgtcatttcttggggagctacttggagtttctttgtgtgatgtattttagattttactttatta

SEQ ID NO: 47126 - DNA, 207 bp, Glycine max
  Clone ID: PAT_MRT3847_142560C.1
ccacgcgtccgatagctacgtcttgttcttcggtgacgaagagctatagcgatcgccgcaactgatctgaaccctgctgccggtcttggggttgctatcaccgtcaataatgacctatgttcctaacaaacactgcagcctctggcagggaccattcatcgatgcagggctcggagacctataccaactggaaagattgctggccca

SEQ ID NO: 47127 - DNA, 331 bp, Glycine max
  Clone ID: PAT_MRT3847_142561C.1
tcaccaacctttttcttttttttcttttaacttccttcctcaaaagatatgtgtcctatcctctaaactcgaccaatctatcttcatctttataacaaaaaactgaacctcaaataaactttctttataataattataaaccaacctttacgcttcttattttttaatatctaccattttttcagtcttactatttctagctttcaatactatataatttctaaatgctatacttatttttcttgatattttatagagcaaactcccctatcatatttcttacaccttatatctgtttcaacagctttttcatgagaataatttacattta

SEQ ID NO: 47128 - DNA, 427 bp, Glycine max
  Clone ID: PAT_MRT3847_142562C.1
attacatgttttgatgtacataggtttattttaccgcttttataggtccatgataggattaacacatgacatgatctgaacttgtcttgatccggactaactctcatgtaagatcattatatctgatgcacttacggctgatgtcaatgttactttattaccatgtctaaacgaatcagctattgaaaaattagtagcttcttggtgcgctattgattttgtttgtgtagagataaatgcgattatttggtcgatattgttttgtggtttatgaatgatatgatggacgtaggaggatatttgatgagaacgcagggtcatacgcctgatggtggagataaatggtactagtatagctgcttactaaaatgtaattattggtgctagataatacacgagactagatctctttccatgctcccttttg

SEQ ID NO: 47129 - DNA, 287 bp, Glycine max
  Clone ID: PAT_MRT3847_142563C.1
accagatggaatccgccgcgtttaatcccagcttgggccccgtccaggcagccctcgtcgccttcatcgccggcggcggcggcgactacgaccggattgtgggtgctgctttggtggagatggacagtgccgtcattaaacaagagcacacagcaaagctattgattcactccatttcccccaattgccaattcgacacattcctttaccacaacaacaacaataataaatattaaatcccttattacgtctttagaagtaattcgaataattaattcaataatgaa

SEQ ID NO: 47130 - DNA, 244 bp, Glycine max
  Clone ID: PAT_MRT3847_142564C.1
acacacgcgttcgtacatctgctagaagactacacaatgttctctgatgatgataaaaaatataaggttcggtcttccgatagctccatgatgataaacgtttgtagaccttatctgaagaggctttaatatactccactttttattccttctacccataaagcttaacctgctattcttcacaatattcaagtgcatttatgtttttttgtatacattctctaatttctgctcttatctttaa

SEQ ID NO: 47131 - DNA, 411 bp, Glycine max
  Clone ID: PAT_MRT3847_142565C.1
ccacacccttccgttggcaccaaattaatttataattttcctgagcgacctaataaataaaggctgattccacttttgcaggaggataataaagctgccaaaccacctcgcaaggggtttaattggtttgatgataaacccagggttggtcctgatcctgaatggaagaactatattgggagggttgggagcatttttggggtctccgtggatccaaagctggccaaattccaggaaagggatttcttagggttgattttctttcctgtggggaatgaggctggccggttccttgatgaaggtatcgcagtcaaagcaccaaaccttgttattttggttataatgggcatgggttttcccccttacggggggggcataatatcctggccgtgtttttttggatccaggtcc

SEQ ID NO: 47132 - DNA, 505 bp, Glycine max
  Clone ID: PAT_MRT3847_142566C.1
gactaaagtgggcataatttgaaacgtaaacagctcatgtttgctaggaaattcactcaatttacggcaatggaaatctgtggtctggttgttaccttcagtaattactgctggtaatagaaaatgtgaccaaatgcccctttttccattttaagaccctatgattccaatgcaactgaggaatttctctgggctcctcttcttgcgtgatctaattctaatgatccagtttattacacactatatgaacgaataaattttcctgattctgttcttatacatgcatcactctgggaaaaaactgatctactagttgttaatacatacttgtggcgtacacacggcccaatcaagctattatggactcatgaacaaaatggagctggtgagaaatagaatgggcatggatccatggagttagctctcgcagcctgagaagatagggtatgttctacagtctgagcccctacacaagcgtgtcttttatttgaccatgctacctact

SEQ ID NO: 47133 - DNA, 746 bp, Glycine max
  Clone ID: PAT_MRT3847_142567C.1
attatgttagcgtataaaatgagagccaaatccaaaccctaatttcctaccacaccgcacttcaccgcccctcgtttcttcacactctgccgtgctctttcggcgcaggtcaagagattcgcaatagaaagtgagaaaaaaaaatgagtcgaggaagtgcaactgctgcgaagggcaagaagaagggtgcgacattcaccattgattgcgcgaagccggtggaggacaagatcatggacattgcgtctctcgagaagttccttcaagagaggattaaggttggtggcaaggccggtgctctcggcgactccatcaccgtcgtacgtgagaagaccaaaatcattgttacttccgacagcaacttctccaaacggtacctcaagtacttgactaagaagtacctgaagaagcacaatgtgcgggactggctcagagtgattgcttctaacaaagatagaagcatttatgaattgaggtacttcaacattgctgagaatgaaggagaggaagaagattaatttacccattttgagagaaccttgtttacccattttcccagtgttagcttctcttttggattgagctatgttgctttgtttacattagttgcaatttaacagttttgcttatttatgagttgtggtgccattttccattgaattcagaatagagttcatttattacatggttaacttttgcgtttgatacagttcgattgctttactaaacgaattcttagatcataa

SEQ ID NO: 47134 - DNA, 1869 bp, Glycine max
  Clone ID: PAT_MRT3847_142568C.1
tacggctgcgagaagacgacagaaggggaccacaccgccgctcgttattcacactgtgctgtgcttatttggcgtagcttaagagattagcaatagaaagtgaaagaaaatgagtcgaggaagtgcaactgctgcgaagggcaagaagaagggtgcgacattcaccattgactgcgccaagccagtggaggacaagatcatggacatcgcgtctctcgagaagttccttcaagagaggattaaggttggtggcaaggccggtgctctcgccgacaccatcaccgtcacacgtgagaagaccaaaatcatagttacttcagacagcaacttctccaaacggtatctcaagtacttgactaagaagtacttgaagaagcacaatgtgcgggactggctcagagtgattgcttctaacaaagatagaagcatttatgaattgaggtacttcaacattgctgagaatgaaggagaggaagaagattaatttacccattttgagaaaccttctttacccattttcccagtgttagcttctcttttggattgagctatgttgctttgtttacattagttgcaatttaacagttttgtttaaaaaaaaaaaaaaaaaaaaaaacccagctcaagcacaagagcaatggactcataagagtagtaactaagaaaaaaaaaggtttctgatttatttagttcggcacttccgatcatttctccgcggcggcgcaaccgattcccccgccgcatatggccaaaggtcgaaaattaacgaccagccggagcgaacgttttttgggaacctacgcctatagccaaggctccgccgccttgaacccatcggagctccgggaagaagatgtctggggcgccggagatgacgccggcgatcgcgagtgggagccacacgccgccgccttaaacaacagtggcgtcagccggcgccggattccacgtgacacggaggagcaccggcgcgtgggtggactgtcactggcgtttgaagctccggctagtggctcgtcgccgaggatggtgcaccagtttcgggcgcgtgaggagatgacgtcgacgccgcgagggcgccacatggcgacgtcggcgccggtgaacgtgccggactggagcaagatactccgagtcgactcggtcgagtcgataaacgacgaggacggggacgaatcggaaatgatgccaccgcatgaatacttggcgcgtagccagaagatggtggctaactcggtgtttgaaggagtgggccgcacgttgaagggccgcgacttgagccgggttcgtgacgccgtgtggaaccagaccgggttcgacggttaacacccggctcaggtttggactttcttcgtcttaattgtaataaaacctattacagtatattaaatttttaaagtaatagaagtgcagacaaataaacacaatagtgtttatatttctgctggttctataaaagacaagacaaacacacagttttgtatgtaattttagttctgttttgcaattataattggagttttattttgataatttacataataaaaagtttttattatgataaattatcaaaatagaaatccaattttaatcgatgaacggtactaaaaatgcttataaaactgtattttaagttttgtgtttattataataattattattgagcaggtggtaagtgatggttagttgaagacaattgttttggtttttctgggcgatgattcggctgggtggactcgactgaagagagtccaactcagtggccagtgagcctgagccgtaataattgattagcatgtaattgaaattgtaatttgtgaattatgattaagatcttttctggccaaggccactttattttcagttttg

SEQ ID NO: 47135 - DNA, 456 bp, Glycine max
  Clone ID: PAT_MRT3847_142569C.1
cttaaaattaaaaatttctaagaattttaaattctttcatccaaacacactcttaggtggtagaatatagagcataccacataataaaaattcctgaaaacaacctaatttaagtaatatcctgcagtaccaattatttgagtctttactccttacaaattccatgtatcaacccttagagaccgctgttatgaaaataattcaacccacaacataaactcaaggaaaaagtaattgattccttcttgtattcccaattgaacttataagcaggaatttaagaagcctgtctaagacagcagtagcagtcgtgaagccagttcactccccattcagtgatttagccttcacattgatgctcagaagcattttctctagacactccatcttctggttgcggttcactggattctggattgatcacatcccacaagaaaccattgtcacatccaagag

SEQ ID NO: 47136 - DNA, 206 bp, Glycine max
  Clone ID: PAT_MRT3847_14256C.1
aacaaaagagatttttttgacgtggaagacatgacccgttaggacaaaccttatttttagcaattttagcaactaaaagctgaccagacctattaactacatttatcattactcacaattggatactacatgggaccaatcatctataaggcgttgggttgctaaggtcttcattatttgcctctagcaggggggactgaacattt

SEQ ID NO: 47137 - DNA, 816 bp, Glycine max
  unsure (1)..(816): unsure at all n locations
  Clone ID: PAT_MRT3847_142570C.1
cttgatgcctgcgttcacatatttgagtctttactccttacaaattccatgtatcaacccttagagaccgctgttatgaaaataattcaacccacaacataaactcaaggaaaaagtaattgattccttcttgtattcccaattgaactggaaagcaacaatataatttagaagcatgcaatagcaatatggctaaaacaataacaagggagtacttggataatgggtagataccagggactgattataccaagccattaccttataagcaggaatttaagaagcctgtctaagacagcagtagcagtcgtgaagccagttcactccccattcagtgatttagccttcacattgatgctacacaattccataaacaacgtgatttctctatacaaccacttccatctggaatttctagtccacataccccttatccaagcatcacctatttccttaaacaaacaagtcaaatcaactaccaaaaacataaaagatactcacctcagaagcattttctctagacactccatcttctggttgcggttcactggattctggattgatcacatcccacaagaaaccattgtcacatccaagagaaagcttgtcaaaatctttatcgacagctctacattgaggctccacatgtgccacatacttctctgtaattccatacaccaaaaaaacattcagtagttaatataattccaataaagaaaaggccaaaaagctagttacatttataacaatgagataaacaatctttgntaatcaaccatcacacacttagccatcattcaccaatcaccagtagca

SEQ ID NO: 47138 - DNA, 736 bp, Glycine max
  unsure (1)..(736): unsure at all n locations
  Clone ID: PAT_MRT3847_142571C.1
cgatttgtcgtttaggaaaattcttgaggttagaaatgttaagctttggttttgaaactagggcatgtttttgtcggtcaaagataaaggttaaggaataggacattgtgattggtgaagttgggtcgcatgataggaggtggatcccacacagtggaagaagcggtggaaaataccatcattactgcaagacaatgccatcatttgcacgtgtccatggaccatccatacatacatacatttcaataccacgaaaactaattaacactgcatcaatgagattatatcatggctttaatcatgatatatttgtgaataaagagatcaaatataggaagatagctacgtagtaattgactaacatgattacatctggaaattggatgcaattgcgttgcggttgttgctgaacaggttacacaagatatatgtaaaatttaattaaaagttgattggtatatatcttttcacaattattgagaacttcaatgactttgtttaaaggaatccggatcttcaagacttcagtattcaaatactttgtttgataaaaagtatacagacttaatttaacgatcatagcttagagaatcagtttgatgtgtttaaggacgttagcagtngtgttgtactggtatttaattaccaaaacaatgagttatttaattatatttatctctgctcttaatttgtatataaggngtttttgcatgaatattgatgccgattttatctg

SEQ ID NO: 47139 - DNA, 372 bp, Glycine max
  Clone ID: PAT_MRT3847_142572C.1
gcattggcagtagttgaatgagataatctcaatctcatatttccctttcaatttgggaatgaaaaaaaaaaaaaaaaaaaaaaaaaaaaaaaaaaaaaaaaaaaaaaaaaaaaaaaaaaaaaaaaaaaaaaaaaaaaaaaaaaaaaaaaaaaaaaagaaaaaaaaaaaaaaaaaaatggagaaaaactctaaataaaaacaagattaaaacccaataattctgctccataaaaatggccgcactagtagagaataacaaagggattcgcattctccaccatagaaaaagacataaaaaaagccacgaaaaaaaattacacaggccccgaatattaaaaaacaaaagaaaaaaaacgcttgggctccctcaaa

SEQ ID NO: 47140 - DNA, 2707 bp, Glycine max
  Clone ID: PAT_MRT3847_142573C.1
cccacgcgtccgcccacgcgtcagaccatacatagcttttcgcctagaatattgaatagttataaattctgccaaaatgataactatacatgtcaatttgttgagtcttcgcattatgtccatttcctttcttaggatgcgaacatcgttccatgggcaaggcttagtgtgtttcttgtgggcactcctcctcatgctcgtcttctatctgttcgtgtctgactgttgtcctccgcctcgattacattgagattgagtggagtagaggcagtgagtgttcctcatggttcttaggttggaattagagagatctaggttgttctcgatacgcaccaataatacagccgttggcattgtagagtctcagtggcactagagttcattcagtactctccttactcgcgttggtcgtagacatctttatgtagaacagattttagttcggaaggaaaggaataagatggttgttatcgtgtaatgagacagattaagagttagattgagattttcttttggcccagcttttggccttctgtagtcttggactattcagatttaattttccacttagcattatgtcatgactagtattcttgtgatggcgttgtctcctctttgttggcttccgcgtggcacaagaggggttgaggtgctactctcccgtctgccaaatgtccccttggggctacctgtggctgtctacctattttgttctgatccatctttgcccggttaactttcgcctgtgttttcaatccttgtatattgctaatctatgccctgatggcgtagagtattcagtttgcagcccccttgttgctccctgtcttgcctgccaactccatctctaagttgtttaggaaccgcctttggcttggttttctttgtcaaattcccacaagaatgtccctacttacgcattggtgttgcacaattggcattaaggttctattataacatatagtgttcttgatgtcagaactggtgttagaatgcattcttgaaatgctactctactttatcacttgcatctccttctttctgtttttaaagcctatcctctctctcaaatcactcccgtcatgggcaagtgaagtgaggttgatctcccctttgttttacaaagacttgtctgtgaagtccatctctaagttgtttaggaaacgcctttggcttggttttcttggtcaaattccgacaaggatgtctctagtgaacaagtcttcaaaggtggagattattgaggactcccaagacatgtcagtgttggacttgccagagctggtgttggaatgcattcttgaaaagctccctccaccttcactttgtcaaatggccggggtttgccgttccctaagggagagctgtgtgagtgatcacctttgggagaggcacatgaaacagaaatggggcagagttattggtcaagctgcttatagggagtggaaatggcatgctgcttctaaagggaatgttggaactcttagacatggcaagcaaaggagcttgttgaggctggtgtcacttagttggcctttttcatggatgagaaccaaggtagatgcaaataatagcatcaagcagcaaagttatttgcctcctgattcactcatgacatggtatcttgctcttgagactggcaatttctggtttcctgctcaggtctataaccgtgagaatggccatgttggatttatgttgtcatgctatgatgctgagcttagctatgatcctcacactgacaccttccaggccagatatccaccacatggaagaagggcagttgcagtagagcatggcattccatgggaaaggctaagagcaccacctgttgatactcctccacatgatcttcatatttctgattgtctatatgatttgcatcccggtgatcacgtagagattcagtggagaagaaacaaagaatttccttatggttggtggtatggtgttgtaggccacttggaattatgcgatgggaatgaaaattactgccgttgtcatagtagtgacacagtggtgctagagttcaatcagtacactcctgactcgcgttggaggaagacaactataagtagaaaagatcatagagaggaaggaaatgaagcagatggtttttatggaggaatcagaaagattaagagtgagactgagatttccatttggaaaagcatttggccttctgaagtcttggactaatcagatctaattttccacttagcattatgtcaagactagtattcttattaagcattggcagaggcaggttcttctgcattggagaaaaaggggtataggattctcatcattcaaccaaatgaccggttgaggctacctatttactttccccttttttattatcccattttttttcatggttaagtttagcctgtgatttcaatcaatgtaaattgctcatttatgcactgatggcgtagaatattcattcccccatttattagaatgattaaaatctctgattttctcaagtgaacgttgaaatcccaaagcaatgcaagtatacaactttcgtaccaagtgatgtgagaagtatttcagccatttttatatgcaaaaaggaccaaagcaatatgcctaaaaaatgcgccctttatgcgctaactgatttttcttttggcaataatttatgattgaggtctgtagcctcctcagtagtatgcaggactcatgctgattcatctaatct

SEQ ID NO: 47141 - DNA, 820 bp, Glycine max
  Clone ID: PAT_MRT3847_142574C.1
gcaatatttgtgtattactcaggacagccactccattggaagatatattcaagtctcttttctgtttgccatgcctattgtgcttgaggtgcatgagggatacatgtattccagaggagaagatgctcagagatcccaggagactctatgcacccggtcgcctttatcacattgttgagaggaagccttttagaatgggaaggttccccccagtagtgaggacagcagtgccagtagatggaaggtttgagcatatagtcctttcttgtaatgccacatctgatcatgccatcatttggatagagaaagaagcccaaagagctctggatttgatgctggagaaagatcaacccatggaaccccctgccaagcaaaagatggagcgtcaggaaaccctaaccagacacaatgacgaatataaagcagcattacaaagggccaaaacattagatgttccacatgcttatacaccgccatcagagtatggcactttcgatgatgagggagaggagaactcaacaagatctcaaggcgagtcttctaataaaagttcagtggacgaaagctgggatgcgttgattgagcgtcatttcgataaggatgaacatggccacactgtgctgaagaaagaatgatagaataagtcgtttttgcagaattcgttcattcttgttgtgtctctaattgtaaacccagatggaacttgaattggggaatgataaatttgttagatgttaatggggatcaggattcatgtgtataatgaaataaatactcaaacatgtaaaaaattaagatagtgaaagttgagagtttacat

SEQ ID NO: 47142 - DNA, 1154 bp, Glycine max
  Clone ID: PAT_MRT3847_142575C.1
atttagcttcatccctagctactagctagcactttcacttccgttaatttaacagtagaccattaacttgaaaatttcaaaacaccgcatcaaaattttcttctgaaggcactaccgaagaatggctgtttttgcatcttcatcatctttacaaacccatttgcattcctcgctcttggcaccttcttttgaaggtgcacatgatcacaactcgtggtgggtgcgagcgagatcacagaaacgcattggtcaaagattacacacacaggacatagctagagggctgagaataaaagtccagagtgcagcaacaaaaccagcaaaatctccagctgaagaagattggaaggttaagcgagaatttctgcttcagaaaagggtaagaagtgtggaagtaaaggaagctctgcgccttcagaaagaaaacagttttgtattacttgatgtaagaccagaagcagagttcaaggaggcacatcctccaggtgcaatcaatgtgcaaatatataggctcataaaagagtggacagcatgggacattgcaagacgtgctgcatttttgttttttggtattttttctgggacagaagagaatcctgagttcatccagtctgttgaagcaaaattagataaaaatgcaaagataatagtagcttgctcagcagggggtacaatgaaaccatcacaaaatctacccgaaggtcaacaatcaaggtctctcatagcagcttacttgctggtccttgatggttataccaatgtcttccatctcgaaggcggcctttactcatggtttaaagaggatctgccaagtgtttcagaggaatgaatctagtgccaagaatgtgtgtgtagtgaagcctagacctagttttggccatgatgagaatgctgataaaagcatatgaagaatagaaccaacgaattgaaatgtcattattgaactagtgcagaaaattcttaagcaagaattggcaacaaaaatgccaggttacattctgtaaaggttgcattcctagcttaaactggaaaatgcccatttatttatcagcagtgtgtgatcagcatttttgtgatttagaaccatgcataaaccaccatgtttctgaacaactgaagcataatgcttcaatgaaaaaccaagttttgcattc

SEQ ID NO: 47143 - DNA, 519 bp, Glycine max
  unsure (1)..(519): unsure at all n locations
  Clone ID: PAT_MRT3847_142576C.1
tttttcagctctgcggtttctatgagtttgtggatttgtaaaagattgtgtggtagagtgaaactcagatttaaaaaagagaagaaatactatcaggggttgatactcaatctgtctgttacgtggagttctcaagcaatttaagaatatttgaagtaccagttgtgtcaggctctggtcagttacatagattccagtcaccaagggggctgccccctatgacacctttgcgagtggcaggtggattaacccaatcatcatcaaattctggaattttctatcaaggagatgggcagtcacagaatgtagttaactctcacttaagctcatcttttgttaactcgtctagcacggtttctggagcttctcgttcaaacctgngtccggtttctggggatatgaataatgcagttttgaacagtgtggcaaactcagcaccaagtgtaggagccagctctttagttacagatgcaaattctgcactctctggtggcccacatttgcagagaagtgccagcg

SEQ ID NO: 47144 - DNA, 250 bp, Glycine max
  Clone ID: PAT_MRT3847_142577C.1
gcttctgatgctgtggaacggtcggtgtgatgctatgtgtatctacaggactaatatgttttgccacatcctcgggaagatgcacaagatggtgtggatcgccgctttagacatcatcctggttggactcattgactacctatacgacaatgctgacgtcattctgaggtacatgcccaacgatgtcattctcttcaaggtctacttcgagctcccccataccactcttcttattgatggtattgctccc

SEQ ID NO: 47145 - DNA, 409 bp, Glycine max
  Clone ID: PAT_MRT3847_142578C.1
gtgaggaaaaatgaaaaatagtccatccgaatgtattgccgaagtcacaccctttctaaatttctaataagaatacattgcttcttagaacaggggtggtacacttgcacctatattgggcgactacgaatctttgataagaggcacagtccttcacaagaggaccaccaagcgccctgttaaacaaaagaccaccctttcaaagatttcaggcacaggaacctccaaaaactaaaggacgaatacatagcgggattctacctacgatcgcagaagactcacacttctggaggaaaaatgtgaacgcatgctaggccttgggagatgctattgggggacgatcgccacggatgtcacccatcctgtgaatatccggaagtgcccgcgtctaagaaagggcttcaaaaac

SEQ ID NO: 47146 - DNA, 136 bp, Glycine max
  Clone ID: PAT_MRT3847_142579C.1
agataggggtggcggccagtccgcgggagggagctgcggaatctaaagcttgagggagagaaatgattcggttttattaataagtagagctttataggagtatggttttttttaaaaacaagaagcaattcctagt

SEQ ID NO: 47147 - DNA, 162 bp, Glycine max
  Clone ID: PAT_MRT3847_14257C.1
cccacgcgcacgattttgttttctcgtccgacctacaaaaaaaacaaacacagggggggccgttttgtaagaaacaaccttacttacgcactcttggcacgccattaattgttactagcgttccctaaaccaaatgaaagggccgtcctttcatatagtgcg

SEQ ID NO: 47148 - DNA, 337 bp, Glycine max
  Clone ID: PAT_MRT3847_142580C.1
aaagaattaaaaactttttaattaaaaaaacggggggggaaccccccccataatgcgggggcacaataaaaacccccacccccaacagagggggcccaaaaaccccccccacaaaattgggggaggccccccctcaggaaccgaaaatagatgcaacaaactccagtcaacccccagacccggcgaaacaccaatcaaggggcattatcaggaagggggaggctatctgcttcccgggagaaatgcctttgccccaaaaggggaaagagacaacctttgactaagcagcaagaactatgatcccgaggggaagcccacccccaaaaaacaccaaaag

SEQ ID NO: 47149 - DNA, 486 bp, Glycine max
  Clone ID: PAT_MRT3847_142581C.1
ggtctcccagtaccaatacgggtacaacatgcacggtggcatatttcctgagcgaagccacacacctcaagcttgtgtgtgagcttattctcacttctttataggctgcaggggtccgccctcacgccttacgaatttctttgaacacgaggacacgtttcacgacctgaccgactgatgagtggagcggacgttactggctcaccagcagccgagcgctcacgaatcatgttccgtttggtattgtgcgtcatcgccagtctggcggatgttgtctctcctggaggtcttacaaggccaagtgggtggtctccaatagtccttcttgacggtcgcgcctgctgcattccctggccgatcttgttgcatgttctttacagctggcgttcccaggaccattggcgtccaccggtattatatctcctgctcgttctctcaaaccatagattggttctaattgcgttgtgtttttcagcgacctcgctc

SEQ ID NO: 47150 - DNA, 349 bp, Glycine max
  Clone ID: PAT_MRT3847_142582C.1
cggtccgtattccgggtcgacccacgctgcgctaagccataggcaaattggcacacccaattccttcaataccacaagcacggtaaaatatcaagggtcctagaccatcactgagctacgttagaaaatggacgaacacaattcaaagtatattgtatatgatgaggggtagcttccagtttcacatgatggaccatgcagcatcatatactccacagaggggagctacatccatcctattgaaatgaatgatcattttccaacaatagatcccaagaaagcaaatgtgttactccttccttttagcatagcatgggatggctccatatgtctacataaggaattcata

SEQ ID NO: 47151 - DNA, 287 bp, Glycine max
  Clone ID: PAT_MRT3847_142583C.1
agaaaatcaataacaatggtttaattaaccatgcaagtccaacacaggatcatatataagatcaacttaatttcccaaatgaatgaatcaagagaagtttgttgatggggaaggagtaagtaaagattacatatcaagagggtttaatttcagtttgttaatgaggaacggagtcacccaattggcttagcaagatggccaagtccatgcctcttatcatcgtaggtgcagctctgctgtagggacactccttggaaaatccaaccttaccagatttcagttcccct

SEQ ID NO: 47152 - DNA, 380 bp, Glycine max
  Clone ID: PAT_MRT3847_142584C.1
ttacacccggatgaaaaaatctaagatatactatgatgagagcgcggctcccattacctgttgcgtgagagtatgatttccttggcatcagtattcgtgtctcatcttgacatctgcgtattagggacaagcataaccccagtcacaacaagtgcctccgaagttgcaatagcgagatagactcctacaggaaccaagcatgccacgctcgttgcaacctccttaaggtggaggaagaagaagattgctaacaaggtcaacttccacgaccacgaccacaacacccgaagagggaacgtcaggcacacggcgagaatgatgaagacgaatgtgagcatccacgtgcattcccattcccacgcgcacgcccacctcatcaa

SEQ ID NO: 47153 - DNA, 437 bp, Glycine max
  Clone ID: PAT_MRT3847_142585C.1
aaaaggggcaaggaacggggtggaaaggggaggtcctaccttacaaatgaaaaaaaaaaaaaaaaaaaattccaactgtaacctaaaagaacaaaaaaaaaaaatggaaaaaaagcaacatggcccaacaaaaaaaaaagggaaaaaggggttaagccacctttccaggtgaaacggcacctggccttccttgcctttcacctagagccggcccagcaaaaaggcaaacaaaaagggggagaaaaaaaacatttccaaaaaccaaaagcacatcctccacccaaccttataataaacgatacggtaaaggcaaagaaaaaataaccggaaccatgaaactgtcaccaaaaaaaaaacaaacccaaagcctaaaaaaaacaaagggaacccgaaccgggggaaaaaaaaaatgccctggaaaaaaatcatataaacgc

SEQ ID NO: 47154 - DNA, 808 bp, Glycine max
  unsure (1)..(808): unsure at all n locations
  Clone ID: PAT_MRT3847_142586C.1
cgtncgcgatttttctccaccaccatagccattattcttctgcgtcaaaaatcttaatcttcttctgtctctctgcatttctcgccctcgccctcatcgccaacctcttccgcgcctccctctccactcactatctcgccatcgccaccaactgggtcgatttttcgcaccccttcttattccgaatgtgaccgccatacctcacaacaacaacaacaacaaggtaagtattgtggttttacaccccgtttcttctttgctcttagaatttgtgtatgacgtaatatcaataactcaaccttattctgcttctaagataagagtgggtctcacttatatacttaaatttgggtatattatatctctagacaatgtggctttcagcaaaaaccatgatgctggttagggggtgattcaggattaatgtttgcggaatggagtggttgttgatttgaaagcgtccatatcgcataaaaaccccattaactggtttttgggatggatggctatcttttacatcaggccaaagggacagagggccagataacccccaaccaaaaaaggttgttggagaaatgtggagaacgaaattacatttgtcatagtttcagataaaaaagctgagtttgttaaaagtttttttttttttccaatttttgattcacattgctgccacatgcctattcaaattatttatcttttccttttcaattaattcaatgccttaatgtaggaaatagttatgtaaaatttgtctaccttgtgtacagagttcagattttaatggatatattggaaattgcagtta

SEQ ID NO: 47155 - DNA, 438 bp, Glycine max
  Clone ID: PAT_MRT3847_142587C.1
aaaaaggcaatggcatcactttacataaggaaacagatttttacggagtcctttataaggaaaggttacttgaaaaagggcccctatttactacacatgggcaataaatcaacttgatccgggttgtctaaaacttgggaggagggggcacattcaggaaaacaacaatggggcaaattttccttggggaaaattcccccagcaaaaaaaattcaaattacgggggcaaaatttgttgaatatcagccagccggagcccccacagattcagcaggtttttccaaaagttccttttgctcctttggaacacaagactgaacagctttttttttttccccatcaaaaaaaggggggggcccatagtttatcttcaatcggggggcagaaacccgggggcccttataatgggagggccaaattttttcggaacgggcacct

SEQ ID NO: 47156 - DNA, 307 bp, Glycine max
  Clone ID: PAT_MRT3847_142588C.1
ctgagaaaaggggttaaaagccccccccccatatatctgccaaattggggtgaaagagggctaccccaaaaaaaaaaaatactgggatcataataaaaaacgccccctaagaacataaaaaaacccccccccctcggaaggaaatcccaatacctttttcctggggggcttttaaaaacacctgcggcccccccgaaaaaaaaagggatgccgcctcgggcccccaaaattttttccttctcaaccggggggtccatgaaaaacagcactcgggctaccccccccccaaaatcttttgcccttcccc

SEQ ID NO: 47157 - DNA, 468 bp, Glycine max
  Clone ID: PAT_MRT3847_142589C.1
gagccagacgcgccgtgcaatagaaagtggcaacgggtaccaggaggaagatgaatggagatgagccacgtggcacgacatcccactagaattttaggaatgctcggggaactggtacatcgtaactttagcagacatgaaacctctaaacctactcctaagcaagagaaagacaaaaagccgattacctagcacttacaaggtggaggatgaaccctgaacgcaatcggctcgtagttactaccatgctactaggatctgaagatacgtgctagggcttcagggcttacatcttcaacaaccattaaaactatgcaatttgaagtattaacgccaaccctatgactcaactacgacatgaggaggtgactgttatagtgaggatgaaaagcccggcaactgtgaaaagaagacatactacccttacctgacctcttcattaaatgatgaataagatgacccttgact

SEQ ID NO: 47158 - DNA, 317 bp, Glycine max
  Clone ID: PAT_MRT3847_14258C.1
ggcagttcagttgcaagcagattagttcattctctttgcgcagttcgctacctctcccttgaaggtgcacatcgtcgtcagcgaccctcaccggcaagaggatcacgcttgacgtgggcagctctgagatcatcgacaccgtcaaggccaggatacaggacacggacggcatccgcccggtccatcagcgtcacacttgcgccggaaagcaacatgaggacggccgtacccatgctgactacagcatgcatatggagagtactcgtcaactcgtcctccgtctcagtggaggtatgcagatcttcggtaagacactc

SEQ ID NO: 47159 - DNA, 459 bp, Glycine max
  unsure (1)..(459): unsure at all n locations
  Clone ID: PAT_MRT3847_142590C.1
ttttaacaaaaggaaaactcaactaaaaatacataccaatcacaacagtaacagaagtagaaccaaaaagggttaagaaaaaaaaaataataaagattcgattcgattcggttgggtgagtgagggttgtggggttttttttttagtcttgaaaaccggttttggcccaaatggcgtttcggagcgtgctgagatcccttccctttagggttctcccaacaccctcgtgcacggagaacgaagctaccctattcctcgcaagaaactcgtgcggtggcacccttccactcctctcatagtagnnnnnncacgtgttgtcgtcgttgtcgtcgtcgtcaaagctgttcctcctccggtactcattcccgaggatcttcgaccaatcggggatgttgaccggcattgaaaccggcgcgccggaagaggaagaaggttttttcttggccgaagaattattaa

SEQ ID NO: 47160 - DNA, 440 bp, Glycine max
  Clone ID: PAT_MRT3847_142591C.1
atcaggcttggagttctgtccctggtgctggagcaggcagagtcacttcgaaccggtggaacttcactcacccttttcaaaaacggatggatggtacttgatgcaattggtgcagctaatgatctcagaactcaattcttagaaattcaaggctgagcttgatctggttcacaatatcagctgtacaggatggtggtgaagtccgtggatgggagggaactacgcgccttcaatttcaaacaagaggatcaaagccaagaggtacgtgcagttgagaggagagtgcttttggaaaccttggctagtcagctacctcgggatagcgttcaatattcttcacaattgcaaaggattgaagccagtccaaacggggataccttgttggaacttgtggatgggtctaagctgcttgcaaggattgtgatagagtgcgatggaat

SEQ ID NO: 47161 - DNA, 1491 bp, Glycine max
  Clone ID: PAT_MRT3847_142592C.1
cgccaacctcgtcttttgccctgctgaaatctcacacgcacaccaaaactttgttcacccgcagaagcttcaaagccataaaggctcaatctcaaactgatggccgagcgaaaactgtctcgttagtgggtgctaagaacgcgagccttccgacggcgcattcccttcaagagcttggagttcggtccctggtgctggagcaggcacagtcacttcgaacaggtggaacttcactcacccttttcaaaaacggatggagggtgctcgatgcaattggagtagctaatgacctcagaactcaattcttagaaattcaagggatggtggtgaagtccgtggatgggagggaactacgcgccttcaatttcaaacaagaggatccaagccaagaggtacgtgcagtggagaggagagtgcttttggaaaccttggctagtcagctacctcgggataccattcaatattcttcacaattacagaggattgaagccactccaaacggggataccttgttggaacttgtggatgggtctaagctgcttgcaaagattgtgatagggtgcgatgggattcgatcaccaatagctaagtggatggggtttcctgagccaaagtatgttggtcattgtgctttccgtggacttgcgtcttattcagatggacaaccttttggaccaagagtgaattacatctacggaagagggttgcgcgctggatttgttcctgtttctccaaccaaagtttactggttcatctgcttcaatagtccatctgcaggtccaaaaataactgattcattggagctgaagaagcaagctaaggaactggtgaagaattggccttcagagctattgaacatagtggattctacgccggatgacactgtcattaagactccattagtagataggtggctttggccagccataagtccttctgcttctgcaggaagagttgtggtggttggagatgcatggcatccaatgaccccaaatcttgggcaaggagcttgttgtgcacttgaggattcagtggttcttgctaaaaagcttgccagagccatcaattctgaagacccatctgtggaagaagctttcaggtcatatggcgctgaaagatggccccgtgtatttccactaaccattcgtgcaaaccttgtaggttccgctttgcagtgggagaacccagtggtgtgttctgttaggaacaatattgtcatacctaagctagtcagtctcgggccattgctggagcatacaaattttacctgtgagggtctataaacaagacaaagcaaggctggcaatgacaagtacattgaaacatgtagttgtcaagagtttcatttctgttcaatatatatactgcatttaatgggtgtaaagagataagtttatgttcattactctataggttgtaaacattgtatttaaccgatctttaataagtacattcaacactttatgagaacttctccatttttctgttaaa

SEQ ID NO: 47162 - DNA, 741 bp, Glycine max
  unsure (1)..(741): unsure at all n locations
  Clone ID: PAT_MRT3847_142593C.1
gaattcgagctcggtacccggggatcctctagagtcgacctgagccacaatacaactggactgaacatatcatggctacgacaacaacaacctcgccttttgtctttctgaaatgtcacacctcaccgccttgtcacaccgaaacattgttcacccgcacaagttacaaagccataaagcctcaatctcaaactgatgatgtccgagaggaacaagttgtggtcgtgggtgctgggatcgccgaccttgcaactgctctgtcccttcataggttgtagctccccaatcttttttctcttcactgttaattatatattatgctcttagttacattcatttatgcatcaggcttggagttctgtccctggtgctggagcaggcagagtcacttcgaaccggtggaacttcactcacccttttcaaaaacggatggatggtacttgatgcaattggtgcagctaatgatctcagaactcaattcttagaaattcaagggtatatacatgaacatgattctaaccccgtgccccttttggaaaagcttaattctttattaatgttttgtttaccagctgagcttgatctggttcacaatatcagctgtacaggatggtggtgaagtccgtggatgggagggaactacgcgccttcaatttcaaacaagagatcaaaggtantacgatnggtgtgttgataaaatatgaatccatggtgtatgattgatagataattatgttcttt

SEQ ID NO: 47163 - DNA, 209 bp, Glycine max
  unsure (1)..(209): unsure at all n locations
  Clone ID: PAT_MRT3847_142594C.1
gtattttgagtgattatttcaataatgagtgtataacnttccctgttgacatgttattgtttttccccataattttaacgcagcgattggacgttgaaactgatatcactgcttttggctaattctatgcgttgtttgttagctttatcgaattgaatgtgaacgtgagtattgttcaaggggaagaagaaagtaggaatcttacctca

SEQ ID NO: 47164 - DNA, 1299 bp, Glycine max
  Clone ID: PAT_MRT3847_142595C.1
gtgaaaatcccaaagctcttggaaggttgaggtcagcgtgtgagaaagctaagaggatactctcttcaagttctcaaaccactattgagcttgattctttatgtgggggggttgatttacatgcaaatttttcaagggccttgttcgaggaattgaacaaggacttgttcatgaagtgtatggagacggtggagaagtgcctcaaggaggcaaggattgctaaaagtcaagttcatgagtttgttcttgtaggagggtctactagaattccaaaggtgcagcaacttttgaaggacatgttcagtgttaatggtaacaaggaactttgtaaaagcataaaccctgatgaggccgtggcgtatggtgcggcggttcaggccgccattttgagtggcgaaggagacaagaaggtggaggagttgttgctgctggatgtgatgccgcttagtcttgggattgagactgatgctggtgaaatgtcagtgttgattcccaagaacaccatgatccccaccaagagggagagtgttttctccacgttttctgataatcaaacaagcgttttgatcaaagttttcgagggggagcaagcgaagacagaggataacttccttcttgggaagtttgagctttctggtttcactccatcgccaaggggagttccacagatcaatgttgggtttgatgttgatgttgatggcattgtggaagtcactgctagagataggagcacggggctgaagaagaagatcacgatcagcaacaagcatgggaggttgagtcctgaagagatgaggagaatggtgagagatgcagtgaggtataaggcagaggatgaggaggtgaggaacaaggtgaggataaaaaacttgcttgagaattatgcttttgaaatgagggacagagtgaagaaccttgagaaggttgtggaggagaccatagaatggcttgacagaaaccaattggctgaaactgatgagtttgagtacaagaggcaggagttggaagaaaaggttttgaagtttatgtaatggtaattcttggtagaacaagtttaatgttgagttgagtccgaagcaatgtaaaatagttccagcttcgttactcaatctagcagtctgagtgttatgactggtttatgcttatgcctaaaatcagtaaaatgtgaaagtgcctagtatggatgcaaggaatgttgtgtttattaattattacagtacctttgtgatatgatggtgcttatggaatggactactcatatttcataaatcataatccattactgattagttttctcgc

SEQ ID NO: 47165 - DNA, 418 bp, Glycine max
  Clone ID: PAT_MRT3847_142596C.1
gctaaatggatggggtttcctgagcccaagtatgttggacttgcatcttatccagatgcacaatattttggaccaagagtgaattacatctacggaagaaggtccaacaataactgattcattggagttgaagaagcaagctaaggaactggtgaagaattggccttcagagctattgaacatggttgattctacgccagatgacactgtcattaagactccattggtagataggtggctttggccagccataagtcctgcttctgcaggaagagttgtggtggttggagatgcttggcatccaatgactccaaatctagggcaaggagcttgttgtgcacttgaggattcagtggttcttgctaaaaagcttgccagagccatcaatgtctgatgacccattgtggaagaagctttc

SEQ ID NO: 47166 - DNA, 569 bp, Glycine max
  Clone ID: PAT_MRT3847_142597C.1
taggagcacggggctgaagaagaagatcccgatcagcaacaagcatgggaggttgagtcctgaagagatgaggaggatggtgagagatgcagagaagtataaggcagaggatgaggaggtgagtaacaaggtgagggccaagaacttgcttgagaattatgcctttgaaatgagggacagagtgaagaaccttgagaaggttgtggaggagaccatagagtggcttgacagaaaccaattggctgaaactgatgagtttgagtacaagaagcaggagttggaagaaaagtttcggaagtttaggtaatggtaattcttggtagaacaagttttaatgttgagtccgaagcaatgtaaaatagttccagcttctttactcaatctagttgtcagagtgtgtataactggtttgtgctttatgtctaaaatgtgaaagtacctaaggttgtatgtatgcaaggaatgtcgtgtttattaattattaaagtacctttgtgatatgatggtgcttatggaatggactagttatatttcataaatcataattcaatactgataagtttttaccc

SEQ ID NO: 47167 - DNA, 278 bp, Glycine max
  Clone ID: PAT_MRT3847_142598C.1
acggctgcgagaagacgacagaagggtcccgaaatacccatatagtctgaatgattgaatttattcctttataattctaattctttcaaaggttgtaataaaaaaaagtaaactgaggtttacgtattcctgttctgaatgattgtttatgctgcagtagtcttgtagtcctgtactccagtattggtcttgctcttctatcttattcctgtgatagtcttgattttaaaagatgcaatcatcttatatggtgacttaatgtttctcatgcagcggaa

SEQ ID NO: 47168 - DNA, 247 bp, Glycine max
  Clone ID: PAT_MRT3847_142599C.1
agaatccatgtgacaacctttttgagtataacttgccattgccaggaatgcttacaatggacctagctcttattacgctgttccgtctcccacattatctcaatcctttggtatccctattggatcacggtctaatggtggcgaccgttgtgctcactatctgtacattacggacctaactctgcaagaaactaagactattgctttatccattttgatgcaagttatggaagagaatgttactccc

SEQ ID NO: 47169 - DNA, 651 bp, Glycine max
  Clone ID: PAT_MRT3847_14259C.1
tctccggcccctgcggctcgggctccggacctgtgcctgcgcggtccgcaggcctttgtggcaagatctgtattctgctcgatcttgaatcctcatcttgtgctggaattgtgaaccttgtgccagaaaggttgctacttcagccatcagaggataagcattcttctaagcaaaaaccattgtctatattacaagaacaagagttatcttccttgagttctttctctggtcggatacaaacctcacaagctatcaaagttgaacaagaattatcggagcttcagatcatagcggcacctgcaaaaccaaaagaaggttctggaagtgtggaagcaaaaggaccagttgagagccttcaaagtaagaaagcacaagatagtggtgagaatgggggttttaacattgagtgcaggtgtttggatcaaggggactctctgggattgataatgatcaccaatagaacgaggtaccttataaattggctggagaactccatgatgaagctgaagcaccctaatgcagtagtggttcccggggatttaacattgattgcaggtgttaaatttgataggggactttcggatgcatactgttcaccaatagaacaaggtaccttataaattggctggtgaactccatgatgaagctgaa

SEQ ID NO: 47170 - DNA, 441 bp, Glycine max
  Clone ID: PAT_MRT3847_1425C.1
ggcacgagcggaaacgggaaagcacgtttgttttgcaaaaaagacagagacaaggccgaggaaagaggaagagaaccaagaacagacaaaaagacgacagcaagagcacggacaaggaaaggaaacgccacggtgaaatcggagaagcgccgaaaggaaaaggagccagccaacgagacaaaccagaaagcacacaccgagcaccgcaaccctgacactacaaagaaaccaaatgaagccgaaaaggcaaagaaagaactagaacaacaggaacaactcgacccaaaacaggccgatgaggagagagaaaaaggaaacgaacccatcaagcagcagaagcagcccgaggccgacaagcatcacacaaaggcgataccaacaaaaccaaaagacccaagggcccaaagcagcaaagcaacaagcccacacaaaaccgggggc

SEQ ID NO: 47171 - DNA, 833 bp, Glycine max
  Clone ID: PAT_MRT3847_142600C.1
tctgcgcggaattcggctcgaggggaggctagccgtcggtgaagaatcgcgcgattcgccaggaaatcgcgattcaagcacgattcatccccgatacagagattcaaccacaattcaggaaagaaaaacgagacaaactccgtttcgtatcaatagaagctggaatcgtatcgaatcgcgagatacggatcgtgaatcattattgtagaagtctctgggtgatggctggttcagaacctgtaagtgcagagggagagagtatggctgtggatgctgccccaaggaagccccggattctacttgctgctagtgggagtgttgctgctgtcaaatttgcaaatctttgtcattgtttctctgaatgggcagatgtaagagcagtttcctcaagtggatctttgcatttcattgatagagcatcaatgcccaaggatgtaattctatacacggatgaggatgaatggtctagttggaagaaattaggtgatagtgtgcttcacattgagcttcgcaaatgggcagatatcatggtcatcgctccattatcggcaaacacccttggcaagattgctggagggttgtgtgacaatctactgacatgcatcgttcgagcctgggactacagcaagccattctttgttgcaccagccatgaacacttttatgtggaacaatcctttcacagagcggcatctcatctccattgatgagcttggcatttctctcatcccgcctgttacaaagtttatagcttgtggggactatggcaatggtgccatggctgaaccctctacctttactcaactgtaaggctcttctatgagtctaaggctc

SEQ ID NO: 47172 - DNA, 219 bp, Glycine max
  Clone ID: PAT_MRT3847_142601C.1
tttttagtaagacaattcacgggcgtatttaaatgaaaagagtattcactggcatagcaagggaaaaatacaatcgcccccattgttcaatggctacacaacgcaaacctgtgatagctaaaagcaatgctctgcatgtcaacaggcctaacataaacacccgtaactgtcaaataatttgcttcgtaagaacggaactttgctttctatcgaattcat

SEQ ID NO: 47173 - DNA, 464 bp, Glycine max
  unsure (1)..(464): unsure at all n locations
  Clone ID: PAT_MRT3847_142602C.1
gcattgtcctgtttagaaataacggtcatggcttctctgctctctacaactgctaccacacttcaacataatcacacaatctgcttctcccctgtcaaacccaccaccccaaataccattcccttctcaacaaaccggtgtttcaagaacaactctgcaaagtgcaatgctttttttgataaattccccaaagacttgttggagaccacttttcatttggaccagttccctgtcttccaatcagtgatagtgaagtttcagaatgtaactgaagacttatcagacgtgcagaggtgggggcttgggatcctaacagggctgacatgggcttatttcaccgcgaggcccggtgtttcgtcggccccattgatgcattcctcttggcccctatccaagtggttttggaagatttctcgggaaggaggaatctgaagaggattttttttcttgaanaanagnggngg

SEQ ID NO: 47174 - DNA, 251 bp, Glycine max
  Clone ID: PAT_MRT3847_142603C.1
cacacacacccacccaatctagtttaaatttttaccattccaacacatcattaagtgagacatcatttttcataaaacattccctaacaacaccaccaccccaatcacacatactaacctacactaagctcttataacagataccatcttcctcttacaacaatctgcacatcccttctcacatacttataatctttcatttaacgataccccttacaccatccagactatcactatcattgacaaacgaa

SEQ ID NO: 47175 - DNA, 450 bp, Glycine max
  Clone ID: PAT_MRT3847_142604C.1
ctctcggtgagggttttagggcacacaccgcagggagacggtttctttcactctctgcgatgggcgatggctgacgaggactatgaagatattgacatggggttcgttctctctctctctctttctctcacacacacagaaattagggttttccctaattcaatttgcctattgaaaatccttaattcccacagccgacgaggacactattttaattaactctcttgatcgtgactaaatgagcaatttctcaactcacggtacccccaaatgggattttttgcaccgtgtcgtatatttattccgggttccttttttttggcctgaggttttatttttggatccgttatggtaacacttgtagtttttctttttttcaaatgttcttctactggatttgatcacgtttgcctttttctttcaaacgtccattgtaaattattcttcatg

SEQ ID NO: 47176 - DNA, 387 bp, Glycine max
  Clone ID: PAT_MRT3847_142605C.1
tttttggtctctaaaaaattatgcatttatttcagaggctttccatatattcatttttattttattttaacgagaaacaacaacaataagataaagaaaaaagtcaaaatatcatcaagcattactttcaaactgccaatgaagattgagttcccacttgactcactcatggaaagctgtcaccatcattagagaatgggcctttgatcatgggcttctcatatcagtctatcgtctgctgaaaattcactaccaaataatctctttcttgccttgattgtctgttgttcccaatttatgcaacttgttatggtagaaagtagaacacattgagcaaaagaaccaacttgtacaccaatccaaagtcctttttcctctcatttttgc

SEQ ID NO: 47177 - DNA, 337 bp, Glycine max
  Clone ID: PAT_MRT3847_142606C.1
atgtacttgtataataaaataaaactcaaattacaaaaactaagtacttagtttttgtataattactgaaagttacaatttaactagtgatgagttacatgaaacagtgacatatatacaggactcattactaggataccatgtggaggtaagacacattggcaaattaacataacatttataattgctcataatagagctccttaaaagagaaaattcaaatttcataaccattctactatatatccatgagtcatgaacatttcattacgtatctggcatgacgttaatcgttagcgctttcacatattgactaatgaatgctctccggcagcac

SEQ ID NO: 47178 - DNA, 526 bp, Glycine max
  unsure (1)..(526): unsure at all n locations
  Clone ID: PAT_MRT3847_142607C.1
gcgagacagaggaacccacggttccagaaaacctcttgtcgctgaactcaagtataacattgatgagcgcacgcgctttcttggccgcgtgaggagtaccgtccgtcagaagcgaatacagcgaaggcataaccgaagcctccttggccagaacaccggtcacttccgcaccaacattaacacagagagccagcaaaatggacgcacagtactccttccctgagcgcgaagtagcagattgcaaaatcttagccaccaaaggcaacgcctctgctcgtaacagagcataagccccttccacactctccgccaacgccaccagaacggccaaggaatcagtaacaagattagcgttacccgaagaagctaacgtattaacaagaacaggaaccgcacccgctgataacacaatcgcgtggtttttccgacgcaagagaagtccgaagatcgcaaccacggaattgttttttccaaaagttgttttttcttttaccattcccaccaacggnnnnnnnnnnnnnnnnnn

SEQ ID NO: 47179 - DNA, 166 bp, Glycine max
  Clone ID: PAT_MRT3847_142608C.1
tgctgaactgatgaagctgttccctgagattggtaaatctctttatgacccccatgtgctggatgaagataccattcttcattggttccgaaaaagaacaaactccaagggcaggcgaacctttgtgaatgcgctcgaaccctacggtaaatggcttgaggatgcc

SEQ ID NO: 47180 - DNA, 551 bp, Glycine max
  Clone ID: PAT_MRT3847_142609C.1
ttaattactaccttcgtttttatctgttggaatgagattgtttcgcagaaactatgaaatgcaataaattttcttaaatttaataaaatagttgtgaaatttcttattttatcttttcactcttcactccacactaaatgtgtttaaattaattaaagataaaaaataaataagaatataattagtaagagtgtaattaatatgatcttgaactttgcaaacaataaataaattctccaaaaattcaacaattaaaatgtaacggagggagtattactaaaactataattttttaggttttcgtgagaattccagttggtaattgtcagtggagttgtgcttctgttttttttttgttttttttattttaacgttcgagcagaattattgtcggtgacaacaacatattaaggtaatgagtgcggtggaccatgattaggagcagtattattattgcgtaagagaatagatgtgatcaatttttgatcattattctttacactttataagttgttggtcattatgtcccttaacgtatagtttcaaagcct

SEQ ID NO: 47181 - DNA, 456 bp, Glycine max
  Clone ID: PAT_MRT3847_14260C.1
cccacgcgtccgcccacgcgtccgagtgtgtccacactacttgggagtgtgtgcccaccagagactctaatcaactgtatactactacacgacgcattgaagaagatgagaacgaaacctatcatgagatgttgcacaccacgaccaatgatactcaattaccaccaccataatgcttaccgcgagctcaacctcaagatcgagaatcaggaggaagacattgtaagatccagccacaaacacgtgcataaccaccatactgagactcatgagagagataacgtggtcgaggatgaacatgatgctgtgatgggcgatgtatatgaagagaaagctgcttataacgacgagcgggactactctaccatgtattgaaactggacagatggaagaacacctataacgttgaatcatgtggatatttattaagcaggctacctagtataccaaaagcac

SEQ ID NO: 47182 - DNA, 481 bp, Glycine max
  Clone ID: PAT_MRT3847_142610C.1
aaggttttcattctccatgttttccttacctttctccttctcttggtgttatataaaacaatgaaaatatcaaaatccaagaggtccaccaccaatttattacccccagggccatggaagtcagtggcggatcattttttaaaattcactaaatttgtaaataaaatcttatatttttatattttattttatttatatttatataattgaatctattgattttattttttataatttgcatccagtgactcagggtcttggatccgccactcatgaaagctacctctcataggaaacttgcaccaactttttggctcaactctgccccatcatgttctaagaaacttggccaccaagtatggacccttaatgcacctaaaactaggggaggtatcaaacatcatagtttcttcgccggaaatggccaaagagattatgaaaacacatgacatcatcttttccaataggcctcaaatacttg

SEQ ID NO: 47183 - DNA, 194 bp, Glycine max
  Clone ID: PAT_MRT3847_142611C.1
ttggtaattcggttaaacactggacttatgtcatcaacatcatgcagcttggattcatgcactctttcacaaaggttctgaacatggtgaaagagtgcatgaaaccaagctgcatgatggtgatgaatggcacgagtgttggtaattcggttaaacactggacttatgttcatagacggcaaggtacacccatg

SEQ ID NO: 47184 - DNA, 320 bp, Glycine max
  Clone ID: PAT_MRT3847_142612C.1
atcaatataactattaaccaagtgtagtattttaacctacgctatttcatcgatgcggcgggttttttaacgggggggggccaccccaactatatgatccctctcctaattaacacttgctatgaaacccgcacttcctaggttaaatacccacatttcaacctttctttgtaaccacacaacatcattggctttcaaaccacttctaaaaagtccttcttttcatcaaaccaatacatccattgcgaacaatatttatcatactccaaaacatttcactcccaagctttacttttatgccaaacacctaaaagaccatt

SEQ ID NO: 47185 - DNA, 397 bp, Glycine max
  Clone ID: PAT_MRT3847_142613C.1
tttaattttgataaaccgcgatcacagggtgtcgtaccttaacagcggatacaaaatctgtccttacttgattacaagaatttctcaatctcttgctacttctatgtgtgcgattacttaagggagagaaaactcactctgtgtgctggacacagacttagggaatcattatattttccactcttagatgatttgctgaacactctcctattggatataggacttcgtgtcagaatgaaacttattctgcatatttcttaaatctctgaccaatttcaagttcaagcttgagacattttggattagggctgccactctactatatggaataagacttcttgggtagactttcatatttctatcctttctttcactctcttcttatgactgatgcgga

SEQ ID NO: 47186 - DNA, 778 bp, Glycine max
  Clone ID: PAT_MRT3847_142614C.1
cacgcgtccgcaaaccaacaaccctggtctcaattttctccccctctctctctttctctcttgtggtaacatacacacacacacacacatatctagctattttggtcccattttcactataactctactaaattaacatggacaaccttcaaaaatgccaagcaaactacacagcactcacacctttaacgtttttgatgagggctgctgcatgctatgcaaacagaacctcagtgatacatgaaggaacccgtttcacttgggcacagacttatgagcgttgtcgccgcctcgccttctccctccgtgcccttaacattgctaggaatgatgttgtatcagtgctggcccctaacatcccagcaatgtatgagatgcatttcgcagtgcctatggcaggtgctgtgctgaacaccatcaacacccgtcttgatgccaagaacattgccaccattctgcgccactccgaagccaaagtcttctttgtggactacgagtacgtgtccaaggccaaagaagccctcagattgctcatggacgacaacaacaacaacaacctcaaaaaggggtgttccaaaaccaacaaatcaaccacactcaacgacattttctcttccactagtcattgtcatagatgacataaacacccccactagaatccgtcttggtgagctagaatacgagcaaatggttcatcatggtaacccaaattacttccctgaaggaatccagaacgagtggaccccaattgcgctgaatacacatcaggaacaacctc

SEQ ID NO: 47187 - DNA, 390 bp, Glycine max
  Clone ID: PAT_MRT3847_142615C.1
tgagggctaaagatggccggatacttttcctttttgtcttgttcttctcttcgaggtgtccttttcgagtgcttgatgaaactatcctctaaagggtgggatccctacgaaaagcactctgatgctcaagttaggtctcgacacaaagaaaataatgagtttagtaaatgagaatggatagaataatgtgtgttacctcgaaaatttaaccctttatatacctcttaattaagggcatgtaatttgagattacctggcagtgttaatatagtattaagaataagataagcaaaattctttaacctccatgagatggtggctgagagggtattactcctaggccatggcttagagggtactaggttgtggcttgaagggtcctaagccatg

SEQ ID NO: 47188 - DNA, 1238 bp, Glycine max
  Clone ID: PAT_MRT3847_142616C.1
tgtggagtttaaagaagacatgatgaagacctttgagatgaccgaccttggtttgatgagttacttcctcggcatagaggtaagtcagagaaatgaagggatattcatctcgcaaaagaaatacacagaaggcttacttaagaaattcaagatgtatggttgcaaacctattgctactccactcataacaaatgagaaactacagaagaatgatggagcaccagaagctgatgcatccaaataccgaagtctaattggaagcctcctatatttgacagctacacggcctgacataatgtatgctacaagtcttctatcaagattcatgcaaagcccaagtcaaatacactttggagcaggaaaaagaattttgaggtatctacaaggaacaaaagagttcggtatatggtatactaccgaaaccaactcataattacttagctacaccgacagtgattgggcaggttcaacagatgacatgaagagtacctctggctatgctttctcactaggatcgggaatgttctcttgggcgtcgaagaagcaagctacaatagcacaatcaacagcagaagtagagtatgtggcagctgctgaagcaacgagtcaagctatatggcttcgtaggatacttgaagacatgggagaaaaacaagataagcctactaaaatcaactgcgacaacaaatcagcaattgcaatgacaaagaatccagttcatcacaacagaacaaaacacatagcaatcaagtatcactttatcagagaagctgaagcaactaaagagatcaaactcaactactgcagaacaaaagatcaaattgcagacatattcaggaaggctttgccaagaccaagatttgaagaattacgagctatgctcggagtcacagaaatttgcatcaaggaggagtgttgaaattgctacaaatttctagaatattcttaaatataatatgtatatagtagaatatcctagaactatagaatatggtagaacaatctagaactataatgtgtatgaatatggtagaacaatctagaactataagtctatgtataagatagaagaatctagaactatcatgatactaatctatcatgaaaactctagaaagacctaaagtaatgtagaaacattcaccaccattgagaggttggtgacttgagcctataaataggcaattggtatgttgtaattgatcaatccaagaaatcaatgacatagccttcttttt

SEQ ID NO: 47189 - DNA, 371 bp, Glycine max
  Clone ID: PAT_MRT3847_142617C.1
aaagcctcacgccctccggcccacagaccctcagcctcctcatggtccccaccaactccgccttctcagagatcccctccaccgccccccaaaaccaggtcgacgaagacttctacctgcacctcaatctccctcccgagctcgacctcccgctccccgctacaactcaaatctaccaccagccgccaaactcatacctcatcccgcgatgggacctaggccccgactccggcgctttcacgcgcatcgagttcccgcctatcggctacgatgtcagccaggaagatctggatacctttgaaactatcctcgcacaatgcactgctttcatggagcgcgcgcaacctcctctgcctcgcaggccgagtcag

SEQ ID NO: 47190 - DNA, 299 bp, Glycine max
  Clone ID: PAT_MRT3847_142618C.1
ggcaaaaagggaaaattttcttccacctggttaaaaaccttttgaaaattaaaattggagcgggggccaacccttgacccagggagaaaaaggattaagtattttaccagctttcccaataaaaacttgatctaccccttggaaatgggaaagggctgaaaaatcttggcaaaaccatcagggcttggaatcttcttcttaacaaaacttggagttttgttctgaatccatcaagtggtttagttcaccactggcatttatttcaactttaattatccatccacctttttaaggacttg

SEQ ID NO: 47191 - DNA, 278 bp, Glycine max
  Clone ID: PAT_MRT3847_142619C.1
gcttaactgaaattttattcatgtgtgacgatttttccaatacctaacaaaggactctttcatcctagaaaagaaccaatctttgattagcacgacagccgcctcctaaagcaaaaagaatttgacactgatgtgtcaagaaccgaggcagcgcttgtgccgtaacaaaccggcccgggaatcaaaaagtatatggagtggcattaaatttaaaataaatggaattggctttccactttttaaaaaagggagggccttaatccttcaaattaggaaac

SEQ ID NO: 47192 - DNA, 409 bp, Glycine max
  Clone ID: PAT_MRT3847_14261C.1
gaagcccatcgacgacaataattccacggtgggagacaacgctcccgcggagaaaaacccaaagggcggaaagaagcttcccaaggacggaggcgcccgcagacaacgcaacaacaaaaacagaaaccccacgatcgtgaaaacatacaaaatctacatctacaacgtactgaatcacgctcaccctgacattggaatctctagcaaggacatgggaatcatgaacagcttcatcaacgacatcttcgagaagcttgcccaggaatcatctagacttgtccgctacaacaagaagcccaccatcacttcaagggaaattcaaaccgcagtcaagcttgtgctgaacggtgaattgtccaatcacgtcgattctgacgctaccaacgcccgataccagctcactagctcc

SEQ ID NO: 47193 - DNA, 384 bp, Glycine max
  Clone ID: PAT_MRT3847_142620C.1
gccatgaatatcatcagaatgggactacttgtgtgctcaagcttgccccttttgagctgctttatggaactttttgttgctgccactgcttctcaaccacacttcaacaccgcgtcgtccgaggaaaataagatgcacaagaagaaagatgtatcaatcactgctaatgtggcagcccaaaagcactttcgacaaattcaacaaatatgttaaggggatcttgaattcaagttttggaggtagtatagtaatgttttgtgataatatttaggagtcatatctaattttctcaattaatgttgttagacttcttaaaattctgggcagaaatttccattaggcataagtttgaccactatatgtaaaccttaattgattggtgtg

SEQ ID NO: 47194 - DNA, 707 bp, Glycine max
  unsure (1)..(707): unsure at all n locations
  Clone ID: PAT_MRT3847_142621C.1
ccacgcgtccgcggctccgtgggtttcaaaggaggctcagaattcctggtcgacacgccagccagatccacaaatcggaagaatcagagcgccgtcggaaaccgccgtccacggcggtgaaactcgccttcgcatcctctcgtcttcgaacccgaagcctctctcggttcctcactcttctcacatcgccaaaaactcaaattcacgatggaagagttggagcagtggaaggaacaactttcgcacttcgctaacctagctttggatcgtcttcgcgaggttcccccgaatcagctctacgctgctgctgcaatcgcgattttcacaactctgcttcttctctcaatacggttgttcaagcgcgcgaagtccaacaccattgttttgaccgggctcagtgggagtggaaaaactgttctcttctatcagcttagggatggctcaactcatcagggtacagttacatcgatggagcctaatgaaggcacttttattcttcacaatgagaaaaccaggaagggcaagataaagcctgttcatgttgttgatgttcctgggcattctcggcttcgacccaaactggatgagtacttgcctcaagcagctggggtagtttttgtagtagatgctttggacttttntaccaaactgccgtgctgcttcagagtacctttatgatctattgactaaaggaagtgttgtgagga

SEQ ID NO: 47195 - DNA, 385 bp, Glycine max
  unsure (1)..(385): unsure at all n locations
  Clone ID: PAT_MRT3847_142622C.1
tttttgtataatgttttnntttttttttttttttttaaaccaaacaaaacagtatgattctttatgctttctgcttcgaggaaaaaaaaattacaaaattcctttggacctaccttaatcaaacattttgcccaaataaaactcccagaatgcgaaatgggaatttgcccttgtacccctgccacaagtttttgaacttgggttgaaaattggaattggaaagccttttcctccaaagaattccccccggcaaaagaattaaggaccaaactttgaccattgaaagaaccgggtccccccgtgggaattttcttttccaaaaaaaaaaaaacctttgtttttcaagggggccttgaagcctgcctaaaaacggttttaccttttt

SEQ ID NO: 47196 - DNA, 1548 bp, Glycine max
  Clone ID: PAT_MRT3847_142623C.1
tatgacgtcgcacgcacgctcgcgaattggtctgaatggcggctcgagcttcctccaaattcagttgctagattaccatctttatacgaagtagcacttttagtcaatattagcagggagccactagtaagccatgatgggaaatatcagcgtaatatctagatattttagcattataacattacataactgaccatttcccactactcctgaggaagaagggatgccggcagatacaaggatactaacattttcttttattttattagtacggctgcgagaagacgacagaaggggtttcaaaggaggctcagaatagctggtcgacacgccagccagatccacaaatcggaaagaatcagagcgccgtcaaaaaccgccgtccacggcggtgaaactcgccttcgaatccagagcctctctcggttcctcactcttctcacatcgagcgcaacgccaaaaaatcgaatttcacgatggaagagttggagcagtggaaggaacaactttctcacttcgctaacctagctttggatcgtcttctcgaggttcctccgaatcagctctacgcagctgctgcaatcgtgattttcacaacgctgcttcttctctcaattcggttgttcaagcgtgcgaagtcaaacactgttgtgttggccgggctcagcgggagtggaaaaactgttatcttctatcagcttagggatggctctactcatcagggtactgttacatcaatggagcctaatgaaggcacttttattcttcacaacgagaaaacaaggaagggcaagataaaacctgttcatgttgttgatgttcctgggcattctcggcttcgacccaaactggatgagtacttgcctcaagcagctgggatagtttttgtggtagatgctttggactttttaccaaactgccgtgctgcttcagagtacctttatgatctattgactaaaggaagtgttgtgaggaagaagattccagtgcttattctctgcaacaaaacagacaaagtcactgctcatactaaagagtttatccgaaaacagatggagaaggaaatagacaaattacgggcatcaaggagtgcaatatcagcagctgacattgcaaatgagttcaccctgggggtacccggtgagccatttttttttacccagtgctctaacaaagtgacaactgcagatgcttctggtttaactggggaaatatctcagctggaagagtttatcagagaacatgtaaagcaatagctggatgttgtgtttaaacttgcggatttttgctgaattgaatgaatgtgtagtgttgttcttcttggttgctatttctttgatttcaaagaactgtctggataagaagaggcaaaaaagagaaaaaggtgttttggggtggggcttggggtgttcggagtaggaatcatgatgttgggatcaataaggatttacttcattgcaagccctggtattttgattggactataatgatttatctaattgtatcgatacttttattaaaaaaaaaaaaaaaaaaaaagaccccaag

SEQ ID NO: 47197 - DNA, 1273 bp, Glycine max
  Clone ID: PAT_MRT3847_142624C.1
gaaaaaattaattgcttttgttttgcttctttagaaatataaagtttgaccaaattatatgggaatttatatagaaattcatcttgtttttgttttttttctttctttctttaattgtttccctagccctaaggaaaatcctccttttagatgagggaaacatctgtggaattattctgcatatgcttacatattttagtatgtgactgttgttctttggtacatttgggttcatatgcaggtagagtgactccacagagtgtggtttacagttttggaactctgctgctagatcgcttgagtggtaaacatattccaccaagccttgcacttgacctgattcgtggcaaaaactttttgatgttgatggattctgccttagagggtcacttttcaaaggatgacggaactgagttggttcgtttggcttctcggtggttacaatatgacgctcgtgagaggccaaatgctaaagtctcttgttgcatctcttttgtcacttctgttagtgacagaggtccctgcctttgttcggatgcgcctcccgcaccatcctgcgtccgcatcgtggcgtttgtcttggtcccctctggctccagcttgtgtgcctctggtcctggctgcctttcgcctagtcttggagataactggttacaaggatgatgaaggaattgccaatgagctttcctttcaattgtggaccagtcaaatgcaagagaccttgaatttgaagaagcatggagatactgcttttagagctaaggactttgttactgccattgactgctacactcaattcatagatggagggaccatggtgtcacctacagtgtatgcaagacgctgcttatctttattgatgaatgacatggcacaagaagcccttggggatgcaatgcaagcccaagtggtatctccagagtggcctactgctttgtatcttcatgcagcttgtcttttcagcctcggaatggaaaatgatgcacaagagactctcaaagatgggactaacatggaaggcagaaaaaacaaaaactgaaaattttgtatagatttttccttgtcttttgttgtcttaagcattatttaatttcatgccctttaaagtctttgttaggctttgcctccaaaatcctctgtcatgatttttatattttttggctttctgtaatgcccgggacaaaatacagtaactgatttgaaattttatacgcgtgcaccctctttttccttcttttgtttccaaaaaaaaaaaaaaaaaaaaaaccaaaaa

SEQ ID NO: 47198 - DNA, 110 bp, Glycine max
  Clone ID: PAT_MRT3847_142625C.1
ttattccacttaatcaaacaagatcacttttatagataccctctatattatctagtctagttcttatcttttcagggcaaacacacccttttcgcatttatctatctaaa

SEQ ID NO: 47199 - DNA, 1278 bp, Glycine max
  Clone ID: PAT_MRT3847_142626C.1
ctgccccgccgcccacctcgggcggatacggctcgagaaggaagagaaataaacgacactcacactatactaaagaatttcgtttcgtttgtacaaaacaaaagctagcgtcatcggaccttctccggcgtcgacaatcgccatcgcagacgacggcgcccatggctcatccgccgttcgatccgtactacctttaccaacaacaagatgagcggagcaacatcaacacgctatttgtctccggtctaccagacgacgtgaaggcgcgtgagattcacaacctcttccgccgccgccccggcttcgactcctgccaactcaagtacaccggccgcgccaaccaggtcgtagcgtttgccacgtttttcaaccaccaatcggcaatggcagcgttgcacgccttgaatggtgtgaaatttgatcctcaaactggatctgttttacatattgaacttgccaggtcaaactctaggaggaagcgtaaaccaggtggtgaagcctacgtggttatagataaaaggtccacaggggagcctgatcttcagggatcatcaagtgatgacggtgacagtgaccctgatgaaccatcagacagtggtgacaaccaagagtgatatagcaatcatgacaagtgatgaaacggctgtaggttctgacaatgctgtatctgtggagcaacatggaaagggcagtgctggaggactgtgttccactctttttatcgcaaatcttggtcctaattgcactgaagatgaattgaagcaggctttttctgtatatactggattcaacatggtcaaaatgcgttccagaggaggaatgcctgttgcatttgttgattttgaggaaactgaccaagctgctaaagttgtggaggagcttcagggaagcttgctgccatcatcagatcggggtggcatgcacattgaatatgcaaggtctaaaatgaggaagcgttaggagaaacgggagctagacagtttccggataatttggttgttcgatacagaggattcgcaacatgtaggaaagattgggaatttggccaattttgcaaaatgttgttttggttatgcctagaaggctagaaccatgaattgtgtaggaattaaaaatattcagaaggttgcaaaatgtttgtccctatcggcagtaaaacttctcggcatatatttttatggtaaatggtaaccacatcagttaataataaagtttttaaagggaaaattacacttagacgcttgattatgttgtcttttgctcttaaacaattacact

SEQ ID NO: 47200 - DNA, 235 bp, Glycine max
  Clone ID: PAT_MRT3847_142627C.1
tactcactatggagggtatgtcactgtggataaagaagcaagtcgggccttgtattattacttcggtgaagctcagcgttctagagcgacactcccacgttcttctttggctcgaggaagtcctggatgttcatcttcgtggctatggagcaatgcgagaacttggacctttgcagtaaactgtgatggttggacacttcacagaaatatattgggttgggacagagttgcagat

SEQ ID NO: 47201 - DNA, 160 bp, Glycine max
  Clone ID: PAT_MRT3847_142628C.1
gccccttttgtttagaacaagcaagttttgcctcatatggctcggaatcggaaaaccctaaccctaaccaattgcgataatcgtttccccaaaatggcaattgcacgcactgagatcgacgtcgacgactatggtggtagtacgcgagcacattacccgc

SEQ ID NO: 47202 - DNA, 479 bp, Glycine max
  Clone ID: PAT_MRT3847_142629C.1
tgcaaactggctttacaggacaggtgggtctaaggtttcaagtaacatcatgaactgtctctctgtccagtgttcccccatccccacagttttctccctcccaccctccctctatctgagtcactctgatatttgctttctcaatgatggcttcattccccagcaggctcagcccatatgggaccacagcattaacagttccaaacttagagcccttaatctaaacaggacagagactctccttttcccagtatctatattagcctactaaaaatgactgctaagtaggatgctctgatcagcttgccaggagcatgtgcctctcgctctgacagggaatttcaccaccaaggacaacagggcaaaggaaagaattcccagaggaaaggatggcaggaagacaaacaggaacacctgcttacagccgtctcctacttctcactttgtgttctctgggtcctaaggctgaagagattctg

SEQ ID NO: 47203 - DNA, 146 bp, Glycine max
  Clone ID: PAT_MRT3847_14262C.1
aaaagatgaaggaagagatcctggtagcaatggttctgtctataatgctccttcctataatgggttcttgctgccccttgctgacaactgtcacaatccactgtgcacgatttgatcactttccacagtcactgggcatactccgg

SEQ ID NO: 47204 - DNA, 1259 bp, Glycine max
  Clone ID: PAT_MRT3847_142630C.1
gcaacaaattttcctgagaattggacgatgaccgcatgatgtgcaatttaaaatacaactgcacctgatcccattcagtccagtccaagcaaagccaacttacgtaatacatttgtccatacacatctttagcaaggttgaaaaatagaatcttaaaagcaagcaaatttacaaaaaaaataaatgaaaaattatagtactaaatcactcagaactagcaagagctgactgcaatacatcttcaagatacttctcagcatcggcatactgccttttcttatcctcaattgctaaggcagccaaagctttatccggaggcaaatcttggtaactcctcagagtatcaaggatgggcttagttttcttctctagctcctttctatgctcagccatttcaaccaaaatcccatggctaacctctgggttataacctgaacgatccagcattctcttgtagttgtcacattgctggttgtactgtctttcttttgcagccattacttgtaagtttgtctcccagctttccttctgagcctcacatggggcaacctcgtcttctaactgagcaagtgttctttttaaataggttagcctggctatggcctttctggtgtaatcaagtagaagcttggattccttgttcacttcagcccttttttcctcaacttcagtcttcctcaaggaaatatcacccattgctacaagaaagctactcatttcagtatctcttatattcaacaagttggcgacattcgcaagaacttgtgccgatgtaaccacattggagggcaagctctcctgcgccaatcccagattctccaaaatctccctaatcctcgcagcttgggatcggtactcggaggacttgaggcggaaatcgcgagcgacgaggcgcgcggcttcgtctttggctttggagagagtcatgagatggttcaaatgcttgacgctgcgcggcgtgtattcgaattccggaacggatttcccagcgccttcgaacgtcttcaccagccactccttcacttctgccatagcctctttctcgcccccactcattcttcttctcaaaggaaccaaccaaccaataaaacaaacgttaaatctgaattcgaatacacgccgttaaatctcaaaggaaaccaaccaatgatcaaaagtttctactttccttgtttcagtcgcgcgttacggtgaacaaaactttcaaatttgaatttttattcaatgactaaatatccaaatcgtaacggacgagtggg

SEQ ID NO: 47205 - DNA, 450 bp, Glycine max
  unsure (1)..(450): unsure at all n locations
  Clone ID: PAT_MRT3847_142631C.1
atagtttttttttaccagcagctttttttttcccatcattgtcncacaccccaggtgctagcaattttgtctcaaacgacactaaactcaccgttgaaaatacacggatgtgttttgcggttctacagcccactacagatgtggactagggtgtaccggacgcaaaaacaggagctgtgggcaacaacggcacctaacgcttcttccctcgccaagtgcagctactattcagatccataacacaacattgcctcctcattatgactggaatccagccagctgcctttctttattatggccctttttcaaaccagacgtgccctcttgaagctcaccagtcagtatcaatttaacagtgcgccccatcatttggacgctcatatcctgtcccttgggtgtggaccttagttatgaccttcttgacatcaggtcctcctgaaactgatttcc

SEQ ID NO: 47206 - DNA, 779 bp, Glycine max
  unsure (1)..(779): unsure at all n locations
  Clone ID: PAT_MRT3847_142632C.1
tgnnnnnnngcctcagtctcaagttacatgctatactatatttagacatgtgtaatgtttaaaatgactgcatgaccatattacacatttgtgttctacttgtgaatccttaaaacaaattattcctaacttttttcagctagcaatttttttgaagtagcatcacaaacagccgtggtaaatgtatgcaatcacgtgattttgagaaagaaagagacctcgtatgtacaatcaccaattggtgggtcccatggcataagcttcaccaatatatgttgctagccgaaatttgttatcaatttctgaaaggaacatatattcttcagcaccagatttagcatgactaattatttccaatttcataaattatgcaatacacaatatggaccctttccacggacggtttaacacacagaaatagctacttgtttgatgaatttccaatatgttgttggaatgcctaactgccttttcaaatcgcatcctaattgctataggaattgaccttatgcattggttctatcataaatggtatgccaccaaaaattagtggcgcaagaaatgaaataagcatctttttttttccttggtcttttgaaaagtctaaagattactataaaaaaagcaagggaagaattgaagagaaaaagaaaaggttattgcagtacttattagttaacttcataattggagttgggaggtattaatggaaaagaatggagtgannnnnntttaatagnnnaaggatcttattattggattcttgataattacttatt

SEQ ID NO: 47207 - DNA, 416 bp, Glycine max
  Clone ID: PAT_MRT3847_142633C.1
gggtcgagcacgcgtccatgcagatgccagaacacaatcgaaaggacaaactcttgccatgtaaacgtgataatcggtttccccttcaccttctcggttgctttttcatattctccccttcactccttcccctattgggctaaatattcatcatcagtgaccactggactcacaatgggagcactcaagtagtcagaacaagagttcctatgttacattaatcactttcctcagggaaacatgttatcatggtaggaatgagtcatatgtggttgttcctcctctgtggttgtacttcgtcgcgccctgatttgtacgctcctcctcttcagtgttaggtacacaaaagttgcgcataaaatgcataggtgattgctaaactgcctggtaaggtgagaattccttgggtaaccatt

SEQ ID NO: 47208 - DNA, 176 bp, Glycine max
  Clone ID: PAT_MRT3847_142634C.1
tttctatactgcaaaaacactcaataccaacctctaaaaaaacaatccctcactttaatcttacaacatctccacattgatccataatactccttcaaactcattcaacactcctcctccacacctcctttaatcgcacccaaaatctccacaaaggaccataactctatcaccac

SEQ ID NO: 47209 - DNA, 376 bp, Glycine max
  Clone ID: PAT_MRT3847_142635C.1
ctcacgcattctgaaacaaatggacagcacattataaaccattgcaagaaatgtgccacctgggtgacattgttcgcatggacaatgaacaaaaaaataaggaagtgcaacaggagcaagtatttccatcactaatgttaatgtcctcaaacatcttggtctgggaaaactggcaaaaacatttgcacaaccattaattgctatgtcattggctgatcaacgactcatgtctatgtaccttcttatactgaaagagtttattcctaatgcggcttctgaggttgctactgactttattgctcataaagtttgacataccgaagaataaaatgatgaggtcgacctctacaccgttaaaaatgaaatggatataaac

SEQ ID NO: 47210 - DNA, 112 bp, Glycine max
  Clone ID: PAT_MRT3847_142636C.1
atctatatgagctcactacagaaaatgcacatatcctagcttctaatgcaagtacactttggctgctggaccattaggaacctacacaccacgcaatatactagctcttaaa

SEQ ID NO: 47211 - DNA, 440 bp, Glycine max
  Clone ID: PAT_MRT3847_142637C.1
tgcttctaaagccgctactatttactttccatggtgagagacccataatctatgaacatcaaattgagctcttcttcatcctaactagacttctacttacaaaaggaagaaggggatttttccttacacactactaacatagggtccgtgcgaaatttagttaacacccaattgaaccctgtctcattatttggaggtttgacactttttctctacccatgacactgttttgcccttttcctgcactggccgatgacctgatcatctttgcgatcagacccaggatgagactttatctctggctctagatccaaccctggagcgtgcaaaatgtactcttctccgcatggtcttatattgcctgaaggctcatcttctgcggctgtgcgcctacgaggaactgaattctcccttcgaataaacatgctggatgtgaggag

SEQ ID NO: 47212 - DNA, 449 bp, Glycine max
  unsure (1)..(449): unsure at all n locations
  Clone ID: PAT_MRT3847_142638C.1
tttttaggtnttttttttttttttttttttttttttttttttttttttttttttttttttttttttttttttntnntnnnaaaggatttcctttttnnngggggggccccccccataatttaccccccggaaaacccaaattcccccattttaaaagggggcgggaaaaaccaaaaagagggggaaaaaaaacaaagaaaaattgccccgggaaaaaaaggaggggcccccaaaaaaaagggggggccccccaaatttgtgcgggaaaccgagaggtatgtaggaaaactggggcctttttccaaaagttttttgatatttcccaccggcccttgtaaaaagggaaaagccctcgccttcttaaagggggggccaacccttttggaaacttggaaaccccttttaaaactttttgaaccaatcccgaaccccttttggaaacccccttt

SEQ ID NO: 47213 - DNA, 304 bp, Glycine max
  Clone ID: PAT_MRT3847_142639C.1
atttgatggaagtgattagaaatagaggcatctctgctggtgttcttgcaaagcgagctcatgactccgaaaaacatgttgctcatgaaagactaaaggatcaaattcctgctgttgacaagaaggattctactaagggcaattagcgtgcataaactctgaaccatagacaaagtgttgggggagatcttaaacttcatactgatgggaagtagaatgagggtaagcatatttcctgatctaccattagtgcaggggaaaaccatgtagttcaaaatcccctaatgtcacacgaagaaattat

SEQ ID NO: 47214 - DNA, 262 bp, Glycine max
  unsure (1)..(262): unsure at all n locations
  Clone ID: PAT_MRT3847_14263C.1
aatnnntgtgaaattttnntttgtgggtattaatctnntctcttaacccatacnacatananntcatgnaanttttattatttaacacnnaacaaanannttgatttnntttttgttnnngaatttgcntnnttttagaaacaaccaaanntattttttatttttaattttaggggtggtttannatgggtcannacctatttnnaatccacaatnnctgtgatnnggattagaatcggnnatattttttttttttttnttt

SEQ ID NO: 47215 - DNA, 177 bp, Glycine max
  Clone ID: PAT_MRT3847_142640C.1
cctttatcatccacccacccaacatactcatcctccctccattcttcaacatctccatccttaaaaatcgcagcttatccaaccttttccacatccagctaccaaaatacgatcccaactccatatacgactcctcattacacacctaacaccaatattcacaaacactctactcct

SEQ ID NO: 47216 - DNA, 454 bp, Glycine max
  Clone ID: PAT_MRT3847_142641C.1
aatgcttgatcgggtggacaagatcgcagactacattctaagacagcatcaacatgcgcgcggatgggcactacttagtaaggcacggttgtcctataagaggaggatcttggagacgttcttccgtatatcccgcttcttttgcaacctggagatccaaatgggaaccacacacatctaagttgttctttgtgccgtctttactggtggaacggctatcttcatctcctcactttgaatgggctatggcagaaatgatgagaaacccaagagtgatggagaaagctcaggcttaagtaagacctgcatctagggaattgaatgtgctccttgaaactgatgtccggaaacgtacatacttaaagttggcgctcagagagacattaaagctaccaccctccttcttctttattggcccctagagaatgctccgaactaagcgtattgttggatt

SEQ ID NO: 47217 - DNA, 286 bp, Glycine max
  Clone ID: PAT_MRT3847_142642C.1
acttgaaaagagtaactccttttggattgaaaccaacctttaaacattgcgccacaaggattttaacatataatctcaccaattcccctcaacggtttttggtaaaaatgaggccatggcacttaaactttttctggattgaaacgggggcgaattcaacccagtcaatcttttttataccttaaatataaaatgtcctgacgaaccttatagaataatacagtggtcttattcgcccccctgactaacccattagagtaattcaaaccttgccagataactgggt

SEQ ID NO: 47218 - DNA, 2142 bp, Glycine max
  Clone ID: PAT_MRT3847_142643C.1
ttttaggggttaggaataccggaatagccaaccaaacccgtcgtcgtcttgttatctatcgactgactgagagagtaaagaaaaccctaaaaccctaaaaattcagaattcagctgaagaaggaggaggaaccaatggacttcgacgagtacgaatacctggagaagacagtggaggaagacatagattcctccaagaagaagaaggacgtcaccgacaagagcgagaggagttaccgaaagccccgcgacgtcgacgacgatctcgacgccgatgacagaaagagcaagaggtctagggtcgacgacgagaacggcggttccaagagagatcgcgacagagacagagagagagaccgtgaccgcgaacgttcctctggtcgtcacaggagcgagagggagagagacggagagaggaaagacagggataaggatagagagaggagggataaggaaaagacataagaaggagatagagaaagagagagagaaatagggccgggggaaggggaaaggagtgcgagagaaaagggtcggatgaggaggaatagaggctagaaacagaggaggaggaaagcggaggtagcaggactatgcacagaaggggatttagatagagagcaagatttgcatatgcccgatggccagagatttagggataaaaaagaggctgcagagcctgaggcagccccaaaaagggatcagagaactgtttttgcataccagatgcctttaaaagcaacagagagagatgcgtatgagttcttttcaaaagctggcaaggtgagagatgtcggtctgatcatggataggaactcaagaccagctaaaggagttgttaatgctatagttatgagtgttgctggggatcccttgcacttatgtttaaccaatgcattaatgaaacttgtcgaatctaatgttttatgatgcgatgtcagtgtagttggccaatatgctcttgtggacaggaaaccatgggcaacctgtaatggtgaaaccttctgaagctgaaaagaaccttgttcaatctaatgcttctggtggagcggccggtgtagctgggccctatggagctgtggacagaaaattgtatgtgggaaatcttcacttcaacatgactgagagtcagctgcgggagattttgaaccatttggtccggttgaggttgtccaactgcctcttgatttggaaacaggacactgcaagggttttgggtttgttcaattttactcatctagaacatgccaaggctgctcagagtttaaatggaaaattggagattgctggcaggactatcaaggtttcatgtgtaacagatcatgttgcaagccaagatgcaactgcaaaatctgcagacttggatgacgatgaaggtggattgactttaaatgctcactcaagagcattgcttatgcagaggctggctggcgcagaccctgcaagcataggtttgcctgttgtgaatggctcagttcctgctcagcaggctatcagcttgcctattggtgcaccagttctaccaacgctagtcatgcctaatccagtggtagaacctgtaggaaaccccagcgagtgtttacttttaaagaatatgtttgatccgagcactgagacggaaccagattttgatatagacattaaagaggacgtagaggaagagtgttctaaatatggccgggtgaagcatatttttgttgacaaaaaaagttcaggttttgtgtatttgcggtttgatacagtggaagcggcaagtggtgctcaacgtgcaatgcacatgagatggtttgcacgcaggttaatttcagctgtcttcatgcaaccagagttgtatgaagccaagtttaaaggggaagtttgaggaagttcatacatggctcgaggctcctgaagatacaatatgcataattttttgtggtcttagttttcatacattaagttctagtttatagattgattcatgaattgtattagatgtatgattacaaaaatgataatgtcctgatattggcgatttttatgatcaggttaccgttgcgcatcccaatgcacattttaacaatcttgccatgtcgtttcatcatgtgtaatgtagaatattttctatttttgcctttatgtaactttcaaagtttttgggttt

SEQ ID NO: 47219 - DNA, 249 bp, Glycine max
  Clone ID: PAT_MRT3847_142644C.1
gccaacccccaaactcctccttctcaagtagtctcatccctcacaccaaacataaaactcccaaacaacccctcatgggttgatttttgaattttattcattgatcaatctccatgccgccccaccgcgatcgcgaccatgaccacgacgacgatcacgtggctgagcaccaccaccactaccaccacagacccatcagaagaaaattggtgaacactcaccacagcggcaaaacacaccctcttatct

SEQ ID NO: 47220 - DNA, 353 bp, Glycine max
  Clone ID: PAT_MRT3847_142645C.1
ggctcgagacggaatctgattccatagcctcacacattcaacgtgaaatgggcatcctcggtttgtaattttatgaaatgtactgtaacaagcactgacctttcttctgtacctgttttggaagtggtgtcgctacctgttacacgtggattttcacttgcgctgtgagcgctttaactggaaggctgattaactaaggagccttgaagcgcgtgtagacttctactttatttcttctggctctgggcgacacaaaagaagaaccttggttttcgaggctgactgcagccactgctcattgctggcaagtaggaatattgtggctgaatcaaatggtttttgtggttagcaag

SEQ ID NO: 47221 - DNA, 296 bp, Glycine max
  Clone ID: PAT_MRT3847_142646C.1
ggttaagctttttttttttttttttttttttttttttttttttttttttttttaaaaacaaaatttaaaattctttttatcatgggcaagcttaatttacgtacaaagggaatgattcttttaaactcagttaaaaattgaaacctcctccccggagggggggaattcaaaatttaaaatccccttttataaaaattcacaaagggggggggtctccgaaaactaaaaaggtttaaatccgggggaatatcccccaactcaaaaaggggattccaagacccaagtcataacaaaaa

SEQ ID NO: 47222 - DNA, 609 bp, Glycine max
  Clone ID: PAT_MRT3847_142647C.1
aaaaaaaaaaaaaaaattttttttttttaacccaaatcctaaaaacggaaaaaaaagggggggccccccaaaccaaaccaaaccaaaagggacccaggacccaccaaaaaaggaccggtattaagggcggggaaccccccaatccagccccggaaattcttccgggattacccccccccccaaacttattaaaacccccacccccccccccccggggccaattttcattaaccaaggccccttatcttaaaaccctgaaccaggacagggggggagcccccagggcccaatttcttaggcaatttagcccccaccgggaaaaaacccccaaggggcacccccccccagggtctcccccaatcccctttggaagaacccattccccccccaacttttcccccagaaattttttaagacccaaaaggggacccccttttcaacccccacccccacagaaggggcggggggggccacacccggggaagggcccccccaaagggccctagggaaacccccctccccggaaaaagggacccccttcccccccggaaaggccaccctaaccggccgaacaaagggaatggcccccacccgtccggggacccgggg

SEQ ID NO: 47223 - DNA, 754 bp, Glycine max
  Clone ID: PAT_MRT3847_142648C.1
cgaattcgagctctgtacccggggatcctctagagtcgacctgcaggaacaatgtgcactatccaagtagatgattttcatggctactctatttttggcttaagtatgtttttggtctatgtaaatatggttaaatttgtttttggccctccatttatttttattgtatttgatcctcataaatttgaaaatggtcctcttcaccaattagtggcgatgtgacatgcatttagtcatactatgttagcgaagtaagttgccagttttttggaaaggactacctatgaaggtgctaactggaaaggttaagttaagcattgcagtgtgcagccatcagaacatcggctcttagtgggttgagattgcacattgactagacatgaccaatgttgataagaaccttaggagacccacaccacaaaaagctagttgttgtagttaaaaatccaccaccacaatctgccatggccactttttaacagcactgactctggttacttatggttttcccatagaattagggtgatgaaagttgataggtaaaatgaatgtgaatttttgtgatctgatgcacctgtgatatcctattactttattgatacttgatagtgatattatggctcttatgtttctgtagaaaaaagtacctactaggatgggcattaagaaataatatttccatgaaactgatttaaagtggatttctagtgacatggatgaacagttgtatgatgaaatgtaggggattatctta

SEQ ID NO: 47224 - DNA, 1186 bp, Glycine max
  Clone ID: PAT_MRT3847_142649C.1
tttttgttaataagcatatctaagtataacattctctgaatacatgcaagatagaatcctctaccatgatataaaagtatcaccaactctctcaaatactgtcaaaacaaccaccaaaatcctgaaggtgggtgtgttgcggtggagaaagagaaatgcgaatccgaaaggagaatttaacatataagagtatgaggacctaatatcaatttacaatacacttatacacatattatgttcagaattcataagtcacaaacaaaatggaggtttcatgctttcatctactgaccattccaagtaaaaacatcataaccaaagctgccactatggataatcccgctcctgataaccacgccaaagtcaaatctctcgggatctactagataaaagtaataacaaaaaactcaaatactatctaatcaataaccaaattcctgaaggtgggtgtgttgcggtggagaaagagaaatgcgaatccgaaaggagaatttaacatataagagtatgaggaccattccaagtaaaaacatcataaccaaagctgccactatggataatcccgctcctgataaccacgcctcagtcaaatatctacaaaagatgaaccacttcccaaagtgcatcctttttttaaggaacccaaagaaatcaaacatacaatagcaaagtggaatcttgaagtatcagagttctgggtataaggtttctaagcctattctatacatgccttgaaatgccatgtaagcctctcatttgtaacatataagaggcagccaaaaccatgtgggacctgcgggtgcagatgaaaatccaaaatggggcaaaaaggaaatagtctctaaatgcaccaagaacgcggagccatgcaaagttgctgtttccagccaacctctctggtcatttgaggtaaaacgctttccattctcgcaaccttacttagtgtggtgccttccttcgcatcttcaaccgtcgaattgctactcctcccaaaacaccagctctaatttctcgttcagttgggcatgtttgtgctctgagagagcgagaaattaagccaatgggtcgagggaagatcgagatcaaaagaatcaacaatgccaacagcagacaagtcatgttctcgaaggggaggaccgggttgttcaagaaggctcaggaactttccatagactccatgggagga

SEQ ID NO: 47225 - DNA, 260 bp, Glycine max
  Clone ID: PAT_MRT3847_14264C.1
gcgaagaagcgaaagtgcatcgccaacagcctcgacgacgtggatcgaaccctatacacctccgggtgcactggcgccaattgcctcttacaggtctacacgcacttcatggaccaccagaagctcttctttaatggcggggaacgacatggcctcgaaaaaaattataaagggatttttagaccacaaggaagggggtcacggggtggaaccagtgatgggcttaattacattcaaaatggggtggattattgggggga

SEQ ID NO: 47226 - DNA, 1315 bp, Glycine max
  unsure (1)..(1315): unsure at all n locations
  Clone ID: PAT_MRT3847_142650C.1
ccacgcgtccgcacatacacgcacagttcaaagctctctctccaattccccacgcgtccgcgtagatttcctctccccattttcacgtgattcccaatctcacactcttctcacaccttcaaccgattcaacgcaacaaagagcagtgataaagtgtggatccgggaagatgagccagagtatcttccaccagacggtgctttgtcaaacgcaaacggttgcggagcatcaaagtaaggttagttccttggaggtgagtgcgaacaaaggaaagaagaacctctttttggctcctacaaattttcgcgggagcaggctgtgtgtgaggaaacgcaaattaaccatgggaaggcaccaccaccgccacgttgacgctgttccacgcgctgttttaaccaccaatctggcttctgagctttctgggaagttcaaccttgacggaaatattgagttgcagattgctgttagttcttcagaaccaggagctgcaagacaagtagattttaaggtttcatataatagtgagtctctgcttttacattggggagttgtgcgtgatcagccagggaagtgggttcttccttctcgtcacccagatggaactaaaaattataagagcagagctcttagaactccttttgtgaaatccgactcaggatctttccttaaaatagaaattgacgatcctgctgcacaagccattgagttcctcatacttgatgaggctaaaaataagtggtttaagaataatggtgagaactttcacatcaagttaccagttaaaagtaagctatctcaagaagtttcagttcctgaagaccttgtacagattcaagcgtatcttaggtgggaacgaaagggtaagcagatgtacactccagagcaagagaaggaggaatatgaagcagctcggaatgaactatttgaggaagtagctaggggtacttctgtacaagatctccgtgcaaagttaactaagaaaactaaagctgccgaagtaaaggagccttctgtttctgaaacaaagaccatccctgatgaacttgtacagattcaagcttttatacggtgggaaaaagctgggaagcctaactactctcaggaacaacaactcatggaatttgaggaagcaagaaaagaattgttagcagagcttgagaagggggcttctctggatgagatacggaagaagattaccaaaggagagatacaaactaaagttgccaagcaattgaaaaccaaaaaatactttcgtgctgaaagaatccagaaaaaaaaaaaaaaaaaaaaaaaaaaaagcggccgctntagagga

SEQ ID NO: 47227 - DNA, 1850 bp, Glycine max
  Clone ID: PAT_MRT3847_142651C.1
atccatgcccttccccgtgactttgttgtgtgtcctctggattgcctactgtcatagactttgtgtgcacccatcaccatgatgaactgtaccttaacactctgaaatgagtatgcttctacgtaacgcctaatgagatgagaattttctgtggtctagaagaggtgccctaaaatcattcgacgactgcgaaacacatggatccatctgaaccctgagaaaggtaggctctgtctctaactcccacaacactatctgtgatttcctatagcgaagggtggagataataatagcacacctattatgatggtattccccacatggagacaagtctcatattcatatgccttgctcacaaatgagattcctgtgatgacgagaatagcgcaaataatgtttcaccacaccctaatgtgattgacctctatgatgtggatgaagactacatatgtcgtgcaccttgagttggacctgtgttctgatgtagaactgtttgataggattgtggcacaagataggtactcagagactgaagctgcaggtgtggttcggcagatagcttcaggattagaggctattcataaagctaacattgtccacagggacttgaagcctgagaattgcctcttcttggatgtgaggagggactctcctcttaagatcatggactttgggttgagttctgttgaggaattcactgacccaattgttggtttgtttggatccattgattatgtttcaccagaggctctttctcaagggaagataactactaagagtgacatgtggtctctgggagtgattctatatatcttgctctctgggtatccacctttcattgctcagaataatcgccagaaacaacaaatgataatgaatgggaatttcagtttctatgagaagacttggaagggcattaccaattctgcgaagcaactgatttcagatcttctcactgttgatcctagtagaagacctagtgctcaagatcttctgagtcatccatgggtggtaggtgacaaagccaaagatgatgcaatggaccctgagattgtctcaagattgcagagctttaacgctaggcgcaaactccgtgcagctgcaattgctagtgtttggagcaccgcaatctttctcagaactaaaaagctgaaatccttggtaggaacacatgatctcacagaagaggaaattgaaaatctcaggatgagttttaagaagatatgtgtgagtggggacaatgccactctatctgagtttgaggaggtgctgaaagcaatgaacttgtcatcactgatccctctagcaccacgtatatttgacttgtttgacaacaaccgtgatggaacagttgacatgagagagatactatgtggtttttccagcttcaaaaactccaaaggagatgatgctctccgtttgtgcttccagatgtatgacacagatcgatccgggtgcatcaccaaggaagaagtagcatccatgctgagagctttaccagaagactgtcttccagctgatatcactgaacctggcaaattggatgaaatatttgacctaatggatgccaacagtgatggaaaagttacatttgatgaattcaaagctgctatgcagagagatagctcactccaagacgtagttctctcttctcttcgtccacaatagttctcctaattttcattaattttatggtattattaattattatggtcttttcaatatggagtagtactattattttctccttttcttcttcctcgggcattctttttgctgacttattgatactataggacaaaaagagagtattggagtactatatagtgaatttttgcttttgcccgttt

SEQ ID NO: 47228 - DNA, 819 bp, Glycine max
  Clone ID: PAT_MRT3847_142652C.1
gaaaatctcaggatgagttttaagaagatatgtgtgagtggggacaatgccactctatctgagtttgaggaggtgctgaaagcaatgaacatgccatcactgatccctctagcaccgcgaatatttgacttgtttgacgacaaccgagatggaacagttgacatgagagagatactatgtggtttttccagcttcaaaaactccaaaggggatgatgctctccgtttgtgcttccagatgtatgacacagatcgatccgggtgcatcaccaaggaagaagtagcatccatgctcagagtaatattatgccccttcttttttaggataaaatataattgaagtctcttaatttttggttaaagttagttatagttcctatactttagaaatattatgatattgatttccatattctttataaccggtgaattttgtttattttttaaacttagaccaagatcaattttgacttaaaattgaagactcaaaacacactatactctatttttctagttagccttaacttgtgactttcatctcttgacacaaacaaattcactgaacaacaggctttaccagaagactgtctcccaactgacatcactgaacctggcaaattggatgagatatttgacctaatggatgccaacagtgatggaaaagttacctttgatgaattcaaagctgctatgcagagagatagctctctccaagacgtagttctctcttctcttcgcccacaatagttctcctaattttcattaatttattgtattattaactatggtattttaaaatggagtagtactagtgttgtcc

SEQ ID NO: 47229 - DNA, 224 bp, Glycine max
  Clone ID: PAT_MRT3847_142653C.1
cccaaacactacacaaggggacttttgtcagtgttggtataacagcaacaggcggggtacgtcggtgaaaaatttctgatgaacttgcaccacacttgaatggccacacgtctatactgaattgcacacagaccaagtaccggcactgcacattatcagcctcattttacaatactcttctgcattaagctttcataaaaatgatctgtttcattttttgctat

SEQ ID NO: 47230 - DNA, 188 bp, Glycine max
  Clone ID: PAT_MRT3847_142654C.1
caaacaccccatttttattatatacgagggaataatggagccgtgactaaaaaaaacgggacgttgccaaggctttgtgcttaacggggccccacaaaaaattggaacatgtactgcccccgcctaacgctttaggactagacacaaactttcctaattggacaaatgggaacatccactgaaacatg

SEQ ID NO: 47231 - DNA, 341 bp, Glycine max
  Clone ID: PAT_MRT3847_142655C.1
gggaagcacaatgccggagcgtttaaaattttcacaaaatggatttcattgttttacgtggaatctatgagggggaagtctacccaacccaattgactccctttaaggaaaaccatggatttttgttagttccagctgacctttttgagctttttgaaagcccagggtttaattggtcccttgagggagtaaccaaaacccgttccagcaacaaaacaaattgcccaaagttttgagcttgtccagtttgaccccggtttatttttttttttgggggacaatgaacttcccagggggcaaacaaacggttggcattgcccattaggcttttaagggggccc

SEQ ID NO: 47232 - DNA, 370 bp, Glycine max
  Clone ID: PAT_MRT3847_142656C.1
agggcaatcgtgcaaaccaatttatcttatagtattcttcgtcccacacagtctgtctgatccttaagggggtgaagataccaggctttaggtctcttcacacataggcatctacaaaacgtcctcgtgccggaacataatattggggcgtaggtgacaaccgctcttttagtgctacttgacgaagccaatctccttgggcttgctacggaagcgctgcctgggggacataagggcatactttctgaccaactcatgtggcataccacacacttcggctagagcgagatccaggaccgccgttgtttgggtgagaatttcagacgtcggagcgtgccagtgatacgccacaggacagggtgcgtgccaa

SEQ ID NO: 47233 - DNA, 260 bp, Glycine max
  unsure (1)..(260): unsure at all n locations
  Clone ID: PAT_MRT3847_142657C.1
gtgtattcacgntctgcacgaagganaaaccctaggctagtccactgccccctttnctccgttcgatcagcantgacaggagaagcagtgaaccccaaagcttancctttgggcggatgaccaactctcantnacnntncnancaccttgttnaacaagctggnagactacaagcagctcaaaagaggtgctaatgaagccnctagaaaccctgaccnggggnatcnnngggattgantggnnnangggtgnngnnantg

SEQ ID NO: 47234 - DNA, 633 bp, Glycine max
  Clone ID: PAT_MRT3847_142658C.1
tatctaacgttgaagaatctttctgaacattcgtttcacaaccctccccagctctttcttcagcagagtcaaacacaaatgtcacacactcaagatcaccaattagtcaaaaatctgtgcagccatcatagctggagccatattcagaatctggactaagcttttggctaacgattatcttgccttctggaattttgagagtatggaatcccctgttattgccaggtagagtttactagattcggagcagtatagcagcagttgtctggctttatcaattgccttgttcagcaaacacagagcttgcattccacaagggcgtgctgcttctatctgtggaattatccgcaagattctatcaactaatttcctgagttctgcacacattgtacgatgtaccttaaaggagcgaggatttggtaatgtctctaccagttcactgccatcagttcccattcaggggagtatcctaagctacaaataagaaagggaaataacattaagcaagtttattaacttcttgcacaaattcatgcataaaccttaaacaaaaactcactgcatgtaaaatatactttatgattttcaatagagtaacaactttgggttttatcagggtgtccacggaacatt

SEQ ID NO: 47235 - DNA, 1231 bp, Glycine max
  Clone ID: PAT_MRT3847_142659C.1
tttcctttttacatttttttttttggtgatttattgctgcttaacttccaaagtcgggaatccagcttgcttttatagttgcaaagagcagtgaagacacgacagaacacaacacaaacacagagaaagagagtgaataaatccagcattgttctgttctctgcaacattctccactctcaaccatggcttcaaagcttttactcatcactgtcttcgtttttgatttgattgcttttggacttgccgtggctgctgagcagagaagaagcaccgctagtgttgtgacggacaatgaaaagaattataattactgtgtctataactctgatatagcaactggctatggtgttggagcatttttgtttctcttggttagtcaagtcctgataatggtggcaagtcgatgcttctgttgcgggaagcctcttaaccctggaggctcaagggcctgtgcagttgttcttttcataatctgctgggtgtttttcatcatagctgaggtgtgcttgttggctggatcagtggaaaatgcctatcacaccaagtacaggaccatcttcggagagaatcctccgtcttgcgaaacagttaggaagggagtctttgctgctggtgctgcttttattttcttcactgccataatctctgaattctactatatcaactactcaagggcaagggaaagcttccaaccttatgctggtggcgagactggtgtcggtatgggaacctacaaatgagcttctagttaagaattttacagcaaacatttaggtgtgactatatctggagtctggattctgcagcacatttccttgattttagtgcatttattgtatttactgtctagctactttagatctatattgtcatgtatacatatcaacaagagaaataatttcttacattctctgatcacacttgatctatagtgtctgcatacttaaattgtagtcctttcattgttggtaacttcattgtagggtcaatttccttaatatttttggtactttgtgataaaaaaaaaaaaaaaaaaaaaaaaaaaaaaaaaaaaaaaaaaaaaacccgaaaaaaaaaaaaaaaaacccgaaaaaaaaaaaaaaaaaaaaaaaaacaaaaaaaaaaaaaaaaaaggggaaaaaaaaaaaaaaaaaaggggcccctggcccccaacttttggtccctttaagggggggaaaatggccccctgggggaaaaatgggcaaaag

SEQ ID NO: 47236 - DNA, 259 bp, Glycine max
  unsure (1)..(259): unsure at all n locations
  Clone ID: PAT_MRT3847_14265C.1
ctgaaaaggggaagaaganagtnaaatgggggagctttacgcgttggacttcganggagtcatatncgatanctgcggagaaagctctctctctgctctcaaggctgccaaagtganatngnctggtttgtttgatggggtggattcaaccacaganaattggattatngaccagatgcacacagtgcnacnagtantggaaactgganatgaaanccttttacttgtcatattgtnnntganacacaaccccccccnc

SEQ ID NO: 47237 - DNA, 154 bp, Glycine max
  Clone ID: PAT_MRT3847_142660C.1
cgggatgcaggattatcacgactccagacgggatacaaggcgaaaggcatgacatgatgctcattcgaatcacaggtcgctggtaagccgacctactaatcttacctaacgagccaccttgggattcctgctccacaatgttctgaggctcatt

SEQ ID NO: 47238 - DNA, 430 bp, Glycine max
  Clone ID: PAT_MRT3847_142661C.1
ggctcgagcccaaatagatgggctacttttaacaccatatcatatacaagggaccaattggtggggctaactccattttgggggatacgcccgatatgatatgataattccataattctcatgcacaacgagcatcgatcgaactacggtgtgggaaggaatatcttaaactagcgctagatcgtaaagatttgaaaagggtgattgagagagaggattaactaggaggagaatggaagcacgtatgagcactctaatcaatgctttcctcccaccattagctggtagctcagggcaagtaataccacatgaggcgagggtgtcaggccttgggacttagagtttaattttaatttatacagacagcattataaacatagatgtagatagatatggagggctatctaattctggtgagttattactgcgc

SEQ ID NO: 47239 - DNA, 411 bp, Glycine max
  Clone ID: PAT_MRT3847_142662C.1
attaacacagcttttttttatttttgtcttattcaagaacttttcagtcattccaaatacttgactaaagcatacacaactgattaaggaatctgggttccttgaaacccacataaattgaacaccatgaacaggactttattattcagaggggccgtagatagagatactgacgggaattcatgtgaaagtcaatccctaggcactagaaggacagagcagagtgtaaggcataataacagcccaatataagcattctcagtgactcatctttgatgttctctataaacatgtgtacaatctctggaggcttctgtccctacctatgaaatacctgtaagggaccggcatcagaagaccagctccaaccaccatctctgtggcgaaggtaaaactcatcagatgcttgcc

SEQ ID NO: 47240 - DNA, 977 bp, Glycine max
  Clone ID: PAT_MRT3847_142663C.1
tacggctgcgagaagacgacagaagggggcagtgttgtagatgttgatcccttgatgatgctgtccctgttgccggaaacgaaatgggtttgattcctaaccctaaccctaacctaatgctaaacccaagcaacctgcgttttgcctaaaatggccatggaatgatgcaaaccctagctctagccctagcccctgcaattttgagggtcctttgctattgaaatctctccaaaacgttggcttaatcgctttcaattttgcgagctctttttcgagtcggaagaagaaaacgagtccagctgcagcgtcggagtcggaggcagaggcagaggcgtttgcgtcggctctggcgagcgggaaggaagcgactttgttggagttctactcccccaagtgcaggctctgcaattccttgctcaaatttgtctccgaagtcgaaaccagaaactctaattggctcaacattgttatggctgatgctgagaaccccaattggctacccgagctccttaattatgatgttagctatgttccttgctttgtgcttcttgacaacaatggaaaggccctggcaaagacgggtgtcccaaatagccgtttacatgttattgcaggactctcccatcttctcaaaatgaagcgtcctcaacaaaataatggatgatgagcctagtgcatgaaaaccaaccttctgttcaagtaccaaggcaccataacaggagttatacagttaacttgatggttgaaggaaaaagtgggaagaaaggagtcgtgtgctcaactctctcactaatattctaacaaaactaactccgaacattttggattgccttggtttaactttaacacggaatcatcattatatgtaaattaactcacattcttatgtttccaagaactacttgcaccaatgctaacccacatgcatggtgagtcttgtattgttgtcatctttgttttgcatgtcaacgtgcatt

SEQ ID NO: 47241 - DNA, 173 bp, Glycine max
  Clone ID: PAT_MRT3847_142664C.1
catctgggctcacttggatcctttatcgctcagttgctatgatatctagttccacgttgtcgcagtaacgtctaccgtccctcatcgttgacctagggtcctcggggggtctttcgactcattgcaattatctcagtgccctgcttccgcttttccactaacctttctccttt

SEQ ID NO: 47242 - DNA, 317 bp, Glycine max
  Clone ID: PAT_MRT3847_142665C.1
ctgcgtttttttttaagccttaagctacggcaatgcgtgtgggagctctagaaattatgaggctttgcctcacacgcggtggctgcaacgtagagagacaggaaaatgtttgtttgaactggtcacaagaggagtgaattacagcttggtcaactcatgtgcggcctgtaacaagtgtgatggctgatgggaggacatatttgcatgctatggcgcatgatagttcagtgtcatacaataccaggagattatgtcattgggtgtaaatacggctgccataaacagtacgcgcgcatatgggctcaaggctggcgtta

SEQ ID NO: 47243 - DNA, 340 bp, Glycine max
  Clone ID: PAT_MRT3847_142666C.1
gaaaaaccgggccgacccacgcgaccgaccacacttactcttatacccatttaaatttcatgtttctataaaacccacattctctgtctgtcctattttaacaaaccactcttcccctaccaacactattataatacattacctaaatcacatcctcaactaatattttattcaacccaatacatatcactccctatactcttcaccatccatcaacaacttttattatcaacaccacctaaaactacttcttactaaattcttcccaatcgtaatcatttttaggaaattcaaccatatgctcaagaactacaaataccaaaattttactactaataat

SEQ ID NO: 47244 - DNA, 1101 bp, Glycine max
  Clone ID: PAT_MRT3847_142667C.1
gcgaaagccccaaatccccttaaaattttggcagtctgtgtgatctaagaaccagaaaccatcctcactaacccattttgtgttgtggaataagcatgtgtgagagacctgtccgtcgtatccctcatgaattcatccctcgcattataaaacctcgccgtgtcacggcctctgagctgtggcctaacttactgcgtgatcctatcattcataacttcatccctactcatataactacacccacaagtgcctctctttttgcctccaagcctcactcattcgattcactcaccagagagtgtccatgtacccttcaaaacgacatgtcgtcgtctattcgcttcgttaagcagactcggaccgcatccgattctcattgtagaaactggaaccaagtccacccagagttcaatatgggttacagggttcaagttcagcaagaatgcagattacccggaagaacaaacaataagagagagatccaatggcacaacaactcagaaaatagattagcaggcaaaaggaagatgtatgatcttgatgataatttagaatgttcttcgtggcccttattgacagaaactttggacgaggaagacagtgatgagacctcagattcaagttcagattctgaaacatactctggcccctcatgatctcaattgttgacaaacattggattaattatcgtataattatatagaataaatttttgtgatttattaaatatataaaaatgatgaagcatactaatttcatcattaattacactcagttaatagagttgtaattcgggtttttgattatgggatgaggttgatgagtttgggttactcatgtagtatctttgagaagttaccactcatattagtagaagctttctcttacagtcttactagcttcttcaaaagcttatgcataagttaattttttttgtcctgagttagagacgatatggattcccaatcacgatatggatttccaatctattagattagagattgatctcgtttattatgtgtgattgcggttggtccaaaggagttttgcagtgaaaatcaaacatgattctcccattaaataaattattttttcatatat

SEQ ID NO: 47245 - DNA, 164 bp, Glycine max
  Clone ID: PAT_MRT3847_142668C.1
gaggaggcaccctttttgccgaagttacagagctagtctgccgagtttcttagagagaggagcaaaacgccactaggtattgtctacctacccccctgaaaacgcttcgggaaaagggacccattaattgaaggtaggtcgatcttttactggcaaaaaggctt

SEQ ID NO: 47246 - DNA, 480 bp, Glycine max
  Clone ID: PAT_MRT3847_142669C.1
ggaggatgttctggtcagcagaataggtgcagaactgttagaaatactccacaactccactgaacgacgaactgttctctcatgtgagtatagtgtgatctcagcgatagcagagacaggtgaagaaggagcacgtcggaaaagcataacacgctggcgaatctaatgctatcagtctgacgaagactcgcgagatagaatcacggcaactgactgttgaagaaggaaccttttcggggctgatactgatggcaagaaaagacacattctaaagatcatgatagagctacgtggctcttggttttgctcagagattatacgacgaacgaaagactaacctaatcaactacggagaaaatgtgttctgacattgctgaacgattagatggagcaaagaaatctactacaactggcgtgaggatatagggagatgtggttaaaagcgactattgaacacagtacgacatgcatccagcatat

SEQ ID NO: 47247 - DNA, 734 bp, Glycine max
  Clone ID: PAT_MRT3847_14266C.1
cggctcgaggttatgttaagtatggtttatggcaatttattatatgacatttgaatgaatttgatagatagtagagcggtttagtggtcgattgcctggttacgtggggtatggaaacgatagattttcgttcagccatgtggaggatgtggtggaagggcacattgcagcaatgaaaaaaggagaagctgggaataggtatctactaacgggggaaaatgcgtccttcaagcatgtttttgatatggctgctgcgattactcatactaaaaaaccactgttcagcatcccattgtggctaattcaactctatggctgcctctctgttttcttctctagaatcaccggaatgctacctctcatcagtccaccgacagtacatgttttaagacatcggtgggaatattcctgcgacaaagctaaaagggagcttgattataggcccagaagcctgaaagatggacttgcagaggtactactatggttgaagaacttgggcctgataagatattagccagaacattctaatactttatttcatttttttgagacgtcgtagtactttctgggcttcagtgtttcaccttgtggaatatcaatcaaaaaataaatactgtaataaaaccacgataagacttttttggtagagaaaaccacgataagatgtaacttttacaatgagtaagtacctattcagtcctgctagttattgaatgattgaatcatttggtgtg

SEQ ID NO: 47248 - DNA, 964 bp, Glycine max
  Clone ID: PAT_MRT3847_142670C.1
gcgccaccgcatcaacctccatcaggagtgagaaaacttcctcattccgtttcagaagcaatgccaatgttcctccgtgctctattgagaaggcatctgatttataaagctaggtagatatattcagcgtcaagtgtcaactatattatggcaagccttctcatgattccttgccagcatctattgctaaagaagttgcaaaggcattgtcatagaaaggcagcatcaaactccattaggagtgagaaaacttcctcattcagtttcagaagcaatgccaatgttccttttcatgaattgcctggggcttcctttgatcaatacatggatgacaagcacagagtgctaagagctgtgttttctgatgacaaaggaacaactaaacagctcaatgaggaagagtggaggatcaaaatgcctcccatacaatgcttatttttgagtgtcaatccaacagcagatgtcaggttaacattcaggtctaatggagaagattatccacctgaaattcctcatcatgtccccaaagttcttgagcttcactttataaggtgggagctacagggcctgaatagcttctacaaggatccttaccaaatcagcatagatgttagaggttctttatacccagaaaggaagggaaaacatagttggctcaagaatcaaatggtgatgacgataaccttttgtgcttctccagcaatagctttcattcctgaaaatgtcttacaagatgccatagagctgattttcaaaacagtgtgggatgaaatgaagcatgaattccatggtagactattggaagattataacaggttcaagagaaacaaatccaagaagaactctgtataaactggttttttcattaatatttaacacaacttgttgatagcaacaacatatcaattatgattaattgtcatgattctttgaaaaggaaaatatgatctttttttattaataa

SEQ ID NO: 47249 - DNA, 268 bp, Glycine max
  Clone ID: PAT_MRT3847_142671C.1
gaacgatcgtaaacatttgtgttatacacgtgcgaatgctgtttacatgcaaattaaaaaaccgctcaggtcattttcaatgtgtagaaaaatggaaacttactttttattaaacctgcaagcgtcgtgcaagatctggattacacagcagacatggatttagatcttgatgcatccatgtagtagagatcccagcgtcatggatttttgagactaaccagtcttatgatgagcggaagagcactggcttccatgatagatggtcgat

SEQ ID NO: 47250 - DNA, 656 bp, Glycine max
  Clone ID: PAT_MRT3847_142672C.1
tttcaaatcccacttgagatagtttggaaatcattcagcctcgtattttttgttgaatggggagatcgctctatgcttgcgacaattgcacttggggctgctcagtctctttggggtgtggcaagtggagccattgctggacacctactcgcaactactattgccattcttggaggagcattccttgctaactacatttctgaaaaactggttggctacttgggtggagggctgtttctaatttttgctgtggccaccttttttggggttttctgattcattgttgtctatccttacaccttttttgtgtgcaatatatcactgatggagctaaaaggaataacacatgctcaaaacagaaagattgtgagagaacagagaaaagctcatattttaactttgttaaaagatttcttgagtagaaattaggagcaaattgctcacatggttggagaataagaagcatgaaatgtgccattagagtgaggtttgaagagaaacttgtgtaattctttctcgagactagcttctgtagagtgtctttatttattgtataatcaaactacatctaagattcaaagaaacgtgcctatcaaaaacaatttgctgttgttaaataacaaaaaaaaaaaaaaaaaaaaaaaaaaaaaagaacg

SEQ ID NO: 47251 - DNA, 1398 bp, Glycine max
  Clone ID: PAT_MRT3847_142673C.1
gcagaccccctggttgagcccaccatgaaagggaacgatgcttctcacgatgctgtacggctgcgagaaggacgacagaaggggggaggtagagttggatagcaaattgtaagtttgggaaaggcagcgggagtggaagatatttatggtgagtctgagggcttggaggcagagaagagatagagatggaaatagagaggctaagaagaaatgcagaggcgctggttgagaagaccatgaaagggaacgatgcttctcatgatgctgctcatgtttggagagttcgtgatcttgctctctcccttgccaaagaggaaggcctctcttccaatccccactccatggaaattgttgagcttgctgcgcttctccatgacatagctgactacaaatacctcagggacccatctgaggaaaaaattgttgagaattttctcgatgaagagggagttcaggaggacaacaagttcaaaattttgaagatcatcaaaggaatgggtttcaaggaagaagtgtcaggaagtggaaatagtgaagggtttccagaatttggagttgtgcaagatgctgatcgacttgatgctattggtgctataggaattgcacgttgtttcacctttggtgggagtaggaagaggttgctgcatgatccagccattctaccacgatctgatttgtccaggcagcaatacatgaacaaagaggaacaaactactattaatcattttcatgagaagcttctcaagctcaaagatatgatgaaaaccaaggctgggaaaaggagggcagagagaaggcataagttcatggaggagtttgtgaaagagttctacgacgaatggaatggtttaagctaataaaccattccacaacttatggatgctagactatattgtgagcttgttatctgttatttcttttcctcctcacccgcagaggttacatatattgtcactggttatacaattcttcccaggatcgtccgcgtaagcacaatgttttgctgataaattacaatgtacatgtgagtcgtagttcccagtatcagtattcagtagtaatggttccaacttcgtttctacttaataaacttgttgtctgatcgtgcaatgagattttttggatgcaaattatatgtacagtagtacttatgttatggatttcaagtatgttaagaaacaagatatcttgtctaatgcgggccccagtattgattaaagtttcttatcctagccctagagagaatatgtgcgggtttgtttttcgagtcaaattaggatagcacaaagtccgagatcatttcactgcagaagtaaggatattgttgcttcctgaaaacggaggttggccccaacacacatttgcattggtaattcaaatacgctataagtcttttgt

SEQ ID NO: 47252 - DNA, 467 bp, Glycine max
  Clone ID: PAT_MRT3847_142674C.1
tttttctttttttttttttttttttttggtttgttttttttttttttttttgttttttttgttcttttttattctttttgtgggggccccccggcgacgggggggggttttgtggtggggccaacgcgcgagcgggaaaagcacaaactgtggccaacaccgcgcgggatcggattttttcccccgcaccccttatttggggggaaaacaaaccccccccgagcaaggattttttttcccaaaaaatttgtcggcaaaattaaaaccgcggtttttctttggggttcgcgccccgcgggggctcccggcccaaaattgggggcccctctccgaccccgatccggttggggtcgcccctcccgtggggggcgaaaaaatggggggggaagttcgtaagggggttttgaaagggaacagaaaaacctgggggggggccccccctcgccgggaccatgagttcggcggcg

SEQ ID NO: 47253 - DNA, 597 bp, Glycine max
  unsure (1)..(597): unsure at all n locations
  Clone ID: PAT_MRT3847_142675C.1
ggatacttatctatgggaagatgatgatgacaggtaattttaaattttcctgttttgtgatgcattcatctctaaacaacagctttcattttctctgttaggaatctggccaccaatgtaataagcaacatcaaagattttatgctaattatatataaacatataaatatacacaacatttgtagctttgaatgtaattagcatctatagctgtatttttagcttttacttaggtagctctgatcagatttctctactttctttaatacatgtgtgtgaaacctagaaaattaaaaaatgacaaattatatgcattgcacttgtattctgttaagggcaaaccagcaaaggaaagatttgtacctgtttttttctccttggataaaatttttcttctttcattttaaaattgccatcatcattcaatgatatagttagatattgatgaaaaatgatcaacgcctctttacaaatttcgtgcatattttgtatctaaaattcatgttaacgtatctaaactttatcatatcttgatttttaagaatttccatngntcttgtatctgggtggcaaacgaaaaatgtgtacctgtttttt

SEQ ID NO: 47254 - DNA, 361 bp, Glycine max
  Clone ID: PAT_MRT3847_142676C.1
ctctatttctctgaatggctcctcttgttctctctccagcttccttgtcagggcttcgaggatgaggatggcgctggagaaacagactatgcagctggcatggtcgcggcgcagagcacttgggatccctggcccactacaacacaggatacacctcagccagcccagaatgctccttcctcacctcatgatgagcccacaccggcataggatgactaaagacaaggctttatttatttattttctgctttttagatatagttttaaatttcagttttagtttaagttaattaactaattaagcaaattttcaagttttggaaatatttaccagtatttatgcaaggggtatggtgggttt

SEQ ID NO: 47255 - DNA, 431 bp, Glycine max
  unsure (1)..(431): unsure at all n locations
  Clone ID: PAT_MRT3847_142677C.1
gggaggctgaggagtatgatgagacacgtgagaaacttcagatgatcagggtgaagtttttacggttggctcataggcttgggcaaactccccataatgttgttgtagctcaagttttatatagattaggactggctgagcaactccgaggaaggaatgggggtcgtgttggtgcttttagctttgatcgtgcaagtgcaatggctgagcagcttgaagcagcaggtcaggagccacttgatttctcttgtacaattatggtccttggaaagacaggagttggtaaaagtgctaccatcaattctatttttgatgaggttaagtttaataccagtgcttttcatatgggaaccaagaaggttcaggatgttgtgggaacagtgcagggcattaaggtacgggtcattgatacaccgngacttctaccttcc

SEQ ID NO: 47256 - DNA, 277 bp, Glycine max
  Clone ID: PAT_MRT3847_142678C.1
atcggagttctgctcgaggatcatgagttgcaaccgagtgtagtcgtcgttgttactgtcagtatcacaaaaccctctaaaaactctaagctgttggagacatatccttaatgttgattccgtttgaatggctccattgcgaactcaacaacatttgtaagtccctcttgagggcgaacaattacacgcattccttttgaagacccatctatcacaagaccccttttacgctacaaaaattgttaggctctatgcagccaacaacgacattaactct

SEQ ID NO: 47257 - DNA, 438 bp, Glycine max
  Clone ID: PAT_MRT3847_142679C.1
ggctcgaggctggtccgacggcataagagagagaaaccaactctggccgcccccgttgtacagaccacctcggaatctgagggtgccaactatggctatcatcgccgaccatgcctttcccctctctcttattattccaactcaatgtgcaacgcaaacctaaaactgagttcgcaatgtgactccaactagctacggtcgaaaacaaaagccccgatttattgccccaagtttgttgctcgcacttcaattggagacaatgatacagacagtgacagtgagaaggattaaggggacgtaggggaggactctgcggcgcctgcaacgagcagacaaaaaatagtctactggatatacttaccgctattctatgagtcgctctctgcgcactcaacgtagcatggacagataattcaactggctacggcaaagcatata

SEQ ID NO: 47258 - DNA, 870 bp, Glycine max
  Clone ID: PAT_MRT3847_14267C.1
tattataagagattgttgtatgaatattatattccaaaaagcaataatattatattgccttgctacactagggaacatcagcaatcacaataatgtgtcgatatggagataaaactataaaagatattagtatattacagcaaactccacagggtagatgctgatgccaccctacatacatataaaggaacatatttttcagttatgcaaggtgtggttggaggagggggggcctttgggtgggcattggtagcacttggcaaatagcccgaatgtgtcaacctgcttgatgaaatttgtcatgctggcccaccctccaaacccaaagcccactaccagaacccacaccaccacaaatgcattcaccacgtacatcaccgtccagttagggataaagaagggcaatttctccgcggcattctgtcttgctgaggcagatctgtatgtgagcatatgagcagaagcagggatgatgtaaacggtgaagctgaccaaaagggcccccacagctgaattaatgggcccaaagaaagggaaaataatggccaaaaaccatattggtatcaccacaggtaacctcgctattgccctcaaaaatatgctctttgtgtcatgcattcctatcactttctcccacacgaaatacaatggcgtacaagcaaacccaaatgtgatgaactggtgaatgagcattaggatgacaccggtgtcacgccagccagagcgagggaggagcgagaaggcattggaatgatccaaaagttggtcaccaaaggcccagtaaacggcaatagcagatggtagagtgagggtgaacacataaactgttgcataaagatatatatatttgaacttctgaggcttccacat

SEQ ID NO: 47259 - DNA, 722 bp, Glycine max
  unsure (1)..(722): unsure at all n locations
  Clone ID: PAT_MRT3847_142680C.1
ggtccggaatccgggtcgaccccgcgtccgggaagaacaagcacgactataccatgagggagcaattgggtaatcctcatttcattttattactacgttggcgtgtaccatcaaataatgtaacttgcatgctgtctcattcatatctacgacaatgtctctagtcaattcatctggcttgcttgtgagtgtttaattttcagtaagtcttattttattggtctgagtttgttcttttttttttttttttttaagtcttgccatatacatagggtgtatggaattatggatagaccaaattgagatgagttgaatcaatcaagtactcaagtgaaatatttaacacgggaagcaaattgggctgacattttatcttttaagtaccagaatagtaggtttctgttttttttcttttcccgtttgacagtgacaagtgacactagatttgtttgactatgatatatactttacaagttcaatactatatgaagacatccttttttgcctctgctcgtgatacattaagctagtttcaattttattgctttatgttcacctttgtagttgtttctaatgatcttggtacattttgacttcccactgcacaggtataatacatttttgtggnttatcctcctgaagattgttaagaaaatgccaaaaaaggaacttgctngaggaggtgatgacanattcttataatataatatatagatataaat

SEQ ID NO: 47260 - DNA, 951 bp, Glycine max
  Clone ID: PAT_MRT3847_142681C.1
atgggcatttcactaaattcacaagccacaacagagagtgtatacaatgctgccttggccctaggaattgcaaatcagctaaccaatatacttagagatgttgaagaggatgctaacggaggaagagtgtatcttccacaagatgagttggctcaagcagggctttcagatgaagacatatttgctggttacgagtatgatattaatgatctgcatcaagaggctcaagccagatggttgaagcctgcagaagtgatgtacattttacagaatcatgaaaagttccagttcacccaagaggtcccacaacagccaaccagtggatccctgtttctgtttaacaaaagaatcctgcgatacttccgtagagatggtcataactggcataagaaaagtggtggaagaactgtgggagaagcacacgaaaggctgaagggaaagctaagttctggagctggggcacaattgtcaccaagttcttctgtctatactcagagtcctagcccatattctactcagaatccagggtcaacatccatacttggtgattcatatgaacctaatcagagtttctccagtcctgggtctacaaaagttacatctgagatattcgttctgaacaataaaatgggtcacatggattgggcagatacagaatcaggaacctcatctgaactcgaggttactcaagctttgcgccgattggaggtacagttaagtttgaatgaggacaactttgaagatattgtttccttcggcagtaagcatgaaactgttcatgattcaaatcccaagcacgatcaaagggtgatcagcaatcaagagcaatctgcagctttctctagacccgatgatcaagggctattttatgatggatgtaatggaaggcaagatatctctgtcttctacttgtttaactgtgcttgcagcatcttacacctgcacagctag

SEQ ID NO: 47261 - DNA, 2120 bp, Glycine max
  Clone ID: PAT_MRT3847_142682C.1
gcaagacgtcgagttcatcgcatataaacgttaatagtctatgtttatgatagtaatgatttccatctagtctctcaggccaattggttgaagactgcatgttggatttatttttactaaaatcattaaaagatccagtttataaaatggtttccaccttattaaaccgaaagctgatgatgactcgtggagccatattatagaggctcttctagttggcagtggaacgtcgactggtactgttgattggcttcttgaagagcttctaaaggataagcttcaacagtggctttcttgcagatctcaggaaaaagggagaaagttcatgaagagacaggctgctctttaagaaagagcaagggattattcacatggttgctgggttagtgacggagcttaacgtagttttgagtgggccttgaaccgcgtttgtgctattctctcgccaacttgtggactaaatataagctgattttcgtgacaatttcaatggatggactgcccttgggagttactgcacgttttggaagggaaaaaatggttgcttcacttatagacttctggagcatctgctggaagatccaaatgcacaagatccaactggtaaaactgctgcatcagaaaaggagtgaccgagcttattgcagccagcagtgggcctggcagggtatctttgttattgtatcgccaaatattggatgagatagaagccatttgttacatctcttacactggaagagagtgaattatctaaaagttctgcttatcttcaggcagataggactgttaacagtgtctccaaggaaaatcttactgccagtgaggatcaggcatcactcaaagataccttggctgctatcagaaatgtaactcaggcagctgcgcggatacaatctgcttttcgttcacattcttttagaaaacgaagagcaagagaagtagctgctagtgcaggtggcattggtaccatttcagagatttctgctatgtcaaaacttgcctttcggaactcacgtgaatataattcagctgctctgctttatcgattcagaagaaatatcgaggttggaaaggtcgcaaagatttcttagcgttgcgcaaaaaagtagtgaagatacaggctcatgtgaggggctaccaggttaggaagcattacaaggtaatatgggcagttggaatcttggacaaggttgtcctacgatggaggagaaaaggagctggtttacgaggtttccgacaagagatggacatcaatgaaaatgaagatgaagatattctcaaggtgttccgaaaacagaaagttgatgtagaaattgaagaggctgtttcaagggtgctgtccatggttgactcaccagatgctcgtgagcaatatcatcgcatgcttgagaaatatcgtcaagctaaggctgaacttgcgggtacgagtgacgaggcatcattatcaacttctgtaggagatgacttatttatggatgatttttatccatttccctaggagcaaacgctagccttggtaatcttcattattttgaatgatcaatttgtggcacaaccatttcgatggtctttgtatctagatgcctagaacaagctgacttattagtttgagacagtctagattgtatagtgaaaataacaatgaacattgttactttgtaaaatatgaaatggtcttgaatgcaagtggggtggggtttcgctggtaaggtgacagacaagtggaggaacttcatgaagagccaaattaaaagggcaagaatgttttttgatgaggcagaaaagggagtgacggagcttaatgaagctagcagatggcctgtaagaaattccaaacatttttctttatataaaaacttttctgtggttgaaagaataaaaaccatcggttatacttgaagtgttctcttaaatattattagaaatcatgctaaatagtctcttaaatattgaaaaacccttcaaattgattcctgaactatagtaaaatgtattaacttagtgactaaaatacttaggggattacttgtatagttttattattttaggcactattttaagaaacctggtaatacttaaaagttaaatgaccaaattagtagtttactcaaattttaatg

SEQ ID NO: 47262 - DNA, 1014 bp, Glycine max
  unsure (1)..(1014): unsure at all n locations
  Clone ID: PAT_MRT3847_142683C.1
gaatgaatgagaagtcttagcaaacactctttgtcggttaatgttttccctggtgacagctgcaactcttttttcttcttcttttggggggggagggggtgttgtttggatttggatttggatcttcattaagtgagttgtttgtattcttgctgtatctaatgaaaagttttcttttgttttgtgtatggttggttttaccgtggtactgaatatgttgtttgttttggtcggctggttcaatcacagatagcttttggtagaacaagttttgcagttgttggaactgtggtttgccacactttcatattgtttttcatgatttgccagcgttttccattgaatggttctttgaaagattaatatttgaggcataagaagtcaaaaacgaaaggaataaactccacaactaagcttcaagtaacgccaactgcgtctgtttcagctttctgcttttgccacttcctttctcagatccattattcttcggaaccaactcgcaccgcagcgaatctagcagcttctgcggttccaacaatgctctgtgtccggttctactacttgtagctttttattcctcggattcaacaccatgacacctggttacgaatacgatattaatgatctgcatcaagaggctcaagcaagatggttgaagcctgcagaagtgatgtacattttacagaatcatgaaaagttccagttcacccaagagcccccacaacagccaaccagtggatctctgtttctgtttaacaaaagagtcctgcgtttcttccgtaaagatggtcataactggcgtaagataagagatggaagaactgtgggagaagcacacgaaaggctgaaggttggaaatgttgaagccttaaattgttactatgcacacggagagcagaaccctactttccagaggcggagctttgggatgttggatccggcatatgatcatattgnttctgggcattataggaacacaagtgaggggaaagctcagttctggagctgggggca

SEQ ID NO: 47263 - DNA, 3202 bp, Glycine max
  Clone ID: PAT_MRT3847_142684C.1
atgtccccggcttatctaattcttctgctatcagaaggttacgagtatgatattaatgatctgcatcaagaggctcaagccagatggttgaagcctgcagaagtgatgtacattttacagaatcatgaaaagttccagttcacccaagaggtcccacaacagccaaccagtggatccctgtttctgtttaacaaaagaatcctgcgatacttccgtagagatggtcataactggcataagaaaagtggtggaagaactgtgggagaagcacacgaaaggctgaaggttctaaatgttgaagccttaaattgttactatgcacgcggagagcagaaccctgctttccagaggcggagctattggatgttggatccggcatatgagcatattgttcttgtgcattataggaacacaagtgagggaaagctaagttctggagctggggcacaattgtcaccaagttcttctgtctatactcagagtcctagcccatattctactcagaatccagggtcaacatccatacttggtgattcatatgaacctaatcagagtttctccagtcctgggtctacaaaagttacatctgagatattcgttctgaacaataaaatgggtcacatggattgggcagatacagaatcaggaacctcatctgaactcgaggttactcaagctttgcgccgattggaggtacagttaagtttgaatgaggacaactttgaagatattgtttccttcggcagtaagcatgaaactgttcatgattcaaatcccaagcacgatcaaagggtgatcagcaatcaagagcaatctgcagctttctctagacccgatgatcaagggctattttatgatggatgtaatggaaggcaagtttttttgtcctcttcattatggaagcatcaaatgggaagagaggaagatcatggttaccctgatgcaaatgaaaaggctttatggacagagcagctggaatcacataagtcctcatctgcagtcaagttacctcagaaaaatgtatacatgccagctgaaaatgaaaattcagtatcttctgcaagaagggtaccagtttccaaccaggaaaacagtcactggctcaacttcaactgtaataattctgaaaactgtatgatttactttcacctggttaacttaacaacctttttggtatattttggtgtttcttcaacttctgattcccctcccatgttagcagctgttttctcacaacctcaaggtgttgatgaagtcaaatttcctgcctattcttctatgttggaaacacaagtaattaattctgactactatgaaacattgtttgaccaaagccaaattggagcaccaccagatgcaaattcaagcttgactgttgcacaaaaacagaaatttactattaagactatctccccagaatggggttatgccaccgagactaccaaggtcattgttgttgggtcttttctctgtcatccctcggattctgcatgggcttgtatgtttggtgatgttgaagttcctattgagataattcaggatggtgtaatctcttgtgaagctccatctcaccttcctggaaaggttactctgtgcattacttctggaaactgggagtcctgcagtgaagtcagagagtttgaatatcatgataagaccaatagttgcactcgatgtactcaatccgaaacagaagccactagaagtccagaagagctgttattacttgttagattagggcagatgcttctttctgcatcaacaataaagaatgacaacatagaatctggaattcctctaataaaaccgaaagctgatgatgattcatggagccatattatagatgctcttctagttggcagtggaacgtcgagtggtactgttgattggcttcttgaagagcttctaaaggataagtttcaacagtggctttctttcagatcacgggaaaaagatgaagagacaggctgctctttgtccaagaaagagcaagggattattcacatggttgctgggttaggttttgagtgggccttgaaccctattctcacgtgtggagttaatataaatttccgtgacatcaatggatggactgcccttcattgggctgcacgttttggaagggaaaaaatggttgcttcacttatagcttctggagcatctgctggagctgtgacagatccaaatgcacaagatccaactggtaaaactgctgcatctattgcagccagcagtgggcacaagggactggcagggtatctttcagagatagctgtaacaagccatttgtcatcgcttacactggaagagagtgaatcatctaaaagttctgcttatcttcaggcggataggactgttaacagtgtctccaaggaaaatcttactgccaatgaggatcaggcgtcactcaaagataccttggctgctatcagaaatgtaactcaggcagctgcgcggatacaatctgcttttcgctcacattcttttagaaaacggagagcaagagaagcaactgctagtacaggtggcattggtaccatttcagagatttctgctatgtcaaaacttgcgtttcggaactcacacgaatataattcagctgctttatccattcagaagaaatatcgaggttggaaaggtcgtagagatttcttagcattgcgccaaaaagtagtgaagatacaggctcatgtgaggggttaccaggttaggaagcattacaaggtaatatgggcagttggaatcttggacaaggttgtcctacgatggaggagaaaaggagctggtttacgaggtttccgacaagagatggacatcaatgaaaatgaagatgaagatattctcaaggtgttccgaaaacagaaattagatgtagaaattgaagaggctgtttcaagggtgctgtccatggttgactcaccggatgctcgtgagcaatatcatcgcatgcttgagaaatatcgtcaagctaaggctgaacttgcgggtacgagtgacgaagcatcattatcaacttctgtaggagatgacttatttatggatgatttttatccatttccctaagagcaaacgctagcctagataatcttcattattatgaatgaacagtttgtggaacaagctgacttattagtttaacacaatatatattctatagtgataatagcgatggacaatgtcactttgaacagaataaaatggt

SEQ ID NO: 47264 - DNA, 247 bp, Glycine max
  Clone ID: PAT_MRT3847_142685C.1
tacggctgcgagaagacaacagaagggggttcaggatgagggataagccctttttctgagtgggcgctgcgtcaacccctttcatggcaataccttcactcttctacggtctcaactttattttcttccccttccttttttttttcttttccaacttctcccggcggtttttttttcttctttcaaccttaaaacaacccttcaaacccctttttcttacccttaaatccaaacccttcgaccacat

SEQ ID NO: 47265 - DNA, 311 bp, Glycine max
  Clone ID: PAT_MRT3847_142686C.1
attttttttttttttcttttttttttttatagttttcttttttttgtttcaggttttggttttaaatactcttctttactctctttttctttctgttttattgtattccaccctgcaaaacaactgagttctcagcttatatctgcgggggagtcccccaagacagcggcgtcctaacttaaaaggaaagtttgattgcgacgggttttcccaaacgggagacaagatccaccgcgccacaacaatagacatagcccccccccctcatggggggccgccttttaaaccagggaggagggttatccctagcc

SEQ ID NO: 47266 - DNA, 498 bp, Glycine max
  Clone ID: PAT_MRT3847_142687C.1
attgatcagaaacaactgattgtatttctgttcaagagtataatcttcccctaaccacttatctgtccagaagttgattttatccccacacccaaccttccaactcatatattggtggaagatgctgtgatcagactgatgataaaacttccttaggtccctccaccagtaggaatacccccccttggacactattatactgaaaatcagaccagcctccatactttgaattaataattctagcccatagctgctgctgatcagaagctaaggcccatatccatttgcccaacaaagctatattgaatttggagatatctttgatccccagaccccccttagtcttgggcaggcaaacaacctcccattttacccaaggaattttcttatggtcatggtctcccccccacaaaaaattcctttgcaaggctaccaatctatggactaccctttgaggaatcttgaaaaaggataatagatatattggtacagcattga

SEQ ID NO: 47267 - DNA, 529 bp, Glycine max
  Clone ID: PAT_MRT3847_142688C.1
ccacaaatacccacacagtgaaaaataaaatcaaataatacagtatcagtgtcaagtgcacttggtcatttgctgtgttcatttttggcagagcacaaagtgtgggaacgctgtacgatagctgttttgattctacctgtattaatgttgctttggaaaacaatattttctccccttcaacatcatcagctcatgtaatttaccattcagttcttcccccatggctgctccccacccctccttatttctttccctttttccaaccaaaattacttgaaaccaaatcaagaacaatggatatttggagcgagcttgacttgcacaaaagaaaatttttaatatctaaacacactgtcattgatcttctaggatctccctgtgtacatgcatgcatgatgtgctgcagtatttgtaattataccggtggaatggaactttaccatcaagtgatgaattacaacaggaacagtaaatgtcacctgctaatccacatttaggttctgacatgctagctgcagtgattgcacta

SEQ ID NO: 47268 - DNA, 141 bp, Glycine max
  Clone ID: PAT_MRT3847_142689C.1
tcaataaactacagaatgggaacttgtgctgataaagcatattgccgtaatgttttatatgcacattgcgaaggttgtatttattctagcatcaatattattggcatcaatttagaagttatccctaactaatgtgaattt

SEQ ID NO: 47269 - DNA, 222 bp, Glycine max
  unsure (1)..(222): unsure at all n locations
  Clone ID: PAT_MRT3847_14268C.1
annaattaanatnaggnatanacnngagnagancncgctgcgganagggggaaggananacccagnaaannnnngnnaaanngncannncagccnancnagcnnanaagggcnaacnacccaannnnnannanngnnccctcagatcatcannacancancggcngacaaggangacggtcatcncnactggcagntgnngannnagntcancananttcgg

SEQ ID NO: 47270 - DNA, 601 bp, Glycine max
  unsure (1)..(601): unsure at all n locations
  Clone ID: PAT_MRT3847_142690C.1
tttcttgcgtccgatttgaagttctactttcactcccttttttcatacacaaaatagcacaatggaccaacaattctatgaagaggttcaagagccagtgagtcctcctggacaatatttcaacagttcggtgatatgttcctatgtttttggctttcttgagatggcagttccaattgatgactcacagactatacctttgcttaaagatgtcttcctccctatcaacccacgtttctcttctattatggtgagagaccaagatggtagaatgaaatggaaaagggtacaagtgaagcctgaagagcatgtaaaggttcccaaatttcctgaatgcaattcacctgaattatatgaccaatattttggtgactacgtgacaaggattctaactgaacggacacctcaaaacaaaccactatgggaaatccatattattaattatccaacaagcaatgctgcaggcacattaattttcaagcttcatcatgcgcttggagatggttattctctcatgggtgctcttctttcttgtcttcaaagaagtgatgatcctctcttccacaaancatncgactntcnacntcanananntcncagt

SEQ ID NO: 47271 - DNA, 184 bp, Glycine max
  Clone ID: PAT_MRT3847_142691C.1
tctggattagctgttcattaagggaattcatccccaattcttcacttctgaagagagttcagttttccctccctttggataagtctaagctagacactgtaaattggatttaattatcatgatttagttatcctctacatttatgtagagtaactattaagataattgtgctcttcagaagaga

SEQ ID NO: 47272 - DNA, 272 bp, Glycine max
  Clone ID: PAT_MRT3847_142692C.1
gttagcaaaaatcaatagcttcgattattcatgatctggtatgaagtatgaactgtttgactaaaccatacttttgcagattactgatgaaggtggtggaataccaaggagtggtctctcaagaatttttacgtatctctatagtacagcagaaaaccctcctgatcttgatgtacataatgaaggagtaactatggctggatatggttatgggattcctattagtcgtctttatgctcgatatttcggcggggacttgcagatcatctcta

SEQ ID NO: 47273 - DNA, 760 bp, Glycine max
  unsure (1)..(760): unsure at all n locations
  Clone ID: PAT_MRT3847_142693C.1
aattcggctcgaggtgaggtcgcaccgccgtcgcaggaccaccaccgcactaggccgcgtcgaacatcgcactaggtcgcacgctgctgctctgcaccgccgtcgccgatttcgcctccgttttgcgaactgaactgcacttctccttattcccaaggtttctctacactgttaatttgttctcttctctcatatatgattttcactgttcacttggtctcgcagctcttttgtgtgttagtattttgttctttgttctcttcagttggattgttctcacagctctgttggattatgtattgtatttgtccatttggatcatatcccttgttatgattatgtattttcaatttaagtttgtttaatgatgtgactaagaggttttcttcttgttgttgttttttttatgcatattactacatattaaatattacgtataatttggcattttagataggaacgtaggatcttactattcgagttatatttcccgagttatgagttttcaccccttcctgaatcctgattctatagaatctcgagtttaacaacgttgtcgctgccaaagttgctgtcagttggttgatattttaaattacagcttttgatctatggaaggtaaggcaggggggttgttcttcaagtgaagatagtgatgnatgaggtctatttgcanaatgcaaagtgatgaagacgagcttggctcttcatctggttctatgcccaagttgcagttcaggaacatgaaatccaaaggctg

SEQ ID NO: 47274 - DNA, 151 bp, Glycine max
  Clone ID: PAT_MRT3847_142694C.1
cgctgcgataagacgacacaacggggagtcgaacaataaaggaaacggtagctcgaggacgagcagactgtagctgtagtgaatgattgtagttgctgctctcagtaatagtcatagcgaaatcggtatttgggtaggaattgcgatcaat

SEQ ID NO: 47275 - DNA, 133 bp, Glycine max
  unsure (1)..(133): unsure at all n locations
  Clone ID: PAT_MRT3847_142695C.1
anacgntagcangcangcntacgtaagcncgtngttcggctcgatntnaangaacncaagnacgtgtaggttngncatgtgctctgatggtntgnggtcntggntgcagngccattgtgcaccgggangtgct

SEQ ID NO: 47276 - DNA, 513 bp, Glycine max
  Clone ID: PAT_MRT3847_142696C.1
gataaatctctcataaccatttctaaatataatattgtgtatatgcatgatatcatacaagaaatgggttgggagattgttcgccaagaatctattgaagaccctggcagtcgcagccgattatgggatgccgatgacatttatgaagtattaaaaaataataagggaactgagtccataagaagcataagagcagacttgtcagtaattagggagctgaagttaagccctgacacatttactaagatgagtaaactacaatttttgcattttcctcatcaaggttgcgttgatcattttcctcacaggcttcaatctttttcagttgagctaaggtattttgtttggaggcatttcccactaaaatccttgccagagaacttttctgccaaaaaccttgttctcttggacttgtcatatagccgggtggagaactttgggatggatacagaatttgaagatttaaaagaagtaaagtctctgtttctaaaaacttgaatgagcttccaaacc

SEQ ID NO: 47277 - DNA, 520 bp, Glycine max
  Clone ID: PAT_MRT3847_142697C.1
gttaagaatttcgtggggttgtctgtatctgatggttacattgctactggttcagagacaaacgaggtgttcatataccacaaggcttttcccatgccagcattatctttcaaattttacagtagtgaccctctttttgggaatgaagaggatgattctacacagttcatcacttctgtttgttggcgcggtcagtcctccaccttacttgctgcaaattccacaggaaatgtcaaaattctggagatgacttgagttggcctttagttgggaataaagatacaattctttggtacacaaggttaaagaatcatgttaatggttagctttttgtttccaaaaaaagctatggagaagtgtatacaaattccatgattactacttgtgacaaaattttacattagatcacagaagaagcagtgagagaaaaaagtgaggtgatctcttcaagaatgttttatagataaaattctatattagaagaaaaggaaagtgaaaataaatattagattgtcttata

SEQ ID NO: 47278 - DNA, 235 bp, Glycine max
  unsure (1)..(235): unsure at all n locations
  Clone ID: PAT_MRT3847_142698C.1
gccgttttacaanacaaaaccaccacctcaacgcgtgcgtaccgttctgcatagattttcgctntggtcgaanaatactggctcggacattgcagtttaaggaaacctggcatgggagttgtnactgtttctagctcagcttgctaaggannccnttnagcattgaatncaagggttgatcagtcatcagcaggagaaaatnctgctcacccctagaaaacagcggaagaaanac

SEQ ID NO: 47279 - DNA, 344 bp, Glycine max
  unsure (1)..(344): unsure at all n locations
  Clone ID: PAT_MRT3847_142699C.1
cacgcgcngcaacggccggggaagcggcaaaaacagcgccgaacccacaacagaacgcgcaccaacacccgaacagcaccggcagaagggaggaccggggcggaaggccagaaacctccacagacagaccaggaagcaccagaacgggatacacaccgacaacgccaccgagaacagggaagacaaggggcacggcaccacgctaaccacgggcaatgggacggacccagggtctgagcacaagcccatgaccagcggactccacagacccgacgacacacccatcaaagacccaggcgccaggaaaggggcgcagaaccgccacaacccacaggacctggcgc

SEQ ID NO: 47280 - DNA, 2025 bp, Glycine max
  Clone ID: PAT_MRT3847_14269C.1
ggctcgcgcgcccgcataaaaccaagcgcacgcttccgccactcactctcacccctcctatcccccactttcaagccatattcttcttcagcttcggccttagttcccgaacttgatattcaacccgacactccccagaaccctaatctctcccccgaagaaacaaccttagccgacaagttccacgccgcaattaaagagcaccaccgcagaaaccccacacccaaccctaacgcccctcccccaactcccaacctcaccatccccgacctctccctcgccttttccgctatctccgccgcccacccaatctccccctccgtcgcccaccgcgtcatcgagaaatgcggcggcgtccgccacggcatccccttcctccaatcccttgccttcttcaactggtcctcctctctcgacggcttccccgcctcgccggagccctacaacgagatgctcgacctcgccggaaagttgagacaattcgacctagcctggcacgtcatcgatctcatgaagtctcgcggcgtcgaaatcaccgtccacacgttctccgccctcgtccgccgctacgtgagggccggattggctgctgaggcagtgcacgcgtttaaccgtatggaggactatggctgcacccctgatatggttgcattttcaattgtaattagtagcttatgtaagaaaagaagagcaaatgaggctcaatcgttttttgatagtcttaagcataggtttgagcctgatgttgtggtttacactagcttggttcatgggtggtgtcgtgctggtgacatatctaaggctgaagaggtgtttagtgatatgaagatggctggaattaaacctaatgtttacacttatagcattgtgattgattcgttgtgccggtgcgggcaaattacgcgtgctcatgatgttttctcggagatgatcgatgcagggtgtgatcctaatgcggggcttttgctcgagccgattcgggttcaggtgaaggctgggaggactgagaaggttttgaaggtttacaatcagatgaagaggcttggttgtcctgctgataccattagctataatttcatcattgagagtcattgtagggatgagaatctcgaagaggctgcgaagattctcaatttgatggtcaagaaaggggttgctcccaatgcgtccactttcaattttatttttggatgcatagctaagttacatgacgtgaatggtgcgcatcggatgtatgctagaatgaaggagctgaactgccagcccaatacgttgacttataatattttgatgaggatgtttgctgagtcaaggtctactgatatggttctgaaaatgaagaaggaaatggatgagagtcaggttgaacctaatgtgaatacttaccgaattttgatttccatgttttgtgatatgaagcactggaacaatgcgtacaagttaatgatggagatggttgaagaaaaatgcctaagaccaaacctgtcagtttatgaaacggttctcgagctgctgagaaaggctggacagttgaaaaaacatgaagagttggtggataagatggttgcgagggggtttgtcactcgtcctttgtagaagttgctttatccttcacatcacatctttgaggtgaataagagaacttctatgtatgactataaaatggtggtattgcttgttaattgctacaattgagacaaaacaacggttttttactaccccacccccaaaaaatagcgtgccttattattattattatattttttttcattatgatgctctagcctcgaattgttatttatgtcctagtgtagtatggtggtttagctgattaagatcatggatggagttcttttccatttgacttgaatttggatagttgatagccatgatttataatttggtttatggccgaaattttaggtgttcatgaaggaaatggcacaagttgtttgaagcatttcattgaacctgtaattgataaatgctgttcttgtcgctgggaaggatactcattctctaatt

SEQ ID NO: 47281 - DNA, 407 bp, Glycine max
  Clone ID: PAT_MRT3847_1426C.1
tgggacccagagatcaagactttcaacctgatcatcgaacagcccgtcgaccgcgtcgactcgcgccctacccccgacgtcacacccgtcgtcacccctgccggctctcgcatgaactcgttctctggtggcgagcgtccagcggtcaagaacaactttggcaaggcctcggatgagctcacgggtaacgactcggtcgtcggctcgcctgtgccttctcgacctggcagcccgggcaatgagaagcgcaccgaggacggtgtgccccagcagaacacgggtgtcactctggatgcgttcaagcgggccctaggtgccaacgcgcagaagaagaagacctttgacgatgaggaatgagcggtgcgacatcagggaggggggcagaagagtagggagagcgcaactca

SEQ ID NO: 47282 - DNA, 204 bp, Glycine max
  Clone ID: PAT_MRT3847_142700C.1
gttttttttttttaagttttaacctcttccaaatgtaactgcatatcataatagattctacctttctatcttctattcaaattcctttttctctgtaaattgtgcactcgctactttctcttataagcttgcataacaaattaattatcttacacttttaagaaataaaatcagtgataaaaaattaaatttgacagttgcaag

SEQ ID NO: 47283 - DNA, 274 bp, Glycine max
  Clone ID: PAT_MRT3847_142701C.1
actactagattttgtgattttttttggggttggggattgaaaggataattggtggatgagaggccccgtggagggcacccgggtccgacgcgcttccagggccaataaatgccggcccgtctccgggtggcttgcccgcttaacttaatgggattaaacctaaagcctggcatatctatggattccctggtccaccggggaccgaagcaaacaactctcacctgcggtattttgcaattattgaatcgtaatcagtggctcctggtgggcccaa

SEQ ID NO: 47284 - DNA, 234 bp, Glycine max
  Clone ID: PAT_MRT3847_142702C.1
ggctcgagtaaataagcatcttagttcatacactgttggtccttccttccttcttctgctcaataagtgtgtgccactctaattaattaccacccccttctacacatagatcttctccctctgctctctcttctctacactgcgaaaccaagacgaaggcagcatacgcggctgctctacttatatgccctgtgctcagcttctccttgtgcgaggagccaatggctggatctg

SEQ ID NO: 47285 - DNA, 292 bp, Glycine max
  unsure (1)..(292): unsure at all n locations
  Clone ID: PAT_MRT3847_142703C.1
aagatactgaggtggaaacaggagaattatgtgcaatttttaaaaaaaaaaaagagcatanagctaaagcggacaggtctgcgcctgctattgactttattgacgagattgatgcaattgcatctaaaagagagaaattgcagcgagagatggagaaacatattgtgacgcaattaaagacttgaatggatcaaacaaaaaggcaatgtaaaccaacggaagaagaggaagagttcaggagatgaacataatacgggctatgcacttgaaattggagctactaataggccag

SEQ ID NO: 47286 - DNA, 307 bp, Glycine max
  Clone ID: PAT_MRT3847_142704C.1
acaccaccaccgagcacattcagcggaaaaaaaaggactaaaaaacaacccagcgcaccggcaacacaggaatacacaaaatgccaccaagaaagccaaccacgcaaggaactatccggcgacaaaggaccaagggagagcaaagaccaaggaaggaaacaaaagacaaaagggaaaacagccatggagctaaagcccaggagggacacaatggaagcacaaaaccagagcgacacccaagagggaacaaacccccgaggcccgcagcaaaacaacacaagaaaccccagaacagcgcagaacaggg

SEQ ID NO: 47287 - DNA, 370 bp, Glycine max
  Clone ID: PAT_MRT3847_142705C.1
acgctttcgcaaccatcgcctactcatctcaagttcgtgtccaacttctcgatagtgctttggagaattagcagtctttaaacctgaatccgcccgcttcaaatgtcataccaacttcaaatagcatgaaggacagtccttcttatccgtccgagactcaaagattgtgcatctgtatacccaattcattaacgacgaaaactgtgaaacagaacgcttcctaagacactcacttggtctatgcgctaaacaagctcatcattcacaccaaatagacctacaaggagcttgagattatatgcctacccactggctatcatttaagtatggattcctttattgaacattgtctcaaacaatttaagcatct

SEQ ID NO: 47288 - DNA, 330 bp, Glycine max
  Clone ID: PAT_MRT3847_142706C.1
gagccccaaaagataggggcattttattcatatagagcaagctcgaatcacaaagggaaagcctttggaaacaattctcatttgtatgcaactgggtcaataatatgcccaaacttcaggggcatttttatatataaaaccataaaagggggggtttttgaagagcaaaaagacaattccaaaacgtgttttgggggaggcaagagggaaaaaagttttagcccatggcatacttttgggtcccgcttctagccgtagactcaaacttgaatttggcgggcttgcacaaatgagcaattttaggcccctaaggggcaacaggatttggat

SEQ ID NO: 47289 - DNA, 256 bp, Glycine max
  Clone ID: PAT_MRT3847_142707C.1
gcgtacgtatatctcggaagttgtggagattactttcctatgaattcgtactccttgctcttatctttcctcctctacgccgtcgtggccatgcgccgggaaatcagaggcgcgggggcgagcgccccgacatccttttccgtcaggtgtagcctcatgttgtgcgaagactcagaggatgacatcctgttgtactccatgctctacttttagatctttaagggctagttcgtcaatagctttgccaccatattag

SEQ ID NO: 47290 - DNA, 365 bp, Glycine max
  Clone ID: PAT_MRT3847_142708C.1
caagaagcaaaattcagaatcgcctattcactattcatttgggggttagtttacttagctcgctcgaatcgggaaaaaaaaaaaaaagaaagagaattagcggtgataaaccgcggaatctcacagaatcacactatctacagggtttgggggtgtaggtgtacctgtaggtccctttttatcactggctctttttccttcaagaatgattggttctactaataaagaggttttggttctaacatacatcgaataaggtattattattggtatggaggatgggaacaagggtcccgcgggggatgacccctcttactggctggatgccggggaagacatatcgggcgaagaattcattgattttg

SEQ ID NO: 47291 - DNA, 859 bp, Glycine max
  Clone ID: PAT_MRT3847_142709C.1
aattcggctcgagaaagaaacaggctttatttgagcactttgggactctcaattctcagggttaccttctctatcagcttctgcagattagctggaagaaataaagaaagaaaaagataacaaaagttgttcaaaggccatggatgttgcacattttttgtttggaatctttgggaatgcttccgctctgttcctcttcttggctccagtgtatgcattacatagctgcttccttccctctttgatcacattcaagaggattataaagaacagatccacagagaagttctcgggcattccatatgtcatgacactgctcaattgtctcctttcagcttgagactagtgatcaaaactaagagtgtggagttcatgcccttcttcttgtcgctgtttgtgtttctctgtggcacttcctggtttatctttggtctgctaggccgtgacccatttgttgcagtacctaatggtgttggttctgctttggggacaatgcaactaatattgtatttcatataccgagacaataaaggtgttccaaggaagcaagcccccacagaggaggagtccatggagatgggggatgcaaagccccaacaagggaagcaatccaatgccaatggaattcaaggatgatatgtcaaggaacatgtttggatcactcgcaacacatgccaaagacaatagtcagctttgtaatttgtaagctacaaagtctgcaactgagagcaagaacctcctctatgatttggtctgctcttgtattagttccataaatggctgtaatttacttcttgctaagacactggcatcttcaattagacggataatattgcacggaaacaagcatgtttgtgtg

SEQ ID NO: 47292 - DNA, 337 bp, Glycine max
  unsure (1)..(337): unsure at all n locations
  Clone ID: PAT_MRT3847_14270C.1
gaattcggcaccagaagaaaatggggaagtgggtgtttgaaagttttgaggaaaatgaaagaatcaagtgaaggtgtgaaggatcaagaaggaagaaaaaaaaaaaaacaacaacaagttgcatgagtccaatgatgttggcgcaagatttgaggaatatttataagagactgggaaggttcgttgaaacagggtgtggaggttagctcgtgtgttgtaacggtcaaaggttagagtagtgaatcaactcgatgttcagatgtgaagagtgtgtgattggggcgcggttttccaatgcatgagaatggaataannngggacatttattatttnntaa

SEQ ID NO: 47293 - DNA, 1269 bp, Glycine max
  Clone ID: PAT_MRT3847_142710C.1
tttacgcaaagaaacaggctttatttgagcactttgggactctcaattctcagggttaccttctctatcagcttctgcagattagctggaagaaataaagaaagaaaaagataacaaaagttgttcaaaggccatggatgttgcacattttttgtttggaatctttgggaatgcttccgctctgttcctcttcttggctccagtgatcacattcaagaggattataaagaacagatccacagagaagttctcgggcattccatatgtcatgacactgctcaattgtctcctttcagcttggtatggtttgccttttgtgtctccccacaacatattagtgtcaacagtgaatggcactggatcattcattgaaatcatatacgtgttaatcttcatcgtattggcaccaaggaaggagaaggctaaaattcttggtctctccaccttcgtgctcttgctgttctctgcagttgttttccgtgtttctcgttgctcttcatggcaattacagaaatctcttaagtcgcttcgctggatccatattagccattatcatcaatggctcgtcactctcagttacgagaaattatgtcacaactaagaaagaccaagagtgtggagttcatgcccttcttcttgtctctgtttgtttttctctgcggcacgtcctggtttatctttggtctgctaggccgtgacccatttgttgcagtacctaatggtgttggttctgctttggggacaatgcaactaatattatatttcatataccgagacaataaaggcgttacaaggaaacaagccccaacagaggaggaatccatggagatcggggatgtaaagccccaacaagggaagcaatccaatgcaaatggaattcaaggatgatatgtcaaatcacaacacatgccaaagacaatagtcatgtttgtcatttttcagctacataatctgcaactgagagcaagaacctctatgatttgatctgctctttaaatggctgtaatttacttcttgctaagacactggcacctttaattagccgataatattgcatggaaacaagcatgtttgtgtgagtttttatttgagtttttagtagctccttcccctggtctcggggattttatgttagtggctttttcgtagtgcacaacctaccaaataaaagtgctaatttgaaattgaaattttcaattaaaaattgtatgccaatgtgaagaagctaaaaggaaatacgatttgctgagatgaccataattttgaatt

SEQ ID NO: 47294 - DNA, 795 bp, Glycine max
  Clone ID: PAT_MRT3847_142711C.1
acattgttaccatttctaaagaacagtgattatttgagcactttgggactctcaactctcagggataccttctccatccgctacttctgcagattagctagaagaaagaaataaaagataacacaagttcaaaggccatggatgttgcacattttttgtttggcatctttgggaatgcttccgctctgttcctattcttggctccagtgatcacattcaagaggattattaagaacagatccacagagaagttctcgggcattccatatgtcatgacactgctcaattgtctcctttcagcttggtatggtttgccttttgtgtctccccacaacatattagtgtcaacagtgaatggcactggatcattgatagaaatcatatacgtgttgatcttcatcgtattggcaccaaggaaggaaaaggctaaaattcttggtctcttcaccttcgtgctctcggtgttctctgctgttgttttcgtgtcactctttgcccttcgtggcaattccagaaagctcttctgtggcttcgctgcagccatattttccattatcatgtatggctcgccactctcaattatgagactagtgatcaaaaccaagagtgtggagttcatgcccttcttcttgtctctgtttgtttttctctgcggcacttcctggtttatctttggtctgctaggccgtgacccatttgttgcagtacctaatggtgttggttctgctttggggacaacgcaactaatattatatttcctataccgagaccataaaggcgttacagggaaacaag

SEQ ID NO: 47295 - DNA, 590 bp, Glycine max
  Clone ID: PAT_MRT3847_142713C.1
ggctcgagcaatcctagtcttcaattgggttgctctctattcattccattttcagaggccttcaagaacagtgctagaacctccatggctgcaaagcccttcaacattatcttcctcctcctccctttactctctttggtggtggtggggcatgaaactgtgaaatcggaacagtacccattggttgtgagcacgtggccctttatcgaggctgttagggctgcatggagggctgttgatgctggctcttcagctgtggattctgtggttgaaggatgctcagcttgtgaggaactcagatgtgatgggacagttggtccgggtggaagtccagatgagaatggagaaactacaattgatgctctgataatggatgggtggatgctaggtgacaatggaagtaggagctgttgcagccatgagatatgtaaaggatggaattaaagctgccagggtagtgatgcaacatactgaacacactttgctggtaggagagaaagcatcagaatttgctatctcagtgggtcttccatggtcccacgaacttgagttcaccaggatctatggagaagtgggccaaatggaaagat

SEQ ID NO: 47296 - DNA, 324 bp, Glycine max
  Clone ID: PAT_MRT3847_142714C.1
ctggatttttgtttgaaaaacgaatataggtcaaaatagacgcctcgaatataattttaaaatccgatagtggaaagttgtgatcatattataacattataataataacaaaggctcgctataaatgtgttgggggataaacaaaactattctggaaggctgtggctgctgtccactgaaccgaaaaggtgagagagtggatgtactctaggcccaattgtggtcctcccagttgaggttgtgaatggaaaaatgacattttagatatgaaagctatacatattagtgtatgtttgttttactatgtcaaaaaaaaaaagaaaa

SEQ ID NO: 47297 - DNA, 313 bp, Glycine max
  Clone ID: PAT_MRT3847_142715C.1
ccacgcgttcatttgtacggccaggcgggcgagggtagagccaccatgagaccgggaggagaaggaagaggatctggaagccaagaaacggcgaacctacccctagaaggaagaagacgaagtccagagggaaagaaaaacacgcgctgcaacaggggaagaatatgagaaaaaagatcagctacagaggaaagcaaggaaagggacactaacaaaatggaaaagggaagcacacggacaacaaagacgaaagtggtacggacgaaatcaactaggagggtcgaagagggaggggggaaaaaagtggaaaaag

SEQ ID NO: 47298 - DNA, 181 bp, Glycine max
  unsure (1)..(181): unsure at all n locations
  Clone ID: PAT_MRT3847_142716C.1
gtgttttttttggcaggcgaagaaccccatnccggaaacgcaaccaaagtgaaaaacacaacactggtaaagaaaaaaacatcaagagtgattgagaataatggcaggactgaataaaattgtatgacaaagagtccgcttaaacatattttttaatggggggaggagacgcagaagagaa

SEQ ID NO: 47299 - DNA, 398 bp, Glycine max
  Clone ID: PAT_MRT3847_142717C.1
aacattctacatgaactccttaatgagtacctcccggtgctcttgtgctaaccatatccaacccggggggctttcgctgtactaaaattggcctggccctgctacaacaaaaaaaattttctgagttggctccttctacccaagaacgttaaaaaagggagaggggacaacaaggcggcacccaaatgcttcatgccactcatacctagaggagatgtcggaaaaactatggttgttaccacctaaaggcaccgctttctccctattgtttgcctagatggatggaacgagaggttttttgtcactcatgacgaagaaaatgtgcaaccacgatgattgtggaccccattagccacacggtaaccctacggagtaaatccctgggtggaaaccctgcc

SEQ ID NO: 47300 - DNA, 489 bp, Glycine max
  Clone ID: PAT_MRT3847_142718C.1
gacgaggaaattcctgttaatgcttagtttttggtatgatagaattggtaaattggcaaggaaaagccgttcagaaatataaattatcattttttttcttgtggtgacaaaactcagatttttttgtgatactgttctctgataaaaacttgacatacgagttatttttcatggttgatgcataaaaaataattgacatgttatgtatttatcggagaagagcactacgaacgcttaagttcagattcaacgaaaaaaatatcctcttttgttaaaaggagcatatattgattgtgcaaaacatttggaagcatttgacatcctttttaggtgactactgtacgtgggtgcaattctccactctgatgtggatgaaatgattagctttcaatttcattagtgatttaatggccaaagatgtcattggctttagtacatttttaagatttgatttgcaatacatgacaggacatgtggaaacttaatgaa

SEQ ID NO: 47301 - DNA, 266 bp, Glycine max
  Clone ID: PAT_MRT3847_142719C.1
gaatagatcgaggctgcttagcatctatctattacacattctgatagcttacaatacctgctccttcttgagggagtgctcataatacacatgtctaccaaagtgggataaaccattcaacacagcgcaagctaaatgtgctctatgaaatattatatatcccacaagtgactaatatcattactttgccgactacaagagtgcaaaaagaaaagtacagagtaccttatcttccagaaacgaaccctgcttgcgctttgcttttg

SEQ ID NO: 47302 - DNA, 3042 bp, Glycine max
  Clone ID: PAT_MRT3847_14271C.1
acacatgtgcacctcctaatggtcctctggcgcccacacccatcaatcttccaattgctgcagttgcaaagcctgctacttatactccacttggagctcatggtcccttcccacctgctgctgcaactgccaatgctaatgctttggctggttggatggccaatgcctcagcttcatcatctgtccaagcagctgtagtcacagcatcaactatacctgtcccacagaatcaagtgcctatcttgaaacgtcctataacacctcctgcaaatcctggcatggttgattatcagaatgctgatcatgaccagctaatgaaaaggcttcgtcctggtcattctgtagaggaggtttcttatcccttggctcgacaagcctcttggtctcttgatgatctaccaagaactgtgaccatgacattgcatcaaggatcctctgtgacgagcatggattttcatccttctcatcataccttacttcttgttggttggcataatggtgaaattaccctctgggaactcagtttacgagaaaagttggtctcaaagccattcaagatatgggatgtgtctgcatgctcattaccatttcaggctgctgcagtcaaggatgcacctatttcagtcagtcgggtcacatggagccctgatggaagttttgtgggtattgcttttactaaacatttgattcacttgtatgcttacactggatcaaatgagctaacccagcgtatagaggttgatgctcatgttgggggtgtgaatgacttgtcatttgctcatccaaataaacagatgtgtattgtgacttgtggagatgataagttgataaaggtatgggatttaaatggacgaaaactattctcctttgagggccacgaagcacctgtgtattccatttgtccccatcacaaagagaacattcagttcatattttcaactgccattgatgggaaaataaaggcatggttatacgataacatgggttctagggttgactatgatgcccctggtcactggtgcactacaatgctttacagtgcagatggaagtaggttattttcttgtgggacaagtaaagatggagagtcttttcttgttgaatggaatgaaagtgaaggcgccatcaagagaacatacaatggattcagaaaaaaatctactggtgttgtgcagtttgacacaacccaaaatcgctttttggctgcaggtgaagatggtcaagttaagttttgggacatggacaatattaatcttctaataagcagtgatgccgatggaggattacagagccttccacgcttgagattcaacaaggaaggtaatattcttgctgttactaccgtggacaatggtttcaagatacttgctaatgcttctggtcttagatctttgagaaccattgaaactccggcatttgaagcattgaggtcacccattgaatcaactccaattaaggtatctggctcttctactgttaatgttagtccggtcaactgtaaagtggaaagaagctcccctgtcaggccttctccaattcttaatggagttgatcccatgggccgaagtgcagagaaaccaagaactgtggaagatgtaatagatagagctaaaccatggcaactatctgaaattctggatcctgtccaatgtcggtcagttaccatgcctgagagcacagattcttccagcaaggttgtcagacttttatatacaaactctgctgttggtattttggcccttggttcaaatggtatccagaagctttggaaatgggctcgcagtgaacagaatcctactgggaaggctactgccaatgttgttccactgcattggcaacccaacaatggtcttcttatgactaatgatatctcgggtgtcaaccttgaagaagcagtaccttgcattgccctctcaaaaaatgactcatacgttatgtctgcctgtggtggaaaggtttctctatttaacatgatgacattcaaggtaatgacaacattcatgccaccgcctcctgcttctaccttcctagctttccatccccaggataacaacattattgccattgggatggaggattcaaccattcacatctataatgtcagagtggatgaggtgaaatcaaaattgaaaggccaccagaagcgtattactggtttagctttttctaccaatcttaacatactggtctcatctggtgctgatgctcatctttgtgtgtggagtatagacacatgggagaaaagaaaatcaattccaatacagctacccgcaggaaagtcacctgttggtgatacacgagtacagttccattctgatcaacttcgcttattggtagttcatgagactcaattggcaatatatgatgcctctaagatggaacgcattcggcagtgggttccccaagatgttctgtctgcccccatatcgtatgcagcttattcctgcaacagtcagttaatatatgcgacattttgtgatgccaacattggcgtttttgatgctgatagcttgaggctcagatgtcgtattgcaccatcaatatgcttgtcaccggcagctttaagtggaagtcaaggtgtgtatcctcttgtggttgctgcccatcctctagaacctaatcagtttgctgttgggctgacggatggatctgtcaaagtgatagaaccgaacgaatcagagggtaagtggggaacctccccacctatggacaatggaatattgaatggtagggcaggatcatcatctacaacaagcaaccacactgctgatcaggctcaaagataagatcaaatgtattttactagttattttcatctgtaattgtatcagcttagatgtttagatttcgattcaccaatatgtctcatcaatatcatgtcagcttggacataaaatggtaaatgcttagacgtagaatcgtgtataccttgatttattctagttaataactcaattttattgtttatatttatgttgtaatgtcattgtatcttgcttccaagtgtatgtcaattttccttgcccttgcggcactcccgat

SEQ ID NO: 47303 - DNA, 652 bp, Glycine max
  Clone ID: PAT_MRT3847_142720C.1
ccacgcgtccgctcctattcttcagtgaaaatccaattggcagaaaccacagaaatttgaaattgagactacgatataaaacgaaccctaactccttcttcatctctctatctatcttcctcttcaagcaacatttccacactgttatcacagccatccccacccgccttcctcccatggacgggcgacgcgcctcgcgggcctctgcggccgaccccaaagtgaggcgcatcggcttcttcgccccgcagtccgaacccgacccgacgccgccgcctccaaacttcgtctcggttcctccgctgcgtcatctctccgctgccgtgcccgtccccgacaccgggattcggcgccagttgtccggcgacctcgtgccaattggaagctacaaccccgccgagtcgctgctcgggacctcgccggcggcgtcttcgctctcttcaagcatagttggcgtcggcgacaaggagttctccgaagactcttccgccgccggctggtaccgtcgcggcgactcgggatttaccggcgtagggtttgacttgccggtagtgaagcctcctggaaattcggcggcggtgaatgcgaaaaacgttgccggagaaaagagggaagagtctggcaaagaagtacacccctgatctgccctcaa

SEQ ID NO: 47304 - DNA, 280 bp, Glycine max
  Clone ID: PAT_MRT3847_142721C.1
cccacgcgtccgcccaagcgaacagcacgccttatgctactgcaatgcttgtggctgctatagaaatcatcattgatagtttcgcaagtgccgactgcgacatacctgacacaatgcttttggacggtactttttatacccaccctgcacatgcatttcactgtattattggcgcgccatccaaaggtaggagggatattctagttgtaccatttcctaacaccatggtccaagtagaacccgacattacatacatgggttgagctcttaggccccaata

SEQ ID NO: 47305 - DNA, 190 bp, Glycine max
  Clone ID: PAT_MRT3847_142722C.1
ctttttttttttttttttttttttttttttatatactgaaacatcaatattattttattggtgggattatatttctttgatgtccattatacaaccaaaacacgaagggacaagtcgtcatccaaataggacaaattgaccccacaaacatatcatttggaatagcaaggcaagtgggggaagccaacat

SEQ ID NO: 47306 - DNA, 672 bp, Glycine max
  Clone ID: PAT_MRT3847_142723C.1
tttttttttttttttttttttttttttttttttttttttttttttttttttgagactttttgtaaattaagcatgtatacataaccttgtcagttttttattttctgctgttcacaagggtaattaaacgctaataaagcaaaagtctgacataaacaaataacagctgaaagtagtactaactaaaaacaaaggacgaaactgaaatgtgcattcttggtagttgtcaaaatttataatgacaaattctactccaataaacaaacacaagaacatcattatcaatatgatgtgatatgattgacagataattaatcattttttaagcttgtggtcaggaattcgatccataggctttctgggcactgaaaaatataccttaagagatacttatctcttaaatggatatcagtagttctagaaattactcttcacgaatcggggtatacctgattcagatgactaatttccaccaatcatgggcagcaacctggacatcttatcaagccattctcattgcaatcagggcaccttctcaaccctccttcctcatgctcaaacaccttcctgctaccattgcaattggggcatggcacaaacctggcatcaccacagttgtcacacacaaacccaggatcctgagtggggaaaccctccaaaagccttgccaat

SEQ ID NO: 47307 - DNA, 474 bp, Glycine max
  Clone ID: PAT_MRT3847_142724C.1
gacacaaaaaaaattcttttttaataacagggggggcctcaatacccccggggtggaagaaaatggtcaatctcaaaccccaaaagggggccccccctgggggggttttttttttataaaattcccacaaaaaaaaaattctctggggggcgttttaaaagaggataacccccgttgagggggggagggggtgggaaaactgggcccggatttagggttttctcccccgggggcgggacagtatatttttttttatggggcccataaaaaaaatcactggcgcggtgttttaaaacggggggggggggaaaacccgggggcccacccaaaaatagggggcggggaaaaccccccttttcccagggggggtatataagaaaggggctcccaccaatcgctcttcccaaaatggccgcccctgtgggggaaagggggcccccccctttgggggccttaacagcggggggggggggg

SEQ ID NO: 47308 - DNA, 668 bp, Glycine max
  Clone ID: PAT_MRT3847_142725C.1
agctcagtctgtgccaaacccagaaaagggtaaagggtcagaggcagttcagatttcagagaaaggactgagcaaaggtaaatcgcatcaaagttcagagaaactgcagatttcagacagcccgcctccccgtcccgcggatcggtggaatccacatccccagccagcccagcgcgcaggtgcagggggtcatcagccttatcacgcggagagaggaaggtcagagggtcatcagacttataatgtggataaaggtcgatgattgaaaggctagttttcttctgttctagaacatgatccacatgcagtcagtgtttttgttgtccatgttgggatttgcttatgtctttcaacaatattttgtgtggtttatgaaatacagtgagaagaatccttcttggataaggttgccacaagagcccttatacaaacaagagaagcatttcccttaccccccaaaagcaccatgtgcaaagcataattcaacatttcccatgacataagccgaactgtttgtaaccttacatgctgatttttactagttcagtgagcagcatgttgatttgcatgtacattatcgtatttgtaactgcaacaacatttgagttgtttggcataagctggcaaagcaatatttaggcagataaccttggtccaaattcttttgt

SEQ ID NO: 47309 - DNA, 371 bp, Glycine max
  unsure (1)..(371): unsure at all n locations
  Clone ID: PAT_MRT3847_142726C.1
gcgtcttcttgctacgtcaataggatccagctttttntcaaatcatgattttttgggggttggtggacattaattctttggaaaatattactattcattaacagaacataatggtttctttggtttgggggccttactggttgaaccagggaaccttggtgccacaaatatttggatggattttaaaacccaagactaaaaatttttggtccttaaaatcattggaacctgggccaagaaaacccaaaccaaaggatggacccgaattaaaattggtcgcaattgaaaaggccgggaatggcaataagtaccggtgaatttcttcctttaaaaaaaaaaaaaaaaaaaaaaaaaaaaanaaaaaanaaaaa

SEQ ID NO: 47310 - DNA, 1037 bp, Glycine max
  Clone ID: PAT_MRT3847_142727C.1
taattcggcactctctctctctctctctctctcccacgcgtccggttaaggactagagaatttccataggacttcaagaagacagtgggcaatgctgggcttttcatatggagaaatatttctgttgcttggagctactgctgctctgatagggccaaaggatttaccaatcatatgcagaacagcaggaaggctagctggtcgagctattggatatgtacaattggctcgtggtcagtttgacactgttatgcagcaatctcaagctcgccaggttcataaggaactgcaagacacaatggctcagctagatgccattcgccatgaaattcgaagtatatcaatcataaatcctggccctttgacgcggaggcttgtggatgatcctgaccagacatctatctcaaatgaaagtaggaaaccagaagaatctggacaagagaatagctcgatacccactgttatgaaggattcaacttcaatgtcatccaattcatgccatatgcaaaatcaagcaaccatttattccagattggtaaactcccctgccataaaaaatgagttgtcagcaagtagtaccgaagttgagaagatagaagataaactacagcttactgtcttaccaatttctgctgaaaatgctggactattaccaattcgtggggctgatgtgaaaggatctgacatagttcttgaagcaattgtggaggcagaggtcgctcataatgcaaaggaattcttttcacagccccaaaatcaaatatgattgatatggtaatcctacatagtaccttaattttctagatgttaaagtttgtggcatttgtaaatacaaaataataggttgaaccttatatttgtaggtattgattcttgttttttcttttcaagtccaggctagaaaatctgtcggagtctttgggttcaagagattattaattttttctgatttgaagtgtttcctcactcaaccttccccactttcccctcgataataaaacaaaaccctcaagctagtctccttaacgaaaaaagaa

SEQ ID NO: 47311 - DNA, 752 bp, Glycine max
  Clone ID: PAT_MRT3847_142728C.1
tggcccccgaccgaaacctgggattctttttctttacactaataatataaagaaaattagtaaatagttgtctgaactaatacataaaaatttatcaatataatttttacaaatgctttttttatccagtccaattccgtgtaagacagtggataaccaaatcattagtattttattaccggcaaacatactaaatgcaataacaaatagatgaaaaacaatccacacgacttaaaccagttttgcttccaaaaataaaaaacacggacacgaacaattagtgtatgccccattctcctcctagcttatctttcagctgatatagttcttcacgaggcaaagaaacagtaacaatccttccattaccaccatcttcgtcatcttctggtgctggaagaaccaaaacaacccctttatcactcaccccacgaaatgtacaatttgccataattggtttctgtccattcagattcatcccatcataaatattaacttcttccaaattcacaaacgtcaagtttaccccataaactataaaatcctctttcccttcatctgcctccaccaatttttccattacatggttctcaaccatcttgttctcagcaatcagcttcaccaattctgaaatttcatatttcccagtcgaaaaatctgcttcaattttgcttaacactaagaagccattggtgggggattcccgttttgcacgattagattcactagtacatatagtcacaacatttggtcca

SEQ ID NO: 47312 - DNA, 308 bp, Glycine max
  Clone ID: PAT_MRT3847_142729C.1
ccaaacagaaaaaaaaaaaaaatttccctataaaccccagggtaaggccaaaaaaagcccattttccttgggaaaccccaaaaaaattcaattttttttgccccccttttctcttaaaaaaaaactaggaggctttaaattaaaccacccagcccccccaaggacccccccacaggaggctataggggtccacacaaaaccaacctctggacctggttcttgctgcttcaaaatcccggggaggggcccaacgaaaaaaggagccccacaaaaatcaaattcgggaaccctttgtctttttccaccga

SEQ ID NO: 47313 - DNA, 263 bp, Glycine max
  Clone ID: PAT_MRT3847_14272C.1
cgttccttggagtactattatagtatcaggaatcatgtcttgtgttacacctgatgaaatctaaaactcttttcatggtgtcatccaagtgaagcatatctgaggagttcaggatcacctaccctaatctatgcatttcaattgaacgggatgttttcgtgcatagacctctctggctcttttgagaaagaggctagcatggaagtccatcggcagaatctgtgctattatacattgtgagcataatatactgtgtctttgga

SEQ ID NO: 47314 - DNA, 191 bp, Glycine max
  Clone ID: PAT_MRT3847_142730C.1
ctcaaagagcaacaccacaaaatgaaagatgaacaacaagaactagcactagagcaagttgaaagcgaagccatagtagatagcatttgtgagagtgaaacagcaactgctgtagtagccactgcaaatgctgaagaagcccaaggtggggatgacagctatgaaattgtaccgggagaaaatccagaaag

SEQ ID NO: 47315 - DNA, 143 bp, Glycine max
  Clone ID: PAT_MRT3847_142731C.1
ttctaataaaaacttcctatttattgattccttaactatttttaagaccaaatcccggttctaaataatctgcagagagagagacggtacagaaaaagaaccgcttatggtgactccagccattatgggaagcccctagcatt

SEQ ID NO: 47316 - DNA, 188 bp, Glycine max
  Clone ID: PAT_MRT3847_142732C.1
gctcttctgaccatgactttgacattttcatcaggtctatacatgtgccaaatgtaccatgagaacatctcatgccctgtcgggcaccatgctcaaccacaacaaagtgatagcaatgtttcgatgagaggcttgtgaaacacctcaagctgtgcaactcgctgggcctgaaagataatatgcatcct

SEQ ID NO: 47317 - DNA, 762 bp, Glycine max
  Clone ID: PAT_MRT3847_142733C.1
cagctcgagtcttaatttcataacaaaagaaatatcattcatttgtgctactagcagctactatctatatctatatgtgcacaatagagcttctccaaatactctgaaaacctactccaaattttgcatgctacctgacaactaagaaacgtgctgctgtcctataatttgaactacttatcactgtcaattaattcagagttcagcagagtgccccaacatgctgaaaaagggaaatggggtgcctgcttattttactaccgtcatgccaataccaccatgttttttgtgacaattagttaattaaaaatcttagttcatcatatcatatgtgaatgtgacagtggttgatggatttgattacatgaccagtgtagtatgtctaccttcaatttcatatttagttggctcatttgttataatgtatttttagaaaataatctttgaagtctatgttaacatgtatgcaaagtgaaaacaagtgaattgcattttgctatcacatagaaagcaattgcttggttgtcaaataagggagtgagttttcacattttaatgttaaatcatgtggtggctggcaggtgatttgtaagtcttatcatatttgataattgatatatatgttaatggatattagctatattgcgatgtcacctctttagatgagattgtcctttagatggatagaggaaagagaagtcagagggaagagatggttaaatcttactaggatgggtattttaagtcatgacatttcttctg

SEQ ID NO: 47318 - DNA, 487 bp, Glycine max
  Clone ID: PAT_MRT3847_142734C.1
aagcacacaaacaaagtttaattgctactttatatgctcatggctgcttcaagtaacacaacagtgagttatatgtgacagaagacaaagaccaaagttcttctgaaagttctgtatggtctctccaggttcaaggtagccaataatgggtatcaagtgcatacacgtttttgatagattatatagttttttcacttgttcgaagaaaagcaccatgccaagtggcagaagaattttccacagggatgtggaaaaggaagaatttcagtatgctagcactcaatgtctctcatcttactacagtgtctttgtggttcgtctagcaatcatggccatgctagcaatcttgattggtcttctcacttttctgacatggcatttcacaaagatttatacaacaaagtctcttaatagcttggcttatgatctgcgttacgaacttctgcaacgccccatcttgaggatgtggaacattttgaattctact

SEQ ID NO: 47319 - DNA, 642 bp, Glycine max
  unsure (1)..(642): unsure at all n locations
  Clone ID: PAT_MRT3847_142735C.1
taccggtccgnattcccgggtcgacccagcgttcgctaattcnatattgagtggattcatttcatcaatcactttgcctttctcatcataaccaccaaaataccaaccattaatccagttcgtttcaaattcatgcaagccataataacatttatgatgatgatgttgcaggttgtttctgctcaagaccaaataaaacaaataaatataaatgcaagccatattttttatgatgttgcaggttgtttgtgctgaagaggaaataatgtgcattgagagggagagggaagcactcctccaattcaaggctgcacttgtggatccctatggcatgctctcttcttggaccacttctgattgctgccaatggcaagggattcgctgcaccaacctcaccgcccatgtcctaatgctcgaccttcacggtgagtttccctcaagaggactttatatgagaggagagatccacaagtcgttgatggagttgcaacaattaaactatttaaacctcagttcgaatgactttcaaggcagaggaatcccagagtttcttggttctctcaccaacttgagataccttgatctgtcacattctgattttgaaggaaaaattccaactcagtttggctctctttctcattt

SEQ ID NO: 47320 - DNA, 454 bp, Glycine max
  Clone ID: PAT_MRT3847_142736C.1
actccttccatttcatcagccaaaaaaaacaaaaacaaaggctccttccatttcgccacactctctctctcttacccaacaaatgtaatttaactccattttactttcgtcattttaaaccactgcttcaaatctatttaactctctctccctctaatccgcgtctctttgcgtttcacggcccacattgctgcgttctctggagtctttggcctttcaaggaaaaaatggcagagacaaaaccagacacaccgttgatgccaccatcatcgcggaaccttccagatttcaagaagtccgtgaaattgaaatatgtgaagcttggttatcattacctcataacacatggcatgtacctctttctttcccctctggtggtgctcattggtggacagctcttgagcttcttccttggagatctccatgtcatttgggagaatctacagtacaattt

SEQ ID NO: 47321 - DNA, 532 bp, Glycine max
  Clone ID: PAT_MRT3847_142737C.1
gactgttgtgatgagactactagtggggccttagggcagggtgttttaatgtttgctaaaatacccacattgtgcgctaaaccacataccttatttgatattgaaatctttaatacacattaaaatattggtgggactctcgggtaaggctgaaaagtgcacttttaaagggattcaaaacatcacacttatatatatctgtaagtttcgtgggcagcctgtgcacctgaagccgtttgtccatgtatctccatacatgatcacgacgagaaacattgtcctagagaaataaaattcctatgggcagccctgacacacctgatgcattatctgattaactcttacacgcttcatctcctataaatcttgatttacgcgtcgaaatccttccttgataatacacaagtagaatttggcttatgcacagactttgattcttccaccccctatattagatctcgccaactagtatggttgcaaaacaataaatctatttctccacagaatatactacacaatcctaattgctcta

SEQ ID NO: 47322 - DNA, 1796 bp, Glycine max
  Clone ID: PAT_MRT3847_142738C.1
ggctcgagtgggatcagtgagttttgtgattcattttgtgccacttatgtgagatacgtgaagtgcagaatggagaatgcgagaataagccagtggttgatccttctggtgtgtgcgctgctgttgctgatatcagaagcttcttatgtgccaatcactattgttcagaacgcggtagcaaaaggagctgtttgtttggatgggagtccaccagcttatcattttgataggggatttggatcagggattaacaattggttggttgcatttgagggaggaggatggtgcaacaatgtcactacttgccttgctcgcaagaccaatcgtttaggttcatctaagcaaatggccaagctaattgccttttcaggaattttgaataacagggaaatgtttaatccagatttctacaactggaacagaatcaaggttaggtattgtgatggttcatcatttactggtgatgtggaagcagtgaatccagtgactaagttgcacttcagaggaggtaggatcttcaatgctgtcatggaggattcactagcaaaaggaatgaaaaatgctcgaaatgctataattcggctcgagactcgattaggttcatctaagaaaatggatacatcactttccttttctgggtttttcagtaacagtaaaaagttcaatccagatttctatgattggaacagaatcaaggttaggtattgtgatgggtcatcatttactggtgatgttgaagctgttgatccgaaaaccaatttgcacttcagaggagcaagggtttttgctgtggtcgttgaggatttattagcaaaaggaatgaaaaatgctcaaaatgcaattatctccggatgttcagctggaggattggcttctattctaaattgcgatcgattcaaatcactactacctgcaacaactaaagtgaaatgccttgcagatgctggtttttttatcaatgtaaaggatgtctctggagcacagcgcattgaagagttctacagtcaagttgttcaaacacatggctctgcaaagaatttgcctacatcctgcacttcaagactcagcccaaggctgtgctttttcccacaaatttggtgtcacgtatcactacaccaatcttctttgtaaacgcggcttacgactcatggcagattaagaacattttggcaccgggtgttgctgatcctgaaggccattggcatagctgcaagcttgatataaacaactgctcacctgatcaacttgatctaatgcaaggcttcaggacagaatttttaagggctataactgtgctaggcaactcttcatctaaaggaatgttcatagactcttgctatgcccactgccaaactgaaatgcaggagacatggttgagaagtgactctccagagctgaaaaagacaacaattgcaaaggctgtagcagattggttttatgaaagaaggcctttccatcagatagattgcccttacccttgcaaccccacttgtcacaaccgtgttttcgatccacaagacgaccatccaggagtatagaaatattcatttcatcaaaatctagcacacatttatttctatcatttttataaaaaccacacacacttattagttattggttagcatgggattgaataagaaaatatgatctccaattttattattaggccaccaaaattacaaggaaatgccgccactgcactaaacttaattgtgtgccgggcgcacctccatcattgtttagtactatcatttaatcttaataaaaattagtactattatattctttctaaaaaa

SEQ ID NO: 47323 - DNA, 152 bp, Glycine max
  unsure (1)..(152): unsure at all n locations
  Clone ID: PAT_MRT3847_142739C.1
cttttgggtcgattatnttttgggatatatgctacnnatatatntatgtgcaaagtangacgcaccgacgtgcaacaaaataataatannaanggatagtttgcngtcnaaggngcnaaggcnttccaagtttgtccnantttttccaagnt

SEQ ID NO: 47324 - DNA, 665 bp, Glycine max
  Clone ID: PAT_MRT3847_14273C.1
ttggtagttcatgagactcaattggcaatatatgatgcctctaagatggaacgcattcggcagtgggttccccaagatgttctgtctgcccccatatcatatgcagcttattcctgcaacagtcagttaatatatgctacattttgtgatgccaacattggtgtttttgatgctgatagcttgaggctcagatgtcgtattgctccatcaatatgcttgtcaccggcagctttaagtggaagtcaaggtgtgtatcctcttgtggttgctgctcatcctctagaacccaaccagtttgcggttgggttgacggatggatctgtcaaagtgatagaaccgaacgagtcagagggtaagtggggaacctgcccaccaacggacaatggaatattgaatggtagaacaggatcatcatctacaacaagcaaccacactgctgatcaggctcaaagataaacgatcaacaaattgtattatactagtgtagttcttttcatctgtaattgtatcagcttagatgtttagatttcgattcaccaatatgtctcatcaatatcaggtcagcttggacataaaatggtaaatgcttagacgtacaatcgtgtataccttttattcttgttaactcaattttattgtttgtaatgttattgtttcttgcttac

SEQ ID NO: 47325 - DNA, 385 bp, Glycine max
  Clone ID: PAT_MRT3847_142740C.1
ttcatgctctacgatatatttgctaatttaaggacatgttggtataaaaaaaaaaaaaaaaaaaaaaaaaaaaaaaaaaaaaaaaaaaaaaaaaaaaaaaaaaaaaaaaaaaaaaaaaaaaaaaaaaaaaaaaaaaaaaaaaaaaaaaattggggagcccccccacccccgaaataaaaccccggacccgaccctcccggcccccccaccttttccctataaaaagttctttttaaagctgggcctaaacacggccataactttttcctttgtgaaatcgcaatccccccccatttcccccccccaacccaaccccaaaaccaaaaggggaaagcccaggggggccaacccggggggcctaactaaaataaattttcttgggtta

SEQ ID NO: 47326 - DNA, 349 bp, Glycine max
  Clone ID: PAT_MRT3847_142741C.1
gggtcacacccttcattagccccaggttaaagaaaaagagttaagaaaccttttaaaccggtggccaccatgccaaaaagccttttttaaaggacctggttgggggtcaaaaggtaaccatttaattccaaacctagaaaactttttttatgttccggggataattaaaggttaaaccttcttaacccttggcaccaaaaccagattctccgaatcattttccgtggaattaagaataggttctgggccaacaatttcttcaattaggattccttttcttacaaaagggacctgaggataactttccttaaaaaaatgctgggaaacttaaaaaaaccttcaaaaaccc

SEQ ID NO: 47327 - DNA, 109 bp, Glycine max
  unsure (1)..(109): unsure at all n locations
  Clone ID: PAT_MRT3847_142742C.1
gctttgtgttatgaattgattgccgtagatggtaacactgtgatctggaaaaagccagcagtggagatgtgtctccccaaccaaaatgaatgctatcctgtatgatntc

SEQ ID NO: 47328 - DNA, 377 bp, Glycine max
  Clone ID: PAT_MRT3847_142743C.1
ctgatgaagaaggcgtagcagcttggtcaccatccttgtaaaattggaccaattcaaatcgcagattgcagctagggtacataactcttccccctacactccccaaacgagaccatggaattccgggtccaataacatcccccaaacaccccttacaatcatcactggtcaaatcccgtgtacactgaccaagagtataaagcgtttgcaaatcattcagtttcaacgatttggttccgaatctctcatcactgtcccctgcttcaatagcaactttcgacaacgcattcgacaacacgaaaatgaagaatttttgttcctgatcggggcttgagaaacgcgtgatattcaccctctagaacaccggactttttttt

SEQ ID NO: 47329 - DNA, 476 bp, Glycine max
  Clone ID: PAT_MRT3847_142744C.1
accgctgccagaagaccaccgaagggggctgctagtaatatcaaaactgaccctcatcaagacaccaaacacaagcccacatttttataaaccaaaataatttcagattcaggctgttgggaatattctgatggtagtttgccgggtttaccactcacactcacaagttgggtggcgcacttttaaccccaacaacttaaagcctcaaggcgcctacaacaatggcagtgctttatccaactcataaatcatctgactcttaacaacccagtatccaataccagcggattttcatcgaatgagaatatttttatcagaggtccacggatcatacattaaaccatccttcggcctcatctcgggtcatgctccacgaaacaaagcaggatgcgttgtttctgcaatgtgtcgcctgtcactgacagcagagaatgtcgacacagtattagatgatgctaggcctggcttgatggctg

SEQ ID NO: 47330 - DNA, 447 bp, Glycine max
  Clone ID: PAT_MRT3847_142745C.1
atacctcactgctgatgatgatcgatactatgcattttaatcatatgatgacatagatccctcgagttaactttttggaacctacggggctgatgttattccctatatgaatttgccataccctgtaaaaaaatagaaaggtgtctgcctctgatcaatgatgaaagataatatagggaatgatctaacaaatattcgcctacactgtaatatcaatgagcactcttcctatatgcataatgtttataagaaacggagtattcatatcttatcaaccaatcttatgaatggtactttaagggtaatagcctcacgaggattatctacgtcacgggttttgctatatattgctattcatcaactgaatgtagagcgtgcaaaccatataatccatttcttggggaaacatattaagcttactatcccgataaacgccctttttttttt

SEQ ID NO: 47331 - DNA, 194 bp, Glycine max
  Clone ID: PAT_MRT3847_142746C.1
aaaagggtacagcagggcaaaacacaacataaaggtattgctgctagataactacacaatggcactgctgctaaaactctttgtaaaggtacagatgtgagaaaaccatattgtggtacggctgccaaagggaaacagaatgtgacacttactattattgcacatggagtcctcaaagatctatgcttacctct

SEQ ID NO: 47332 - DNA, 303 bp, Glycine max
  Clone ID: PAT_MRT3847_142747C.1
atgctctcaattttatgatgagaaatcttgaggtgattcgaggtgcatgtttcacattaattggggggtgggggaaaaattaggattaataaatgtcatctagcttacatggcatacatgtttactgttacctaagttttggcagcatcctgatttaatttcattaggatgaatattgagaatgtcatattgttccctgttatagcaaactatctatctttttgcattcttttaagaaaacttttatcatgattggtttgtgaccattgtttaagatgtaatttgatttgattcattttgatt

SEQ ID NO: 47333 - DNA, 350 bp, Glycine max
  Clone ID: PAT_MRT3847_142748C.1
gatcaagcactcgagccgattcggctcgagggctgcgagaagacgacagaagggcccagaagatgacactaagggtgtcaaagagggagagggatgctgagggaattgtgaagtgttgaccaatgtgttggtccattttgttgccttgtaacacaaacatggtgctcatttgactgtacacggttgcaaaggcaatcatggttgcccaaactgggagcaaatgaattatggatttgagctcctcaacttgtgtcactgtgcacagcctccataaatttggccaattagtgtggtcagattctgtctctattgctgccttgtccaaacacctagaatctacaagttagtct

SEQ ID NO: 47334 - DNA, 354 bp, Glycine max
  Clone ID: PAT_MRT3847_142749C.1
tttaataataattatttttggttattgggttttttaactttttttttttttttttatttaggccccctctttcctttgattagggggggtgggggaaaaccccactttagataaataataacttaaagtgccagacttttaaagactttacatcaaaatggattaaacaaaattaaattggccctttgaaaataaaaggcaaggggttttcatactttgggtttcctttttgacaaacaaagtggggaattaaaaaaaagttcctaacccccggataaccgttcatacaaaaattataatgggggccaatattttaattcaaggggagccaaaactccaaaatttatggggggg

SEQ ID NO: 47335 - DNA, 805 bp, Glycine max
  Clone ID: PAT_MRT3847_14274C.1
ccacgcgtccgatttggcatatacttaagtccctattacataggacgtgaaacctaacgtaaaaaaaatgtttacatcttttcatgcaaaacgtgcaaccactttttaacggataatcaaatccgttgatgggtaggaatttagacaattactcaatggtttatcaccaaatcacataaaatcaaaatactgatttggcaacagcaaccactaaaatgtagaacaatttcccatttggaactttctactttatttttttgcaactgggaaagtaaggggaaaaaagtgataaaaggaagataacatttttgaacaggcaatagttagttggtgcacattgggatttaagatttattgtcaacggatgcatatctgaccaaacaactggaaaattgaaaagagcacctaataaatgaaacatgctctaaaatgtcaaaggacgtgtataatagataggttaaaaattaaatagaaatgttagattcacactctataacacattttttttgaatatgtcattttttattaaaatttattaaaaaaacataaaatttagtgaatcttagatcttatttaatgatttttttttaattttatactttttaatatattttaatcaataaaaaaatatgtatgaataaatatgttactaacactcttaaaaataaaatttaaatcatttccatgggagaaaacaaatgggtaggtaatcttatgatatgataggctctatttcactcctagatatgcttatgctttccttacaaagagtagaaaaaatatacatttctttccactttttttc

SEQ ID NO: 47336 - DNA, 344 bp, Glycine max
  Clone ID: PAT_MRT3847_142750C.1
aacaacttctgctacttcctactccaaccgcacttccggcccgccattaaccagggccaaggccagattcggatccaacggattgggaaaattttggccgttgggaacccaaattggctctgcaaagacacaatgttgaactcgtcgccgtaaacaaccctttcatcaccaccgattacatgacatacatgtttaaatacgacagtgttcatggacactggaagcatcacgatgtcaccgttaaggacgagaacactcttctcgtcggtgacacgccagtcactatttgtggacacaaaccccctgaaaatatcccaggggggtcaactggacctgacatcatt

SEQ ID NO: 47337 - DNA, 388 bp, Glycine max
  Clone ID: PAT_MRT3847_142751C.1
caaagggccccaacccctaaggttttaagcgggggacccaaattaaaaacaggggccaaccctgggcccaaaacattcaattttaaaaatctggcaaaaaaaaaaaaaccttttacaaagccccaaaaccaagggcccctgggaattaaaccgggggggccaaaaacttattttttttccccagcctgggcaaattcggaagcccggggcttttttaccccacaaatttttttagccctattttttcccccctaaattggcctcctggacttttcaccccgggggaaaaggccctccctgaaaaacccgttttggggcccaaaccttgggggattctccccgggttcaaaaatcaacccaaatcccggggatttgccccccccaaaaa

SEQ ID NO: 47338 - DNA, 238 bp, Glycine max
  Clone ID: PAT_MRT3847_142752C.1
aagaaaggttctccaaccggggatttattttcccctacaatccaccaaatttgaaaggggcccctgcccagataaaagggaaaacttttaacttaaaaggagaacttaaaaagggggagggaccaaaaaaatgggggagacattaaaactcaaaaagggtgcctggtcccttcatatggatggtgaatttccaacaaagctaactgcaccaaaaagggtgttaacgaaaacctttcct

SEQ ID NO: 47339 - DNA, 439 bp, Glycine max
  unsure (1)..(439): unsure at all n locations
  Clone ID: PAT_MRT3847_142753C.1
ggacaattgcttaaaagtgagcaaagggtttaattaaccaataaacatgaagatgagattttttcttgtagcttgtttggcagtgttctgcatcctaggggtttgccaaggaggcaacctcagaaagaaattctacaagaaaacatgtcctcaagctgaggagattgttaggacgaaaatccaggaacatgtctctgcaaggcctgatttgcctgccaagttgattagaatgcattttcatgattgttttgtcaggggttgtgatggttcagttttgctggactccactgccaccaacactgcagagaaggactccattcccaacttatctttggctggctttgatgtcatagatgacattaaagaagcattggaggctaaatgtcccggaactgtgtcttgtgctgatatattagcattggcagctanggatactgtt

SEQ ID NO: 47340 - DNA, 527 bp, Glycine max
  Clone ID: PAT_MRT3847_142754C.1
gcacgagggtgaagtaccgtggagtgagaaagaggccatggggtaagttcggagcagagatcagagacccaacaaaacctacgggaaggcaatggttagggacatttgacactgctgaagaagctgctagagcttatgatcgtgcagccattgctttgaggggtgctcttgcaatccttaattttcctcatgagttccattctcatctcccttttatattatcaaattcttccactaagggaaatggaagttcttttgataaggaagttattgagttagagtatttggatgacaaggtgttggaagagcttcttgagttagaagagaagagaaggagtaacgaagactaagatcactggagtactattcattgttttgagatccccggccccttttattttctctagctctccacttgtattaatatctgaacttatgatttagggttcagattgatttccaaaaatcttccccacccattgattgaattaaattgtgtatgcttcaaaaatcttacaattaatgca

SEQ ID NO: 47341 - DNA, 572 bp, Glycine max
  unsure (1)..(572): unsure at all n locations
  Clone ID: PAT_MRT3847_142755C.1
aaaaaannnaaaaaccccnnntttnaaaaaaaaaatnaaaannnaannnnnnnnnntttaaaaaangggnccnnaaaaaccaaaanggnccnnnaaaaaccnnggggccccnngggaannnnaaaaaccngggnnnnnaaaaaaaaagggnccnttaaccccgggnngggnaaaaaaatnntnccccggaaggnncccttnccccgggnaaagggcccaaantnntnntnttnntncccgggaaatncccctaggnttcttaggaggnnngnataggacctcttnttnccctnggggggaaaaaaaaagggggtngnggntngggggaatngnggcccaaaaanaaaaacccaaaacccaaaaggtnaaaccgnccccttcctaatntaaaaactnnncacacccannannntcaacnaaaaanccaaaacaacaccaaccaaacccacacaacaagaaacaccantcacncttcatctncngcntcctatnccgccanctccgcccanacaaacccanncgcatcctcnacctaaccgaccatccaatcancagccnnaccgcaacganan

SEQ ID NO: 47342 - DNA, 679 bp, Glycine max
  Clone ID: PAT_MRT3847_142756C.1
gagcaggaaatagtatgcaaaaattttataagaaattttttggataattctagagtttccttacaagcatacaaatctaagttgaactgggaatttggacatttgcatgaagcctggtaagtttgctcagtgtttcacgagcagatatggtatctgggtgatcttcaccacaaattgaagtcctaataaaaacagccttcctgatcagatcatcccctatgtcaaattgagcacctcttagcattagcttggccctagtctcgagaacagtggctctacacaatgctaactcttgccaaaggcaaggattcaactgagcattagtctggatggatctccagcaaagtgatttgtccaaccacttgtcaactggggtaacaaatgcttggtctgcagcttccaatgcattggtgcacagacgcagaagctcaagagcggcagtgcatcgagaatatgtaatgaatgtatgaattgcaagaggcagaactactcttttgacaagatataaaagctcagacaccttgacctcaacaaccacaggatcatgaccaaatccaaataacagaaaacaagcagcccataaatgctccagattttgtgatattgacccatgattgatgatagcttgaatcatggcctgtgcagccccagtatcgtctcttctctgagcatacagttt

SEQ ID NO: 47343 - DNA, 368 bp, Glycine max
  Clone ID: PAT_MRT3847_142757C.1
gtcttaatcatccatcttgaatatcttttatttctttgtcttgaataaaactttgagaaacatgtaatcctttggcatcatcaaaacattcagcttgatcctttgtctacatatacatcggccaaatatgataatatcaaaagtgtaaagaaactatggttgattcgtgcgctacctacgtcaagacctcacattacacaatgcggtctttcgtgacacccttggcaatcctaaggcattgtttcatgacctcatgtgtctctgtgcctggtgtgactatccttaggttgggatgaggctccaacctttcagcgatctccatgacaagcctccacaacatgtataggctcatccacctcacaacgggc

SEQ ID NO: 47344 - DNA, 117 bp, Glycine max
  unsure (1)..(117): unsure at all n locations
  Clone ID: PAT_MRT3847_142758C.1
ganncatgtcacanctgnacatgnnccngaatncctntggcatctcctcaanggcgttgctcgtggcnaaaatgaggacnttgaaaattttatggaatnatnttagttgttttactt

SEQ ID NO: 47345 - DNA, 494 bp, Glycine max
  Clone ID: PAT_MRT3847_142759C.1
atagaccaaccccgggatctttttttagaggcccaatcacgatttcaaattttaattccgaagggtagaaaagccacattttttttttacataaagcgtgctttgatatatccttaggctttcccctttgagccaggctggctcacttttaatttttttggaacctaattaagccctaaactatgggggggcctctccaacaagcttaaacttttgcccctccttgaagttgaaccatgccttttcccaaactttgggttcataaacctttttttgcccaccattttttgcctccaaaggggggggggacaaggtaccaaaaaccacttggtgttttggacttactaccttttcaaactccaaaaggggaatctggtttttgtggggttcttcaacagcaaagcgagctaaaccatcaacctcaaggctggtctgggttcctgccacatcacgaatgccaccaagggcggccattccttatttttctttcgctt

SEQ ID NO: 47346 - DNA, 436 bp, Glycine max
  Clone ID: PAT_MRT3847_14275C.1
agaaccaaccccagcacccagcacccagggaccccctcacaagcaacccccaagaacaaacgcccccaccaccaagcagacagcacccccaaaccccaaagagggccaaaacctggcaaccctcagcctccctacaagggctcccggaacacaacaggtcgatgctcacacccattcatggaagcggaacgcaagaatcgtaacctcagacgccgacggaaccactacaaagccctgcgccccggggcagtctacgcccctagttggcgaagaccggacacaacctggagtggcaaggcttcgacgtgctattaaggagaatggatacaaaccactctagtcgggagcacgaggaattgtgcaggctatgcagcgaaaagctgctagcttagccgggacaggacggagagagcctaccagcggacctgtcgtacta

SEQ ID NO: 47347 - DNA, 778 bp, Glycine max
  unsure (1)..(778): unsure at all n locations
  Clone ID: PAT_MRT3847_142760C.1
cgggctgttttctttagctaggcttctcataccacatacagggacattatccccaacaaaatgcgagcaaccgctatattttgtgtggcccgcctcccattctattgaatagaatgcaattgccccaaacatccatcgcatgtgcaacaactagaattgcgtgttgccttggtatctagatgatacacaacaataatttgggtcccaccataatattctctgtattgtatgatttagtgtatcctcttctttctttggtggaaaatgtttgcatatttttctcactacattattcttcactactttctttccatattgtgttcattaatatatggtacagctacagctgctaacaaagtagaaaaccacggatctatgtcccttacttgttcaacataatccgatattattttgattttcttcattatcttttccagagtctcagcttttcagtgacggggtagacggaagattgtgtatatgccattcatttattcattaatagtgtgtaatttaatcatgatgaagatttgtatagttaggttcatcccaagtccctaatactagaaatgaaaggagaatatatgaaattaaacttgaagagtaaaaaaaagacattgttttaaatgatatttcttgaagagtaacgatatttttttgccatggttgcccgctttgtctcctcgtgttgtctatttcctttcatgaactaatnnnnnnnnnnnnctatgtggagacagacaggttactagtttgnnannnnnnatgctcaacagct

SEQ ID NO: 47348 - DNA, 145 bp, Glycine max
  Clone ID: PAT_MRT3847_142761C.1
atcgagccgaatcggctcgagtgcgttctccagcctagtcattttagcgttgtatggattggctaaccttgaagaagtgtttaatgacccctcttccagatgttctctcaaaagtttagaagagctaaccatagagaggtgtaga

SEQ ID NO: 47349 - DNA, 452 bp, Glycine max
  unsure (1)..(452): unsure at all n locations
  Clone ID: PAT_MRT3847_142762C.1
gagaaccttaacgttggacttcccgtggcttgcaaataaagaggctaanagtgggtagtattgtttgttatggtgatgatgattgctggttgtaaagaaatgggtaattggaagaaaaaatgcagagagttgttgaggccaagagaggtcttgtacctcctcaccatcacaatcctcagcctcctcctccctttgtctttcttactcttagccactctctccggtgcccaatactaccttcaagccctcacttattattcctcacaaccctttccctatcttttccaccttgccctcaatatcaacccatgtattctttattttctcgtgtccattgtgagcgtggggaccctgatccaggggctgatgggtaaaatcacactcttgagcgagttaccctccaagtcctcgcgtatctccacagcgcggattttgctatgcgcctttcaagt

SEQ ID NO: 47350 - DNA, 1499 bp, Glycine max
  Clone ID: PAT_MRT3847_142763C.1
gctccttttggctaccgcgcaacgatgagaaataaagttgaggatagcacaaagaaaagtaaacactgccacagcaagagtgttcaaatgggagagggaaaaggaagaatttgtgtcactggaggcacaggattccttggttcatggataatcaagagactccttgaacatggatatgctgttaataccactattagatctgacccaggacgcaagagagatgttagcttcctcacaaacctacctggtgcatcagaaaagctaaaaatttttcaagcgctgatctcagcgacccagagagttttggtccagcagttgagggttgtgttggaattttccacactgccaccccaattgattttgcggtgaacgagccagaggaagtggtgaccaaaagagccattgatggagcactaggcataatgaaagcaggcctaaaagcaaagactgttgaagagggttgtttacacttctagagactccactgtttccttcagcagcctagaagagaaagatgtggtggatgagagtgtttggagtgatgtggatttgcttaggagtgtgaagccttttaggttggtcctatgcagtttcaaaggtgttgtcggagaagacagtgcttgaatttggagaacataatggagtttgaatttgccactcttatgctgctttttgttgttggacgctttgtttgtcccaagcttcctgattctgttgaaagagcactgcttatggtgtttaggaaaaaagtgagaaatttgtgtcattcattaccatatggtacatgtggatgatgtggctagagcacatatcttcctgcttgagcatcctaacccaaaagggagatataattgctcaccattcattgtgcctattgaagagattgctgaaattatttcagccaaatacccagaatatcaaataccagcactagaagaggtgaaggaaattaaaggtgccaagttaccacatttaacctcccagaaacttgtggatgctggttttgagttcaagtatagcgttgaggacatatttacggatgcaattgaatgctgcaaggaaaagggttacctttaatcgattttagccacgaagttgaaaaaataaaattgtcgaagatgattgttagttcgtactattttcagatccctggcaatgatgcctcttgacatgtactccatttaatgcatgatgttttcttaataaattgaccagggaaataattcttttggtttgtctgaataataaacaatgtaattttcaccttttccccttatctccctaacctcggtgagtatttattaattttgtcttttgttaatggttaatcttctgtgagagagtttaacttattattcacagagtttaacttattatttttttagtaaatctttctttccttccccttactctactatgtttcttcttccagtttatttttcatgttaaattgagtttgatttataccccctcaaggtcccctatgcacacctagatgc

SEQ ID NO: 47351 - DNA, 629 bp, Glycine max
  unsure (1)..(629): unsure at all n locations
  Clone ID: PAT_MRT3847_142764C.1
ccacgcgtccgcttctccttctccttcatcttttttggtcgatgctccatctcaaccacaccgcacagagagtatatatttatgtgtgtgtgtgtgcattgaaactctgatcttcgaccccacccaattttactgccccaaattcagtctcataaatccccaaattaaggaggaaaaagaaagcacgaaaagctctcgctcacccccagacagacgcaaagtgaccgaaaagttatgtaaaagactcggcaattcattggggcgctattttcttaatctctcttcgaattgcatgtgtggctgtggcagaggtgacttgctgttctcaagccttcaaggaaaagttgtgtgagtggtaggaaaactatggcagaccatcgaaatggaagtacacaacctcctaatggaaagaccagtgcagcaggatccgcatattctattgatctgaatgcatttcaatcccgattgaaagctttttatgagcactgggatgatcacaaaacagatctgtggggctcttctgatgcaatagcaatagcatgtcctccaccttcagaagatctgcgatacctganatctactgctctgaacttatggctgcttggatttgagttccctgagacattatg

SEQ ID NO: 47352 - DNA, 355 bp, Glycine max
  Clone ID: PAT_MRT3847_142765C.1
ttggtatctgaccaacgaggctggcaagaccatggctagggttttaaacacttctttggagctcagcaccagcgcatcggacatagcggacggtgagtcgaatatctataggggtcttatcttgagttcctttagcatcaacaacaacaggaagcttctatgggagggagctgggttccctacctgggggagtgcaggacagaggaaggttctccaggctgtggacaccaatatggaacgctgttgtggctcatgatgggagtggacaggtgaggacattttacgaggctcttaacttggtgcctaaaaagaacaagaggccttttgtcatctacgtcaaggccgatgtctacca

SEQ ID NO: 47353 - DNA, 291 bp, Glycine max
  Clone ID: PAT_MRT3847_142766C.1
gtgatacgacaagagaacggaggggagcttagtttgaacatatatcatcacttacaatcaggggtttgtggaacacatcgaatgcagtgtcttgccgcgttcaaagttttggtgatgaccaggataatctggacttccaaggtgatgccacgtcgtcggtccacgggcataaaaatcacaatgttagatggtgtaggaaaagcactgggtggcactgtggggacagtgttatactcctctccagtgcaactttgggaaggctctacagtggtcacaggctttgaaacctac

SEQ ID NO: 47354 - DNA, 176 bp, Glycine max
  Clone ID: PAT_MRT3847_142767C.1
gatgcaggaacacgttgtttcgagatgttcacaggaggaatgtctgacggctcgggcatctcaggtgcgtcctgcgacaactttgttggctgagggcagtacatatttgtatgctatggtgcatgatgggtcagcgtctacaataccaggtgactttgtcattggttgtaagttgg

SEQ ID NO: 47355 - DNA, 471 bp, Glycine max
  Clone ID: PAT_MRT3847_142768C.1
ctcaaacacaggttgatagcaaagaatagcacagaggaaaaatgaaacttaaaccagaacaatatggaggaaataataataatatagaatcaaacgaagtagctttggtgcatctttaagggaagaggcattcagaattttgcaatcaaaatgcaatttaaaatagtacattagtgtcaaaactcaaaagcttctggttccaatgatcataaacattgctatcgagctttaataccttatactaaaatcagggtacaaaaaatgagaataataaaagatggatgttcgcctatacaagaataaaagaatagagatgaagcgccaatacttgcatttgtttcacacatccgtattaaatacatatataatattgatacttatggatacatcactaatatgtatttgtgaagcattgaagcatttttaggaaaaaatgttatgcaaatcttatacacccagatacaagacata

SEQ ID NO: 47356 - DNA, 258 bp, Glycine max
  Clone ID: PAT_MRT3847_142769C.1
gtggaagttttttccatttttattatttttttttttacttttgcggcctcataactgtttttacttttatcttttgtattgtaacttgattgaaaggaatacctgcgtctatgttgatgatctttaaatgtcctgtggttgcccatattggaagaatgaaggatgcccagaattaaattagccctctcccaaagaaaccctgtacgtccttacgtccaatgaaaatagatgtctgagtttctaaaaacaagaagatcc

SEQ ID NO: 47357 - DNA, 201 bp, Glycine max
  Clone ID: PAT_MRT3847_14276C.1
atcaagcattcgtactgtcctatcttggtgcagcatgtgttctggttcctttatagacggtattaaggctgattcggaaccaattcacggccagccaatcacttgtatttaagtacctttggtactcatgtatctatatataaatatttatctctgctgatacactgactaaccataaataaatagactaacaagacaatg

SEQ ID NO: 47358 - DNA, 220 bp, Glycine max
  Clone ID: PAT_MRT3847_142770C.1
cgcttatttgttttctttagatataacaaaaatggcatggcttacacttgattcccttgcgttagcccgctattccagttctcttatgagccttagatttactggtggcaggcaccctctcaaacccgtttttgtgcgcgcccgtatacatagttcgtaaaatggagaccctaattaaacaaatgtcttccgcactcgttattattggggaacttcgggt

SEQ ID NO: 47359 - DNA, 842 bp, Glycine max
  Clone ID: PAT_MRT3847_142771C.1
cggctcgagcaaacattcaacactcacttgttgcgctattcgtaattcagacctcaaactatctcagactcagagacttgtccatcacttcaatcccaaaactcccatagaggaagccgttactcccccaacatcatggtacactcatccctctttcttccaccttgagctcgatcgtgtcttctacagaggctggcaagttgtgggatccacagagcagataaaggatccccgtgactatttcactggaagactaggagatgtggaatatgtggtctgtcgagatgatagtggcattgtccgtgcctttcacaatgtctgtcgtcatcatgcttctcttcttgcttatggaagtggaaagaagtcctgctttgtctgcccttatcatatattaaaagacagatttctgcaggggtggacatatggattcaatggagcacttctcaaggcaactagaatatcaggaatgcgaaatttcaatgtaaatgattttggccttttcaacttgaaagtagctaatgcggaatttcattgtacttctctatttcctataggcaatgaatttagctaccgggggaccgatagctcttcttgtgtcggaggaatggcattggtagctgaaggaagttcttagccataatgtgtcaaaggaatggcttggtaactcttcagaaatactgagtaccaatggagttgattcttcactaagttatgtttgtagacgtgaatacacaattgaatgcaattggaaggtattctgtgataactacttagatggtggctatcatgtgccatatgcacataaaggccttgcatctggtcttaagctggactcctattct

SEQ ID NO: 47360 - DNA, 735 bp, Glycine max
  Clone ID: PAT_MRT3847_142772C.1
ccaagcgctgcgtgggttctattgaggatatgattgacttttccacctccgtattgggccgtaatgtcgcggtttggaccactgagaatgtaaatgggtccaataagaatgtgatggtgggccgggtcaaagggatgaacggtggaaaggtgacccaatcggtgtcgtgccaccaaagcttgttcccttacatgctttactattgtcactccgttcccaaggttcgggtctaccaagcggatcttttagacccggaatctaaggccaagattaaccacggtgttgctatttgtcacttggataccactgcgtggagccccacccacggtgcattcatggcgctcgggtcgggtccgggtcggatcgaagtgtgccattggatctttgagaatgacttgacctggactattgctgattgatttaggaaactagagttggttcgcgactccattggctaatggaaattgaaagcaggctcaacccaatgtcaatgtgttttcattttaagtcacctttttttttttttttcctggttttcagaaataaatgttttgtaagggtttgttcattttaagtaattattaaagtgtgcattatgtagtagaagccagtgaatgtagtagtgtctatttatttatataatcattagtattttcccccgtgttatatgcctggctagttatgcgtctggccatatgcaagtgttaaatattaacaaagaaagttttactattt

SEQ ID NO: 47361 - DNA, 129 bp, Glycine max
  Clone ID: PAT_MRT3847_142773C.1
catgtacacacgaaaatgctagcttctccaacatagcactcaaaagttaattatgagaatggaaacaaaaaatttcatgacccctttgaggattagtctttgcttcattctcctcttccacacaacata

SEQ ID NO: 47362 - DNA, 1079 bp, Glycine max
  Clone ID: PAT_MRT3847_142774C.1
ttttgaggtgcgagagagacagtggaaagaaaggaaagggatgacgctgggtctgatcaatgcgaatcctgtggttcacgccaagaaagagcgaatcgctcgttctgatgatcctcacgccgatgacgccgttgatcctctcgacatctatgatatccttttttttttttcattttctcttctcccactcccaactcaactaactgttgagatccttgacttggctttgacaaatttcgtgagggatattcgggatcccgaacatccttattccctggaacagctcagtgttctctccgaggaatctatctccgttgacgacaaattaggccgaattctgataacttttacgccgaccgtacagcactgtagcatggccacggttattggactttgtctcagagttaaactgaagcactacttccctcctcattacaaagtggacatcaaggtttctcctggatctcatgccaacgaagaatcagtcaataagcagttgaatgataaagaaagagtcgctgctgccttggagaatcctaacctccgccagcttgtggacgagtgcctctactccaatgaactgtgaactagcagatatgccatcataataactattgtacagggcatttaccacttatgatgttataaaaagtagtcaatgtgtatggaaattagttggacggatttacctttggagaagctttatctctttgaagctatttgattttcagaggatgcatcttccctcttcttacccacttcacgttgtgtttagcatgtggtatgtatgtaaatcaagtaagacatcacgatgtcatatttttgcacctttcactacagaatgtgctgaatcagtctgtttaggggttgacccggtccttatgctcatagttcatgccatcccttttaataagtttaggtggaaagtaagcatcatttcttgtgtgtgacaaatgataattatatttgcagttatatgtggcatcgtctcatttttttagctgagggcttttgctttccctcaagtactaacctatactagttagagaggtttctcgtttgctgaatgatagcttgtt

SEQ ID NO: 47363 - DNA, 395 bp, Glycine max
  Clone ID: PAT_MRT3847_142775C.1
acgaggctggcttccagatccgccgctctcataatcgggatccaaatctatcgtacgtgccgatgacatccagatctgttactcactccaccggtgtctagatccgcggtgtatttgttgacgatgtgcatggtcgacacgatggtcattgaacttgatgtcgatgtagatccgacggtgagggaggctggtgccgtagaacatgcaggggccaaagacacgattgggaacggtggcaaatgtgtttgtttgattggaattcaaaaatcaagtaaacgaaggaggagaaataggggatcgtagaaaactgaatcgctttggtcattcacttttattttccaggggtgatggatatgtgttagattaaagaacactatgaaagggaacttggtgga

SEQ ID NO: 47364 - DNA, 236 bp, Glycine max
  unsure (1)..(236): unsure at all n locations
  Clone ID: PAT_MRT3847_142776C.1
gtttttttttaataagattgttgttgggtttggttcttcatttgtttactttgaagtggnggtgtggggagaganagttgggtntctctctctcgtatctggaaaaagtttcgatttttgagcgtggggtttgacggatttanggtttgggntgttgggtctgagtggaatcaggcaantanncatntnatggcgganccttcaaagagcatgctctggnagactccattccttca

SEQ ID NO: 47365 - DNA, 205 bp, Glycine max
  Clone ID: PAT_MRT3847_142777C.1
actcgagcgaatcggctcgagacggctgcgagaagacgacgaaacgggataacggagataaaggtgtagagtataggataaacaagtttctgtgcacagtacagagtttatccagttatgaagccttcgcttctcttcagtgccgatagaagccatgatggatatgcttctatcttcttatgctgctacacataatctcatcaaa

SEQ ID NO: 47366 - DNA, 433 bp, Glycine max
  unsure (1)..(433): unsure at all n locations
  Clone ID: PAT_MRT3847_142778C.1
aagcaaaatttttcgtttggttctttttttttaaggttttaaacattaatttttccactttttaccccttcgaccggggggggctcatttatctcccttagacagacaccccatcattcttcactagcaggttagaggcaggaaaagtaggccggccccactaagttaaaaagcctacaaaaaaaacggggggtacaagaaagcaaacacccccccatttgggttcaagatacaggggtcaaagcgacgcgccccttggaaaaactgctagggcacacgacccggcccataaggccggggagaaaaaaccccccaaacaagtcccgggggaaaaggcaaaaaaaaccccttggctgccaattttcctccccattcaccaccgaaacccccgntataggctcttcccgccccccccccccncgaaaggggaggc

SEQ ID NO: 47367 - DNA, 675 bp, Glycine max
  unsure (1)..(675): unsure at all n locations
  Clone ID: PAT_MRT3847_142779C.1
gaaacttcattcacatccattaaatcaggacaaaacctggtggttggtcattaaaaggaaaacaagaaaggtgaaggattctaataaaaaccactcacaccaaaggaaggtccnnagggggagacannnntggtcaacagaaaggggccaaacccgggagctaaaggctaaactaaagaaaataccaccaagcaggggctctttgggcctttcaaaacccaacggggggggtcttaattggctaccacaatataattaccggaatcaagggggtgggaaaaggttcattcaacatgggccaatttaaatctcaccatggggggaaagaaagctaggtgcagaaaaatttgacgaagacctaagaatggatattgggaggtgagtgggaatggatctctcatctttcaaaacagaccatgaatccctggttttaaggcattcatcaaagaacgggcgaagggactgacccttttggttcacaggttctggcgaggcataatcactaaannagaaagaagggtggagannatcaccctggaacatggaaatattaattgaactcaatggaangaangnngcaacttcaccgggtggcatcaaaggggtggccatctnnnnnttcatggggnnnnncctggtggttcntaaaggtttggacannaaactatggtcctc

SEQ ID NO: 47368 - DNA, 149 bp, Glycine max
  unsure (1)..(149): unsure at all n locations
  Clone ID: PAT_MRT3847_14277C.1
cgcaccgaacccttacccccttaaatgactgagagaaagggcaagatgtcattcttcaacctttagaaatcacgtattagtcggtccngannataaatgggggggggaggaatgacctancgccctttccgcagcctttggccgtggat

SEQ ID NO: 47369 - DNA, 445 bp, Glycine max
  Clone ID: PAT_MRT3847_142780C.1
ttataactttcaggtatttaatcaagcaagagaacatattcaccagtaggttgattcaatatatttctaactttttatggattggtgcgcccattaacttacagaactatagtacaaatggagtttccaaaggactagatttgatccatgctaaagaattgaaataactgatggaattgcatttatagatattatataaaaaaaattggaaaaaaaggaaaccaaaagggatagttgatagttcacaaagtaaaccccactctttccctaatacaagaatctagtcttttcacagattgatcatcaaaggagatatcaagctccttaatcttagacacaaagtccatggcttcttcatacttccctgtttacagtaaccatcaactaaaatctagtaaggtagttcacttggcctggcattgtgcctaattataagatctaatga

SEQ ID NO: 47370 - DNA, 533 bp, Glycine max
  Clone ID: PAT_MRT3847_142781C.1
gaaggtttcccgtcatcactgtatgacgtcctccttctttgggggggggggggggaaggaaattggggtgccggggaagaccgaaaccaagaacagaggcaatgagtaatgagaaatagcttaaagaaccagtgagttgaagccctaggtgaaagaccgttacggtgtaacgaaaattatggtcgaagatatagggttagttggaggtttaggggagagacaaagcgaaaacctgaatagaaataccaaacgaagccggggttacagatagcgaaaagattgcgaaaagtagggaccgaggatgttaaggtacagcttgtggtgcaagtacataagccgaagacccgatagagtttacgtagcgcattggcacgtatatagaagatgtaacgtaagtagtagaccaatttaattgcgtaatgacgtatgggcacccagtaggggcctggctactacgtgttataatgggcttggataagaaccctacatggtgcggccaagccaatggcctattgggaggaagaactagtggt

SEQ ID NO: 47371 - DNA, 598 bp, Glycine max
  Clone ID: PAT_MRT3847_142782C.1
ggctcgagggcttacagtttggtctgtttctgggtgtcgcttgatgtcaacaatccgacaaataggtgtaaactttatgctattgaggtggggtcttcagagagaattctatcgttctcatttgggaaatgctgtcttagcagaggtgtttcaggcactacatacatccggcaagtgatttatggggaagaccgtttactcattgtgcagtcagaagagactgatgaactcaaaatgctacatcttaagcttccagtttcttatatttcccaaaactggcctgttcaacatgtggcagctagccaggatggcatgtacttagctgttgctggtcttcatggtttgatattgtatgatatacgattgaaaagatggagagtatttggagatgttactcaggagcaaaagattcagtgtaaaggtttgttatggctggggaagattgtcgttgtctgcaactatgttgattcatcaaatacgtatgaattgctcttttacccaagatatcaccttgatcaaagctcattactctgtcgaaaaccattgcttgctaaaccaatggtgatggatgtgtaccaagattatatgctgcttacat

SEQ ID NO: 47372 - DNA, 714 bp, Glycine max
  Clone ID: PAT_MRT3847_142783C.1
gtgaaggctgagtccctctggagagaagggtataggctccatgattccatgcttcctttgtttatctcaccttcgcttgcacagaggatattgaggaccgggaaatccattaattttcttcgcgtttgttgtgaggatcatggttgggctgatgctgcgaccgaggttgttgctgatcatggagcaacggcgagaagaggtggttttggatatggagaaacggatacccttgagtttttggtggatgaagcttcaaagaggattgataagcatttgttggatgtgattttcaagaggtacaagttcaaagaacactgtcttgcaattaagcagtatttgttgcttgggcaaggtgattttgtgcagtatctgatggatatcgttgggcctgaactttctgagccggctaacactataagctcttttaaactttcgggattgctggaaactgcaattcgggcatctaatgctcagtatgatgatcctgaaattttggataggctcagggttaaaatgatgccacatgaaagcggtgataggggctgggatgtattttcactagaatacgatgctagagttccacttgatacggtgttcacggaatctgtgatggcaaggtatttaagaatttttaattttctgtggaagcttagacgagtggaacatgcgcttactggagcctggaagaccatgaagccaaactgcattacctct

SEQ ID NO: 47373 - DNA, 487 bp, Glycine max
  Clone ID: PAT_MRT3847_142784C.1
aggaaggtttcccgtcatcactgtatgacgtcctccttctttgggggggggggacgggagaggacgcgcgggccaaagaccaagccaaaacaaatatggacggataaagtgcgagagagcgagcaaaccaaccgtgacaccacggttattggagtttccgggcggggatagtgagagaggtttggaaacgcaagggatgcgatagattgcccggcagcgccgtgggtgagaatgcttgtggttcaccctaagacaaaattgtgtgaggggtgtagtcctaattatgtcagcggggacgtggggagaaatattaggcttcaagcctgcgtataggagaccatgtataaaggaaggaaacggcataacagtggtcacaacattgcgataggggcgcaaattaagagaagaacagacaaaaattaaaggagtcacccgaggtgactaagattggtggggcgataaaaaaagacaaaagaaaaaacgatgg

SEQ ID NO: 47374 - DNA, 271 bp, Glycine max
  Clone ID: PAT_MRT3847_142785C.1
cccacgcgtccgttcaatagtttgaaattctcaatctgatcagttttttccggactggtgaccattgtagtaaactttcttacagaaaatactacattctcgtaggctatggcagctatgttaatgtacacgatcttatattatacagtaaccagtattgtacgacaatattcacaacgaatgaaccgagattatcgctgagacctacaatatctacatgaccagtgacatgctgaaagtgctcgttgacattattatctagatcatagac

SEQ ID NO: 47375 - DNA, 466 bp, Glycine max
  Clone ID: PAT_MRT3847_142786C.1
aaaaggggaaaaatccagtccattggattttttttcctaaccggaaaggaaaaaataaaagggggaaaaagatttttttatgggaaattcccccgggccctttttccggggaaagggatggaaccccaaaaaacttttcccatacccccacaaattttaccccaaaccccccaatttttgggcggggtcttttttatatatcccccttttatgaaaaaatctcacccaaaaaacccttttcccatttaagggaccaaacaaaatttcaaataaaccaccccccaaaaaagattcaaatcaaccaaggcccagggggtccataaaacctataatatacccatatttctcttataggggaacttatgcccccccccccaacctttgacctcggaggaaatttctgaaaaggcactcataatccccctggaacatcactggccttcacaaatctccctctaaccctttt

SEQ ID NO: 47376 - DNA, 518 bp, Glycine max
  Clone ID: PAT_MRT3847_142787C.1
gattcagcaattaaaagtacgcaacgtcggacgaacctcgatcatgatctgggactcgtccaactttcaaaccgcggattacattggtcaattgggccaggcatgcaccaccagagctacataataccacgatccttacatacataagtcgaggacttatacggctaaaaacaagggaagagcattataaattgttttaatgacacttggccaataatcacaaacattgggtggagattggatgattgtgttgatagcaaattgactcagcctgagccgtttgattgaatctgtgggagtatgagtggaacggccctgatgtaccatctgcagcgtcagtgctgtgagagcttgtccgatgaatgcagccacccagaagatccagcggtaagtgccacactaagcactggttgtagatgagaccttgaccaatagtccaagctgggtcgttcccattatgagaggtggggctgggagtacagcttctccatagaaaaggtaaccaaaatgcaagggtt

SEQ ID NO: 47377 - DNA, 1014 bp, Glycine max
  Clone ID: PAT_MRT3847_142788C.1
gccgaaaacaagtttcccctttttttttggtttctcatttgtttgaagagtacaacgctaaacagaacacacaaaataaaatcaagagggaaactaaaccaaaaactaatttaagtttcatgaaaaatggagaaaacaagcacaaccttgagaagccaataacccttattaatactgatatttggtcaacttcatcagaagaccaatatctcaaactgttccactctcccaccacaacccaacacaaaaccacaagtagatccgaacctgaaccgctttgtcgactctctctctctctcagtacctgtagtgaggaggcttgtatggtccctcaattggaatgctgacgtagtcagattggtcctttgacagctttgtaagcctggctccaagcttgcccaagtgaagtaatgcaaccttctcatccaaatgcttgggaagaacgtacaccttcttctcgtactttccgcttgctttctcgttccagagctcgagctgggcaatcacctggttggtgaaagagcaagacatcacgaaacttgggtgaccagtggcacaacccaagttcatcagacgaccctcagccaagacaatgattccagccttggtctctgggaacacccacctgtcagtctgtggcttgatggtgatacgcttcacaccagggtaagtctcaagtccaagcatgtcaatctcattgtcaaagtgaccaatgttgcacacaatagcgttgttcttcatcttcctcatgtggtcgaccatgatgatgtctttgttaccggtggtggtgacaaagatatcagcttctgagacaacatcctcaagggtaagaacctgaagtccttccatcaaagcttgaagggcacagatgggatcaatctcagtcacaatgactctagcaccagcagtcttcatggcagcagcacaacccttaccaacatcaccatatccacagataacagcaacctttccagcgatcatgacatcagtggccctcatgagaccatcagggag

SEQ ID NO: 47378 - DNA, 699 bp, Glycine max
  Clone ID: PAT_MRT3847_142789C.1
ccacgcgtccgcgcatgtatgtttctagtgtctgagtatatgtttatatcatgcatgctggttccattacgtcaatgtgaaacaatcagctttcttcatttatttatttcactgttgtaggttaccagactacatgtatgcgagtgatgtaaccctttacaagtagtagtagcagtattgttttaatgtgaagaagggtgagagaaagaaaaaaaaataatgtttcttttcacaacaaccatctgttgctgttggttgccagtgatttggacttgaaagcgcccatcttttcatgtccatttgacattgatagttgatacatcacttggctagttgatgtcttcttcttttgactctctctttctctctgctacctcctcctctccctcctgtttcttcatcgttgtcaagcactgtgtttaagtcttacttaaaagtttaaacttattactcattcaccactcacacagaaagagagcaactcatagatacaagaaatggggtctctggttgctgaaacagccatgaagaaaccaatgtggttgtatccaaaggttttgggttttaatccttctgaaagatggggacactctgcttgcttctctggggggcttatgtatgtctttgggggctgttgtggggggctacatttcggagatgttctgtggttggaccttgaaaaaatggattggagcaagc

SEQ ID NO: 47379 - DNA, 387 bp, Glycine max
  Clone ID: PAT_MRT3847_14278C.1
cccggtcaatgcttatctctagtatcagtgctttagtaattggaacattcgatcatcaatttaatatgaaagatggttttaaagcttctttggatggatttaatcacacaatgctacaccagtctcatatttcaaataatgctaagacgttgattgagcagggtggtatgatgagtatcactcaaatctttgtaactatattttgtggttatgcttttgctggtattgttgaaaaggcagctggagttgcttcaatagttattattatggtaggcgtacttatgaaagatatgttcgaaaagatgaatgtctcaaagtcagtgttatctcgtacacttgaagattcaagtacaatggtattgccactcattccatggggcacatctg

SEQ ID NO: 47380 - DNA, 354 bp, Glycine max
  Clone ID: PAT_MRT3847_142790C.1
ggggaaaagaaccgggccgggtttgcccttatttgaaaatcccccgaccccatggccccccccctcccggttcactgggtagttggaccctaaattcccggtctaaaaattaaaccaaaacccctgttccctagggatttacccccccctgttttaattcccggggatccatgttttttggaaaacgcccctttcacccacttttttttttggggggggaatgccaccttctaaaaaaccaccttggttatcttggggagggggcgctatgatttttgcgggcccccgcaccctacacccgccttggaatatgtgtgttcagccccctgggcccccccttttatttcaaggcca

SEQ ID NO: 47381 - DNA, 383 bp, Glycine max
  Clone ID: PAT_MRT3847_142791C.1
cggctcgagctgatcctcgctagttcacactagccacaaaagcttcaacccagctgatgacttaaaccttcgacgtccaacctacacggagttccaactatcccaacacgcttcctattccctcgtttgagccacaccgtccggtccctctacccatcatgcctcacggcacgggtcttgtggacggcgcaagtttacgatctctgtctagcttccgggcgttcagagatcgagcggtgtcggtgagaggtacctgggtcggcgtctatcgatgaagttggcggggagagcggtcgtcttcggttcttggttacctccgggtaccgccgtcgattcgcaccctcttcccgtgggcgtttcgaagcgagtctgatgggtccctt

SEQ ID NO: 47382 - DNA, 111 bp, Glycine max
  Clone ID: PAT_MRT3847_142792C.1
gcatataatttctctcttttcagcaggttgagctacaagtgtgctgacaattgtcacactcttttactacaattaccttataccatgcctctcatgcctggcaactaattt

SEQ ID NO: 47383 - DNA, 612 bp, Glycine max
  Clone ID: PAT_MRT3847_142793C.1
aacgaaaaagacttgaagccttgaaattcccaatgcagtgaacccagcaccagcactttaacgatgaattattggatatcccgaaattacattagactcttttaagtctaaccaactactcctagtaaattttacgacccataatcaaaaagtctttatatagtgcgtgaaacaattggaagaaaccacacacagtctcagtataaaagggcaaaataataataataataataataacacgcgtgtcacataatgccccttggattctcgcatcagattccgtgtattcgagaatataaatcacacacacaccctcttcaagaaatcatcaaaagttaacataacaattagtatcaactgagaaatttcaagtgacatagaaaataaactcaactatattttctgcaggttgttgttgcacatttaaacgacacataactgaaactccatagaaatattctttattatattgtgggagttaaaaatgtggcacgcgcgttacttgaatcgatttttctattagcattcgttaatcagagtaattaattccactaatctaatcgaacgagagagaaattaaaggtaaacacacacgtacaagcagaaataaac

SEQ ID NO: 47384 - DNA, 166 bp, Glycine max
  unsure (1)..(166): unsure at all n locations
  Clone ID: PAT_MRT3847_142794C.1
aacaattctcattcaagtttcacctttcgccggnaaaagaaaaactcntcgcaacgtttagntcagtttncgatggcgncaacgctgaagctgcnccgccgtcggaactntcnccgtgtctcctcctccgtngaccggnnccggcagctttccccagnggaantcc

SEQ ID NO: 47385 - DNA, 1999 bp, Glycine max
  Clone ID: PAT_MRT3847_142795C.1
cagcagtagtctggggtctgggaggtgaaggagagagaatggatcctttgtcggctctcagagagtttacgatgagaggcgaggtggaaaagatagtgcgtgtgaacgcagagttccgattcggggaggagtacaccttcccatgctgggtggagactgcttaccgttccaccaagggcaaccgttacacccttgaaaccctagtccactacatacaaaaccaccacctcaagcacaccgagtacatccagaacaccttcgccgtcggcatcccctccgtcaccctccccgaccgcaagcccctcctccaatacctccagggcaccctctcctcctccgattccatcgagtaccgcccccacgacgacccttcttccttcccagcccccaaatccacccccaaccccccttccctgccccctgaggacctcaatttggacttcatctccatgatcaggtccgccgagaagcccttgaaggaccgccagtccttgctggagtgcaagaatcgcgacttctacagcgtcctcgtctccgccaccaagcgcgaagaggagcgccagaggatggaatctcaccagaggaaggacggcctcgttgccaagagtcgcctcatgggctccgacgaccggggtttagggttctccgacgacatgggcggctatgaccctactcccaagcccaagatgcacctcaagggcaccaaaattggggaaggtgtccccattatcttggtccccagtgcctttcagaccctcattactatctacaatgtcaaggagttcttggaggatggtgtttatatacccactgatgttaaggtcaagcagatgaaaggtgccaggcccgattgtgttaccgtccagaagaagctcagtagggatagggttgtaaccgcttatgaagtcagggataagccttctactcttaaacccgacgattgggatcgggttgttgctgtttttgtgctcggcaaggagtggcagtttaaggattggcctttcaaggaccatgttgaaattttcaacaaaattattggatttttcatgcgttttgaagatgatagtttggagtcatgcaagactgtcaagcagtggaatgtcaagattatctcgattagtaagaacaagcgacatcaagacagggctgcagcattggacgtctgggagagactagaagactttgtacgcgcacgatcacattcttgattttgtaccatatttacagatcatgtacgtacataattttttgatttcgagaactccttagggccacaatgttgcactttttgctgtcttcatgttttatcggatgatatgagataaatgtttaagattatatgctccgtgtaatggatgggaatgtttacacctgctttgagctttcaagctacatatgtcaagtttatgcccaagttcttgtccatataaagattaatttctgtgcaacgtttggaacatttagctttactagtacttctatttttcatcaggaattgctgaatttagaggttgagttgactcagagttctagataaaaaaaaccacttccagctccaggacctgcggcttttgggccatctctttctccatctgctccatctcttagtcctgaagcttcctctgtacttccttcaccttctttggcaccactgtctgacataacccctcctcttttgactccatcatctgcaaccacgggaagtggtcgttctgatctgactccatcttctgccatgccatcttaccgttttctaccttcagttgtgttgattgcgttaggatttgctgttcttaaacactattaggttgccgtgccttccacaattccacatccttaatttgtggatgcgcatgtacctaataggtttgcaatatgtatggttgttgcgttaggttttgctgagcttgtttcagacccacattgggggagtattatttgagttgtaatgtatatgagtgcatggaaaacaaattacttttattttatcaatctggtt

SEQ ID NO: 47386 - DNA, 392 bp, Glycine max
  unsure (1)..(392): unsure at all n locations
  Clone ID: PAT_MRT3847_142796C.1
aagactacatttttttttttctttgcattctattcattcaggggtcaggtggttttttttggaagcanagaccaaaatacttcaaaattgcccgtacaaagcaaactgctcctaagtcaactgcaggaaaagctcccattaagcatcttacaaccaatgctgcacgtaagtctgcaccaacaactgctgatgtgaataaccctcatcgttatcgtcctgaaactgttgctcttcatgagattatgaaataccagaacagcactgaactcctaatcaagaagctttctttccataagttgaatcctgaaattgcccaggatttcaagactgatctgcgtttacagagccatgctgtgcttgcattgcaagaagcttatgaggcataccttttt

SEQ ID NO: 47387 - DNA, 226 bp, Glycine max
  Clone ID: PAT_MRT3847_142797C.1
attttgttttctatggagcataccacagaccagaagtaacatagagtacacgtgttggggctgggaattatcttaggtgttcatatgcattttgagtcgtctgctggcttattaaccgtaaaactgggagtcttcatgtgggagaactctatggatgggttaatgtgcttatgtttacgtctaataagaagcctttggcgagcatgtggagtccactgccgtgatt

SEQ ID NO: 47388 - DNA, 415 bp, Glycine max
  Clone ID: PAT_MRT3847_142798C.1
atcacatctactgctctctgagaacaataccatacactcctaactctctctccgttgacttatcttctcacacctccatggcccacacttgcattacatacgcagatgccggcatggacgctgaccaacgccgactcatgttcgaagacaagttcactgctgtccttattcattcggtgatgaatatacttatttggtgcctgattcattatctgccattgtaattcgcgtcacctgcggttgtgaggattcatagatcgattgatcgatcgatctgcgagacgggtgtagagactggaaatgcggatctgcgtgataagttgggctgatcatttttcggtcaactaattcattgatgatcatcatatcaaaattgactgtcgtcggattgcaatggcatgtgaagcctcgattc

SEQ ID NO: 47389 - DNA, 696 bp, Glycine max
  Clone ID: PAT_MRT3847_142799C.1
aagtgatgttaattacagcatttgaaggggaggagctaattccacacaaaatggaagactctataatgtacccattaaactgctaaaaaatagtggtgaggctacaagaggagtcagttgagatccctagtgttgtcagggtgtgaccacaatcaccgcccagctcagagccggagaacccggaagctatttcatactctggtgcaatggcgaaagaaggaattaaaaaaaaaaaagaagaagaagaaagaaaaccacaccacaacacaaggaagaattaagtcctgaatgactggctccatcacgcccaccctctccaccctaaaatggcacaaaagaaatagctaaccacaccctaaagactacttttggtgtaaaacaggttaagtgatgggctaggatgggaacagggcacgatgggaacagggtgtgaggatcagtctaaaaacatccctttcacgcaggtgtgtacatgcttccgagcagataggatctggacaccagggttcgatgctcgggaagtcacaatttcatctggggactggatacagatttacaaaggacccacatgttcccagctttccacttgtagcctggcatctctacaggggctcctccccaacccacgcctacagttaaaaaggaccctttctggaatggggtttctgctgtacctctgaaatggtaaacacctta

SEQ ID NO: 47390 - DNA, 448 bp, Glycine max
  Clone ID: PAT_MRT3847_14279C.1
ggaaaaaaaaccccacggggttggttttttggagggcccaaaattttgcctttaatctcttggttcaaaaaaatccccctcaaacaaagtggggggaaaccccccttttgggggccccccccccaaaaataaaaggcgggctttaaattaactctggggtcccaaaaaattttttttttcccccccggaaagaatcccctttttttttaaaaaaatgggaggggcttttcccttgaaaacccctggctgttcccccaaacaaaaattaccgggtcgccacctggaggggcacaaaaaaaaataggggggggcttcaccccaaacgggggagaagtttttccttcatgtttgggggacataacgctaaaaacctttccttttacattttccccaaatatttttgggcccaaagcctggatccctttttttggagggcccattttttttt

SEQ ID NO: 47391 - DNA, 452 bp, Glycine max
  Clone ID: PAT_MRT3847_1427C.1
cttggatttaaatgaaataagctatgtgtctgaggttctcagcgagcttaatcgccctattgtgtattctctatctcccggaaccagtgtgacaccagccatggccaaggatgtcagtggactagttaacatgtatagaataacaggagatgactgggatttatgggaggacgtcaaggctcattttgatgtaacaagggatttttctacagctaatatgataggaggaaaaggtttaaagggaaattcctggcctgatttggacatgctaccatttggatggctaactgatccaggatcaaatgaaggtccacacaggtttagtaaactcaatctagaagaaaaaaggacacagatgactctgtggtcgatggcgaagtctccccttatgtatggaggggatgtgaggaagaatgatcctagcacatatgatgttataacaaatcctaccc

SEQ ID NO: 47392 - DNA, 289 bp, Glycine max
  Clone ID: PAT_MRT3847_142800C.1
aaaacgacagaactggagagcatccttcacaacaggagcaagctgatcccaacctattctcttatcatgtttcacacttgaacactagcgaggaccattagatacattatgctctggggcggagtgtccaccgattataccgcgcgggagtttgtcaaacaaagcgcttagccaggggagtgggttataaatacgaaagaagaggtcacgccctatgaactcacttgtcttagcaaggcctaccatttttcagagtcccctgctagacttcctatgattcaacactttg

SEQ ID NO: 47393 - DNA, 1058 bp, Glycine max
  Clone ID: PAT_MRT3847_142801C.1
ttatctcgcgaagaaaccagcaaaggcctctctcttctctctttctccttctgcttccttttctttccctgcactccatccaccgccgctcctcctctttatcgattcaacacaacacaagctttctctccctccatccatatatgttatatttatatacagacgcataccacacttcccttaaaataaccataaacaaaagagaactccttcctatttattaatatccagctatatcaacacccaaaaaataaactagtatatattcgtttttttttctttgaataaaaattgaacagtacctctctcttcctttgatgtgtctatggctggtttggatttaagcacggcttcacccttcgtccaaagtctccacagaccagacttcaaccaacaacacgattccggagaagacgccaaacaatcagcagaagatgggccacatcaccagggcgatgtggtggggcggcgcccgcgggggcgtccggcggggtccaagaacaagccgaagccgccggtcatcataacgcgggagagcgccaacacgctccgcgcccacatcctcgaagtcgccaacggctgcgacgtcttcgaaagcgtagccagctacgcacgccgccgccagcgcgggatctgtattctcagcggcagcggaacggttacgaatgtgagcctccggcagccggcgtcggcgggggcggtggtcacgcttcacggcaggttcgagatactgtccctgacgggatcgttccttcctccgccggcgccgccgggggcgacgagtctcagcatatacctcgccggaggacaggggcaggtggtgggtgggagtgtggtcggagagtttgatcgctgcgggaccggtgattgtgatggcggcgtcgttcacgaacgtggcctatgaaaaggttaccgttggaggaagaagagaacaggttgagatatcttggtgttgctggtaataatagtaacccctttcctgatccttcttcgggacttcctttcttcaatttgccaatgaatgttcagttgccctgtggatgcctgggccgggaaac

SEQ ID NO: 47394 - DNA, 265 bp, Glycine max
  Clone ID: PAT_MRT3847_142802C.1
agaaacagtaagtccacgcaatacatattttaagcgctgtatcaccaagtttggaaggcttttggggtacccggtgagacacagtggattcattagatctccatggatatggagctctgttctgtagccatcatctctctttttcgttttcattattggcttactaatgtgccctgtagttgatttctgatatccacaggagaagatatgaatgtgaagcacatcgtgttgtggttcggaaacctctgactctgtctgttgccat

SEQ ID NO: 47395 - DNA, 521 bp, Glycine max
  Clone ID: PAT_MRT3847_142803C.1
ttcgtgcgcttgtttacagaaatggcggtcggttcgacttgttcttcttcggttttctttcttccttttctttcagatctcgtgagaacctcggaagagtcgtctccattggatcactctaactttacgacctgtcgcagccgattctcgcgcgagttctacccccatgggtggcactgagagcttgctcgagtatgagaaagctgcttctatcttgagtgcatgatcctcctattgtttggctaaagagatgccatgaggagaaacaaagaccttgctacaatatgatgttagggattcccacaattaatttctgagaaatgggggaaagaatgtcggaatacaaaggtccccggaacagatgggtcgttacttttgagaaacaagtggcctgcttaactgaaattaaatctgctgatgaagctactgcttttttgggaaaataagtgcttcgtggagttccccgaattttctgagaggagttgacacttttctgccttagcagagaagttgcgttctga

SEQ ID NO: 47396 - DNA, 2084 bp, Glycine max
  Clone ID: PAT_MRT3847_142804C.1
ccatacggctgcgagaagacgacagaaggggaactcaagtcattagcattcttctttgactttttggtctaaaaccggtttctcttgtcacaccaaatggaccgacccgccgccatattttccgacaccgtcaacctcaacggcacggtgacgcagctgtctctgctcgccgacgggaggctgtggtggccggagggcggtcaacgcaatttgagcatcgagaaagaggttctcgggttcaccggcgacggtcccgatataaggctcaaaacaatcgtggaaaccgaagatggatgctgtggcggtgcaagcagagcaaaactagtccgaaacgacgtcgtttttcggccatcgtccgaggaaacgcataggctctggtgccagaagcttggcgaattcatcgattctctcggacgacccaagaggctttttgtttttgttaatccattcggggggacgaaatctgctgtcattgtttttcgtgatcaagtcaagcctctgcttgaagacgcacaagtgcagcttacagtccaagaaactaagcatcagctccacgcaaagcaagttgttcagtcattagatttttcaaagtacgatgggattgtttgtgttagtggagatgggatcttggtcgagtaggttgtaaatggactgcttcagaggcaggactgggacactgcaattaagatgccccttggagtagttcctgcaggtacgggaaatggcatggcaaagtctcttcttgattcagttggtgatccttgtacagtacccaatgctgttcttgccatcatacgaggccgtaagcgaaaacttgatgtggccaccatcacacaaggggagaccagatttttcagtgtgttgatgcttgcatggggtctggttgctgatattgatatcgagtctgaaaagtataggtggatgggaagtgctcgtattgatttttatgctctcactcgaatcttgcatttgaggcattacattggatgtctttattttgtgcctgcacctggatttgaagcttacggggaccccactagttaccctggaagttctaataacaaaggcagcaatagtgaactaattgatgaggaacctttgaagttacaaaggctaggctatcaaggacctgaaattgacctggagaatcagagttggagagttttaaatggaccatttatttctgtctggcttcacaatgtggcttggggtgctgaaaacaccaaggcagcaccagatgcaaagttctcagatggttatctggacttgatcattacgaagaattgcccaaagttaccattgctgtcgttgatgtcagatttgaataatggaggtcatgtaaaatcaccatatgtcatgtatttaaaggtgaaagttttggtcttggaacctggtccacgcttgggggaccaagagaaggaagggatcatagatgcagatggtgaggttctggcaagggggaaagggtcgtaccaatgtgagcagaaggctttgatggcctatgataaacttcaaataacagtagatcaaggtttagctactattttttctccaatataaaaaccttgatttttataacaaaaaagaaaaaaaaaacaaaagaaagaataatcttggtttaataattttggaaaaaagcaactatcagtgcaaccttatttcagcctggagagaaagagatgttagagaggagaaatgtaaatataataaattgtaaatgatataagagatgttcatataacattgtttgataataaacaaaaaaaaaaatccgtggtcgctcactttgacatcttatcctccgttcactagacgcacatgcagctcatgagcgtgactggtttgacccgctaaagcgtcgctagtcgcttgcagaagtccggtcttcacctcaagcgcatgcaggggatatccgccaccggtcctgacggcgcctccggtgcagtcgccgaccccgccaccgaccacttgttcgccagctcgccggtgccggcgcatttcttgcacccggccgcgaggcggaattcggatcatttcctgccgttcgtgccggcgctcctccaccaccaacagcagcagcagat

SEQ ID NO: 47397 - DNA, 410 bp, Glycine max
  Clone ID: PAT_MRT3847_142805C.1
gcacggtacgaaagtacatccgaaccatctaatgacaaaaatattaactatttcaaaaccatctcatctaatgattcaaatttacttttgtactatctaagaaatctttcactttttgtaaaatttattttgttttactatataatcttgcatacttgaaaaatcacattcttgaagatattattttgtttaggaatattattcacatagacatgttttgttggtatttaataattgcgaaaaattaaaatttatttaattaaaaaattaaaaaaagtaaaaaaaaaaatatagtagaatatagtaaaaataggtagctattgtagaaaataacttgtattctcatgagaatattatatactcatccttattcatgagtagagcttgtttgaaacatgaagatataacat

SEQ ID NO: 47398 - DNA, 266 bp, Glycine max
  Clone ID: PAT_MRT3847_142806C.1
cacagtcaaaaaaaaaaaaaaaattagctctacagatagcatttttccacaggaggaccctcgggaagggtcaattttatgttactttttcagtccattttactagggaaagtagtaaagtttaatacaaataatcaagttttgcttttttcattgttagatataatatcattgtatgataaattcgaattctgaggtttatactgtacttggccgttgcaattcaggaatgtaattctgataatcggattttcatggccctaaaa

SEQ ID NO: 47399 - DNA, 282 bp, Glycine max
  Clone ID: PAT_MRT3847_142807C.1
gctcaatgatcagtctaatcctactcttcagccatggccggcactggctgatccgcgctgtcgagtctcagactagcgtgaaatgcgccatattcttcatctatgtccagagaattgcgatcgtaaccgactctcacacgctactgggcttggctcacaagctagtcagaatgaagtatggcacaggcacgtacattgattttgatgactaccactagctctctgggcggtgctcttaccgtgcgtgctggctgcatcgtgtcacagcgcgggacgatgcac

SEQ ID NO: 47400 - DNA, 611 bp, Glycine max
  Clone ID: PAT_MRT3847_142808C.1
gaaacactttccggacgcgtgggcggacgcgtgggcggacgcgtgggtgttgctggaaaagaaagaaaaaaacaattttagtgtagcggtgtgtgtttggtgcaatgactttgaggtttgaatcagtagtgtgggctttaaaccctaagctaagtcaccaccgtttctccatccccaatcttcgtcggaatccccactctctattcgcacctcctcctcctcctcgcattcgcacttccttcctcgcattcgaagaaggaggaggaggagaaatcgaaccggagaaaaacgaaaacaacaacgataaccgtaccggtgccgaagaatcgtggaagcaagctctggacacgttccgagaacaggcctcgaagattcgagatgcttctcaagaagcgtacgagctgtactccgagaaggcgattgcggtgttgaaggacgccacggaggagctgagagtggccgccaaggaaatcggcgacgaaggcaaacagtatctcaccgtagttgccgagaattcgccggaggtcaaggaagtcgttgaatcattcacctcttcaagtcgtgacccccgcgagatttctcaattgcgcgatttcttcgtccgtgtacct

SEQ ID NO: 47401 - DNA, 729 bp, Glycine max
  Clone ID: PAT_MRT3847_142809C.1
aagctcggaattcggctcgaaaaaaaatcgtgctggtgttgccaagtttgttgataacaccactttatttttggtaccaccttctgatttcttgaccaaggttttgaaagtcacaggacctgaacgcttatatggtgtggttcttaaatttccattagttccaagtagcacatctatgcaacaaccaatgcatttgccttctccctctactcagtatatgcaacggattcctccttcacaagctgaatatggttcaatattggtaaaggaggaacaggttttaccaatggattataacagattgttgcatgaggattctaagcatctgccaaaaccacttcatccagctacaaatgtccccccttcagctcattctgttccttctgattatgctcctacttatactgcttctgcatcccaagctgttacatggacacctgaacttattgcaagtttaacttctttactccctgcaacaacgcaatcatcaaccacgggtggcccaatggcagtggctggtccctctattgtgaagccatcttttccttctgttgcacctaatgatggaaatcaatctcatttgtggaaacaagctcagcaaatccctgatccttctagtcatcctcctcaacaatttgggagtattcataatgttcaatatcaaccttatccacctgcatcttctactgaccaccctgctcaagtggtctctggcagttcttgttttca

SEQ ID NO: 47402 - DNA, 246 bp, Glycine max
  Clone ID: PAT_MRT3847_14280C.1
ttcatcctcaaataagccacatgtacccttctgacaaagctgtgtaaagtattagaatctgatgctgtagaaagatcctagttgcctttgtgtatatttactgcctgcttgtgtgtttctatgtgtgggttttccctgtatcttgtagaaatgttggggtgttttcctctgccatatggctcgtggcctgcgagcgaactatttcaagtgtagtttaccttcatttttgatgaggtgatttaaatt

SEQ ID NO: 47403 - DNA, 507 bp, Glycine max
  Clone ID: PAT_MRT3847_142810C.1
atcacacgcacgggagggccggggaggacattgaggaatgatcagggtacatcggcaagggcgatgacatcatacgagcgggtagcgaggacgacacatggtttaatgacactcttagcacttgatttgctgaactgggtggtgaataacaactttgaggaacggacaaagaaaagggaggaactgtggctcatgtcccacaaagccaggtgcggtgacggaatatatattccaaagctagagcctgagagaagcgcctctatcctagagagggacaggagcaaagagcttatgcatcgcactgaggagatatgcgcatcaatgaatgaggcatggggatacactgaattgctgcaggaaatccgcaaatactatatgaggcttgtggacaaggatgaatagaaggagctcgctgtggctggaaaagcaccatatattgcagagacagctcagagaaagctatacacaggtgtgaatgctcatgcaagtgagctacaaagatatctt

SEQ ID NO: 47404 - DNA, 291 bp, Glycine max
  Clone ID: PAT_MRT3847_142811C.1
aaaaggaaacccccattatgggccccataaaaagatttacaatgttttccaaaaaaaatggccccaaaaaaaactgttttaaaaaaattttttggggaaaacacccttaaaaacggggttcttaattaccggccaaagggggggcccccccaaatccctttttgaaaatgttccaagctagcccccccctgggggggtgctgtttgacctattttgttcccacccaccactggtggagggttctggtggtgcacattttaaatggaaaaaatgccccccaaaccattggtg

SEQ ID NO: 47405 - DNA, 429 bp, Glycine max
  Clone ID: PAT_MRT3847_142812C.1
cccactctttcttttttagggggggggggaaaaaaaaaaaaaaacaaaacttttaaaaaacaaaaaaacctaaccttaaaaaaaaaaccaaacttaacacccccatcctatcccaaaaataccatcttttatattccctccttaccaccataaacttcctatccaaatacccctaaattcaatcccttaaccctttttttaccccacctaaaccctttaaacccctcccttccttaccctatttgccttttaacaaacccccccttacccaacttccttcctaaccaataccccccctcttttcccattttccaacaacccaacatccctaatttaaacttcctccctccctatatccccccctttttcccccttactttttccttttcttaccccccaattctttcactttctatcgttttattcccc

SEQ ID NO: 47406 - DNA, 233 bp, Glycine max
  unsure (1)..(233): unsure at all n locations
  Clone ID: PAT_MRT3847_142813C.1
gcagggggctctaaattctactctnagccgcagatctctcagggctggcatcttctcagggaaggtgggaagatgtacacattaagggagaaaatccacaaggataaggatgctgaaccaactgagtttgaagaggcagttggacaggcattgtttgatctggaaaataccaaccaggagcttaaaagtgatctgaaagatttatacataaactcagctgtgcaagttgatgt

SEQ ID NO: 47407 - DNA, 364 bp, Glycine max
  Clone ID: PAT_MRT3847_142814C.1
ttgacgcgtggggtgagattggcggatctcagaaatgtcagatttttctctgaaggagaacgattacagggcgaaattgtgaggagcagagccgagcgttacgaggagatggttgagttcattgagaaagttgcaaagactgtgtaaggtgaggagttggcagtagaggagaggaatataatatatgttgcttacaagagcctgatggatgcgatgcgggctttgtgggggatcatctactacatcaaggttatcgagtaatgagggttcggtggagacaacagtgggcgttctcagggagcccaggtgcgaatttgatctataagacctgttcagaaaggtaagaacataggacacgaacttt

SEQ ID NO: 47408 - DNA, 583 bp, Glycine max
  unsure (1)..(583): unsure at all n locations
  Clone ID: PAT_MRT3847_142815C.1
ctgcgagaagacgacagaagggggagcggaggagataccagtgggcactccgaggcaacttcacactccttttaatctttcatcctatctttgtattgttgaaccctccattctctgcaacattcttcgattcaattgctcttgtgaaattcctcctttattagcggctaaaccctaaatcagaactttggtgtggtgtgttgacttaattgagtgtagaaatagaataatggtgaaagcacatacacaggaacacgtctacaagcacccttgggaacgtgtaacttgtgcatcttggcgcaagtttgctgaccaagagaacaaacgcatattatcccatattcttgatgttgacacattgaaccacagccttgacccttcatcagggaagctttacacgacccgtgctatcacgatccattgtcctgggccatggtttgtccgcaagattgttggtcaggatatttgccactgtgtggaatccactgtggtggatgcacggtcgcgctccatgcaactaacctcccgnaatatcagcctccagaagttcattgaagtggaagagaagatccgatatgatcct

SEQ ID NO: 47409 - DNA, 236 bp, Glycine max
  Clone ID: PAT_MRT3847_142816C.1
aaattcataaaattatgatagctggggtagtttgggtctatggtgtcctagaggaagaactttccatcgtcttttcagttcctcattcctcaactcaccacaacacaacacccccaccctttattttctgtttgttcaaaactagcttcttttcaattcactcccaatttttcaccatattaatcttactatatttaatatttctttctttttcttcaatttctgagtttttttgc

SEQ ID NO: 47410 - DNA, 154 bp, Glycine max
  Clone ID: PAT_MRT3847_142817C.1
acgagaacatttaattttatattaaggtctgttttaattcttttttagcctaagatatggataaccaacaatgtgcactctcatgtccccctaacatccataaagaagctcccatcttctgcatcttgcacccacatgtaatatatctttatca

SEQ ID NO: 47411 - DNA, 521 bp, Glycine max
  Clone ID: PAT_MRT3847_142818C.1
aaaagggggaaaaaacaaaaaaaattcctattcccaggggggggggggcaaggggaaggcaaaaaactggggggggggaccaaaaccccccccaaaaaaaaaacgggggggggaaccctcccgggaaaaaatggggccgccctaaaaaaaaatttttttgggaaccccccaaagaaaacttggccaagctagcttttaaaaaaaaaaaggggttgggcaactttggaagaccttccaacccttaaaaggaaaaaacccggccgggattcgggaaacaaaaaaaaaaaggcctttttttgggaatttctagcaaaggggccccaaaaccaagccctttaggaagggtcggggaaaaaaagagggtttccttgggaaaaaaaaaaccatcggccaaaaagggggaggaaatcccgggggaaaaaccaaaagtggaaaaatttggtgttggggaaaaaaacttttcgggggaaaaagatctcctaacaaaaaaaaaaaaaaaaaatgttagacttggggggggc

SEQ ID NO: 47412 - DNA, 472 bp, Glycine max
  unsure (1)..(472): unsure at all n locations
  Clone ID: PAT_MRT3847_142819C.1
tgccctcaagtacgncgaagagcttcagaagaagaagcattcggatgtcgttgccttccttctgcgagggcgctgctgggaactccgtcaattgaacgtcatccaccgcgcctctcgtccttcccgcctggacaaggctcgccgcctcggatacaaggccaagcagggctatgttatctaccgcgtccgtgtccgccgtggtggccgcaagcgccctgctcctaagggtgccacttacggcaagcccaccaaccagggtatcaaccagctgaagtaccagcgatccctcaaggctaccgccgaggagcgtgtcggccgccgctgcgctaacctccgagtcctcaactnttactggatcaaccaggactctacctacaagtactacgaggtcatcctcgtcgacccccagcacaaggccatccgcatcgacccccgcatcaactggatcgncaaccctgtccaaaagcaccga

SEQ ID NO: 47413 - DNA, 487 bp, Glycine max
  Clone ID: PAT_MRT3847_14281C.1
cttcttgctccgggaggagaatttgcatttgtggcttttggtgaagctgttaatcaaggcataatgtcttcccagttgtcctctttactgtttcttgttgtgggaatttcaatggctctcactccatggctagctgaaagaggtcagctccttgcttcccgttttgagttacacgatgttcgaagtttattacctgtggaaagtgagacagatgatctgcaaaatcatatcattatttgtggatttgggcgagttgggcagatcattgcacaacttctttctgagcaacttattccttttgttgcactagatgtgagaagtgatagagtgacaattggacgttccctggatctccctgtgtactttggagatgctggtagtcgagaggtcctacacaaagttggggctgaaagggcaagtgctgctgcggtaactctagattcccctggagcaaattatagaacagtttgggctctgagcaagcact

SEQ ID NO: 47414 - DNA, 360 bp, Glycine max
  Clone ID: PAT_MRT3847_142820C.1
ctccatcttgttccaagaatagtcgagcacacatctctcaacagaaattcaaactaatgaaaaatctacatattggatttctaattgctctcacaaacttgaaatgttttttctggaaatatacatggatatataattataaattgctatcacaatttaaaatgtagcataaaataaaatgttgaaatatctttaatctttaattttttttatgtagaagctaaaaatttacagatttataatctaggataactcaccaaaatttatagatttattatccatcatgatcacaaacaatgatattatgggtcttcttaatagaaatctttttattttggggatatttataacctctttcgt

SEQ ID NO: 47415 - DNA, 428 bp, Glycine max
  Clone ID: PAT_MRT3847_142821C.1
gaaccatgttttgggatgtttttcatataatcttgagttgagtttactttcttcaaataacctttttaaagaccaatttagtttagtttacagtcctttttttttctaagggattcttgaatcaaaatgaaaaaaaaaaaaaaatcccggaaaaaaggatctgaatgttacaggatgggaatttaacttgaacaatccccctgcaactgcaattgcaattcaacaacttgaatcaaaggaaaacacaagggggggccttcttctttccttttttctgggacttagggggttgcaaaacaaccttgtttgcagaataaaacacggccttcacattttggtgagtttttgagctgccctttatgtacacagcagcaccaattgcctttttaagtttttctccctgggcagaaactatagctgtggttcca

SEQ ID NO: 47416 - DNA, 160 bp, Glycine max
  Clone ID: PAT_MRT3847_142822C.1
cgcgtacgcccgctcggaattcggctcgagcgttgacgtagacaccttaccaacccaagcctcctgaaccccatgcacgacctcacgcaagcaggggcaggctttgcaacggcccaacgccggtgaaaacgacggagatgctggccgtcaccggacggcc

SEQ ID NO: 47417 - DNA, 413 bp, Glycine max
  Clone ID: PAT_MRT3847_142823C.1
caacaattggatgccaaagtgagggaaaagggggctaattttccttaaaaaaaacccgaaagcaaacctttgggggggggggatgggaattttttctttgccatccttcttaaaaagggtttggagggggctgggtaaaaccggataaacctccctcaaaaaccaagggttttaaacgcgcttttgaggggggggggattcccactatttatcaggggggggcctcaaccgaagtgcccgggggcgccctatttttttattttggggggggaggacaaaaagcccctcctccaaaaatcctaaaaaaaaagaaagcaaaacccctgcacaactttttaaaaacattgagggctaaaaaaaaactgccccttaccctttaaaaaaaaaaaaaattcttgggggggaccccccaa

SEQ ID NO: 47418 - DNA, 303 bp, Glycine max
  unsure (1)..(303): unsure at all n locations
  Clone ID: PAT_MRT3847_142824C.1
gaagtagaacccatggatgcagagcgtctgctgctgaccgcgtcgtgggattggggcttaaggtttccgctagtgaaagagatgattgttgaagaatgtgagtgggcgctaggggtggaaataggccaggccagaccaggctttaaaaggcctgagcctagcctacgatgaattttttaggcctgagcctggcctatagcctatcaaaagcttttattttggctcggcctgtaccttttaaaagcctagcctgacctgatagcctttttaaaagcctntttatatttgtttgctttggggtag

SEQ ID NO: 47419 - DNA, 286 bp, Glycine max
  unsure (1)..(286): unsure at all n locations
  Clone ID: PAT_MRT3847_142825C.1
ggcccgggaaagacggcgcccagcccgcagaccccaaccccnggcncaagccccagagggaggcgggcgagcacagncagcgaggccagagcgagcgaaagcanaccgngggcacgcgaagacccccccggggccaaacagagccgccgcgnacccgaccagnggaagggcgacgaacgcaacgagcaccagccgaagccgcggaagaccaagccgagaaggacgggagaccgggacggcaagacaaacacgccgacgggcggaggggagaccacaaccccccggc

SEQ ID NO: 47420 - DNA, 543 bp, Glycine max
  unsure (1)..(543): unsure at all n locations
  Clone ID: PAT_MRT3847_142826C.1
gggagtatacagtcttaactgagtgtgtagagcttgtaagaaagataacaggaatacatactaaccaaagcaagtataagtaactcatcagtttcttgatattaacagattcctcgagccatagttggcgacccaccatggcaccagatactactgccttaagttattggttgaattggaggttcttcctctgtgcactatttattttattaactatgggcctagcgtcatttttgatatggaagtatgaagaattcaataaatcaaggaatgagagaagagaaaggcagcgagaaacggctggatcgctttatgagtatgaagcatggaatacatgtcttaaaggaattcattctgcttggctgcttgcttacaggataatttcttttcttggggcttttttctttgctgactgccaaatgtggttgctgatgngaggtggcatattttatttctacactcagtggacatttactntggtcactatttactttggngcttgggtcttgtgtctccataatgggggtgtcgctataaacacat

SEQ ID NO: 47421 - DNA, 486 bp, Glycine max
  Clone ID: PAT_MRT3847_142827C.1
aattcggctcgagctgcgagaagacgacagaaggggtaccaaagttccctggcccgcaaatgtgattgaattgaaggttttgaaaaacaaggacattgggaaatgggtggattcaactaccccaactgcagcaatagattaattttaagttgttggaataacgctagtagtatagacacattgaccataaaatgataataatacttatggattgacccaccagagtagtctccttcattccccgctcctcacatgtcctatatgcatatttcttaaggcactaaggataaaaagaatgagatgcttattgtataccccaaaaaaagcttatggccatgtggggacaatgatgaacgtgccttaattcacatctttttataggttttaatttaattatatcatacttgaacctaattacatatgggaaccattataaacgaaagcgagctgacgctagttaaaaatttgatacgaatgttcatttta

SEQ ID NO: 47422 - DNA, 1690 bp, Glycine max
  Clone ID: PAT_MRT3847_142828C.1
gggagtatacagtcttaactgagtgtgtagagcttgtaagaaagataacaggaatacatactaaccaaagcaagtataagtaactcatcagtttcttgatattaacagtcggaattcccccgtcgacccacgcgtccgggaaaagcgtgtggtgtcttcttctccggtggatcctcaggcctgtaatttgggattagccactcatgaatcaaaatcaatccattaaatcaaaatacctttctcactgttaactcatcaacaatacctaatttttttggttctttttttcacacttacacatattggctttctcttcctcgtacatataaaaggaagaagcaaagcatctttttcttttttcagtattcacgcctctgcccgcttaattttacttctcaactctctctattcctcgagccatagttggcgacccaccatggcaccagatactactgccttaagttattggttgaattggaggttcttcctctgtgcactatttattttattaactatgggcctagcgtcatttttgatatggaagtatgaagaattcaataaatcaaggaatgagagaagagaaaggcagcgagaaacggctggatcgctttatgagtatgaagcatggaatacatgtcttaaaggaattcatcctgcttggctgcttgcttacaggataatttcttttcttctgcttttttctttgctgactgccaatgtggttgctgatggaggtggcatattttatttctacactcagtggacatttactttggtcactatttactttgggcttgggtcttgtgtctccatatatggatgtcgctataaacacaataaaattgatagcaccactgttaatcgtgctgatttagatactgaagaaggcacttatgtggctcctacacttgatgggactccagaattacctaacctgtacaagaattccaatgccaatcaggagccattcactcggaatactgctggtgtatggggttatatttttcaaataacttttcagacttgtgcaggtgctgtagtgctcactgacgttgtattctggcttgtcctttatccaacatatctgaatactaaagatttccatctgcattttatggatgtttgtttgcactcccttaacgccatattcctcctcggtgatgcatcattgaattgcatgagatttccagtgtttcgatttgcatattttattttgtggacagctatatttgtgatttttcagtggatcattcatgcttgtgtttcattatggtggccttatcctttccttgatctgtcatccccatatgcacccttatggtactttggtgtgggtgtaatgcacattccatgctatggcttctttgctttgataatgaagttgaagcacttgtggttgtcaaaattgtttcctggctcttgtcagtttatacggtgataatacattgaagattagtcatcggagtaaggctatcttcatcgtggctaaagcagattttaactttgaagatcaatttgtaaccccatccctccccccaaagtgtttagaggactatcatttttgtgcgggggtaattgtgatatgtatttgtatttgcaacttcagatggaattcataaaagttctctggtctaaccatgtatatcttccataaaagttaaatcttccataatatcctcatcccttgatt

SEQ ID NO: 47423 - DNA, 483 bp, Glycine max
  Clone ID: PAT_MRT3847_142829C.1
ctcataacacggcctccggctcagatcagcataatagcgatcggttgttagccgccaagagcagtcgcaagagactgaacggaagaacctttccatcgctttagaaaagctccaccacccgcacatacacatgatcatgcgcttcttcacaccggtggttgtgaacgacgaggatgtgcatgtgcttgtccgctactcctacaacgtgaccgagatgatgctcaggatggagaataagcacattgttcacaccatggatcagaacatcgacaatgatgtcgggcgcgcgaccaatatgtaccacgactacctgcgcacgatgaccgagaacagcgacaccttgagtggtctcttccactgaggatgccatcgtgaataccatctagagggctttatcacgagatgggattctcacaagacctgcgagctggaacaactctctggagcacatgcaggtctctaaggtcgtctctgatatctacg

SEQ ID NO: 47424 - DNA, 440 bp, Glycine max
  Clone ID: PAT_MRT3847_14282C.1
cgttcttttcctcctcatctttaccctttacaaacagaaaaaaaaaagcgggcatttactttcagggaaggcattccttcaaatgggtcctgttaataaagcctttaattcaaaagaacctcaccattgcaaagttggttaaacctccacactgttaatgacacggatccataagggtcccagattattttgtaaccaaatttttttggttcccttccaaggccgaccgggcatcccccaatatggaatgccctgaagcttctttctcaacaacaggctttttaagttcgtaaagggtggtggcctcctaagggtccacataaccaaccaccccctgctgacctgatcgcaacccttagacgcgtgggaaaatcccgtgaatatccgaccggcccctggatgccttccagctatcccataagagagcctaattagaactt

SEQ ID NO: 47425 - DNA, 159 bp, Glycine max
  Clone ID: PAT_MRT3847_142830C.1
aaaaaacagctcctataaaatttaggcgtacttatcaaaaaaacgagcctactttcaaaatgtttttttcaccatataacacatacccacactctataatttcttataaaagattaccgacgaaaatgaacacccctcttttcaacaatatccaatttt

SEQ ID NO: 47426 - DNA, 478 bp, Glycine max
  Clone ID: PAT_MRT3847_142831C.1
tgcgaacatttcttataggaagacacacatggccacacgtggagaccaacatattccataagatgcgagacgaatagcgacagtctttggtttgcttatctaatacaaataagcgaactggaaatataagaaatataatctaccacattacagaacgaggcattggtataccgagctgacatacattgtgccatctttattcactgctgaaatcaaatataagcggaagcagagtaacattcaaagacccgggatattttacgaccgcagatacagatgctggactaaacaccagaaaaatactgttttgacagaggaagaaaagatggatgcgatgataaatagaagcattacgagcttgagttattgcgacgcgagctacaggagttgggaaaacatggagctaatgaatggcgtaaggatcaaaataccagcagggacaagttgagatccttctaacgtggagaagcaaccgaaa

SEQ ID NO: 47427 - DNA, 264 bp, Glycine max
  Clone ID: PAT_MRT3847_142832C.1
atcattctcttattctttgcctgttcctaattttctagggtttcctttctaatctcctctttacaatcctattgtattcccccttcgtattttttcgattttatcttcttcttccatctccaatctccatccgatctctcgcgcgttcttcaattttgaattctcggggattcgttttgttttgggtttagggttctattaaacaaaaaaatacaaaaaaaactgttgcaaagggtggattagggttttcccttgtgattcacg

SEQ ID NO: 47428 - DNA, 266 bp, Glycine max
  unsure (1)..(266): unsure at all n locations
  Clone ID: PAT_MRT3847_142833C.1
ccacgcgcanagctaaaaccgcgatctctcgaactcttgaggggcgttccacttcttgtttnangggcgctnccacttcttgttataggcggcttcttnctcgtnggatganctggtngatatnttgaacgtgccagtggccttgntgatagccgactcggcgtggtccaagagccaccggatgggtcttgncgtcgaacttgtggtcgatntcttnggtnanctgnaagatccgggcgacgcaggcgttantctacngcattngt

SEQ ID NO: 47429 - DNA, 462 bp, Glycine max
  Clone ID: PAT_MRT3847_142834C.1
ggaggttgaaaaagaggaaggagcaactgacattttttggaggctttagccgccagtacctttatcttattaacgacattacctttgaatgcacggtagagaccaatttaaattattttaaatagataaatgattatattttactcaaaaaggtgatcaaattgaagtttttaaaaagaagataaagaactaaaacaataatttgatcttaatttaattatattttattacttatttattttgataatttttagcggttagaaattactcattaagggtcaatttgatttactaaaatttaccatgctgaacatgacaaatatttttattccaccgtggatttgaaaatactgaacgcggcattgacagctggaatcacaacctcattgaagctatcataaatctaggcgatgtggaggcaactaagaaggtctcgttttgtgatatagagggtccagatgt

SEQ ID NO: 47430 - DNA, 420 bp, Glycine max
  Clone ID: PAT_MRT3847_142835C.1
gcttttgatcccttggttcgtgctctactagaaaaataataggaattgttaggaccatggagtttcttcatgaaacagttgatgggaagctttgactctgggaaaatgatctgacaaggttagatactatagtgcgaacttaatttattcttcgttttgttcttgatttgtttgaaactattggttaacagatgcttgcttctggtgcaaaaaaaaaatggagtccacagtggcttgattgatcttgaagaagttttgattaatttatatatcgctaatttatttcgaccttatgtttttgccattggttaaccattggagtcttgactcttgacatgtctattatccttcttccctcctatgtgattttaatttgcttatttggccttatgttcttagttattgaccatgaattagtgt

SEQ ID NO: 47431 - DNA, 466 bp, Glycine max
  unsure (1)..(466): unsure at all n locations
  Clone ID: PAT_MRT3847_142836C.1
ctgatctgctgaggccaatcaattccaaatgaatccttgccatttgtttagacctggcttgacaaagcactggatcagttgatctataaaatgcccttactatttgtgaataggatttaatttcgaggacatattcttttgggaaatttggaagacaagaaaggaaggataaaggaaggangatggtgctgcaagccatgaagaattctatttttttttataaaaaattgtattattatttactactacttcagagagctgaaaaactcttccttgggctgacaattaatagtagcgaaaaatcctacgagtatctatttttcttcaaacggccccgttaggttttcgcccttgttttactagagtctgattacttactatcaacagctagagtctgattactatcaagcagctgtttggttatatgcgacaaaacattattacctgcgttgtctaaaattttccg

SEQ ID NO: 47432 - DNA, 215 bp, Glycine max
  Clone ID: PAT_MRT3847_142837C.1
ggagaccacaaacattaagagtaagcgttatgaatcagtccaaagtggagcaattcagcacatagtaatccaacacagaagaggaacacactgttaacaatctcaacagaaattttgtatttggtgacaacttcggcagaagagagatccaactctttctcctccctttcatcgtccgacatggtggcacaactctttagtccttgtgaactctg

SEQ ID NO: 47433 - DNA, 207 bp, Glycine max
  Clone ID: PAT_MRT3847_142838C.1
tgctaatgcacggaagccctaatacttcactcaggtttggatatagcagagtctatcgcctagtgagaagttacatctttcaccacataacccccaacacaaagacagtcaatggggatagatgggcctgtgcttccacagtgtaacgagcataatctgacgtggaccactctattataactaacacacctcattttccacctaacc

SEQ ID NO: 47434 - DNA, 409 bp, Glycine max
  Clone ID: PAT_MRT3847_142839C.1
ggctcgaggataaaacccagcatatccatgtttctaacgtcatgtaacatcaaatcaacgggacacaagatgggtatctcttgaaaaggctctgatcaaatcttggaaaggtatctatatttgcacaacgtacccaataacgaggactttgaccctgatacacgcctcaagaatcatgcattacacaaatatgatagcgtgccagccattcaattgacctttgcctcggggacacacacgcgagtactatatttagacaaaacgactgttaccacatcgatgaacatcgaccctgactgttaaacgatctaggagcgacaccggcgaatcttgaaatgcactccgaggagggcctcataggatgaacaacattcttatctgccacagcccattttatatagccagaaag

SEQ ID NO: 47435 - DNA, 228 bp, Glycine max
  Clone ID: PAT_MRT3847_14283C.1
aataagaaaggcaaaggacaggccaaaccgaataaagaacccaggcccattaactagcgagaccgcgtactacctatgcgagtagaacgcacgcgaaaacggctgaaacactgatgggctttccgaagacccagaaacctttgcctaaaaccttgaactcagatagatccactgcaggcgggccatgctcggagcactgggctgctgcaagccggagtcagctgtcct

SEQ ID NO: 47436 - DNA, 454 bp, Glycine max
  Clone ID: PAT_MRT3847_142840C.1
agaaaccaatatttaacctaacaaatggaccccaaccagggcccccccaaaagggcccaaaagtcccaattctagttaaaatttttacttatttaaaccattcttccaaccccaggttacaaaaaaaaaaaaattttttcaagaaggctttttgtttttacaatttggaaaaaaaaggttaaccttctttctcaaaaacccgccttcctaagggggaattccccaaacaaaaccaaaatttttaaaaggtctaatgcctggcgggcaaggtggtaaaaaagccagcccaacccctaataaaaaccctttcaaaaagtggcacaagggcttggaatataccaggggcgttaacggaggaaataaagcccaagctgtgaattttttttgaaagatttcttgtgttaagaaaaatcttgcttgtgggaaaaaacaagcaaaacagcttgtttaagtt

SEQ ID NO: 47437 - DNA, 244 bp, Glycine max
  Clone ID: PAT_MRT3847_142841C.1
tttaaacacagtcagggatggacatacgatccttctaccatcattccccctaagccatcatatccccctataaacatcgacgttttctcctcacccatattcactttactaatacaatccaccaatttacataaccaataaatacaatgattatgcttattgtaatctcaataatatccctcaatgaatgacatttacactactacataattatatctcatcctttcttttacttgttatttaa

SEQ ID NO: 47438 - DNA, 466 bp, Glycine max
  Clone ID: PAT_MRT3847_142842C.1
tgaggtctactcaatgctaaatgcaaaggggctaatatttgttgctaatcataaaccacggtcacacaaatacacgaacttttatgatcacacaaatcaaatctccactaacacgtaatcagtacttattctatcttaggaattcaattttatcattaattattcacttatttcttctgtcatgagatagctatgatgaatagccaataatattttgtcctgaccttaccaaccaattaacaaatgagagaattgtcttgacaaacttacatgcacacaatttaaaaattcttgtagcaatatcaaatttctctgacgatgataaatgaggatcctgatcaatttttcggtgaaaaatacgtttcaagatgctgttggagaatttgctttgatggatatttccaatttcctgatgtagcttttctagtaaaccaccatatgttatttcaggattatctctaattat

SEQ ID NO: 47439 - DNA, 1021 bp, Glycine max
  Clone ID: PAT_MRT3847_142843C.1
cccttttcagtttataccaaataaatgatgttacaagcttcttttttgcgcttgatctctttcttctttctcatcgcactccctcttggaagaagctctaccaccttgaatgtaccaaaggacataatcaaccaaacatgccaaaaatgtgccaaccaatccatcatcttgagctacaacctatgctccacttctcttccggcggttccggtgagtcactccgcaaatctcgaagggttggcgttggttgcaatggagctagcactagagaatgtcactagcactttggcaatcatagagaagctattagatggcacaagtttggataattctgctttggggtgcttagcagattgcttggaactgtactctgatgcagcatggacaatactgaattccgtaggtgttttcttgtctgggaattatgatgtaactaggatttggatgagttcagttatggaagcagcatcaacatgccaacaaggttttactgagagaggtgaagcttctcctttgacacaggagaattataatctctttcagttgtgtggtattgcactttgcattattcatttggctacacctggagtaccttattctcaattattccacagataaatttggtcgtatacgctgtctttctcatcaataaagtgagagacatcgatttagtatctcaaaatggacaatattagtgagtatagtggaaacgttttgtatcttaatagaaaagggaattaaaggagaaagacggagtagagatgctagtgctagacattagacatagaaattagaatcatctacgttgttttctttgttttagtttttattagagcaaaatcttttctatgaatgaaaggtgtatttatcgtagaaatcctcatcgatctgactatttttctttttaatttagtctatcaaagtttaaatttttaatagtttaactttctattctgatataacaccaagatgcatttggatcttatgttattaactaattatcgtgacaattttattttat

SEQ ID NO: 47440 - DNA, 594 bp, Glycine max
  Clone ID: PAT_MRT3847_142844C.1
gatccatgctttctttttttttttttgttttttgtttatttttatttttttgttgtgtttgttctgttttgttttttgttgcggacaataaaagcaaagtcaaacacttttaaaggggggcggaaccaaaatatcgctccgggggcctaaaaaaaaactagtcttttggagcaggttttattttaaaaccaaaggcacaaacaggagaactttaacaatttagttaaagcccggtccaaggaacaaaaaaattcatgtgtgaaacccttaaacgggaattcagggctaaaaagaaatgctttcagcttggggtttcactgactcaaaaagcccgggggacaggtacctttccccgaagctgggaaaaacgggaacaataagcttcccggaattttctgggctttttgcaatcggaaaagcaacaccaggtgcagctccggaaaaaattcccacaaataggccttttttaaacgcaaaaagctttgcagtttctattgcttcatcacttgatatttgaaaaacttcataaaaaaaattggcttccaagacacccgggataaaaccccccccaatcccttgaattttggggggacc

SEQ ID NO: 47441 - DNA, 656 bp, Glycine max
  unsure (1)..(656): unsure at all n locations
  Clone ID: PAT_MRT3847_142845C.1
tacgtcatccagttcagttgccaatctcaacctcctactgatgcaacccccaactgctggacaaaatgctgttgttgttgagataagctgtagtgctgtacaggtgtggatatttctcattcaacgggatccctccagccaaccaaccatcttcccaaaatttgacctttgacccacatcctattttccattttatcccactcttgaaccaactcccctcctcacatacattactgaccttaaatcccgccagcaaattgaatctctactattccttctagattcatctagacttctccaacttccatatttggaatccaatactttcgcccacaattccccctgatggtggaaaaggttccactgccattttccaagtaaggcactgctgaattttgccaaaccccgcacacccaaaccacctttctcctttgggagacagactgtctcccactntacccaggcaatcttctgctggtctgaatttctcccccacaagaaccaccgttgcaacctctccagcctctcttggtttttcctgtggatatcaatttggtgggtacactatgttttactnttcctgctagtttattatgtatgattattttgcagaatgggtcttaagagacatcttactgctgcagaatagtagagca

SEQ ID NO: 47442 - DNA, 321 bp, Glycine max
  Clone ID: PAT_MRT3847_142846C.1
cttctcaccccttttactgacactccctttgcagtctaaccaccttgttgcattctcaatccatttgccccagctctacccttgcatagagagaggacctatatatcaacattcccgactcgcttgatatggacgatgaagacccttgtcattagctggcgcaaaccagactccatcttctttatttgacacaacaccaccgttgcaatgtacatccaatgagcaattctacgtttatacctgatgattttcttatcacaaaaaatataccctggtccctcagtctcattcccccactcctgccacctcctgtctgtccat

SEQ ID NO: 47443 - DNA, 128 bp, Glycine max
  Clone ID: PAT_MRT3847_142847C.1
tggcactcaggaccttgactgcgtgaggactagctggcatgaggagattcacggcctctcttcagagaacggctagtctcaagcgcgaatcggatacctacaggaggtctctgaccacaatgttgggc

SEQ ID NO: 47444 - DNA, 504 bp, Glycine max
  Clone ID: PAT_MRT3847_142848C.1
ccacgcgtccgcagaaattgccgagtctctattactaatgttgaagtgttaattgttccttctgtaacagtttcttttgcattatttccccttcctggccttcacagtctcctacgatccaatttctgacatacgcatgcagaaaaatcgatgatttccctcgacccatgtaaattctccgcctcaatgacatgcctctactctcacatggcttgcattttccccctgtagtccatgaccaccaactaaggcctctccctactgtacctccctcattcttccctttaagaaaacccattaattttgcgccacattggaaggccttccttaacgggtttccatataaagctactgaaactaccgcatcaaccttttgggtcaccatgctcaagcattatctgaacaaactccctgacaaggcaccggaacccgacaccgacgagttatgccgagccgactcgtcaagcttggacgatctcccacactccggacagagaaacaccc

SEQ ID NO: 47445 - DNA, 537 bp, Glycine max
  Clone ID: PAT_MRT3847_142849C.1
ttcgggagaaaagttgaataattttgaagtgaaagataaataaatgggttttggaggaaggaagagatccttgtgttgtgggttgaggtgagaagggaagggatgtccgatgaggaacctagcgaatcctccttctccacctctctcttctggaaacgacactccttctactctacccgtatgctccttctattcttcttccatcgatatattctccttttacacatgataattaatgaatgaatcaagcttctatccttttattaatgaatggaagcctctcgtttgcgttgtcggcgtcccaaatcacatgacctatgcggatttctgccagttctgtggttccttcattcaacacatgctagagatgcgcatagtctggtatgctactggtatatatgcatattcatgctcacaaatcacaatcgcaatcacatctgcaatattgatgtcttcttctttctttatgttttaattcgctttgacgataagacaccaccgacagcttctacaatggccgccgtttcacttctctag

SEQ ID NO: 47446 - DNA, 330 bp, Glycine max
  unsure (1)..(330): unsure at all n locations
  Clone ID: PAT_MRT3847_14284C.1
cggggtacctaatatngaacacgaatcgtttctctcatctacctttgcacttgcatgacaatatcgcgaactgcgaactgcatctcaagatataacatatatactacatactatatatactatatatgatatcatgtattacattcatgcgtcacaccatacgataatgtttatgtaattacataggtagactggtgtttgaataagggtacgttggtaagttataagttgttcgtcccatatatgtgaagaagcacggtttaggcagattgttgttcctgcgaattctgacgattaccgaggaagagcgataaagcgataagcagcaac

SEQ ID NO: 47447 - DNA, 2823 bp, Glycine max
  unsure (1)..(2823): unsure at all n locations
  Clone ID: PAT_MRT3847_142850C.1
gcggaattccagcaccgacccacgcgtccgctccatatttttttcataaagaggccgattgtaatctgagtttttgaagcaaatccatcgaaatggcagcatcgtcttcttctccttcaaaggagccacaactcaaggacgaggaggatcgggaacaagaggaacaacaccaacagccacagccagtcaaagagtgcgtccacaaaaccaaaactgagcagcatctcggacgccagaatcagttcgttcttcaaaacgacaacggaccctgcccgctcctcgctatcggtccccaggtggcaagaaacaactggaagacattcatcttcatcaacatctgcatctcccaggtctgatgcaaaatccaaagataaatgtatagtgatgtgatgtgaatttcactagcagagtttgtttagaagcttgcactaaaaaatgcgtcgcctagataatttgcccttattacagctctcttacttgctactggaattgatgtaaatataaaatttaggagaatagctgattttgaattcactcgagagtgtgccatatttgatctgctggacattcctttgtatcatggctggattgttgatcctcaggattatgacactgtgaatgcaattggatcaaagtcctataatgcccttatgggagagcttgtctctcttgaaacactaatcatgaatgtccatcatgaaaataatccggaagattgtgttgattttgtggctgcaacaaactgctactcttggagttccttctcccagtctttcaaaagccaggtcgtttgatgattcttctcattctatttctgatcatatgcaaagaaaaggtgatctagaagaagagcagagttgttgagagtcttgaaaatgtccgaggctgaaagtgatcctgttgtaggtcacataaatggaggagaaatttctgtcagtatggatagaaatatgtgtgatgacggaggttataaatacggattctggagataaattaggaaatagcactggtgctggtaacagtaactttcatgagcatggcccagagccttccttatctgatgattgtgctacttctggcaaagaccacaacgaacagatatcttctacttctacactgggagaggcagctaattcatccttaaagactgatgccataaatgaccttcatcaatcaacttatacgggacctgaagaatcttttgacctgaatgatgtgattgagaagaacagccttgatgcattggttcagaatgagagtgaagttatcccttctcctgaaaaacactctgtctctttgtttgagtgccgtgcagatttttctggaggtgatggaaaagtccatgatcaatccactcctacaactatagatcatgaagttgtaggtgaatctcatggacctgatgccacaggattatcattctcatcccctggccatacaaattcagattcatctagtgtcagatatcatcaaactgatgtttctggagcattgacttcaagtgttcaagggagtgagcccatatatgaaggagaggaatgtgtattggatacaagaactggaaattttgaggatcgtgaacctgtttatgaaggtgaggtggtacttgcagaacagtctgacaaaagcaccttagctgctcctgatctaagagctaaggatgaacttactccagaacaaggtgaattgatcaagagtttcttgaggaataatgccagccagttgacattttatggtcttttctgtttacaagatgggcttaaagagcgtgagctgtgtgtttttttccgtaacaatcatttcagcaccatgttcaagtttgagggtgagctctatcttctagccacggaccaaggttacataaatcaacctgatctggtctgggaaaaactgaatgaggtcaatggtgatacattgtttatgaccagtaatttcaaggaattcaaggtagaaaaccatgaaagtagcacttgggatgagaacaatgctctgaccagcactgctgactatcttgccagcatagatagtgcaacacatgcaagcttagatatcaattctgatctgcaattagcaatagccttgcaacaacaagagtttgagcagcagccaccacgccagaataattcacagcagcaatcatccattagtggtagctctagactggtcacaggtccccaggtggcaagaaacactggaagacattcatcttcatcaacatctgcatctcccaagtctgatacaaaatccaaagataaatgtatagtgatgtgaatttcacgagcagagtttgtttagaaccttgcactttaaaatgcgtcgccttgataattgtacctcgttacagcaatcttattcctcatgctttgtatgtgatattaggttaagtttctttttgtaaatattggaagtatatagtgtacaacagtgctaggtcctttttaactgtgaccacaacactcaacccttcccccccgtcacttaatattgtctggactaacaaaatcccaaccattgtatggtgaatgattgtgcagcactttaagtagggagttaaagcccagtctaggtttaccattgccatttcaggggggtgtcctctcgattagaaactgttgccaacttgctagatagatgttaactgaatgggaatgtgcatggcccccatttttaagggaaaaaggttaaattttaaattttggaagtaatacattcttttttcttttcanaccacgtagtatttgcttgtaatgacaatttttagaatgagctagtaatttaacttttaatttgtgattggcaaaaaaaaaaaaaaaagaattttag

SEQ ID NO: 47448 - DNA, 428 bp, Glycine max
  Clone ID: PAT_MRT3847_142851C.1
aaaaaaaaacccattccccttttcccttcctttcccgccaagggggccggaaaaaacccttaaaaggggccccttccccccaaagggggcccgggttggaaaatgggaagcccccccggggtaaaaaattaacccccttcccaaaccacaaaaaaggcccggggtccaaaacactggggaacttgggccccaggggaaaggggttaaagggggctaaccccccaaaaactttacggggaaaaaaccccctctttccaactaggaaatctttgggggggggccccaggtcaagaaccccaaagctttttttggggggaattcccgccaagcctttagccaaggccccccttggtttgggacccttcactcctttgaaaaggggaaaaatttttccctgggggggggggaaaaatttggagggggggaat

SEQ ID NO: 47449 - DNA, 1793 bp, Glycine max
  Clone ID: PAT_MRT3847_142852C.1
gaacgacgggggtgaaaagggactatatataaagaagtacttgagagactaatctgcacacagcaatacaaagtgaagaagcagaagcatattcagagagagaaatggaagcagcatgggtcaatattctgatgctgatactgatactgactctgatatgggcatggaagaagctcaactcattatggctcacgccaaagaggcttgaaaagatcttaagagaacaaggccttcgaggcagtccatacaggtttaaggttggggacacgaaggagacattgaagatgcaaatgcaagccatgtccaaacccatgaatctcttctctaatgacataggaccgcgtgtgtctccctatgatcattacattgtcaacaaacatagcaaaaattcttttatttggaatggacagaaaccaagggtgaccctcacagatcccgagctaatcaaagatgtattcaacaagatttatgactttggaaagcctaatatgggcccaaatatcagatcacttattcctggtcttgcaatgcatgacggagaaaagtggagcatgcatagaaagataatcaaccccgcatttaatttagaaacgtagaagaatatgttaccactattcatccaatgttgcgatgatctgattagcaaatgggaggaaatgctgccttcagatggatcaagtgagattgacgtatggccttatgctaagaatttgactgctgatgttatttctcgaacagcatttgcagaggatcgttgacttcttcgcttgcaagggcagttgctccttcaggacacgtctatacctttgatttccacgaacaaagggctgcatcggctagggctgattttgagaggacaggtctaagcagcttagtcactgttcaagttagggacattcagggtgaaggatttcctgatgacttgactggcatggctgactctgtatttttggatctacctcaaccttggcttgccatccctgcagctgcaaaagtattaagacatgatggcacactgtgctctttctctccttgtattgaacaagtacaacgaacatgtgaaacactccgaacccggttcacagacacaaggacatttgaggtactcttacgcacgtatgaagttcgggaagagaaaatgcaaagcttatgtggggatagcaatggttctgttcctagcaaaaggaaacaatgctctggtggaagctatgtactaggcagcagtccatctacttcttctgtcatggctagaccttgtggtgaagctcgaggacacacgggctatttgacatttgcaagagttaaatcactctcatgaagagtgctatcatatccatcacattcgtgaatctcctttcgatttgagcctcatgcagtaggttgttgtcgtttgttacaatacagcatgcctatgatccataccttgctacaaaaagcaaggcctgcctcttttttgcagattagtaatcattgataaatattttgtggtgcttcatattatttacaaatatttagagggatcaagtttcttaacctgtttgtattgcttcaacaaaatggtaagaggtctctgtcattattgatttattttctgactcccattacgttaagaatttcatgtttggccattgtcttctatagttttatacattatgctgaaagtaaaaaactgaacactttgacattcccttttaagataacattttccattaaagttttgaatttgcagaattaggaatagaggccagaatgttgtgataaaaaaaaaaaaaaagggcgggccgggcgtagta

SEQ ID NO: 47450 - DNA, 488 bp, Glycine max
  Clone ID: PAT_MRT3847_142853C.1
attagggctgaacgtatggaaacatgcaggggggaccacccgctgggggggtccccaacaagacgaccttgaaaaaaacaaaataaaaaaaaaaaagaacccatttttttaaaaaggaaaaacccttccaaaaaaaaaagagccctcgccccgaaatccaagcttaaaaacccgggaaaggaaaacaaaaatttttttatgggggcacccaaaaaaaaataaagggggggggaaaaaaaaacgggggaaaaggaaaaaacctgggggcacccaacaaaagggcccgggggaaaaaacccctaaaagaagggggcggaaaaccaaaaaagccccccccgagcccccttgccaaaaggggcccccccttaatgggaaaagggacccccccggggggggggaaaaaaacccgggggggggggggggtacccacaaggggaccccccccctgggcagggccctaaccccccttccttaagggtttttccctt

SEQ ID NO: 47451 - DNA, 621 bp, Glycine max
  Clone ID: PAT_MRT3847_142854C.1
agggaattgaactagcatcatagccctctcaatattaattcttgttttttttttctttctctaaacggctcacatatagtactaacctgcagcttaattttgcgtcaactaatacgttagttaaggagcatggagggtgaagaaagaaggaagagaaaaatagagaatgaagaagaaaatgaggagcagaagatggaaaagttctttgccttgataaagaggacaaaggatgttcgcgatcgcttctacaaggagaaattaacagatactaagaagattgatggagaaaaggcagctgcagggggtactagtactatttggaacccaaagtttcaaccagaagacttcattgattctggagaaatggcaaagagaaacaatattaatattgtttcaggtcatggccatgatcatgcaagtccttcagagaaagagttgatgatagaaaagaaacaggatttacaagaagcaacaccagcagcagcccaagataatgaagagaaagacaaagcaagtgaacattttttagacttaaaactttctttataaaattataagaagtatatgcatttatatctgatgaactggctatggcctatactatatgactatgatttgcta

SEQ ID NO: 47452 - DNA, 913 bp, Glycine max
  Clone ID: PAT_MRT3847_142855C.1
gtgagagtatacaacgatgttcttttcctgtatggggtccgacattcggctgcgtgtgggaaatcaagagcagagctgaaacttcttctcttcacttgaaactgtgtttgaaaaagaaaaaaaacatggccacactattctcacctttgtctctgcactctgctcgcccctcttcttcttccttttcttcttcttcttcttcttcttcatcttctcccttctttgccttttgcagcttccctttgcgctctcgcatttcatctttgaaggcacaaacaattcttcttcagaagatgaagcgcgtggtaaaggcagtggaagaagagacccagcaagaactcaccgctgtggatgagtctgaacaaccatcaacctccgaagcaccacccgttgtggttcccgtttccccatcagatactctcaccatgttctttcaggcagagggaacagtgagtgaaacagctattccagctttaaccaaagctttagaggagacagatggtgttactgatttgaagtttcagcttgccgagggacttgcaattttagagttgaagaagcagacaacagtccaagctacaggagtggcttctggtcttttagaaaccatacaaggttcaggctttaaactacagacattaaatctgagttttgaggatgaagaagttgcagttgcctagactaaatgtgctggtgttataacaatagtttgagggagtaaaaaaaaaatttaaagaacatgcctttcacacattcctgactagagcctcgaacaatcattttggtttgtatagggctgactgaggatattggttattattattattgttgttcttgttatcataaaaaagtgagattctttaaaaaaatgaaagattatttgatgatgaaagccttcaaaaaaaagattaac

SEQ ID NO: 47453 - DNA, 223 bp, Glycine max
  Clone ID: PAT_MRT3847_142856C.1
aggactatgtgatgttgactcaagactaggaacgagaggaggggaagaaataaaggctcatccatggttcaagggtattcagggggacatgctttatgaatcagaagctgcttataaacctacggtcactggggacttggatactcaaaaatttgagaagtttcccgaagtcgatggcccaccatctgtaattgcatctgacggaccttggaggaagatgctg

SEQ ID NO: 47454 - DNA, 452 bp, Glycine max
  unsure (1)..(452): unsure at all n locations
  Clone ID: PAT_MRT3847_142857C.1
ctcgcacgtgccaaaatgaaggatctgagcaagcccgtttccgtggtaanaaacgaaacccaccgatagtctggggttcctggaagcggagagcgggaacagcactgaagcaacgccgactgagactgctaccacaagagcacgtagatccacaggaggcaagaatccagtgtacttataccgcgtctacaccgagtgacgaggatgacctattgctacaaccagaacaaaacgagatgaagtggctgaagactcctaaccggaactggcactacaacacactgctgacaatcaaagaggaatacatacaacatggagaaaccctaacgataacccctatgacgcagatgataaaaaaactgcgcgtacggctgacaataatgaacacgagtccacagtagaccatgaaaaggacgccgttgacgagttgctgtaaatgtacaaaacgacaa

SEQ ID NO: 47455 - DNA, 398 bp, Glycine max
  unsure (1)..(398): unsure at all n locations
  Clone ID: PAT_MRT3847_142858C.1
atcctcatcaagctcatggcggtcgagtcgctcgtcttcgcaccgtttttcgccacccatggtggtcttctcttcaagatctttggagggaaataagaatcgaagttcgctgatctcgtctatttacattttgtttattttcgagtattggaagacgatgtcgctctgtattagtaggtaacaaattttcaaatgcgtcgtctacgacgacgatgatggtgtcggggacgatagtgagtaggtgagctgctctcgcatacactcctcttgggttgttggaacagctgagtttgattggatgtgctgtctaatgtgtttttttttaccgagttgctttgctggagtcagtttacctaaatgagaagagtcttgttggtttaaaaaaaaaaaaatatntt

SEQ ID NO: 47456 - DNA, 2625 bp, Glycine max
  Clone ID: PAT_MRT3847_142859C.1
agagactgcagaaatgaaccccactaatggtattgaggtagaaaagattccagcaaatcatgccaaggagaaactagtgattgaggatgatggtaaattcaatcaagaagaagcaaaagggatcgaagaagcaacaaaaacactgttactaaatactgcaacagagagcctaacagaggaagaagtccaggaaatattgcccactcctgcaattgtccaacgtgacacaaagcaaatcatgcaacaacaaacacttcacaatgatgaatcagaagcaattgataaggaaaagagctgcataccagaaaatgaacttgacagaaagttcattgatgtagaggaatctgatcaacctgaaaccaaggccaatgctggcatagtaaaagaagaacaagcagacaaccaatcacaagtatcaagcatgcagagtgtgattacaaactatataacagcagaaggacatctggcatcagaaagcagtacaaaattaagttttatgaatgaacagaagacagtagacgcgtcagtagagaatttagaaatcaaggatgcaagtgaaatcacagcagaggaagcaacagatgccaaacaattgactgatgaggagatacaaaaatcagaaaccgaaagtgtgtatgaagataaggccctgcaaacattacccagtacagcatctgtccgtattgaagttgagaaaagcattcaagagatacatacagaaacagaattagcagtgacagataccaaagaggggcagatatcagaaaatgagtctgaggcaaaaaaggaagtttctgagtatatgttaaaaaaggcttttgatctgcacaaagtggcatgccagaccggtgcagaaaatgaactgaaagctgaattcctatctgaagagcggagccaggaaactatagttacaaagcatccaaatttggaaggagagagcatagagataaacccaacaagtgaaactgaagaacatgaacaggtaccagcatcacacaccggagagaaattagagatcaacgatgatgggaatttcatacaagaggaagaaaaagagatggaaaaagaaactgaaaggcagttgcttaaaactgcaacagaaagtgtaccagaagatgaagtccagacaaccctgccaacatcaacaattgttaaaggtgagacagttgaaggaattgttcaggaacaaacactcgaggaagagaaatcagcagcaatagataacaatagtggcagaccagaaaataaacttgagggaatggctaatgctgctgagccgattgtgcacccggcagccatgcccctgctctgcacggacctggacgacctggccccccgcccttctccgccgtcccgcttggagaaggtgctgaccatccatctcaagtctcaagggtggggagcctcagtacacagtacataaccgcggtaggacgtgggagatctggaagcggctctagactcagactccatggcaacgtcagtcatcagggatggtagaaaaatcttgtcagaggaagcatctaatatgaggaggcgcctctgatcagagtagaaggaacacattccaaacaattgactgaggcagaaaagccatctcaactttgcctgagatagttgaggaaagcattccattcgtaatacaaaagggagactgaacaagagtgatcgaaacaaaagttgaggcaacaaaagcaagagattgaggaatcaaaagcgatcaataatgcgaatttgatttacacaaagcgcaaggcaacaccactctggaaaatgaaatgaaagcagaagtccagtctgaagcaaagagccgggagatcattatcgagcatcaaaatttgctggagactgcagaaataagtccaagaaatgatactaaagaacctgaaaaggaacataaagtcaccacaggtatctctgaatcagtatctgcagataccacagagcaaacagacacaggaaaaccggaaactccagaggccgaaatcactcaaccaggcatcacaaaagaagacgaagcaggagacgaattcgaaaaaataagcccatcatctagtgtgagtgtgatatccagagactctcaagacaccgacacgaaagtttcacacaaaaaatctcatggcatcctatcaggtgtagggtcaaaggtgaagcactcaatttccaaagtgaagaaggccattacaggcaagtcttcacaccccaagacaccaccatcatcaaaataaaaaaaaagtgacccattagacaactacatacatgctgcttttgtaaatagatagaatacacagatgcttgagctttttggagggcttgtttcttttgttgaggaattggattgatttgtttcattgatgtattgcttggtttgttatgaaaatttatcttaaggggggtctattattctcctaactcagtgtaatgtattcatattctctttgttttaatgaaattgttatagacataaaaaaaaaaaaaaaaagggcgcgcccccgtgtttgaacgggtgaagacccgaattgcatccggatctcgcagaggcacccgtccgaaaagattggcctggcgctgaggactgaggtgatgctgaattgctgcccatcctgtaactcaacaaataatatt

SEQ ID NO: 47457 - DNA, 195 bp, Glycine max
  unsure (1)..(195): unsure at all n locations
  Clone ID: PAT_MRT3847_14285C.1
cgagtgagaagtgaaaaaatgcagacagatatcggtatctacatagagtctatttgtttttgaatttgtaataattactaatgagttgctgtatgataaagggtattcttggaaagctgaaactgagggatctacacgccnattaatatataacatctaccggttctatcttgtggtattaactttaaaatgtaa

SEQ ID NO: 47458 - DNA, 454 bp, Glycine max
  Clone ID: PAT_MRT3847_142860C.1
gaaaattcagaaatgaaggatggtagaaaaatcttgtcagaggaagcatctaatattttatgaagccactgatgcacctgaggataaagccatctcaactttgcctgagatagttgaggaaagcattcaagaagtaatacaaaaggaagctgaatcagaagtgatcgataccaaagaggagcagagaccaggaaatgattttgtaaagaacatggaagttctcgagggatttgatttacacaaagcgcatagcaacaccactctggaaaatgaaatgaaagcagaagtccagtctgaagcaaagagccgggagatcattatcgagcatcaaaatttgctggagactgcagaaataagtccaagaaatgatactaaagaacctgaaaaggaacataaagtcaccacaggtatctctgaatcagtatctgcagataccacacagcaaacagacaca

SEQ ID NO: 47459 - DNA, 917 bp, Glycine max
  unsure (1)..(917): unsure at all n locations
  Clone ID: PAT_MRT3847_142861C.1
gccgctcgaggccnnggccgggcccgggaatagtgatcattcatacgaaacctacttcctataaccacaggacctatatagtgctatcccataggatccaactttcacaaccttgaattttctgtgatctttgcaatctacacaatattcagtattcaccatgggagccacaacttttacacatgattattcatcccctgttgctccatcacgcatgttcaaggccttgatcactgactctagaactttgctgccaaagctcttaccacagatcataaaagaggtcaatctgatccaaggagatggggaagctggaagcattgagcaagttaactttgctgaagctttccccttcaagtatgtgaaacacaggattgatgaggttgataaggacaactttgtgtgcaaatacactatgattgaaggagatccattggaggacaagcttgagtctatagcttatgaagttaagtttgaggccactagtgatggaggttgcctttgtaaaatgacaaccaaatataacgtcattgggggttttgaagtcaaagaggaagagataaaggaaggaagggaaagctctcttggagtctgcaaggttgtggaagcctacctgctggagaatccacaagtttatgcttaattattcatttgtttttgtcaagtatacagatactgtttcaagattaaattcaaacttattcaatttttgaatgatatatatagtgtgcaagcaaatataggcacaattagaatgtttgcaatgtattgaactccttaatatgtccttacccttcaagggctgctttgtggtttggcaaagtatttgtacttttgtagtaacaaagagtactctgatggtaataattcctcctaattaatcattctgccaaaaaaaactcgagactagttctctc

SEQ ID NO: 47460 - DNA, 828 bp, Glycine max
  Clone ID: PAT_MRT3847_142862C.1
ggctcgaggtaatttcttaaatcttttgaaacatattcagttgtatacatttaaactaaaaattgtgtttgtttgaaacaaacaagttgattcagctaatatgtggatgaatgatgatagcatgtaaagaataattctttggccacataaagtagcttgttgtggcagtgggacttctataattttcaataaaactcatagatgtacaaataagcagtagcatagacaaccttgtgtcagtgatcgcattcactatttcatttgtataattatatgataggtgtgtatgaagataaggccctgcaaacattacccagtacagcatctgtccgtattgaagttgagaaaagcattcaagagatacatacagaaacagaattagcagtgacagataccaaagaggggcagatatcagaaaatgagtctgaggcaaaaaaggaagtttctgaggtttgagcatactacaaacaaaattaactagaaaacaaaagatatctccttgcactttcacacttgcatgtgttagttatgtgttcctgacattaaaatgttattctcttggcttacatctttatgttctgatgcagtatatgttaaaaaaggcttttgatctgcacaaagtggcatgccagaccggtgcagaaaatgaactgaaagctgaattcctatctgaagagcggagccaggaaactatagttacaaagcatccaaatttggaaggagagagcatagagataaacccaacaagtgaaactgaagaacatgaacaggtaccagcatcacacaccggagagaaattagagatcaacgatgatgggaatttcatac

SEQ ID NO: 47461 - DNA, 245 bp, Glycine max
  unsure (1)..(245): unsure at all n locations
  Clone ID: PAT_MRT3847_142863C.1
aaaattctgtgcgttttcttgcacacaacatactagcggaannaatncgccaaattcgaatnatcatattgagatactattaggcataaatctgtgtagttcacaactgagaagtaaaactttaccaaacaagattgcttttgatgacacagcttgtgttgattacaacacaaaaattcttctgatgaaagtgtccagtcgaatcatggtgaacaataattgtgcattgtcattatcatgaaagt

SEQ ID NO: 47462 - DNA, 558 bp, Glycine max
  Clone ID: PAT_MRT3847_142864C.1
gttttgatccttcggatcactggctacttgatcgtatatattaatttgccggattgcatgctttcttatgatcttgataaatgattagcagtgtcttacggtatgattgaaaacagatttatagaagtaaaaaacgccgggttaaaattttcattttttgataaatattttttggtttaatattttctacattaaaatgatacaaagtgttataaaaaaatactatatagaagaattatatgaatagtatagttttaaatttaactttatatatattagtttgttccctttacttttataatttttatttttttaatttctgaggtttgaacgtgattattttaattctataatttatattttaattcttaaaatattttttttagtccttataagaacaaaaataagtaagaatcataaaattataaaaatttttaaaaaatgattttcaaaactgaagagattaaagagattaaaaaaaaattaaaatataaattataaaattaaaaagatcatttttaaattagagagactaaaaagaagtaaaaatcatgaaat

SEQ ID NO: 47463 - DNA, 724 bp, Glycine max
  Clone ID: PAT_MRT3847_142865C.1
atcaggtgggattcctggtccttcttctttgcctttgtataatctcccaccaaatcttcttcccaatcgaggccaagtggggcatgaggcttttgcttgggctcatggccatggaaggccaccttactgaattcataccaaggttttaaattgctgatgccgtcattgttgtgaagaattttgtgatcacaactttattgttgcactcacaattgatattatattatatatatatatatgtggttatttaaaaccttggggtgatatatagagacttcatgcgtggctggttcgagatctaatggaattctgttggtgttatctgtctagtttgaaggattaattaggaattggggaaagaattgcaaagattttagaaagctggagtagttgtgaagaactgtggagacgaggaagagaagcatgttttaatttacttagctcagtgtatatgtatatggagtaagaactttgatttctgtgtttttcttttgctttatgtgtttggaataaagaaagtgatcgatgatgggcgaatttttaatggattaatttctgaatagttttaactgtcatacattttaatttaatttatgaactctactgttttttttttttaaaatataatccttgatattttgttggttgaagtcatattaggagatattttagtcatgtaaaattatataatatatttttgtttgtctccaaaaaaaaaaaaaaa

SEQ ID NO: 47464 - DNA, 366 bp, Glycine max
  Clone ID: PAT_MRT3847_142866C.1
gcatcctttactatttttggcacaatttgaacctaagactattagacaggctattgatgaccctcaatggtttgctgctatgaaacaagagtatgaggctctttttaacgataaagcatgggatcttgttcctcttcccaaagacagaaaggttgtaggttgtaagtgggtctttagaattaaggaaaatgtttgtggaacagttagctaattcaaggctcggttagtggctaaaggatttcatcagttgctggttgtgactttaatgaaacattttatcctatgataaaacatgttacaatcaagttgattatcactcttgctctcactaataaatgtgatttgttccagctagatgtcaacaat

SEQ ID NO: 47465 - DNA, 465 bp, Glycine max
  Clone ID: PAT_MRT3847_142867C.1
gcggttaaatatgaccattacttaaatttgaagtcgatgaccacctctcgtaaatagagctacaatcgttcctatggggtgcgaaaaacacctgcactctgaaatcaataaggtgcattcagctcaaaccattgctatattaatcggttcctatttactcccttttctttacagggtctttgcccggaaaatgtctggtttattcaataggagctccaaggcttccttcagaggaactaatacagccgggagcactgagactcaaagatggtttcacaaactctggaaagacatgagatagtccctagctccttaatggcatgtggaaccaaaacagctgctgctaagaatgcgaacctctctacactgattcactataatttgtgttggaaatgctgatggagacagcgctttgtccgctatgttctattaaggaaaatacttcttgcaagatcttcgttaatg

SEQ ID NO: 47466 - DNA, 361 bp, Glycine max
  Clone ID: PAT_MRT3847_142868C.1
gcagacgttgcgagtggtgccgaaaccaatgtgcatactagcctgcagataacgaccacctaggatacggagaaactgcgagtgatgactgatgagggactaccagcggtcccagcgaatggacctgaccaccgcctcaggctagatgcatacgggggtacgcagtgagagattgtaaaggccgtagcacgggaagactgacttaataggccccgaggtgtcccatgcggtggagctgaacgaaccctcggccattaaataatgagtaagccgagtagcacattaattatacaatagcacagagaaaaaagacacgccaggggcgagtaaatgggttaccccagcggttgacgcggcagcc

SEQ ID NO: 47467 - DNA, 549 bp, Glycine max
  unsure (1)..(549): unsure at all n locations
  Clone ID: PAT_MRT3847_142869C.1
ttctttcacgcgttcggaaattttgataaaccgggatcacaggttgccgcaccttaaaccggaaacaaaagcaatcctactcgatttcaagaatctngtaatttcttcttacttctttgtgtactatttcttaagggaaagaaaaatactctctgtgctggccacagacttcgttaattattttcttttccactcttagtttatttgctgaacactctcctatttgattatatgactctgtgtcagatttaaactttttctgcctcttttttatttctttgttcatttttaagtccaagctggagaaattctggattagtgcttacactttcttatctggtatatgacttcgtgtgttgacttttctatttctctcctttctttaactctcttcttttaactgttccgcatcgcccttcaaagtggtttttattgaaacacaccttgtcggtggggcaaatgtttgcttcgttaatttcctctgaatacatctggttcactgagaaaacttttttacttgcatagattggacatcttcgttgttaattt

SEQ ID NO: 47468 - DNA, 272 bp, Glycine max
  Clone ID: PAT_MRT3847_14286C.1
cggcaagtgtcgtggacttcgtactgctaggaagctccgtagtcaccgacgagaccagaagtggcatgataaacagtataagacagctcatttgggcacagccctaaaggccaacccttttggaggtgcttctcatgcaaaaggaatcgtgctggaaaaagtaggagttgaagccaaacagccaaattctgccattaggaagtgtgtaagggtccagctgatcaagaatggcaagaaaatcacagcctttgtacccaatgacggttgcttga

SEQ ID NO: 47469 - DNA, 384 bp, Glycine max
  Clone ID: PAT_MRT3847_142870C.1
ccttcgcgtttgtggcatcttgttacatcaccggattatttatcttttctcttctcattcaccacttcacaattcattttatgatttgagatgccaactgactcgtttatagtttttcggcgaaaacgtgtgtgtgaccggtgccggcggttttatagccgcttggcttgtcgagcatgtcttagttaaaggctacactgtgagaggatccgcgagatcttcaaatgatccggagaatgggcattagagagagttggtaggaggcaatgtgaggctaactctgcattaagagtgatctcttcgataatgcctgcattaaagcatctcttcacggttgccacagtggatttcacaccgctgtctcggtaatcgacaaccttgagt

SEQ ID NO: 47470 - DNA, 328 bp, Glycine max
  Clone ID: PAT_MRT3847_142871C.1
ggagagagagagagaactagtctcgagtttgatttttctatgtttatccttggtgtttgtttaggagagttggtctttaggaagacattttatcttctcttatgcagtgcacgactgtataaggaaagattcagtctctgttgaggggcttcattttattttgatagatttactctcaagtaggtgtgtgttgttgtggagatattgtttctcttggcagatcgtgtgggtattgatgcagtagcttcctgctacttgctattttctgtttttagcatctttggtgcttattaatcaaatatcgttgcttttaaaaaaaaaaaaaata

SEQ ID NO: 47471 - DNA, 395 bp, Glycine max
  Clone ID: PAT_MRT3847_142872C.1
ccttgctcctcagctctggcctgctggctatccttgataaatggatgattcggatcctcaggtgtgactttcggctgtctcgcgctccgaggaggaactatgtcttggggaaccgcaacggggctcgcttgcccgcttgcatgttgcgacattaagacccctcactgtgtacgtgctagccggcaatcggccgcttgcttggcctctttgtgcccaccgtggactgttccctactaggtagtcccatgatccgaagcctgtggcgtgccctgctgctgcggatctgctctcacggctctctggcgccggcgcgtctcacaaggcttgctgtgtcaccagatatgttgtgtttccggctggtggcctgttgcctctccgagatcattgggggccat

SEQ ID NO: 47472 - DNA, 455 bp, Glycine max
  Clone ID: PAT_MRT3847_142873C.1
aggaagagctggtcttggttgcttgagacacaagaaatcaacaacacaatgagtctcaattgcctcacatgcagccagcttcttcaaaggacagactcctatggcgagttatttgtggaaaaggaatacacgaaaatatgcaaacaggttaatagaagctggtcaagtaacatgtcatcatcaacaaccaaatgtgagctaccaaaaggtggggcggtggccaaggttaaggctgaccatcgccgcaattatagcaccggagacgttccttatccttccggcagcgcaggaccaaagttggtgcgcagcagtggaatgagaagaaactggagttttgaggatgttgctgaaacgcaagatcagggtgtaagttgccactgagatcagattattgtcctatgtttccttgcttgtgttatatttggtccttttctgcattgtgtatattttgtttg

SEQ ID NO: 47473 - DNA, 1326 bp, Glycine max
  Clone ID: PAT_MRT3847_142874C.1
ttcccatttgcgctttctcattcaaattctttctatattctcctctttgttcatcatcaatcatgctttcgttacggttacttcgccttttctctgttcgttctacttgttctaaccaagctcccattctgcaggaaagttataagattctgtttcaggggtgtaaagaaactggctttcgatcattatctccaggttcggtgaaaatgagttcaggaggaaagcaggggggcttcgtttcgtaccaaaacgtcttcgtaatgaggcacggggagcgtttggacaacttcgagccgtcgtgggtgatgacggcggcgcggccgtgggacccgccgctggcagaggcaggtagaaaacgggcgttcgaaacgggtcggaggctccgggagagtgtcgggcttccgatcgggcgagtcttcgtttcgccgttcctccgctgcctccagaccgccggggaactcgtggcgtctttctccgatgagggtcgtggtggcaccgtcgccggcgatggtgttgccgttaagcctttcgaagtcaaggtctctgttgagtatggattgtgtgaaatgatgaacagcaaggctatacgtcccaatgtggcccctaaagatggaaatatggggtttgatgtagcagtgtgtgaagccatgctcccagctgagatagtggataaaaatgttgaaaggatgtgtaaagagttgccccagtgggaagaatcagttctgcaagcaggggcaagatatcagcagttaattaaggaccttgcagataaataccctactgagaacttgctgcttgttacacatggggaaggagtcaaggtagctgtttcttcattcaaaaaggatgctgaggtaaatgaagtcgattactgtggatatgtggaacttagacgtcctattttcaagaaagatcacacatttatcgctggagagttcgatttacttacaactagtggtcaaactggcgtaagctatttcctaccacgtcctttgggaagtgacaccaaccaaactttaccatgatcaagcatatactcgtgattctcaattcaagtttgtgagctttatacttgagtggtgtctctttcaaggtttttgattaggtgaattgaaaaacatgtggttgggatttaacatgtataggaacttttcaaatggaagaaggagaaaatgaaagtgaaaatctatgttcctgattgggatgtcataacttaagaatatttccatagaaatttaatatatcctctccttaacatggagatgaaagtcaagtaaaatatcaccacattttcttggaaaacaactatagcccgtttggttttaa

SEQ ID NO: 47474 - DNA, 1512 bp, Glycine max
  unsure (1)..(1512): unsure at all n locations
  Clone ID: PAT_MRT3847_142875C.1
acgagctgggcccgaattcggcacgaggagtggagagtctgcacctcgtggttgtgaagcccagatctaatctcctttggtgtattaaaatcttggtctcaatatagtggaactccctccttagttcgaagttaaattttgaagcggaatccaatccatgcatccaagttgatagcacgtggattgattacaagatgccaacgtctaaacctcttttccccaaagagaagaaaacataatagatatctcattctcatcttcatctgcatctgcccatgtttcttgtttctgtctgcaattttcaattccaactctctctcacatgcaattctccatccaacaaaagtttctcatcatttctgtttcccataagcaattaattaaaatactgaatttggtataatttctttctcaaatataattagttttacaattattttatttctttttccttggattgtagccggggtttcttgttgtgagagaaaaacctttattctctgttttgggaacatctggggtctcaatttagtggaagttaaattttgaaactttggacgaagatggcgaattgggtccaaaagaagatcactgatccccttctttccattatccgaagaggagctgaaccaaaccacttggctttctctgctgctcttggtgttacattgggactatttcctatatgtggtgtcactgtgttcctctgtggaatggctattgcattgcttggatcattttgccatgctccaactgtgatgcttgcaaactttattgctactccaatagagttgagtctggttgtaccctttctacgctttggtgaggttatctctggtggatctcatttccctttaacatctgatgctttaaagaaagttcttactggccaagcttcacgtgaagtcttattaagtgttgcccatgcgttattagggtggctggttgcatcaccatttattttgggaactctatacatagttcttttaccatgcttcaaaattctagttcataaattctcaagtgttcctttaagtccaaagaagccgctcaatccacactcagaagtaaagctgaaggtaagggatgtttgacaaagtagcaacgagatcatagtgtcaaaatctgctttgtcacagtgatcagtcattgattcatgttcttgtgtgacacaaattgtacataattaacaaaaacttgtcactgtttatattgctgagattgatgtatcctatttgtaaactatgtatttgtaaagcatgccatgagtatgtgatgtgatgttattaccaaaaatagtatattgttattggccatgggacatttgaagatcataaggaacatggagatcaaatttttcaaataggctaaattaaaagtgccaataatgcagccgatattttgttgctttcnnnaannaaaaaaaaaaaaaaaaaaaaaaaaaaaaaaaaaaaaaaaaaaaaaaaaaaaaaaaaaaaaaaaaaaaaaaaaaaaaaaaaaaaaaaaaaaaaa

SEQ ID NO: 47475 - DNA, 520 bp, Glycine max
  Clone ID: PAT_MRT3847_142876C.1
acgaggtcaaggtccctagtaaagctgccttctttgtgtggagacttatcagggacagattacccactaaaaccaatttgcacaggaggcatgtggaaattcatgatcttacatgcccattttgcaaaaataaggaagaggatgcagcacacctcttttttacttgcagcaagatcatgccactttggtgggcatcattatcgtggacaaataccacagccccatttccagagaacccccatatgcacttcctccagcaagtgcttcgaaatggaaaagacactagctatcaaaaatggcaatgctggtggacttccttgacatggagtatctggcagcataggaataagattgtttttgaagaagaaaggtttaatgctagtaagatcttgaaggatgccatattcccctgctggacctggtttaaaaatctggttaaaggttttgacatgccttttaatcactggtccatcaacatgaaggaggcttttacaggatgagggggggataataattatag

SEQ ID NO: 47476 - DNA, 394 bp, Glycine max
  Clone ID: PAT_MRT3847_142877C.1
tttgggggtttggttttttttaatttttttggaggagcaactgcagcataaacgcaaaagagaatgtgcacctgcttggaaagaatgggaaaaaggataagagaacttagtgtagaatgaatgagcacaagtagaaagtatgtaaaacttaccccgtaagacaagaaaaacaaactaaaccttagagcactatccgtcctgtaacatgagatggcacaaaaatataaaacataacattttaatttggaatgttaaaatcgagggaagaaaaaaggaagaatcctgaattgctgatactaaaacggatcctgttcacaatataaacattcccaaaaaggcatttacatgaaaattgacaaaggctatacatgaacatactccatatgaccccaca

SEQ ID NO: 47477 - DNA, 720 bp, Glycine max
  Clone ID: PAT_MRT3847_142878C.1
acggctgcgagaagacgacagaaggggattccaaccattctccaccattcacaatctaagcatcccaaaactaactattgtgctagctacttagttgtgtaagatggcttccaagggaaatgttgcatccacttatgttgcactactcatgtgtctctatttgctttcattcaccatggtgagctctcaaatctcaaccccaccaccaatgccttctcaaaacggtacatgtcctataaatgtacttcgattgggtgtgtgtgccaatgtgttgaacctggtcaatgttacactaggatcaccaccaaccctcccctgttgcaccctcattcagggtttggctgatgttgatgttggtgtttgcctttgcactgccctcagagctaaccttcttggcatcaacttaaacttgccaatttccttgacattgcttctcaatacctgcagagggaacatccctaatatccagtgttcttaaatttatcttctctagtggaatatacatgtggtctatgaaaaaataaactcatcgcctccatccacaattccacatgttgtctctctcatatttcgtatctttttatggtgtttttttttctttcagttcttgttgtactccatgtatttcccctttttagcgctttccatcctaataataatttctcactccttcgacattgttctactatcggaaaaaaaaaaaaaaattaccaaaaccgc

SEQ ID NO: 47478 - DNA, 250 bp, Glycine max
  Clone ID: PAT_MRT3847_142879C.1
tttggtttttttttttttttttttttttttgaaaaaatgtggggaagtgactcccctgatcaacatttgactcgaacccagttattcccccttacacgttaccaataaagaaggctcctcataaaataaatgttacaaggggataatgtttttcccgcttaatatattatccaataatatgaaacactggaattgcacattaaaagaatgtagggattttagacccacaagtggtgtgaatgaggaaaaa

SEQ ID NO: 47479 - DNA, 180 bp, Glycine max
  Clone ID: PAT_MRT3847_14287C.1
accacgcttgataaagatctataacaactccttacatgtataatcacaaggatattaatctttccatgcgtattatcattgcttgagcgttgagagtacacttgacccaaggattgtcaactccagtctagatactaaaggagagactaatgcagatgccaagttcaatgccacatatat

SEQ ID NO: 47480 - DNA, 314 bp, Glycine max
  Clone ID: PAT_MRT3847_142880C.1
tttttgctactaatggccgaattcgcggatggggggagttataattaacaagacgtaatttgcgtgcaaccaaattgaccaagcctacaactggatgggtgtacacctgaaaatggaactggcgggacccttggattaccaaaacatatacatgagatatatctatagtagatgttattgttcacacgaaagtggctgaagaatgaagcttacaatttctaaacggttgctattatacacgcaccagatttggccactgattgcaaaatctaaaaaacactttgatacaatgaacctctatttcattcaacttg

SEQ ID NO: 47481 - DNA, 320 bp, Glycine max
  unsure (1)..(320): unsure at all n locations
  Clone ID: PAT_MRT3847_142881C.1
acgaggttgggttcaaatcagagtaagaagcccatgacttgttgcttagaaaagcaagaaccttggtataaggcatggatagtcaacgccacaaccagataaaattacctagttgataagttggatgaacacaccaatgaaagaatcagataagttcataccttttgggttcacattccaannaatttnnanggngggggggnntnggggccctttttttttccccnaaaacccccaaaaagggggccccttgcactaggtaattgcaatgaatttttctttaattttttttcaaaatgaatttggcatttaaattgcca

SEQ ID NO: 47482 - DNA, 289 bp, Glycine max
  Clone ID: PAT_MRT3847_142882C.1
aggccacgcgtagctattcatctgattggtctgcatacatggtaagctagtcaccacacagggcatggtcaaccttcaacatacacttgaagtgcagtgaactcaagctgaaaccaagggaggaagaatactgtgctatatgaacactagtcttcgacttgcctattacgatactagacacatgatctatacagctgcagagattactatcatcgattctctgcacttcatactcaacaaagaaatctcagcttatcctcaacaattactcaatggatactagggaatc

SEQ ID NO: 47483 - DNA, 1132 bp, Glycine max
  Clone ID: PAT_MRT3847_142883C.1
acggctgcgagaagacgacagaaggggataacaacattgtcctacagtttccatgtatctggcaaccattatcgttcaactcttcactcttcttgtgtccaagtaatcatttcacatcccacaacgttgtcttccaacaacaacaagagaaagaagaagaaaacttcaatttttgacagccaagtttgtttccagtaacgacggacaacaacctttcacttttactatgatgagagaaaaccacgtctgaagagtttgagcagcaaagagaacttagaatgatggaggatttttggagcatgttttgtggggatcgtgattgtcctgggacccggggaaagactttttgccatgatttaaagtttttgaaagatccttctacatgcattaaccagttcttgatcatttgcgttgatgtgctactactggtcatgttgggattcattttgatccagaagtctttgttcagaccatttcgtggtcagttttgcgtggaaagatattcaaacttgcagctaatttcttgccgttaccaatggctctctggggttgttgcatttgtgcttagccatttgggttttagagaacataaggaagagctacactctttttccacttaatgggtgggtgctagaactttttcatggattcagatggttcttagttggcttaagtgtaagtcttcagttgaaacaactttcaagatcgtcgttgtggttgttttcacttcttacagtatttgtttccactattttatgtgtttcatccatgtcttatgcaattagcagcagagaattgtccttcaaggcagctttacatgttctgtcttttacaggagcagttttactactcttgtgcacttataaagtgtataaatgtgaagacactgatagagatattgatgaaggcctttatgaccctttaaatgaccactttaatgaagttgatcctgataactatttaactccatttgccaatgcagggttccttagtaggatgtctttttggtggttgaatccattgatgaaaaggggtcaagagaaaacacttcaggatgaggatattccaaagttaagagaatcagatcgagcaggaagttgctatttatcgtttgtagaacaattgagcagcc

SEQ ID NO: 47484 - DNA, 440 bp, Glycine max
  Clone ID: PAT_MRT3847_142884C.1
tttgcttgttgactgtcgcaagcatagcgctggacaattttatatagccgttcgaggcggaggaatctgagcggacctatctggagatgggttcacacttattctaaattctccaatccgttactcgctgaaagtcgctgcgcggaagaatggctgttgaatggttatcattgtgacgactggaaatgcagcaatcaaaaagcgtgattggccctcactgatacaagtgttttgaacagacagcaacagttcacaacaccttgctgcatgtgaagagacaaaatcgataccacaatcctgggaattgatcttccccatacaggaatgtggtgctaataatagctttgcaatgtggagttccgagcgggcaaaccaacctgcatggcatttgaaccctcttattgacaatggccaaacagtctacaatctttgacactgtc

SEQ ID NO: 47485 - DNA, 433 bp, Glycine max
  Clone ID: PAT_MRT3847_142885C.1
gtaaaaccagacatatagggaaaagaaacagagagcatagtgcatgaagcataagaccccacacgggatattaacaactttcttgcgcgttacatagaaagcaccaacagcatgacagcacgtgcacttccttgccagctaggaaagatgactggtttcgtgcacaggatatacgcggtataaatcgcgtagccaaccatacacgcttgtcgaaccatggagaacacctgcactaaaacgccgagtgagtgattggacagagaccacctcacctatttagaaccgatgtgcgaatgcagacaccatttgcctacaaaaacgagcggcggcacctgtggccaaagattccccttctaaggcaaacgacctatcaagaacatggcctgctgagttgggaaactcctgctaggtctcccgagctctttgattgggc

SEQ ID NO: 47486 - DNA, 286 bp, Glycine max
  Clone ID: PAT_MRT3847_142886C.1
gaccacgcatccagtttcatctaagccctcttgtcgcaacgtattaagaataattaatcaggcccttcgatcttcgattcatctgaaaagaggtcttttgtttcacatcaacacgagttcatgcacagtaatgggtatcgctcactttccttgtatagcatttccagtgcagagagatgtgaaccctcttatgcaaatttctctgcttgtggtgaaagatggttgcaaggtcacttttgtacagactgagttgaacctcaagcgagcagagacttggggtgctgac

SEQ ID NO: 47487 - DNA, 504 bp, Glycine max
  Clone ID: PAT_MRT3847_142887C.1
gggtctttctgtgttgggtttttgaatgctgggaaattaagggtgtgtttggattttcgatgggagtgttccaaaaatatgtttgagagtaaaatcaaggtttagggtctgtttgaataaacttttccctgagtacttatatgagaagaaaataagaagagagatgaaagaagttcctccataagttgaagtgaacttatgcataagctacaaaatcatgtttttttgaatggtggaactaagtaaagtcctgtttagataaactttataaacggttgtaagagaataatataagttagagggttaatacatcaataggtgattgaattatttgggaatttttaatgaagtttctaaaaaaattaaaaataaattgtaattgggttcttagatctcttacaatttttgtaattgggtcttggagttggtaaaacagccacatattgttatttttatggcagtttcaagctgtagtaaactaacttagagaaatttgtttaaaaa

SEQ ID NO: 47488 - DNA, 1270 bp, Glycine max
  unsure (1)..(1270): unsure at all n locations
  Clone ID: PAT_MRT3847_142888C.1
ggctgcgagaagacgacagaagggggacgaaaccaaacgtatcaataacacaacattgctgaagaagttgaaaggtcgcatccttccttcattcgtttcgttgagttgaaaactctttttccacattcttttatttcttgtctcacccgcaccatgcaagtgtgccaactactgtgattggtatggcgacacgtgtcccttttgttttgtgcgcagccaccacttctcccaaccactgccttaaatactgcgtggtggcaccgtcacttcctctaccggtttcttcctcctcattaagccgccactttctctctctttccttttcgtcttctttttcttcttcgttgggtttgttgccacttagtaagaaagagggtgtgaagagagtggggagaagatttggtgttgtggccatggcggagtctaagagtactgtgcttgttacgggagcgggtggtcgcacaggacaaatagtttacaaaaaattaagagagaggccaaaccaatatgtggctagaggtctggttagaacagatgaaagcaaacagaacattggtgctgcagatgacgttattgttggggatataagagatgctgaaagtattgttcctgcaattcaaggtatagatgccctcataatcctcacaagtgcagttccacagataaagcctgggtttgatcctaccaaaggacaaagaccagagttctattttgatgatggggcatatcctgagcaggttgactggattgggcagaaaaatcaaatagatgccgctaaggctgctggagtgaagcacattgtgttagtagggtctatgggtggaacagatcttaaccatcctttgaacagcttgggtaatgggaatatactggtttggaaaaggaaggctgagcaatatctggctgattccggcatcccatatacaattataaggtacatcaactcttgtccatactgagacatataatactcctagctaggtttcttcggttttccccccatatatgtcccttttagttgcaaaaatgtatacaattatagactgcttgaccgtttccttggaattctattttaatcctcataacatgaactgcacccaaaacattttcaatcaacactatattgttatcttgatacctggttgttttgacagaacacttctagaatatttggtgttagttttctcaaatcaacaaaacttaagatctcaatttggtacatncatttttacaattaaacctatcaatttgtgcctgcatattttttttt

SEQ ID NO: 47489 - DNA, 478 bp, Glycine max
  Clone ID: PAT_MRT3847_142889C.1
aaaacgtttggaactttcagcccacagcttaattgtctaaatagttctttcacttccttgaattcctacatcaagtattttcttagctcttggaattgttgtattctagagtatgtctaatgtcgaaaagaaaagggaactttttgccgtggagtatggtaagaatgatttaagtggaaattttcattgagtttgcttgaatgatatagttttcactctatcaaattaaacatactctgccatatatactaacataaggatcagttttttgaatttttctccactaaaaaattaaacatactttgagtatggtagtatttcttcaaaaaattgttataccttccttattgcctcatatttttgttcttagtgttataaactcataattgtcatgtcaactttagaaaattgtgaatatatattttggttttatttcttcaattctgcggcatcgattgtaataagcaaaacattttta

SEQ ID NO: 47490 - DNA, 393 bp, Glycine max
  Clone ID: PAT_MRT3847_14288C.1
tcttatacctttgttatagggttattggggtctctcatggcatttgtgatcataatcttacctttcatttcgagacttattattttcaacaaccagtgtgaatgaataaaccagtcttgtattgacagtctcactttgtgggtgcaaagcaaattgctaggttctgtattgcaagaatatcctaatctctggttatgaaccaacagttaagtctaccctaaaatggatttaaccaccgaatctgaactgggctgatctgaaaaagatatcaaatttaacaagcatcagttggaagatatatgttcaatgctatgatatacgagctctcattgcgttctatttacagcatcactcctcaatcatataccaaacagagttttcatattaccacag

SEQ ID NO: 47491 - DNA, 592 bp, Glycine max
  unsure (1)..(592): unsure at all n locations
  Clone ID: PAT_MRT3847_142890C.1
cctcgaggcctgccgggaactacttgtagggaaggatgatgagcttctccagactgaaaccagaaccataagtagatctgatgttgcagaagtctgcattcaggcactaaattttgaggaggctaaattcaaggcatttgacttggcatcaaaacctgagggagcaggttcagcaacaaaggatttcaaggctttatttcccagatcaccactcgcttttgatttttgaatgttgttgtcatggtcccaaaatccttgtggattgaaccatatgggtattagtgctatctgaaacaaaatttaattttagtaaaggattgttttaaggcaaattatagacttcactagtactgtacctgcacgccttgagaaaaacaaatgtcttctaatcagcacatcatttcatgttatcaaaaaaaaaaaaaaaaaaaaaaataaaaaaaaaaagnaanaanggaaccanaaancaaaaccctttgttacattaatacaggttgaattgcgcctcaggcggaatcaagggccatggcggtgtacctgcaataaatgtgtatcgcttcacatttcaccgccactaacaattccaaaggca

SEQ ID NO: 47492 - DNA, 1894 bp, Glycine max
  Clone ID: PAT_MRT3847_142891C.1
tcgcttcaggcccaagttaacttgtccctccctctcctccaccagcccgccactttcctctctctaaaacactaacgcatgacatctccataagctccccgctgtagaccttgctctgacactcggaccgcgttccgacgtacacggccatcgcgcaacttcgcctcttccgagctcggcacctcctctttcgacaccgtcctcgggggtttccgatcctctttgttttgctcttacggtcgcctatttgtctgcggcttcacttggagggttcttggcaccaccgcattgcgtgaagacaacgtgcctgtgccattccctgaacggtgtcggttcttgttctggccttcaatttttgaggggggattttctgggggaaattataaggtactttggagggatgtgcataataaaagcttgtggagaaagtgaattcatatacgtattgatcacaattcgtgtataagaagggatgtgctagttccctatggtacaacagattcttgaactccaatctcaagaacttatggacgttatgtgctagtccctatggtacaagagattctcccattaatgggaggggtaatagatttagcaatcttttagtgagattctcccgaaaatttccttggcaagagatagaaaatgtgagattcactggagaccaagtcaaagataggactcaatcaaaacattaagtgaacgaggtaaagtctttgttttttaccgttcttgataagcaataagatgattgattaattaaaagtataaatcgtagcaaataacaatacaatgagaaactattcaactattttagcatgccaaatgcccaagttttgtgtagatttacattaacattgtctatgaaccatttttctgccagaaatgctatgtgtagaggttccatatttgttagtgatcttcttcagcttgtctgtaaagaattactaagtcatgtctgcaaaaggtcaacttcacgggaatgtttttttcatcaatgtcgacgtagtccttctcaatttaatttaatgtagatgtatattcttttggagttttgcttgttgaacttgtcacaggaagacgcccttcttttgcttttatttgaactcaaggagcgaatcacggcaatgatgggctatgaagaggttcattgagggagatgctatctcagtcttggacccaagactggaccagattgctgcaaatactttagcactagaaaagatccttgagctagctttacagtgcttggctccacgtagacaaagtaggccaactatgaagagatgtgctgagatcctttggtccatccgcaaggatatcagagagcagctatccgcttcaaatttccgctcattttccacttcttcccaaagaagcacctcattgaaagagtgagaatgctaaagttgcaacactagcatcaaagaatgtaagttaggacaagccatggccttgggagaaaaaccattcttccatataatgattggcaactttggcacttggggtggttggtgttggactagggtggcatgtagaaattcatattttgtggaaattgtacatgagagttttggcttgtgtataggaatggggagagctacttcccttaaagatgatgagtaccttcctttccttaattgtgcatttctttttcttcttggaacaacacaaggaggaaaacttctattcttatgattggaaacttgattggtgtattattatttggctataatattccatttgcggttaaatatatcctccactttattttacctttcatacattaaaggttaatggaatatagcgatcctgtagaaactttgctgactgcaggggaaaatatagagttgcccactttcctgtctacaccatatacgcatttggttttatt

SEQ ID NO: 47493 - DNA, 1544 bp, Glycine max
  Clone ID: PAT_MRT3847_142892C.1
ctggattcgagctaacctttgccttttcctttgggcccaatttaggagatctttttttcgggtattgaaaagtgttttcatcattccttcattcgtttcgttgagttgaaaactctttttccacattcttttatttcttgtctcacccgcaccatgcaagtgtgccaactactgtgattggtatggcgacacgtgtcccttttgttttgtgcgcagccaccacttctcccaaccactgccttaaatactgcgtggtggcaccgtcacttcctctaccggtttcttcctcctcattaagccgccactctctctctctttcctttgcgttcttcctcctcattaaggcgcgactctctctctctctttctttttctttgttaggtttggtgacacttagttagaaagagcgtgcgaagagggtggggagaagatttagtgttgtggccatggcggagtctgagaagagtactgtgcttgttacgggagccggtggtcgcacaggacaaatagtttacaaaaaattaaaagagaggccaaaccaatatgtggctagaggtctggttagaacagatgaaagcaaacagaacattggtgctgcagatgacgtttttgttggggatataagacatgctgaaagtattgttcctgcaattcaaggtatagatgctctcataatcctcacaagtgctgttccacagataaaacctgggtttgatcctaccaaaggacaaagaccagagttctattttgatgatggtgcatatcctgagcaggttgactggattgggcagaaaaatcaaatagatgccgctaaggctgctggagtgaagcacattgtgttagtagggtctatgggtggaacagatcttaaccatcctttgaacagcttgggtaatgggaatatactggtttggaaaaggaaggctgagcaatatctggctgattccggcatcccatatacaattataagggctggtggcttgcaagacaaagatggaggtcttcgggaactacttgtagggaaggatgatgagcttctccagactgaaaccagaaccataactagatctgatgttgcagaagtctgcattcaggcactaaattatgaggaggctaaattcaaggcatttgacttggcgtcaaaaccagagggagctggttcagcaacaaaggacttgaaggctttattttcccagatcaccactcgcttttgattttggatgttgttgtcatggtcccaaaatccttgtgaattgaaccatatgggtattagtgctatctgaagcaaatttaattttagtaaaggattgtttaaagcaaattagacttcactagtagtgcacgccttgagaaaaacattccttaatgttttcatttgcatgatactatgataaaaataaaaaaagtagttttcatagggacaaaactcagctgtctgtataaacttactagaaaatacattgctgacaattgtcactattataattggaaactgatttccctgttgggagcagggacggcaaaccagcatgtcgggtgtcagg

SEQ ID NO: 47494 - DNA, 553 bp, Glycine max
  unsure (1)..(553): unsure at all n locations
  Clone ID: PAT_MRT3847_142893C.1
attcgagctctttacccggggatcctctagagtcgacctgcagcaattatttaatgggataagatggtttttctattgtcttgttcaatcccatccaatgatctaacctttgaccaatattatttatagtttcattataaacattcagaatgctgatacaacaactaagccttttcccactatgtgggattggctaccctacttgaatcgtatggttacaactccctctatttctatgttgttttctgaaagacccaagaatgttgatatatatatatatagatagatgatagcattgacctttatttatttatttattttccatctccaaagtaagggaaataatacaagaatctcctaactctgccattttttcataaagattgcaaccttttttttttagttgagcttcatcttatttgctttattcatctgaatgcgcaggagaagcttttcacaagtaaaaacagaacggaggcatctgtagggaagaaggtgaagatagacatgcctccttgaaatcgagaaagtcacagggtactntattttttta

SEQ ID NO: 47495 - DNA, 302 bp, Glycine max
  Clone ID: PAT_MRT3847_142894C.1
aaaaacctgtaaaccatatgctgatattgagcttacaaaataacctgaacgcaatttaataccatgctctgctgcaagggtatagctctaagacctttacgtgattatgaaacattacgaaatttcagcactttggtagcttgcatgctcacaccagatctatggataatcaaacaggcaggaaaagtgaccaccgcctaccaggacgctagatcagaaagatgcggctacaggagattagggctaactacaaactatagctaaaacagaacactgctgagtagagaaggatgaaactacta

SEQ ID NO: 47496 - DNA, 462 bp, Glycine max
  unsure (1)..(462): unsure at all n locations
  Clone ID: PAT_MRT3847_142895C.1
gattctgtntgaaacttatatacgcattaacggggggggtttaaaaataaggggggcccctagtacaatcgcaatcactctaacgtttgtatttgttacaaagaaacctttttttatttcacttacagataaattacgcctgtgagaaagctatcactgtggtaaaatatcccttatttttccataaagagatcccaattcttttttttgatatagaagcgcgcttttttggaactgtcatataattaatatagctctcaattggtatagaattcgacgcgaaccacatgtttatgaaaatatatttatgtttaattagccatatatcatatctatcttaattcccattttttactatttcaagtgaaacattgaatattataatactttttctaaaatttttcaaacatagatattgtttattgtaataaaaaatactaaattagtttacaaaaccaacta

SEQ ID NO: 47497 - DNA, 876 bp, Glycine max
  unsure (1)..(876): unsure at all n locations
  Clone ID: PAT_MRT3847_142896C.1
tactgctgcgagaagaccacagaaggggatcttaagcttgttctctctctctctctcttgttacacattctacattctctctctattatttttcaccctttttctctcttttgcaaagaaaacaatttaattaagtcaatttgtaccaaaatggcttctcaagtttgtgaaactttggctttcatcaacggtgatgatgggttgaaaatcaacggtgctcttctaatgtccctgatggaagagccatcaccaagtgatgagagtgatgatgatcgattggatagcttgattaggtcctttgaggctgaaattagtggaagcaagatgggggatcatcatgattcatcatccatagggtcagaaatattgatgagcaataatattatagaagagtgtgcatctcaatcatggaataataacatgggagagattgatggagtggagtgttgggctaattcatcatcaagtgaatttggggtggagtgggtagatatggattttgtgcaatcatccccatttgaagaaaggagctggagtgttgacccttgtggagatgagtatgctatcgcaaacaacttgaaagggtatgatgggtttgccttgggagaacatggatgcaattccttgtggcaagacatggcatgcaattgatcatgccttgctaatttatgatattgttcatgtaaaatcatgttgtaatcctcaaaatgattttataaaaaaaatgggataagattatgtgcaaaagaaagttctttgacatgtcaaatgatcttcactagacaataaacaaacaaaggaaagatagagagagaaaaaatctctttcatgactttttttttccgaaaaaaaaaaaaaaaaaaaaaacgaaaanta

SEQ ID NO: 47498 - DNA, 972 bp, Glycine max
  Clone ID: PAT_MRT3847_142897C.1
tgtttttagaaactttgatgcctcaattaattctgatctgaccaagtctgatctaaaacaaagatcattgaagtggcctgtttctggtatggatcctcagaagggaactgcagtcggtaacatagagctaataaatggaaatggatctgttaaacttatgagatgtgttaaacgccatcgaagatggagtgtggccaagataaaagctgttcattggacgcgatatttgctcagatatactgcaatagagatattctttagtgattcacttgccccagtatttttaaactttgcatcgcagaaggatgcaaaagatataggaaacttgatagttactacaagaaatgaatattcatttcccaaaggaagtggaaaggataagagtggatctattagttttgttgatcgacgagtggcacaagaaatggcagaaactgccagagaaagctggaggagaagggatataacaaactttgagtatttaatgattctcaatacacttgctggaagatcttataatgatctgacacaatatcccgtttttccttgggtcttggctgaccactcatcagaggttcttgattttaacaaatcatctacatttcgagatctctcaaagcctgttggagcgcttgatactaaacgatttgaggtatttgaagatagataccgtaacttctgtgatcctgatatacccagtttctactatggatctcattactcaagtatgggtattgtgctttattaccttcttagattggagccctttacctctcttcaccgtaatctgcagggtggtaaatttgatcatgctgaccgtctttttcaaggtattgagggtacctacagaaattgccttacaaatactagtgatgtgaaggagttaatacctgagttcttttacatgcctgagtttcttgtcaatccaaactcttattatctaggaattaaacaggatggccaacctaattg

SEQ ID NO: 47499 - DNA, 807 bp, Glycine max
  Clone ID: PAT_MRT3847_142898C.1
cccacgcgtccgcccacgcgatctctctcttatacacattctatattctctctctattatttttcaccctttttctctcttttgcaaagaactcaatttaattagtctatttgtaccaaaatggcttctcaagtttgtgagactttgactttcatcaacggtgatgatgggttgaaaatcaacggtgctcttctaatgtcatcattgatggaagagccatcaccaagtgatgagagtgatgatgatcgattggatagcttgattaggtcctttgaggctgaaattagtggaagcaagatgggggatcatcatgattcatcacccatagggtcagaaatattgatgagcaacaatattatggaagagtgtgcaactcaatcatggaataataacatgggagagattgatggaatggagtgttgggcccattcatcttcaagtgaatttggggtggaatgggtagacatggattttgtgccatcatccccatttgaagataggagctggaatcttgacccttgtggggatgagtatgccatggcaaacaacttcaaagggtatgatggatttgccttgggagaacatggatattacaattccttgtggcaagacatggcatgcaattgatgatgccttgctaattgatcatgttgtaatcctagctcaaaatgattttatgagaaaaaaaaattgggatgagattatgtgcaaaagaaagttctttgacatgtcaaacgatcttccctagataataaacaagccaaggaaagagagaaaaaaaaataatctctttcatctcttttttcc

SEQ ID NO: 47500 - DNA, 292 bp, Glycine max
  unsure (1)..(292): unsure at all n locations
  Clone ID: PAT_MRT3847_142899C.1
actctacattccagatcacttctgatnnctnnctctgaaacccatttacacgtagcaatgcccnagacatnntcgtccacanacgaccaaaccattcgtgataactgatgaatagatgaccaaagtcattgatggatacattgtcagtgtgcagcctgacgccttaacagatgccttgaaaaacgccattgagatagaatttataaccttcattncatatgaaccaaactganngccactgaacttcagacgtaactagattgaaactctctctgactgtgctgccatgatc

SEQ ID NO: 47501 - DNA, 110 bp, Glycine max
  unsure (1)..(110): unsure at all n locations
  Clone ID: PAT_MRT3847_14289C.1
cgcgtgcgggcggctctgtggcggacgcgccggcggttgttgatgtatgaagacggagttcgacctggtgatcgatgaggtgcctagcaacgctcgactcncggcgatta

SEQ ID NO: 47502 - DNA, 887 bp, Glycine max
  unsure (1)..(887): unsure at all n locations
  Clone ID: PAT_MRT3847_1428C.1
cctctcactttctctcttaccaaaagaatcgtaacatacaacaagtataatttcctatgtagtttgtctaaacacggtgcgatccaacagttacgtaccgcactgcagtgcattaacacatacaaatttcacctaacccccaccatgggaagagtaataattaaatagagggggaaaaaagcctcaacaatgagatgctgttttcttttccttttctgttcaaaataattggaagccatgccagactagttgcaatttagaagaaatagtgcacatccatgaatttccatgttcattgatatcgtcccctgcgtcgttattacatctgttccactccacacttccttgcccttgcatgaagtgatgcttttgtcaggaagaaccttagccagatatgatgtctttgcatatatctccgtcttctgttcgcttagattgaagaaagcaagatagatttcccctgaatagagatataagattaatataggatttgactttgactcctcttagagggtgaagtggatgaaattatagtaattgattggacccttatttaagagtcagatggtactcatgattaagcaaattctgttatttaagttcttatgtactcatgattatttaagcaattagcatttttccaattttgatgctttgcagttgcagaaaagaagaaaactcttgaaattcattcaagtgtttgttagaaagtagacagagacctgttcttcctgttgcgatccaagagcgaatcccaccagaattaacatttgctgcatgaatgaccgatgtgctttatgagtgataaacacaaggaaatggngaaaaagcaaccctggaaactagttctaaaaagtggaaaatgattacaaaattttaccttcaac

SEQ ID NO: 47503 - DNA, 714 bp, Glycine max
  Clone ID: PAT_MRT3847_142900C.1
atggcgactgtgtcccctctcgccaaatacaagctcgttttcttaggcgatcaatcggtcggcaaaaccagcatcatcactcgcttcatgtatgacaaattcgacattaattatcaggctactattggtattgacttcttgtcaaaaacaatgtaccttgaagatcgaacagttcgtctgcagctttgggatactgcagggcaagaaagatttagaagtctcattccaagctacataagagattcttctgttgcagttgttgtatacgatgtagccaaccggcaatcatttttgaacactaacaagtggattgaggaggtgcgtacagaacgaggcagtgatgttattattgtattggttgggaataaaactgatcttgttgaaaaaagggcgagccctggtgcagcggtaaagttgtgtcttggtgacttgttggtcatgggttcgaatccggaaacagcctctttgcatatgcaaggacaggtttctatagaggaaggagatgccaagtcccgtgagagtggaatcatgttcatagaaaccagtgcaaaagcaggcttcaatattaagcctttatttcgcaagattgctgcagccttgccagggatggaaacactttcttctacaaaacaggaagacatggttgatgtaaatttaaaacccaccgtgaattcatcccaggcagagcagcaaggaggaggttgctcttgctaa

SEQ ID NO: 47504 - DNA, 784 bp, Glycine max
  Clone ID: PAT_MRT3847_142901C.1
ggcgaaaatggtgatatacaaagaatggattgtagtagtcgtggtggttggcgctttctgatgcccgtgtataaaaggcattgtactttgaaattgcaattggtgtacatttcctctccctctccattttttgttgctccctcaaagtttgagagattcaggttcagatctgatcaacaaaaatggcgactgtgtccctctcgccaaatacaagctcgttttcttaggcgatcaatcggtcggcaaaaccagcatcatcactcgcttcatgtatgacaaattcgacactaactatcagatgtgtttattgcgaatgatcagctcttaattaggaggatcagaggagataggtatcatagtttgcattgcaatgatctctcagagatactttttctataccatcagggtcttgacaaatttctagatcatcaaaatttcaggctactattggtattgacttcttgtcaaaaacaatgtaccttgaagatcgaacagttcgtttgcagctttgggatactgcagggcaagaaaggtttagaagtctcattccaagctacataagagattcttctgttgcagttattgtatatgatgtagccagtgagtgtagtggtttttcattttttctaaatgtcagtttcattatctaattagctgtgttctttctgaatcttccgagattttctcatgtcataattcttccgagttatttgttagttatactcagagaaaagattttgtagcatatgaatgcattcttagattggtatctgtactctgtctg

SEQ ID NO: 47505 - DNA, 510 bp, Glycine max
  Clone ID: PAT_MRT3847_142902C.1
atgaagaatgtaactgtgaaatggaatccctgttctgagaaagagcatcagttttatatttcagaagctgaactgcaaatgcatcaagctaagacgcaattgtggggaaagactgggatatattttcattcagtgggtaaagaggctactttgatgatggatgaagaagctgctctcgaaggggaatttgagatcgaaaagattccaactcgtgtgatacaagctaggtcaaaagacttggttccaatttttgactatattcagacctcaaaatttcaacaaataaggtctgctttgatgactaactaattaacttactaattatctattaggtaggtcaaaagatttaggctttcgacattttgctattaatttttttgtcataacgacattacctcactttcgaaggctagagaataccaaaattgattatgttcatattgcatgtactctttgctgcatgcaaggagacagtttatttatgtgaatgaaaaactatggttttcacgc

SEQ ID NO: 47506 - DNA, 2805 bp, Glycine max
  Clone ID: PAT_MRT3847_142903C.1
cccacgcgtccgcagggccaagggcgagctggcaactgtgccattctggtgtggaatctttttatggacctccgacagggttcactgggccttttatggcgcctccggaggcattccaggagtccaggggccaccacacatggttgtttataaccattttgctcctgttgggcaatttggtcaagttggcttgagtttcatgggaaccacttatatcccctctggaaagcagcctgattggaaacacattcctacatcttctgctgcgggggctggtgagggggatataaacagtatgaatatggcatcttcacagaggaatcctgctaacattccttctccaatgcaacatcttgctcctggttcaccacttatgccaatggcttctcctgtggcaatgtttgatgtttctcctttccagccctctactgagatgtcggtacaagctcgatggtcacatgttcctaattcacaacttcctctgtcaatgccattgcagcaacaagaagggatacagacttctcagttcagccatgtcccttctgttgatcagccattaaatgccaaaaggtttaccggttctcgagcttcaacatcttctgagggcgataggaattttcctagagccactgatgtgaatgtcaacccattgcccgatgaacttgggttaggggacacttcaaactcaactcctaccaagacttcagcacagagtgttgtcaacaagactccatctgtgatccccattacagatactttgaaggttgatgttctgaatggcaatagccatagtagtaataaccagaatgcaagttcttctttcaagaatcagccctcacaatttgaccattcctcagggcatggtaattatcagaggggtggtatttctcagaggaataattctgggggtgaatggtcccatcgtagagggtaccaaggtagaaatcaatctctgggttcagacaaaaacttttcctcaacaaaggtaaagcaaatatatgtggctaaacagaccattagtggggcatcaacagtatcatgaggagcaagaaatatcagctggatttgaaaaaaaaaaaaactcaggaaggctttattattaatttttggtctggcagaaataaaagttttgattaagcttcttctacttgggaggttgatttttagattgatttttgctggctacaacaaattccgccgcaggttctggtagggatataggagactggtatttagcatggtaatgtggctttgatggacactgtccttttgcaatggtgtatctatcaaccaagcttggtcggtatttgttttcttttgatggtagaaaaaaaaaaaatcagcatcaaggccaattgggagctgcaacagtgccattctggtgtggaatctttttatggacctccaacagggttcactgggccttttattgctcctcctggaggcattccaggagtccaggggccaccacacatggttgtttataaccattttgctcctgttgggcaatttggtcaagttggcttgagtttcatgggaaccacttatataccctctggaaagcagcctgattggaaacacatccctacatcatctgctgtgggagctggtgaaggcgatatgaacagtatgaatatggcatcttcattgcggaatcctgctaacatgccttctccaattcaacatcttgctcctggttcaccacttatgccaatggcttctcctgtggctatgtttgatgtttctcctttccagccctctactgagatgtcagtacaagctcgatggccacatgttcctaattcacaacttcctctgtcaatgccattgcagcaacaagaagggatacagacttctcagttcagccatgtcccttctgttgatcagccattaaatgccaaaaggtttaccggttctcgagcttcaacatcttctgagggcgataggaattttcctagagccactgatgtgaatgtcaaccaattgcccgatgaacttgggttaggggacacttcaaactcaactcctaccaagacttcagcacagagtgttgtcaacaagactccatctgtgatccccattacagatactttgaaggttgatgttctgaatggcaatagccatagtagtaataaccagaatgcaagttcttctttcaagaatcagccctcacaatttgaccattcctcagggcatggtaattatcagagaggtggtgtttctcagagaaataattctgggggcgaatggtcccatcgtagagtgtaccaaggaagaaatcaatctctgggatcagataagaacttttcctcaacaaaggtaaagcaaatatatgtggctaaacagaccattagtggggcatcaacagtgtcatgaggagcgagaaaaatcagctggatttgaaaaaactcaggaaaggctttgttattaatttttgatctggcagaaaataaaagttttgattaaagcttctacttgggaggttgattgttgatttttgctggctacaacaaattccataccaggttgtggtaggggatattggagactagtatttagcatggtaatgtggctttgatggacactgtcgttttgcaatggtgtatctatcaaccaagcatggtcgatctttgttttcttttgatcgtaaaaaaaatgcagattatttattgggcttgtgtatcgaaatcatttgttgtctattctttccattaataaatgggaagtatcagttttgattaatgttagttttcatgtcttactttaatacttggtattctagtgttatgaactcgtttatatttg

SEQ ID NO: 47507 - DNA, 292 bp, Glycine max
  Clone ID: PAT_MRT3847_142904C.1
aatggaaaagaaaggttaccactaaaaatgaccaaaattatgggccggcaacacgttgacacggcccacacgttgtttctaaaatgaccaaatcaactaacggtttttaaaaggcgttttttgtccgtggaaacaattaaccaggagaaaacttttcaggatcctttaaaaaaaaaacccgaagtttttgggtacttccccatgtttaaacttaaaaacactgccagaatatttttatattttgaaaacccccctaaaaatctcaaatcaaggggaagagaaagctcttttt

SEQ ID NO: 47508 - DNA, 203 bp, Glycine max
  Clone ID: PAT_MRT3847_142905C.1
ggttctcatccgccgacaccgggcgtgaacaaggggggtattttgaaaaggtagcggggtataacccccgtggcaaccccggaccgggttattgggccagtggcggtagagtgcacaacccaggaaggggaccggtggcgaccacatgctacaacgggaccagcaactaacgagttcgccgaccgccttatggaccgagggaa

SEQ ID NO: 47509 - DNA, 478 bp, Glycine max
  Clone ID: PAT_MRT3847_142906C.1
gtcaaaaccaaagatgcgattaaaacatgatagtgattacctaatacggagagcttattactagatcctgatctttgatatgacgagaaacactaacaagctcagctcatttggatgccatgcgttacatcataaaagcactactggatttgcttccatcagaacaacaaccgtggatccaacattgcacattacactcctttcatgttaaatcgaccataaatcttactcaaaaagcactctatcgacaagaaatgctaattggcataaagccaacattcttttaattgacaaggacctctatatcatatagctttaagtctgaactgaaactccacagaagaacatctttatcagctaattcaactgaactatgcgccatgatgacttattcatcttacgaacttacttaaacttgctctgttgtaacgtcttaattctacgggcctacccagacttgaaatgctgctgaagcttg

SEQ ID NO: 47510 - DNA, 900 bp, Glycine max
  unsure (1)..(900): unsure at all n locations
  Clone ID: PAT_MRT3847_142907C.1
cgctagtgaaacttcacaacacaacaatctcaccaaaacattatctgattcatctcagcaaaaatgtcagcaacatctaaagaaggagagaacttaagcacaaacgacagggccaaccgacacccctcaactccttcatcgcacactaaaaaatgccctttgaatgccaattttgtgaagatggtggtagaagagctaagagtccaacgagggatagcccttccacttgtggccatgaacttggcttggttcgccaagttagccataacaacagcttttctcggccaccttggggagctgaacttagccggtggcgcactcgggttcagttttgctaatgtctccggcttcgctgtcttgaacggtctaagcggcgccatggaacccatttgtggacaagcacatggagccaagaacgtgaggctccttcacaagacccttctcatgacaaccctcttgttgcttttggtaacacttcccttatctttcttgtggcttaacgttgacaagattttgattctttttggccaacaacaagagatctcaatagttgccaaaacctatgtttcctatctcatacctgacttgtttatcaaggcactcctttgtcccttaaaagcctacctcagctctcagtgcatgactcttcccaccatgtttagttctgctgtggcactagcctttcacatacccgtcaacatactactctccaaaaccatgggactccgaggagttgcaatcgcggtttggataaaccgatctcattgttatggttatgctggcgatttatgttgcggctcttgagagaagaagtgagggcctgttgtggaaagaaggaggggtgttttgnatcagaacatgatggattggattaggctaatcaagcttagtggatcatgc

SEQ ID NO: 47511 - DNA, 321 bp, Glycine max
  Clone ID: PAT_MRT3847_142908C.1
ttgacaagaacgtagtgcaacactttgcaatttcagaatagttagcagatagagattctctcatgacatactgtaagcagatgtataatgttttgcaggaggctcctgaagacacagcgagtttatggtcacaacttcattatagtttcgtgggataatactgcaaatgcaagaagcttatcttgtcaatctagaagatgtgaacgagaactatattcagacagcccagaggaagctcgccaattgagagagagagctctctcataattagaaaggctgcgacagcctgatgagcctaccatagcacagattggaagagct

SEQ ID NO: 47512 - DNA, 327 bp, Glycine max
  unsure (1)..(327): unsure at all n locations
  Clone ID: PAT_MRT3847_142909C.1
nttttcgacanagnangcgaaaactncaacntaagctctggcancactnanttcntcatnctnctaaaacncnaanantggagtacaagcangaatnatntagataggaaacnnngatngttttcctctatctnacggtnaanngcttcggncncaggnantntcatantggaagtgaacaacnntggtacgtgnactatnctgtttacgttgnaaaaccgttccgggannttattgncggcgnccnttacatnnctggcagcctctntcaacccgcnatgattncacgggccaanngtgnngggatatgtcnnnaggaccagggnc

SEQ ID NO: 47513 - DNA, 231 bp, Glycine max
  Clone ID: PAT_MRT3847_14290C.1
gctgatcctgtcaacctagtagaagtgttacctgaattgtatctgcgcagttcacacgaagctcgccgactgagaacgagagctctctctcgtattgaatggctgccaagagctgatgtgccgaccatatcacagattgaagagctccattcgatgcagatgactgtgcatgctcctgattcacacgatgatattgagtgactgcttagcattgagttgttgcgtttacaa

SEQ ID NO: 47514 - DNA, 112 bp, Glycine max
  Clone ID: PAT_MRT3847_142910C.1
tccgggaaattgattgacataattatatatgcaaggataacttagcgtatcatttgaagtttgatgaaaaacgcgatcaaagctgtgaagaaagtccaagctgtggtccaac

SEQ ID NO: 47515 - DNA, 411 bp, Glycine max
  Clone ID: PAT_MRT3847_142911C.1
gggaaaaaccgccctcattcatgaaatcttaacccagggcccaacccccggattggggggatcccccccagagggggggaaaaccccccccccagtttttcaaccccccccaaaaaaatttcccgttatttgggaacctgttttttttttcctgggggccccggcaaggggccctggggcagggtcttttcaagagggcgccggggcctttaaaaaaattttcgggacctggtccggggacccttttttttttttcttgggtggcccccccccccccggggttttctttgggggccccgggaaggggaccttggatttaaaggggttttcggggggggggggggggggcttcaacaggtgggcgaaactgcccgacctttttaacaactgccaaaaaggggtttggccaaa

SEQ ID NO: 47516 - DNA, 394 bp, Glycine max
  Clone ID: PAT_MRT3847_142912C.1
ctctagcgttcttccacgcgcacgggcttgctcaagctccttagagctgctccttgcagcccaaattctatcccttcaacgacttgtaaactatgagaattctccagcggacaagactcccactgcgaaatcaccagttgtataagcccccagttgagaagccttctgcctacaaacccaacaaggtgaaaaccctccaatttataagccttcagctaagaagttaccagagttcaagcccccagatgagaaaccccccagcgttcacgcccccacctgtaaaaccaccactgttcaagcccccagctgagaaactaccagtgcacaagcctccagatgagaagccttccattcacaaggcctcagttgaaaaacccccagagtacaagcccct

SEQ ID NO: 47517 - DNA, 379 bp, Glycine max
  unsure (1)..(379): unsure at all n locations
  Clone ID: PAT_MRT3847_142913C.1
agcaaggaggggggagtgcaggcctgggcaagaccttgtgcccattccataacttctatctcaaaaccaagactgaccttcaacacaaggggcggtgctatccttgagttctgcagtgcgagtctgcatttaaaatgccaatcgcctaccaacagnaatgtaatatgcacaatcgtcacaaacctccgtcacattgtgttaacctgtcgccttccatgagctactctctgatgcacaacatcttctctctaaatttggggagagtaattatcaccaaaatagtcacctgaggattttgataatcaacattgaggaaattaatgaantcattgtatgtgtttaacgccacaacaggaaaaaaaaaaatgtcatgctttta

SEQ ID NO: 47518 - DNA, 1130 bp, Glycine max
  Clone ID: PAT_MRT3847_142914C.1
agaaatagccaagaagaattttatttgaaaaaaaacatagacatgtttagaagcagcataaatagaagcaatagccttgcaatcaacgagttcccccgaagatggttccgtgagaggagtgaatgtggtattggttgatggaagattggagagtgttccagcaggagaagggaagaagaaaccggtgcggtggagataacgaatggcttgaaggatgtaacgacagcgcgtggcgtcgtccgaggaggttcttgaacggaggctggtggtgttgaggggacatggattcagatctgaatgtcgagcagatctcaaacttcgtcgatcgtccagccttctccgccaactacggttgttgggctccacgaaccttggcagcagccagcagcttcatcggatatggatttggagcttctgcgcttcaaaacgacgtcgtcatcgaagtgtcgtaggtaggcgtgtccgctttcgttctattgttcacattaggctgcatgctccatagatttggatattttattgtagcagcttgcaaagttgccatttttcaacgatctatgtaattgggataggtacaaattgtggtacgagacgtctaagtcaagacatattaggaaagaaggaaagcaagtcccacttttcggctgcatcggggctgagtgtgctggccgtcggctctgctgtggtggcccctgggggtcaccgataaacaacaacaaagattctaatgacctcaatgtgacctcttctgcttcggttaaaacactaagcatggacaaagtgtaaaactcactttttatggctttcattgtcttccccttttcgttaaactgaggggtatgttagccgggtatgggtgtttgtgttgtttcttctgaactctggagttttgagttttaggggttggcatgcatgctttatatagcgaacaaattacgggagacaagaagtttgcttaaatcgtttcctttattgagcacttctagaatgccatcaacgcacttgtcattcctatttcgagtcagcatgctatcattatatggcaagggagacaagatgttagtctttccctgcaaatccaacaatccgttaagtttgtggcttagtgaagatgatgatgatattgaaga

SEQ ID NO: 47519 - DNA, 469 bp, Glycine max
  Clone ID: PAT_MRT3847_142915C.1
gtaacaaactattgtttttttttttttaccctttcttttctgcattagtttctacaaattggtgatgaagaaaatcaataattagagtttacctaaaactaaaaccatacactctcacaagttaatgatcatgacaagaacaaccattaattattacacacactcaccgagccttcttccgggtcttgaatgggaaattcgagggaggtgatggtgagaactcgaacggcaagtgtggtggctcagcctccccactaagcatccccacaacctccttgatggaaggcctcttcccgggggacctctgcagacacaacaaggcaatggtgatgcagagaagcgcctgctccttatccaaggaatggatagaagtgtcaacaagatccaaaagcctcccattgtgagcaaggctgccctggccccaggaaatccaaattgggcccctctcaaaactcagaacattggcctt

SEQ ID NO: 47520 - DNA, 306 bp, Glycine max
  Clone ID: PAT_MRT3847_142916C.1
ggctcgaggcacaagatcttgggtctgatctttgtcatgacttaacgacagcgatctccgacgtgaactaccaggacctccgagccctgctgatacacaagggaggctaccattatgtcaggatcacggacaagccatatccaatcgagaggacaccccctgcaaaggagaacacacccataactaccgagtgataacagctgatacacattcattcaccgattgtaaatagagagcttggcagcgtatatggtactaatggaagtgctgcaccggcgcaagatgacgcagctacagctcatgtcc

SEQ ID NO: 47521 - DNA, 451 bp, Glycine max
  Clone ID: PAT_MRT3847_142917C.1
ctttttcttttccctttctgcctctcggaactttgaaaacgtggaaacacacgggagagcccacaccagtgcccggttgttccgctgcatatcataaacaccgtgtattacccgtgcggggaaaaagataataaaagaaaagaaccctcaattttccgggaaaaccctacccacaatggtttcccaggaaaacaccaattggctcttcgattactgcttgatcgacgatattcccgttcctgacgccaccttcggcgtcaattcctgcgccttcacatggccccctaacgccttgaacgcttcctccaatgtcagcgttgaaattgatggctcgctgtgggattctgacagtctcaaagagtctggctcaaacaaaagggttaggtctgagtcatgtgctgcttctcgctccaaggcatgtcggtagaagttgataagggataggcttaat

SEQ ID NO: 47522 - DNA, 250 bp, Glycine max
  unsure (1)..(250): unsure at all n locations
  Clone ID: PAT_MRT3847_142918C.1
gttccatcaagtatggctcaatcatagaaggctccaatttcacttttcatattcctcttcnacactctcttatatggcttaaagcaagatctattcctcgggttataatattttgctatgctatactctgactattgtgccgctagtgctcccacgctatacccctcgtcaatggttaaatagcagcttcaatctccaatttaggggtcggatgaccagcttattaagttctcctaagcatctaaatgtt

SEQ ID NO: 47523 - DNA, 641 bp, Glycine max
  Clone ID: PAT_MRT3847_142919C.1
aaagttaagcgagaaatgacttaagtaaaatgacttaagcacgtcaacagggggtataaaaagtaaacaaaacgagaataaaaatgcccgcaacagccttttggaggaatattctggagggcccaagtgggcctgggtgctatttgcacccccatttttactaagtacacccccctctgctgttttttggggattcttttttcgtaaagttacggaaacttacaaatttcgaaacgatacttgttttttttccgtaatgttacggaaccttgcggattacataatcatcccccttttgacttacggaatgttacggaacctcacttaattatgcaacgatgcttccatttgatttccggggtgtcacggaaacttacggattgggcatcaatatttttttggtttttcggcatgtcctggaatttcacaaattgcctaatgatggatgccaagcacctcacaaggaccaaagaaaggtcgcatgtcatcaagcaaaggtccccggacaaaattagggtatgacagttgcccctctttacttgtcttttattggagataaaaggaaagtaaagataagacactaatttcgttcctctcgatttgacgagagtcgcgggtgaccataaaatctcccatgcaaa

SEQ ID NO: 47524 - DNA, 263 bp, Glycine max
  Clone ID: PAT_MRT3847_14291C.1
ctcccaccggacttacatacacactcttttactcctcctagccggccgagttggatgggggagacagtgaccgagctgaaccatgtcggactaagagcaccatttgcgaatacaaggccgatgccggagccttcaagacctattctgagctggccggaaccatcttcattaacgggtacatcgtcatcaagggtcgtccttgctaggttggtgaagtttcttctttcaagactgttaagctcggccgagcgttatgtcacttt

SEQ ID NO: 47525 - DNA, 526 bp, Glycine max
  Clone ID: PAT_MRT3847_142920C.1
gggtgtacttagtaaaaatgggggtgcagatagcaatcaggcccacttgggccctccagaagattcctccagaaggctgttgcttctggaggaagcaaccctgctcgcctgggcgagctgggtggcaagcttctccccccaattttctataaatagggggagaagtgaagtgaaaaggggttcagccccttaggcacttctctctctttcgaatttgcttggaaaaattgtttccgtgaagaaaatccaagccgaggcgcttccgaaacatttccgtaatgtttccgtaaggaatttcgcgaaggtttcgaccgttcttcgacgttcttcatccgttcttcatcgttcttcgatcttcaacgggtaagtacctcgaaccaagcttttcgattcattctatgtacccgtggtggtccacattgtgttttgtgtatttttattctcgttttatttactttttatacccccttttgacgtgcttaagccattttatttaagtcatttctcacttaacccggacgcgtgg

SEQ ID NO: 47526 - DNA, 733 bp, Glycine max
  Clone ID: PAT_MRT3847_142921C.1
ccataaaaaacaagcatagctaggttccttagtgggctcaatatggaagtaagggacaaggttgaactccttccatatagggacctagatgagctagtccaactttgtataaaagtggagcaacaacttaaaaaaaagccttcttcaaaaaggggatgattatgtaatccacaaggttccgtaacattacggaaagaaaacaagtttcgttacaaaattcataagtttccgtacctttacgaaaaaagaatcaccaaaaaaagcagagggggggtgtacttagtaaaaatgggggtgcaaatagcacccaggcccacttgggccctccagaatattcctccagaaggctgttgcttctgtaggaagcaacctggctcgcctgggcgagctgggcggcaaccacctcccctattttgctataaataggggaggaagtgaagaagaaaagggttcagccccttaggcatttctctttttttcgaatttgcttggaaaaattgtttccgtgaagaaaatctaagccgaggcgcttccgaaacgtttccgtaacgttttccgtgaagaaattcgcaaaggtttcaaccgttcttcgacgttcttcatcgttcttcgatcttcaatgggtaagtaccttgaaccaagcttttcgattcattctatgtacccacggtggtccacattgtgttttgtgtatttttattcccgtttcgtttactttttataccccctcttg

SEQ ID NO: 47527 - DNA, 715 bp, Glycine max
  Clone ID: PAT_MRT3847_142922C.1
gaagacgacagaaggggattcacaaaaccaaattgctttgcactactactaaactaccatcttgctttccaagcaatcactaaagtaaaagccagccatgggaaactgcttggtgctgcaagagaacgttgtgaagatcgtgaaaaccgatgggaaagttcttgaatacaaaacacccatcaaagtggaagaggttctgatacaattttctggccatgcagtgtctgaatcactcacagtgctgcggcatcttgagccacacacaaagttgcttagagggcagttatattacctagtgcctctgccaccatcaccaaaaaccaacaagaaggtgaggtttgcggaaccagaagtccaagatgtacataaaagtaacgtggttaggattaaggtggttattagtaagcaacagctgcagaacatgctgcagaatggagggttttcggttagtaagatgttgtctctagttcatgaggagaagggtactgaagatttgtctcaaaagagtgaggatgtttctcaagggtggaaaccagcgttggaaagcatacctgaagtaaagtagcaataaattttaagtttcaatacactttttctgtccctgcttataattttccctttttctagcttgctttatacagtgtaacaagagatatatattagagaaagagaaaaaaaaaaacaaacaaacaaaatttaagacttcccttttggc

SEQ ID NO: 47528 - DNA, 268 bp, Glycine max
  Clone ID: PAT_MRT3847_142923C.1
gctttattgatttttgttaatgttcctgagaaaatatgaagaatcaattttaataattgattctataattctattactcctatctaaaaaaatctgctcagcatcttactttaaaaataaagtttttttcaattactaatgaacaaatcaacaatcaatattatatgcacatgcgcatggataataaatcatgcatatgataaaatatcaactgctgattacaatggtttgtatcaaattatctactatagagaattcaaatcctatc

SEQ ID NO: 47529 - DNA, 1389 bp, Glycine max
  Clone ID: PAT_MRT3847_142924C.1
cggttagtcaacttagtttattactttaaagctttgatttttgttctgattgcatgatgctaggatagttgatagttaaaatagtgttaggaattatattttcatacaatgtatgttgttctggttaggatttgatggcctaattgtagaagcaagcttcatgatgatgaacctagcaattttgacgatgccaaaagaccaagtgattgattcaagacttcaagatcaagcatcaagaatctaatccaagattcaagattcaagagaagaaatcaagaagcaataagtcaagacttcatataggataagtattaaaagattttttcaaaaacaaaatagcacagttttgttatacaaaagaattttctcaaattttttaagttaccagagtgattactctctggtaatcgattacctgttatcagtaatcgattaccagttgtcataccctaatttcgtccggggacctttgctcgatgacgtgcgaccattctttggtcctcgtgaggtgcttggcacccatcattaggcaatttgtgaaattccagaacatgccgaaaaaaaccaaaaaaatattgatgcacaatccgtaagtttccgtgacacaccggaaatcaaatggaagcatcgttgcataattaagtgaggttccgtaacattccgtaagtcaaaaaggggatgattatgtaatccgcaaggttccgtaacattacggaaagaaaacaagtatcgttacgaaattcgtaagtttccgtaactttacgaaaaaagaatcaccaaaaaacagcagaggggggtgtacttagtaaaaatgggggtgcaaatagcacccaggcccatttggaccctccagaagattcctccagaaggctgttgcttctggaggaagcaacctggctcgcctgggcgagctgagctcgcctgggcgagctgggcggcaaccacctcccctattttgctataaataggggaggaagtgaagaagaaaagggttcagcccctttggcacttctctctctttcgaatttgcttggaaaaattgtttccgtgaagaaaatctaagccgaggcgcttccgaaacgtttccgtaacgtttcccgtgaggaatttcgcaaaagtttccactgttcttcgacgttcttcatccgttcttcatcgttcttcgatcttcaacgggtaagtacctcgaaccaagcttttcgattcattctatgtacccgtagtggtccacattgtgtttcgtgcatttttattctcgttttgtttactttttataccccctgttgacgtgcttaagccattttacttaagtcatttctcgcttaacttaaaaataaaatcaatttccaccgaacgtttgaattgtattatccattaacttcggttaaa

SEQ ID NO: 47530 - DNA, 529 bp, Glycine max
  Clone ID: PAT_MRT3847_142925C.1
acttacaacctagcaacactgggttcccgttactgtctgctacccacaccgtcaaggtcggtggcccgggaggcttgacctaccagcccgatcagctccagaacgttcccgtcggcgatgttgtcgtcttcgagttcctgtcccagaaccacaccgtcacccagtctccgttcgacaccccttgcgatgccatcgagggtggcatggactctggcttccaggccaacctcaacaacactgtcgtccccgctcctcaggtcgccatgcaagtcatgactgacaagcccctctggttctactgcaagcagggtaaccactgcggtgctggcatggttttctccatcaaccccaccgctgagaagactcaggcacagttccaggctctcgctatcgctcagaagggcaacggcaagcagactcccatcactggtggagagcctcttcctcctcctgaggctggcgctcccgccgctcctcctctcgccgctacccctgccgctcctccggttggttctcccgctcccgatgc

SEQ ID NO: 47531 - DNA, 2233 bp, Glycine max
  unsure (1)..(2233): unsure at all n locations
  Clone ID: PAT_MRT3847_142926C.1
ccacgcgtccggttcagccccttaggcacttctctctctttcgaatttgcttggaaaaattgttttcgtgaagaaaatctaatccgaggcgcttccgaaacgtttccgtaacattttccgtgaagaatttcgcaaaggtttcaaccattcttcgacgttcttcattcgttcttcatcgttcttctatcttcaacgggtaagtacctcgaaccaagcttttcgattcattctatgtacccatggtggtccacattgtgtttcgtgtatttttattctcgttttgtttactttttataccccctgttgacgtgcttaagccattttactcaagtcatttctcgcttaacttaaaaataaaatcaatttccaccgaacgtttgaattatattatccgttaacttcggttaaaataaattccgaccgtcggtcgtgccgtaaccatgttggaaatcaaaaaaagaggtaaaaaataatataataatcaaaaaaatatctttaggcaaagtaaagcggaaaatcaatcggacgtcttctctttgggatttctcattcttaatcgaattgattaataactaaagtgaaactaaggctaaaatcaactcgcctagtcaagctcgtccacaaaaataggctttttgaagtttgtcatttcaatttctcactaagtaaaatggatcattttttaaggtccaacacctttaaatgatcacctttcaagtaaaaagaatcacttgattcacgcataaaaagaactacgtaggtctgatttcctctttgatggagggtacgtaggagcaagagcctcgcttttgtcgacctcaaaaaataaaaaaaaataaagttaaggtaatgcaatttccacaattctaaaaaataggttgttgtccttcgagacaaacgtaagaggtgctaataccttcctcaagcgtaaatacaactcccgaacttagaatttttattttgaccggtttccttcggtttttccgacgttttccacaaataaacgttggtggcgactccgcgcatctttcctcctttggaaagcgcacccgtgagcctcgccctcgctcgcccgcgaagggcacgttgcgacagttgacgactccactggggacttatttttgtgagttaggcctattttaaggaattgtggatttgtgaaacttcgtgtgtgcatttgttgaactgtgtaaaatgtaaataattgttgtctatttttcacattctttacactgcattctaagcacccacgggtttgagtaaaaaaggggccctatacccgggttcatgggaatttaaggagtggaggtgaatctatcatcatgttaggtctccgacttgcttgataatagtgaaacctcgtctagagctttctctctttataatatgttgtcgctggtattccataccgccacaatattattatcttgagtgatgatacctctagaaaacggctatgtgagttatgaatcattgggaatagttattagagacccctagatactatcctgtaggtcggggggaaggggcattttttttttgctgcgngccgntttaaacactgccatgcatgtagtcctaaatgtcatatacgcctttgcttgtaattatttatggatattgcggtactctgtgcatccccctgttgcgcttttgcgcatctgcatcatgccatcacatatgcattgtatgtgggtctcgtcttttgtcatgggaattcgaaagatccatatcatcttcttaactgcacacatggggcactgcgccccccaaatgtgcagtaaggagagatgattttccaggccctcgtgtccgtaaatgcattcatatcatgcatcgcataaacatctcttcagcataataatgaacatatcgttcctgcatttgtccgttatcacattcccattttgcatgagtcattgcatcatcatgcatatgcattcaacatactttttgttctacaaactgcataccttttgttttcatgttcgctcatgcatgatccttgcattttcctctgcgaaacaaaaaaaagagaagcgcgaaaattcacgctgcattcttagttgcatatattcagtaccatgagtcaaccatgtttgggatcataaacccatttcacttaaaaacaaaatgattgaacatggtacctaaggcatggttaactaagaaagggatgntttcttcgggcatctcaatctcataattacattttccatgcatagcatgcata

SEQ ID NO: 47532 - DNA, 2290 bp, Glycine max
  Clone ID: PAT_MRT3847_142927C.1
acgagggaaaaccaaaaaaatattgatgcacaatccgtaagtttccgtgacacaccggaaatcaaatggaagcatcgttgcataattaagtgagattccgtaacattccgtaagtcaaaaaggggatgattatgtaatccgcaaggttccgtaacattacggaaagaaaacaagtatcgttacgaaattcgtaagtttccgtaactttacgaaaaaagaatcaccaaaaaaagcagagggggtgtacttagtaaaaatgggggtgcaaatagcacccaggcccacttgggccctccagaatattcctccagaaggctgttgcttctggaggaagcaacctggctcgcctgggcgagctgggcggcaaccacctcccctattttgctataaataggggaggaagtgaagaagaaaagggttcagcgccttaggcacttctctctctttcgaatttgcttggaaaaattgtttccgtgaagaaaatctaagccgaggcgcttccgaaacgtttccgtaacgttttccgtgaggaatctcgcaaaggtttcaaccgttcttcgacgttcttcattcgttcttcatcgttcttcgatcttcaacgggtaagtacctcgaaccaagcttttcgattcattctatgtgcccgtagtggtccacattgtgtttcgtgcatttttattctcgttttgtttactttttataccccctgttgacgtgcttaagccattttacttaagtcatttctcgcttaacttaaaaataaaataaatttccaccgaacgtttgaattgtattatccattaacttcggttaaaataaattccgaccgttcggtcgtgccgtaaccacgttggaaatcaaaaagaggtaaaaaataatataataatcaaaaagacatcttttagtaaaataaagcggaaaatcaatcggacgttttctctttgggatttctcattcttaatcgaattgattaataactaaagtgaaactaaggctaaaatcaactcgcctagtcaagctcgtccacaaaaaataggcttttgaaattcgtcatttcaatttctcactaagtaaaatggatcatttttaaggtccaacgccttaaaatgatcccctcttaaagtaaaaaataatcacttgataaaaaagaactacgtaggtctgattttctcatcccaaattgaggaatacgtaggagcaaagggaaatgttagacaagtggcctcagatatcttaagaatgaggggttgaattaagatattacaaaatatttccccaattaaaattctatttcactttctattcaagttacaaattcccttaacaatgaacttcttaaatattgattcaaatagaacaatctgaatatgaatataaagcaataataaataaaggagtttaagggaagagaaagtgcaaactcagatttatactggttcggccacacccttgtgcctacgtccagtccccaagcaacccgcttgagagttccactatcttgtaaattccttttacaagttctaaacacacaaggacaatccttcctttgtttttagaattcttttacaacaagagaccctccgtctcttaatcccttagagaatgagaagaagaagaagaacaaatctctctagaaagagatagattttacagattgagcactcaaataattccttaatgaattgcaattgaattgaccaaggaattcttaagaggataaaatgaatttgctctttgagaggataaacacttgttgttctgaaaatctcagagcaatttcgtgtttaagtcacatatatatagaccattggtggtcatgaataaagactttgaaaagttgtgactcttgaaattatttttctgaaaatcctgtctggtaatcgattacagtaattgtgtaatcgattacagcttttaaaatttgaattaaaacgtttactaactgctggtaatcgattaccaaaattgtgtaatcgattacacagtctaaaatttcgaattcaaatttttgtagctgttataaaacgtatttggccactggtaatcgattacatcctctggtaatcgattaccagagagtaaaaccattgagaaacacttttttaatttaaatcacttggccaaacctttgctaattcaattaggaattcccttcctaatattctagtgatcatcttgatgttgtgacttgtaatcttgaagtattgtcttgaattttaatcttgaaaagcccatttgcatcaattgcaacacatcatcatgatcatcatcaaaacatcaaagccaattg

SEQ ID NO: 47533 - DNA, 326 bp, Glycine max
  unsure (1)..(326): unsure at all n locations
  Clone ID: PAT_MRT3847_142928C.1
taacaaatatgcttggcaagaccgaggtcgatttgtcccagccttaccggagaaaagagctatngttagttacactagctcatcctattcccccagctctttcttttctgctgtttcccaatgaagttttcagatcagtggcaatctnagtcccctggctatgaccctgctttgttctttccctgagaaacagttcagcagtgaccaccacccacatgacatttcaaagcacctccttaagccagccagagtaggaccagttagacccagggtgtggacagctccttagcatcttatctctgtgctgttntggttttgtacataag

SEQ ID NO: 47534 - DNA, 3798 bp, Glycine max
  Clone ID: PAT_MRT3847_142929C.1
atggacctaaagaagtccaacaggccctggggtttccagctctggttacgggtctctgtcggccctacagggcgcccggattgtgcccgtaagacacctagtggacccgaagaaggccaacagggtcttgagttgccagctctaaatacggggcgaaacaccacagcagcattgggatggccggtagcgggcaatagacacaccgccaccacctctagagttcacctcagctcatccgcaaaaaggttagagcgttgcctacgacacatggccgaccagcaggcgaccaagtccaaagccaaagaaaacaccgagactttttcaagtctcacaagttatccagaactacgtaggtctgagttcctcattggaggatacgtaggagcaaaagcctcgcttttgtcgaccgcgccgctttctgttaccatgacccaagagctggtagcccgcggagacaccttacggttatccgcacctcgtcattcagtgaccccaagtgtgattgatgagcagaggccaatgtggtcatctgcgccttttccggagatgtcagcattttccgatggagacttttcaagtctcacaagttatccagaactacgtcatgtgacgtgcacccatgtatcatccagaggcggcgggcccgatgatacgcggagataccttacggttatccgcacccttttgtcatccagaggcggcgggcccgatgaaaagcagagaccagaggcggcgggcccgatgacaagcagagaccaagtttggtcattctgcacccttgtatcatccagaggcggcgggcccgatgatacgcggagataccttacggttatccgcacccttttgtcatccagaggcggcgggcccgatgacaagcagagaccaaagaccaaatttggtcattctgcacccttgtatcatccagaggcggtgggcccgatgatacgcggagataccttacggttatccgcacccttttgtcatccagaggcggcgggcccgatgacaagcagagaccaagtttggtcattctgcacccttgtatcatccagaggcggcgggcccgatgatacgcggagataccttacggttatccgcacccttttgtcatccagaggcggcgggcccgatgacaagcagagaccaagtttggtcattctgcacccttcagagacaaaatttggtcattctgcacccttgtatcatccagaggcggcgggcccgatgacaagcagagacaaaatttggtcattctacacccttgtatcatccagaggcggcgggcccgatgatacgcggagataccttacggttatccgcacccttttgtcatccagaggcggcgggcccgatgacaagcagagacaaaatttggtcattctgcacccttcagagaccaagtttggtcattctgcacccttgtatcatccagaggcggcgggcccgatgatacgcggagataccttacggttatccgcacccttttgtcatccagaggcggcgggcccgatgacaagcagagaccaagtttggtcattctgcacccttgtatcatccagaggcggcgggcccgatgatacgcggagataccttacggttatccgcacccttttgtcatccagaggcggcgggcccgatgatacgcggaaatacccgagtggaggaagcaactgggcggcaagctcctccacgtttttgaaaaatggttttcggggcttccgcggcttccgtaatacttccgtaaaatttccgaaaaccttgggagaggggggagctgtttcaaaatgttcagcccctttggcacttctctctctttcgaatttgcttggaaaaatcgtttccgtgaagaaaatcaagtcgaagtacttccgtaacgcttccgtaagcgattctgtggaaattcttcatcgttcttcgtcgttcttcaccgttcttcatccgttcttcgttcgttcttcgttcttcaacggctatttctcaaaggcaaagagagcagatgacttccccttctctgaccttgagctcaaagaagctgtgtggaattatagaggtgacaaatgccctgggccagatggccttaacttcaactttatcaaaaaaatttgggatatcatgagaccagagtttagaaggtttgtagatgagttctatgcccatggcagctttcctagaggaagtaatgcttcctttgtggcattgattcctaaactgaaccatcctcagtcattcaatgattataggcctatatccttgataagctgtatgtataaagttattgccaagttgctgtctaatagattgaggtctgttatggatgggctaattgatgaaaggcagtcagccttcattaaaggtagacatatcctccatggtattgtgattctcaatgaggtggttgaggaagcaaggagaagcaagaaaccagtgatgatcttcaaggtggattttgaaaaggcctacgattcagtgtcttggtctttcctggactatatgctgtttagattggggttctgcccaaaatggaggtcttggatatcagcatgcctccattcagcttctatttgtgttttgattaatggtatcccctctaaggaatttacacctataaggggtttgagacaaggggatcccctagctcccttgcttttcaatattgtaggagaaggcattactggtatgatgagacaagcagtccacaaaaacctctttagaaccttcttggttggtaagaatagagagcctatcaacatcttacagtatgctgatgatactgttttttttttagaggctgtgtgggacaacattcatgctattaaggccatcttaagaggatttgaattagcttctggtttaaagattaattttgccaaaagccaatttggggttattggtgatggtgttaattgggccagggaagcagctaataacctgaactgtcggcagctggaatgtcttttcctttacttaggcatacctattggggctaatccctctagccagctggtgtgggagcctatcatcactaaattcaagtcaaaattagccaaatgggctcagaaaaatatatccatggctgggaaggttactctaataaattatgtcctcaatgccctcccaatttacctcctctcattctttaagatacctcaaaaggttgtcaaaaagctgatatcccttaaaaggaattttctgtggggtggagatactgatcaaaaaaaaattccttgggtgaaatggactgatctttgtttgcctaaggctgatggggggctggggataaaagatatctccaaattcaactcagctttgatgggaagatggttatgggcttttgcatctgatcagcaacagctatgggctagggttataacctctaaatatggtggttggtcatatcttcaaaatgctagagacaaaaggggctattcccattggtggagagacattagaaacttgtaccatcagctagactgcagtatttttaaagataacttgtcttggaagactgacgacccacacaaggtgaaggaagaggtgaaatcctttttcttccataggttccaagaaccaattggtcagcgacccaagattgatggaatcaggtttcaaactgttaatctacagcagaataacgagcttctggcacctttcatggacgaagaaattcagaaggcaatttttaaagctgcagcgaagttttttatgaaggaaggcaattcacaaaaggattgcatggatttaatggaaatcagtatgcttaccaaaagaaaaggctggcttgggcatcaaggatattga

SEQ ID NO: 47535 - DNA, 573 bp, Glycine max
  Clone ID: PAT_MRT3847_14292C.1
ctgttctcacatctttgatcattgttggattcctcttgaatggttaaatttcacatttcattaaaatcctattagcacaagactaacaaatttgaatcccttatttggtattttagttttagccaattgactccactttctccctttcaggtacagggcagttacaagtgcctactatagaggtgctgttggggcaatgttagtgtatgacatgactaagcgccaatcgtttgatcacatggtaaagtggttggaagagttgcgaggccatgctgaccaaaacattgtgataatgctaattggtaacaagtgtgatttggggagcctaagagcagtgccaatggaagatgcagaggagcttgcacaaagagagaaccttttctttatggagacatctgcacttgagtccacaaatgttgaaacttgctttttgaccattttaactgagatatatcgaatccatgccaagaaatcactcactaccagtgatgatgatattgggggttcggggcttctcaagggaagcagaataattgttcccaatcaagagatatataatggtggaaaaaaggg

SEQ ID NO: 47536 - DNA, 656 bp, Glycine max
  unsure (1)..(656): unsure at all n locations
  Clone ID: PAT_MRT3847_142930C.1
ccttccatcaaagggagtaactgacactttagttcctccttcctcctgcacatctagcttagtttctgtctctcttcccgtgtatgagacctttcgtttatgctctaatcaatattgtcgcccataaaaatcattccccaacatgattaatgctcccattaattatttatcctcttcccgtgtcattatttcatattcatgttttttccattccattnctctttcacgaagaaccgattcaatatcccctcctcccttcctcgcctctttatttctttttcctttgctccttcatccactttcgttgtgccggaacgtcaaagctatcactgttcctcaatggcttccacaggcagggccatggaaaggccagagtcgtcgcatcaaggggaacatgacaagcaattatccaaccgcactcatctatagagattctatggttgcaatggttactcaaggagcacatgctgcaaattcatttttgtatcgggacaatatttctcagagtgtttttgcataaacaaggagggattttgtaagaatagggtggtagtgcacttagcactaactttatgttggataggataggatgtggtcctctaatgtacccatccatctttaatttnnntaatctttatctaaactcggaagattag

SEQ ID NO: 47537 - DNA, 412 bp, Glycine max
  Clone ID: PAT_MRT3847_142932C.1
ttcttttttttttttagaaattataatgactggctatgctttaatctaacagatggataatttatcctacgtcagaatcctagatcaaactgaacggctcgatccaatagctattaacgagatcccagagcaaacacctatctagctctgagtaatgtgggacgaaacatcgcggtgcactaattgcgccccggacttggtgaccccgtcagtgaaccacaatagacccttcagatgaagatatcacttaaatgggactgtgaccacgttctacatgataagacgcttatcatactcgggcgatggcatacgccgaacactcatgtttcggcgagtttcaagagctgaatagtctgcaccagacccgtcagcgttcctttgcatgatgcccaatagcccatgccgataaaca

SEQ ID NO: 47538 - DNA, 554 bp, Glycine max
  Clone ID: PAT_MRT3847_142933C.1
cctcgtgccgaattcggcacgaggcggcacgagggttcttctggctattaatgttttctgattctagttagttgttttagctatacttttttcaggatggcaatatcctgccatgctttatggacctgttattgtctatttaggtgtaactggaacaattctagttggttttgtactggctgggcatgaatgcttataatgaccatcttctgacttgtgtaaataggataaaagatattgcatcaattagtgatcttgtctggatcttatgtaaaatgagtgcactatatgtttgtcctactgtgctatttactgggttgcttcagtgttttgcgtcttgtctagcagcccggttttttgctaatagtagtgtgttgttctgtaaggaaaggccagttttaaactgaataattttcgttgtacttctccagttcagagattacttcagtaatattccctatagtgactacactgattttcttgtgtatgttttgcaaaatatcctgaaatcatgataaaggtttttggaaataggactcagtttttgcagttgt

SEQ ID NO: 47539 - DNA, 1243 bp, Glycine max
  unsure (1)..(1243): unsure at all n locations
  Clone ID: PAT_MRT3847_142934C.1
gaaagaagtaacctctgttttctctcactctggaagaaacaaacaaacaaacactcaaattctctttccttccacgcagtaatcaatattcaatcaacctttatgacacagaaaaccccaatcccaaacaacaccctcagaccctaattacttaaaaaaattcaattttctgttatggcgactgatgcaagggcgaagttccaaaacccggaattccgacccgatttccacgcggacttaacggtgtcaagtcacgacggcctccagttctggcagtttatgatcgccggatccatcgccggctgcgtcgagcacatggccatgttccccgttgacaccgtcaagacgcgaatgcaagccctaggctcctgccccgtcaaatccgtaacggtccgtcacgccctcaagaccattctccgtctacgaaacctgcaagaagaaattctccgaggggaaccccagcagcgacgcggtgctgacgccgatggacatggtgaagcagaggctgcagctggggaacagtgggtacaagggggtttgggactgtgtgaagagggtaatgagtgaggaagggtttggagcgttctatgcgtcttataggaccactgtgttgatgaatgcgccgtttactgctgtgcatttcacgacgtatgaggccgcgaaacgaggcctcatggaggtctcgccggagagtgtggatgaggagaggctggttgtgctctccactgctggggctgctgctgggggtttggctgctgtggttaccacgccgcttgatgtcgtcaagactcanttgcagtgtcagggtgtctgtggttgtgataggttcacangtggatcanttgggggtgttgttggagcgntggtgggagnggatggttncggaggggttgtgcnnnnnnnnnnnnnnnnnnnnnnnnnnnnnnnnnnnnnnnnnnnnnnnnnnnnnnnnnnnnnnnnnnnnnnnnnnnnnnnnnnnnnnnnnnnnnnnnnnnnnnnnnnnnnnnnnnnnnnnnnnnnnnnnnnnnnnnnnnnnnnnnnnnnnnnnnnnnnnnnnnnnnnnnnnnnnnnnnnnnnnnnnnnnnnnnnnnnnnnnnnnnnnnnnnnnnnnnnnnnnnnnnnnnnnnnnnnnnnnnnnnnnnnnnnnnnnnnnnnnnnnnnnnnnnnnnnnnnnnnnnnnnnnnnnnnnnnnnnnnnnnnnnnnnnnnnnnnnnnnnnnnnnnnnnnnnnnnnnnnnnnnnnn

SEQ ID NO: 47540 - DNA, 180 bp, Glycine max
  Clone ID: PAT_MRT3847_142935C.1
agacacagtgccattgccggatttaattgcaccactcctctctctctctctcacctcctatacaactaatcttgtaagattttctctctctctaccctgtctttgcccaaaatttggtgggtgcaatcatcacacttactttgccattaaaatccctccaaaaaccgtttcccctttcca

SEQ ID NO: 47541 - DNA, 174 bp, Glycine max
  Clone ID: PAT_MRT3847_142936C.1
ttattcattcaaaggagtcaaatccacttttcataaaaaaagaagaaacgacagtattacaaaattgattgggccttaaaccaccatgagtttatataaggccatgaataaatactgggttggaaaaggatgatgacacaaggtcattttgccttacttgtacttcaattgaaa

SEQ ID NO: 47542 - DNA, 163 bp, Glycine max
  Clone ID: PAT_MRT3847_142937C.1
cgtacgacagcacataatggggctcaaagagattctttttgcgaaggcaatatatgatgaacacggcggattaaattttgacggcgcttcaactccctccctcgctttcagcatctaccactatgaatctcttcttatatctcatcctctagatcttctaaaa

SEQ ID NO: 47543 - DNA, 235 bp, Glycine max
  Clone ID: PAT_MRT3847_142938C.1
ggatcctctgagcgggcgctgttggttttttttgtgggtatttttttttggtcagcaaaaataggggtatataaatagagagaggaccaggaagtgctgaaaatacataatgaggttaagtacatggggttggtccaagaactagcctagcagtggataataggaaccagcttaacgcaggcgaggggggcaaaaggcctgcacctattatataaatgcctgcaggtggcatcct

SEQ ID NO: 47544 - DNA, 225 bp, Glycine max
  Clone ID: PAT_MRT3847_142939C.1
caactttagctcggaattcggctcgagcaaatccccacttatttctactacacttccgtcgcctccaccctcttctttttccttcagcaaatcatcagtcacgaaaacaacaccgagtgggtggaggaactcatcatacctatgttaccgaaaattcacaccgattattttccagatcaagatgaatgaccaggtttttattgacatttccatcttcatgaggga

SEQ ID NO: 47545 - DNA, 134 bp, Glycine max
  Clone ID: PAT_MRT3847_14293C.1
ataacacatgagcgaagctctagacattatctacaggtgtgggtcccatgttcgggttctcagaattcgaggaagtgcacctaaatctgtccgagcgaatccacgatatgttcgtgtaaacactgagacaaaat

SEQ ID NO: 47546 - DNA, 427 bp, Glycine max
  unsure (1)..(427): unsure at all n locations
  Clone ID: PAT_MRT3847_142940C.1
acactctttcctaaacttttgtgagggtagactgccgctttttttttatttaatttctccaatattttctttacttnncgtcctttttggtccaatgtaaaaaccgtaacttacaaaccaaacatttttcattcaaaaattgtttactctcaagtacaaataataaacattcaacctcaaaggggcctaaaaccccctaaaaacattcaaaaactttaacaaagttttttattgacacaatctccatcaaacatggattcttcttatcaaagtaaactaccaatttatttcttataataaaataacttcaagccaaaaaaaaaaaatgaatcgaccccactttttccaccaatagaaaaaagtctttcccctaaaaaacttttttttcaactttaaaaaattccattcaacaaaaccttaaaaattt

SEQ ID NO: 47547 - DNA, 269 bp, Glycine max
  Clone ID: PAT_MRT3847_142941C.1
tcttttttttttttataaattttattccttcattactcctgggtttttttaagagggcattaacccggaagcccaatctctgaatggggcaccccttcattttccttaagttccattagaaggagggggacaaccccttgtaaaaaccagtgtcccccagccaccatctaccatgtggccctttttaataatttaaaagcaccccctttttttcaaggggggaagaacccccccttcctgttaaaaatcgtgcttctctcacacattcc

SEQ ID NO: 47548 - DNA, 323 bp, Glycine max
  Clone ID: PAT_MRT3847_142942C.1
atggagggataggaatcccctagactcccaagaggcgaggatcacatatcctcttttataccataagatcagaactacgcccagacagagcgggtgatgcctgcaataggagtctagataatgcctcacactcataggacatgttcttaccttctgatggtgcaaccgggacattcctctaaccctcttatgccgtgcataattgaacacgccatgattttgatggctagaccagagcatttacctggcgaagcaaagaatctgagcgcaaaagctcttcatcaccctgaccatcctcctctgtgaagacccacagagcatag

SEQ ID NO: 47549 - DNA, 465 bp, Glycine max
  Clone ID: PAT_MRT3847_142943C.1
caaaaccttaaggttcttgtcaatttttcagtcttcaccacgaaattgttgtgcatctgagggaggactgggcctcatacttgcatttcaacgagggatcatagtagtagtactctcctacgggagttcctggcagcaacctatccttattaggtggagctcgacaccgggcattaaatcttgtacttgcatagcctcttaggagaaactagagtctagagatataatccttcaacggtttgcttggtttttgcctatatatggccatgaggcttgcttgggttccctgcgtcattccttgtgaaaaggacaggtgaccaaaggttcgaaggctttggtggcatgattgtaattctggggaaggattgttatagacatctcaacatgttgtgcctacaatctcgaattcttatcaggttttgctttttgatcagtagagcctgctcatgaatcaatttgattagc

SEQ ID NO: 47550 - DNA, 541 bp, Glycine max
  Clone ID: PAT_MRT3847_142944C.1
gccccatcatgctcataaggagtatgttccccagcttgccaagatgaagagaggtggagggttggttttagtttcacaattcatggttgaattgcaagggctgaagtcagtggatggggaggatcctccgaagattcttcacttgaatcctcgaataaggggggattggagcagacagccagtaattgagcataatacctgttacagaatgcactggggaacctctcaaagatgtgatggtctaccgtctggggatgaagaagaaatgcttgttgatggatacagacggtgtgagaaatggttgccgaatgatattatagattctaaagagtccaagacgacatcctggtttaagcggtttatagggcgtgagcaaaagcccgaaatgaccttgccatttcctttagttgagggcagaatgtttgtccttacattgcgtgctggtgttgatggataccatattaatattgggggtcggcatgtaactttatttccatatcggacctggtttacacttgaggatgctacccgattggcaatc

SEQ ID NO: 47551 - DNA, 381 bp, Glycine max
  Clone ID: PAT_MRT3847_142945C.1
gttttacccacacgctttttgaaccccttaaagggatggattatgcggcattccccattcgttattaccttctttgcgttcttgcccttgcatagactcctgaaaacttacgcccaaaagtttgatcacaaggggacatcctggcccatgtaggttacacgatgtggtgcaccgtcatcagctatcatttgtagagtcacttcctgagcaagctatgcaaaaacctctccttatacgtggaccatcaatgctccacctactaggcgaaccacgaacactttgtgtcacacccccaagaaggatcttgagatgagtaacacccatgatgttcaatgcgtgggaggcgccactttcctgaccaccaatttatggaatgatggg

SEQ ID NO: 47552 - DNA, 378 bp, Glycine max
  Clone ID: PAT_MRT3847_142946C.1
gtaagcctcggaacattcggctcgagggacactgatgcaacctactacagctgatttttctgtatttggtggctctcacattctgattttgaagccctgcctttaattccatccgggacccttcgagaagactaatggcctctaaaaagaaatctattaaagaatgttgtgattaaaaaacaagcaagtctcctgtcaagagaggtaccaaaggaggcgtttatcaacacagtactaaacaaaaagcattaaattctgagttggaagaaaaaaattaaaggtcaaatttaggtgaatttgcgaggttatataaacacagttgatgcatcagaaaacatgatccatgagaatgactaattaatagtcaatctcgcaatg

SEQ ID NO: 47553 - DNA, 835 bp, Glycine max
  Clone ID: PAT_MRT3847_142947C.1
attttaattcattattatgttctatatttttctgttttctttttttttctttttctatagccaaagagcccgaccagtacgtacctagttgggctctttttaattcccatgaatattgaataacaatgttttgtttgaattgaatgtactttattagaaatatgttttctcatcttttagacaaattatatgatttctataaattagttaattttgttaatgaacatctcattttaacttatcatgaaatttatctcattatttttttctcttattagtgtttctaaataaatttatccaaacaggtcataacactttgtcgaccagtacctgatagcttcaacatcatttgaagtgtcctctccacacattggaggtgctctgaagttgtctcagtgtctatctaatggttaaatgtcacaaacattgatttttcacctaagtgtttgttgttttcctccatttgcatagctccgttgaggttgggtcgatgtaggcattgttccttctttggaaattttattgttaaggttcattttttggaattcttagttaactattttccctattaagtaatccaaaagggtattgatggtaaaagaattcaaaatatgcaatctagaagacttattaatgtcttacagaatatgtattccaaaaaattaattacaatttcgaactaggcaatgaagaaaagaaacttcaacctttcaaaataattattccattaatttttaaccatcttctagattatccattgcggaatatgtttaacatttttggaataattattctgaaagattgaagcttcttttttggatagtaattagttttc

SEQ ID NO: 47554 - DNA, 196 bp, Glycine max
  Clone ID: PAT_MRT3847_142948C.1
agaccttcataccatagtagagtgccgaggttggaggatccgaatgccctgcatttgtgcggtacggatcttccatctgacccgttaacttgatcataaatcctactgttacaccatccagttgcattttctactcgctctaccttccattattgtctccacctgcaccggtactaaccccttcatctctattgct

SEQ ID NO: 47555 - DNA, 503 bp, Glycine max
  Clone ID: PAT_MRT3847_142949C.1
ggcaattggatcgtcttgttgctagcgaacttagtttgtttaaataatcaggtcacggaactacctacctcgctggaactatgcttagaactgacaaacttacagggaccaacctatcttatcacacgtttgccagaaaattgaccatattgatccaaattgtctaaactagatttggaggggaccaggctaccggtgatatctgaaaatctcattacatcagggacgatgcttactgaattcaatgcatcaaaaaattggctgactgggataccagccagcattggaggcctttcgcgtttaattcacgtttacgggcatcaaaccagaatataagcattcccttgctcaatcatatggttgtcattcactcactgagctttatttgatgaataacagtatttctacattaccagtggatataggggccctttctcgccttgggactttatatcttcactctaaccagctgaaggactatccagtagacgcatgcacattga

SEQ ID NO: 47556 - DNA, 651 bp, Glycine max
  Clone ID: PAT_MRT3847_14294C.1
gtaaacaacttaaatttttataaaaagacaaatatacatatttacacaggtccaccacatgaccaaacaccatttagcagttaggtggcgtttctaatagatagtcaagagtcacgccaaggcgctcacaaccccccttttccctggggctgctgaggactgccaaggcctgaggagacagcaggcaccaggcaaggcactatataaataaatgcaaaggcctagactggggagaaatgttagtgtacacctctgatcagaaatgtggcaaagtccacagagaaagtgccatttttttttcctgagccccacagctggagcaggtagtgaggcagattccctctgaggctaagggagccaaccttcacaggaccccattttttttcccttcacatttcactggcttgggaaccatcccagggctcggttgggaagggcagcagttctttgggaataggactcatttagtgcaattgtctcctagtacagagccagctctagggccagtgctatgctcttctgtgggcgctggtctattcccctcagggccagcccagcgataagaccctctctatgcaacaaggcttttaaaaagctagaagatgactcctgtccatggcctctgccttacacctcagaccccccaatcca

SEQ ID NO: 47557 - DNA, 250 bp, Glycine max
  Clone ID: PAT_MRT3847_142950C.1
gttccaggttaacaccaaacaacacatatagtgcagattcataagcttccaacgctggaggatccccatcccactccagtgacgtctgctcagagatccatgggaactcccagtactgtacacatgctgactggtgggatgctaatgggcagactccgctgtgtcctcgtatcttaggccacgaagcttcggcgattgtggagaccgttcgcaatggtgtgaaacatctgcaaccaggcgaccatgctct

SEQ ID NO: 47558 - DNA, 2069 bp, Glycine max
  Clone ID: PAT_MRT3847_142951C.1
cctggggccggctgcaataagactccaaaaggggggcttcacaaatctggaagacccataacccattcctctctctctctaattttcacactctgtccctgtcgctgtgttatttcattttttccacactcccattcatcatcttcgttcttcttcttcgccctccatttcttatttttctttcttttcttttttcttaatttattatttattcatcttcgtttcttcgcattgtgctttcttcgattttttcgctgcgtccctcttagatccctctctggatcacaggggtgttgatggatggtggatgtatggggaagctggtgaggtacctcgaacttaaatgaagaaggaacgtgcatggccgcaattcataaggaatcttttgctcatggttggatcaagaagccggccacagttgaggaggcctacttggattattgttctgctttccatagtgtgtgtgtttctgattgctgcctatgtttaccccccgcctagcccttcttcgtgctccgtcttttcctcccatggttgtggtagtggtgcttttgatctgcctccggctgctcatacccgcgaattgactgatgcggaggttgagtcccgggttgttattaatgagatcctgaacagttatcctatgcacaccaagaaacctaaagttgcttttttgtttttgagtccgggttcgttgcccttcgagaagctctggcacatgttctttcagggtcatgagggaaaattctctgtttatgtacattcgtcaaaggaaaaaccaacacatgtcagctccttctttgttggccgagagattcacagtgaaccggtaggctggggaaaaatttctatggttgaggcagaaaggagacttttggcacatgcacttttagaccctgataaccaacattttgtcttattgtctgaaagttgtatacctgtgcgccgctttgaatttgtgtacaactacttattattaacaaatgtcagctttattgacagctatgtggatcctggtcctcatggaaatggcagatatatagaacatatgttgcctgaagtagaaaagaaggatttccgaaagggttcacagtggttctcaatgaaacggcagcatgctataatagttatggcagatagtctctattttacaaaattcaagcaccattgcaggccaaatatggagggaaaccgcaactgctatgctgatgagcattacctgccaaccttctttactatgcttgatcctggtggaatcgcaaattggtcggtaacatatgttgattggtctgaaggaaaatggcatccaagatcattcagagctcgggatattacttatcaagtcatgaaaaacatagcatatattgacgaaagtccacattttacaagtgatgcaaagagaacagtggtgattacaccttgcatgttgaacggctcgaaacgatcatgttatctatttgccaggaagtttttcccagaaactcaggatagattgatccaactctactctaattctacaatattctaaagtatttatgtttctcatcattctttggtgatccaacaccatgtgatccccggcctcactgtcttgcacataccgaattgttttgagaagtgcccaaaggtaactggaaaaatttcttaggaagacaaagaagctgattcagttaagatttgctttgtctggggctggacggaactgctgagcttgtcttgttggataatatgcttttcctattgtacctttttttttaagtatttaaaacaatcatagattctcctgaaggataaaaagttttggtatccttgatagaggctagagagggagggataaggtttggtttagattttgtctctggaagctaactgtcacttatgactgtttttgcattggaaatttttctgcagtcacacattaaatgttacttgatgaatggttcagcggttaagaagagaattttgcaaagaattctcagtattttgttttagaaattgacaaatgtacggctttatgggacaatttttttcttaaaatttattgagcgtgtagtatctggttatatttc

SEQ ID NO: 47559 - DNA, 478 bp, Glycine max
  Clone ID: PAT_MRT3847_142952C.1
ggctcgagctctattcttaaattttttttataataatatgccgtcttcgctggaacttgtaacttgtagctgtcgtgccttttattttattcaagagtttagagcttccttttcccctctaaatgatgactttatcttacgatcctcgctcagtctggatgttagggttgctaattcatgaaatatgtgttattgattaagttaatactctcgattttcactcttcttctttgttttcagattgttttattttcctactaccaaactttttccaactgagttctattgtttaggtttggactttgtttaatcacgtggaccattagagttggtgaactcttcttttcctcacactacttaggtgagcatctcaggttttttttttgtttctctgatccttgatttttttctcctttaaagaaacataataagtacgtactattcattatgctggttactttggactttggagtaatgc

SEQ ID NO: 47560 - DNA, 492 bp, Glycine max
  unsure (1)..(492): unsure at all n locations
  Clone ID: PAT_MRT3847_142953C.1
nctttttcttgatttattatttattcatcttcgtttcttcgcattgtgctttcttcgattttttcgctgcgtccctcttagatccctctctggatcacagggtcatgagggaaaattctctgtttatgtacattcatcaaaggaaaaaccaatacatgtcagccccttctttgttggccgagacattcacagtgaaccggctggggaaaaatttctatggttgaggcagaaaggagacttttggcacatgcacttttagaccctgataaccaacattttgtcttattgtctgaaagttgtatacctgtgcgccgctttgaatttgtgtacaactacttattattaacaaatgtcagctttattgacagctatgtggatcctggtcctcatggaaatggcaggtatatagaacatatgctgcctgaagtagaaaagaaggatttccgaaagggttcacagtggttctcaatgaaacggcagcatgctattata

SEQ ID NO: 47561 - DNA, 332 bp, Glycine max
  Clone ID: PAT_MRT3847_142954C.1
agtcgaaatatcgcgttctatcaaagtaaccaatcatattcgcaattttttttttatttctcgttttcttcttcactctatttcttctttaccacacaaatgacaaagaaaatactgtgtttccttactttctttgttccgttaatcttcttcacccaaacacgttacgttggaatcgactgtaataggcaaacaccattgactcacagtagtactattagcttgggtctacgacatgtgtttgtcagcatcagtagatgtcactcaaaagattgagcggtagttcttgatttgcacaatagctgccattgccaaatacatatgattagccc

SEQ ID NO: 47562 - DNA, 358 bp, Glycine max
  Clone ID: PAT_MRT3847_142955C.1
gacagccacatcgaaatactgttgtagaaagctttgtgttgtattgtggctgagccaccacaattctgattcctttctcttctcggcagtttgcttcctccgtagcagatcgtaaggaacttttgccttgtaagtgtaactattggtaccatggtgtaaacctaaagcattggaagaactgagacattgccttatgaagactgtgggagtaggctctagtaaagtgacattgtctctaagataaaattctcaactcagaaagatggtcatattctcaataagtaatgccagatatacttatgtgcatgatcagaaatatccctctaaagatgttgacatacaccatatagtttcaagg

SEQ ID NO: 47563 - DNA, 523 bp, Glycine max
  Clone ID: PAT_MRT3847_142956C.1
ggctcgagcaaatctgaggctcgagggtaaccactcctctctttgttctcttctttccacactctgtccctgtcgctgtgttatttcattttcccacactcccattcatcatcttcgttcttcttcttcgccctccatttcttatttttctttcttttcttttttcttaatttattatttattcatcttcgtttcttcgcattgtgctttcttcgattttttcgctgcgtccctcttagatccctctctggatcacagtgagaacagtgttgttgagtttgaataaattaatgaaggggtgttgatggatggtggatgtatggtgaagctggtgaggtacctcgaacttaaatgaagaaggaacgtgcatggccgcaattcataaggaatcttttgatcatggttggatcaagaagccggtcacagttgaggaggcctacttggattattgttctgctctccatattgtgtgcgactctgattgctgcctatgttaccctcctgctagcccttcttcgtgctc

SEQ ID NO: 47564 - DNA, 678 bp, Glycine max
  Clone ID: PAT_MRT3847_142957C.1
ccacgcgtccggttagtagcatgtggagaatatcatacttgtgctgttacttattctggggatctttatacatggggtgatggtgctcacaattctggcatgcttgggcatggaaatgaagtcagtcactggattcccaagaaagtaggtggtaacttggagggcttacgtgtattatatgtgtcctgtggaccttggcacacagctattgttacatcagctgggcagttgttcacatttggtgatggaacttttggtgccttaggacatggagatcttagtagcgcaaatattcctcgggaagtagaaaatttgaaagggttgagaacaaccagggttgcctgtggtgtttggcacactgctgcagttgttgaggtggtaaatgaatctgtggaatcttctacacgctcatctagtggaagactgttcacctggggtgatggagataaaagccaacttggacatgctgatagggaacctagactagttcctgagtgtgtaaatgcattgagtactgaaaacatttgccgagtggcttgtggccacagtcttacaattgctttgacaacgtcaggacgtttatatacaatgggaagtacagcgtatggacaacttggctgtcctgcatctgatgggaaagtccctacatgtgttgaagatataatttctgatagtttt

SEQ ID NO: 47565 - DNA, 255 bp, Glycine max
  Clone ID: PAT_MRT3847_142958C.1
ctgttcagcatttcctatacatcatcccttttaacttcatctgcgtggacggtgctggtttttccacggtggtattgtctctgtcgaaaaatgcagtatgtttgttaggtagagccggttggttaaaactcacgggaccatgcattctcggattggtgctctgagattaccccgctttcattttttcccttcacaggccgttatattaagactcttgcatgaactagatcctcaagtttgcgacattcctcgcca

SEQ ID NO: 47566 - DNA, 523 bp, Glycine max
  Clone ID: PAT_MRT3847_142959C.1
tccctcggttttttgtcttcctctagtttcatcagaaaaccaattagccacagcattatatatactaacaaggaaaatagaaagaccagagaagcttctattaattattttacagtctttttgttcaaatgtcaaatatttcaggtggcgacgcgaagcaagtttctcctcagcaaacactggggaagaagttcatcaagaaaacaagctgcatcaacaaccactgaaccaccctcatggctcaagttctggtgcttgcaacagcgatagctccactaatcaacaacaaaagcaagcaaacaggaattaaagaaacctacctggaaccccagatccgaatgctgaagttattgctttatcaccaaccacattaatggcaacaaatagattcgtctgtgagatctgcaacaaagggtttcagaggaaccaaaaccttcagttgcaccgtagaggtcgcaatcctccatggaagctgaggcagagaggaagcaatgagttgatgaagaaaagggttatgtgtgcc

SEQ ID NO: 47567 - DNA, 543 bp, Glycine max
  Clone ID: PAT_MRT3847_14295C.1
agccttccttacggctgcgagaagacgacagaagggactgaagggaatggttataagaagcagctcaatcattccagagatcagggaagctatatttaggtgtcttgtgtgtggattctgctctgagccagttcctgtggagagagggcgaataaccgaacccactatatgtttgaaggaagagtgccaatccagaaactccatgacacttgttcacaaccgatgcaggtttgctgataagcaaattgtgagggtccaggagacacctgatgagattccggaaggaggaacacctcacacagttagcttgctgatgcatgacaagttggtggatactgcaaagccaggtgacagagttgaggtgactggtatttatagggctatgagtgtcaggattggaccaacacagagaactgttaagtcattgttcaagacatatattgattgtcttcacataaagaagaccgataagtccaggatgttggtagaggatgctatggattgttgatggccaagacaaaaatgcagaagttctctttgatg

SEQ ID NO: 47568 - DNA, 281 bp, Glycine max
  unsure (1)..(281): unsure at all n locations
  Clone ID: PAT_MRT3847_142960C.1
cgatgaccaatcaaaaattatgttaaaaatnacttttaaggtaattatcataaaagttgataaaattatcatataagataatttctgattgattgataaattctttgcagtgtcggtgattgattgataaattctttgcagtgtcggngcatgtgcatganttatttagttagatgccatgtcggtttcatttacattattattgncncagatattganaagtattatttggttcgaccaggtgtatcccaagtccagggactgcaattcacatgnccttt

SEQ ID NO: 47569 - DNA, 223 bp, Glycine max
  Clone ID: PAT_MRT3847_142961C.1
gacgaggcgagttacagaagacaatggaaatgctccggggtgctaggattagcgaattcactgaaattaggaacactttttaagaggctttcaaatatggtcaacatagatattctctctattcatgggtactttgggccagcagatttcctcaggatggccgacacttaagggccggggggatttattcttggaccaagaaggggcttatagggagagcttc

SEQ ID NO: 47570 - DNA, 801 bp, Glycine max
  unsure (1)..(801): unsure at all n locations
  Clone ID: PAT_MRT3847_142962C.1
gtgatctcggaattcggatctggtgtcaccttcttgttttcttttttagaaaaattaatccctttaaggcttaattttctaattaagcatgcaatattgtttttaattagtcaccttcaagtcgaggaacatacatatacacatatgtttgtgatcaccacaccaaattccacttctttctaagtgtgtgtatgtgtgtacatagattttgttttatatatatttgaggtttcaccttcattattgcctccttaattctgtgcaaaagaggattcaccaccaccatgttggtaaacgttatccaccccatgccactatgtcaccactcactgaaggatgagatttcaagcccgattagtgctcgaattttcgaactttgcgagcctgatttcttcccagacacactgcaaaattcagatgttacttccagctcaaattgttgccatgaagagaagtcctcatatgccacaaccatatctccacctttagatttagtagacaacaagatcaatatcaataacaatagcaacatagtcactactacctcatctagcactaccacaaccagcaccacaaccaacaacaacaacaacaacacaacgaacagcaataacctgtccatcctctttgacactcaagatgaaattgacaatgacatctcagcctccatagacttctcatcatgtcgatctttagttgttccaccacttctctcaatctcaactcagcaggatcagtttgatttctcttcagctcagccacaggtgcaactatcagcagcagcaggttcagttntgaagg

SEQ ID NO: 47571 - DNA, 276 bp, Glycine max
  Clone ID: PAT_MRT3847_142963C.1
agggggacagagagatagagatagggagagtgctggatcatagacgcgaaaacttcaatcacaacatcaacacttgaatcctgatattcagagtagggtctctctattcttaaatgatccaagggaaggtagtatgataacatgacttaacaccgagctcccatatcttgcctcatactcatctatagctatctcaacctatttgtctttgccagcgactctgtttgatgctaatccccaatgactgaaccttgcaaggtcattcacgatctaaat

SEQ ID NO: 47572 - DNA, 534 bp, Glycine max
  Clone ID: PAT_MRT3847_142964C.1
agagcacaaagaaatatggatgacccaataacaaatcttggttagactttgatacctaatttgaatttgggcttagggcctaattcaacccctcaaaatcgccttgtaaggtgagcattgctcaaactttataagctctatttagaagctatgtttctaggtgatgtgggagtgtgggactaaacacaccctttcacagctacaattaaggcaagctaggggtaattgcaattaaggcggttttccaacattaaacaaattttgattcatatttttcaagcattttaaatataggacaatctagtacacaaggctcctaatattggagtctagggagggtagatgtatcaggcagccttacctctgtgagtggagagaggttgtttcttggatttgaatgtgacttcaaagtaagacaacaatgttacagttgttcaaggctcgccctctatgtaagcattgcaatatgtgaatatgaaaactatttatgtagagactctttattgtattgcatttatatattatataaagaga

SEQ ID NO: 47573 - DNA, 194 bp, Glycine max
  unsure (1)..(194): unsure at all n locations
  Clone ID: PAT_MRT3847_142965C.1
ggggggtagggggccaaaaaaaacgaaagacttgcatttatgtgctgcttgggatcatcctgacccgcatcagaggctcttacaataggaacagcatttaacatagcggcctttaaacactcaatggaagacaccaattttttgcggacttttttagggggagtgggnncaaagccagccccccaattttgaac

SEQ ID NO: 47574 - DNA, 485 bp, Glycine max
  Clone ID: PAT_MRT3847_142966C.1
agctcggaattcggctcgagagagacgcaagcatgtagaacatgaacttgatttggtacagcaggagatcccggagtgcagaaaaaaatcggtggttgctgagcaagcaaaaacgcaagtactgcaggagctggatagcactaagaggctaatagaagaactaaaacttaacctagagagggcgcaaaccgaagagcgtcaggcaagacaggactcagaacttgcaaagcttagagtggaagagatggagcaaggtattgcagacgactctagcattgcagccagggcacagctggaggtagctaaagctaggtacacatctgctattacagagttaacatctgtaaaagaggagttggaaggattgcgcggggaatatgcagcattagatgttgaaaaagatgaagctattaagagagctgaaggcgctgttgcttcatcgaagcaagtggagaaaacagtggaagacttgactattgagctga

SEQ ID NO: 47575 - DNA, 457 bp, Glycine max
  unsure (1)..(457): unsure at all n locations
  Clone ID: PAT_MRT3847_142967C.1
gggcccgaaancccggggcggaccacacccttccggttggtaatgaaaaatgaggatggtagtttttatttaagtaagtttaatctgaaacggggggttttaatttttaatactttggaaccaaaaaatttaccacccaagggccaccataatggttttttcctaatcaactgggcttttttttgaatccttttcttacctcctccaattttaaaacctttttacttggggcctttttttttttttttccttttcctcctcctccttttttttataaattcttccttttttttaataatacactttttaaaattttacacattttgccattaatgctgctttaagaataagtgccagccccgccaaaaagaaaaaggtgttaatggtaaataccaacagcggcggccatgccataatgggtttttactttgcaaagagactttttggggctggccat

SEQ ID NO: 47576 - DNA, 272 bp, Glycine max
  Clone ID: PAT_MRT3847_142968C.1
caaagattgataaaggggatgttggtgatgagtgtactctcaggggtgtcaagtttatctctctttctctttcttcttttgggaatttttcaagagtggaggtggagcaaaaggtggaggagcttaggggtcttgtgaaggcaagtgaacatagcaaagggtatgttttgtatttgggggatctcaagtgggtgttagattttagggctagcggatcacaaggcagagggtgttattgtcctgtggatcacatggttggggagattgggaac

SEQ ID NO: 47577 - DNA, 421 bp, Glycine max
  Clone ID: PAT_MRT3847_142969C.1
gcacgagtgaacttgtggcaaatccttctataatatttatggatgagccaacttctgggctagatgcaagagctgctgctattgtcatgagaacagttaggaacacagtagacaccggaagaacagttgtctgtaccatccatcagccaagcatagacatatttgaatcttttgatgagcttttgctaatgaagcaaggaggccaagaaatatatgtggggccacttggacatcattcttcccatttaattaattactttgagggaatccaaggtgtcaataagattaaagatggctataatccggcaacatggatgctggaagtctcgacttcagcaaaagaaatggaattggggattgattttgctgaagtgtacaaaaattcagagttatacaggagaaacaaagcacttattaaaga

SEQ ID NO: 47578 - DNA, 203 bp, Glycine max
  Clone ID: PAT_MRT3847_14296C.1
gatgaaagagtgtattttataataacctaactaaaatacctgtgtcctttcattatgtacattgcatgccttaggacttggttcccagaatcttgataaaaaaaccagctgactccattctaacaaaatgtaccagtgtgagtggccatgcgtgctccaattaatacatttgagacatgattgaaaaaatctatgtgtaagcc

SEQ ID NO: 47579 - DNA, 223 bp, Glycine max
  Clone ID: PAT_MRT3847_142970C.1
caggaaaaggaaggagactttcatatttatttttatgggatattgacatcaaaaatgaatcggaaagggttgtccactagcgcccacccgagaaaccatggaaacgcacccgagctaattattaaacccctcatttcaaccttaaaaaggaacaccctcgaaactccgaccttgtggaacttatctagtactccaaagaaaaacttttaacctggggcaaggc

SEQ ID NO: 47580 - DNA, 232 bp, Glycine max
  Clone ID: PAT_MRT3847_142971C.1
cacatattatattttgtcatacataacatcatttggcggaataagagcaacccccacgcgacaagagagaggacctcttgctgcaatgcaacgtatcaaggagctcggaaagcggagtggaactgtcaggtgcgtccgaattctaatccaggtaatcgccgaacgcgatgctatgagactgaactcccatgcactggcagatacaatgcagtgtgttgtaatgactacgcaa

SEQ ID NO: 47581 - DNA, 358 bp, Glycine max
  Clone ID: PAT_MRT3847_142972C.1
cgaagcttgatcctcagagcggccgccctttttttttttttttttttttttttttttttttttttttttttttttttttttttttttttttttttttttttgggggggaaaccacctcttaacctcagaggaaaacaaacaaaccacaaaaattccccccccagcctcttgcggaaattgaaggggggcggaaccactttttttaaaaggtaccaaatccactgaaacacccccaaaaggaccccccaaaaagctctttccccgaaaaggcttaaattgccccctcaagggaagggagttttgggccggacaaaggggttattttcatttttcagggaatcatgggccgaagggccct

SEQ ID NO: 47582 - DNA, 354 bp, Glycine max
  unsure (1)..(354): unsure at all n locations
  Clone ID: PAT_MRT3847_142973C.1
ccacgcgtccggaaggaagaagaagaattacaaaggaccactcaaacaggctgcgacgacgtcagtctttggaacttgcagttacttgtgtatatctgtttgcggtcgatacctgatcttgatcttgatgaatatgacaccagtttgaccctttgtcaaagctgatgcccccgatcataacaatgcgtttaagaaatctggcgaaaactctatgaaacatcatagctgagtctcaaagtaaggggaagaaagaggttaatgacttacctagtacctaaccaaagtgccctttatgatatgattcacagncgtttaagattggacctcttagctgacggtgggccaagcactttt

SEQ ID NO: 47583 - DNA, 210 bp, Glycine max
  Clone ID: PAT_MRT3847_142974C.1
gacatgactctgagtaagatgtttctatgtgtgactgtatctctgtctgccatggttctctgcgacaccacctgcgaatacaacgtctctgtccactcaaccttagatcatcgagatgtcagaactcaacttcccaagattaagatgccggatgagtggctaccaaaggaggcagcgtatcatataatacacgatgagtagatgtctgat

SEQ ID NO: 47584 - DNA, 333 bp, Glycine max
  Clone ID: PAT_MRT3847_142975C.1
ccgcgctcacttcgaactaaacctattatcttatgcacgaaactgcacaactggaccatgctcattcactacctcaaaaacactagctttagcactatgttacctatccataagaccgaaaaacactaccattatccgggattccctttgcaacttgactaattcataaatcacttcatataattaaatacatagcatatatatctatatatatatatacatatatatatatatacatcactatctatacacactttgaacctacaaagcataattacacatgcattacctatgatattacaactatatcttaacattttaacatgaatcatc

SEQ ID NO: 47585 - DNA, 706 bp, Glycine max
  unsure (1)..(706): unsure at all n locations
  Clone ID: PAT_MRT3847_142976C.1
acacataatagatgccatgcacttcatataaatagtataaggtggagagttcttgtgaaactaagtctcttcaaacctaagaaaaatgccacagtttgtggaaaagttcatcaccaaaataatacaacacaccgcccctctcaaatcataagattttgctttctccttgacaccaacaaaataaagcatgcataaacccaccatccttgccacaagcaacacaaaagagatggctggatttccacctgtggaaataggcaccagaggcacagttggatcccttctaatgcaagaaattgagtactatagccggcaggaattcaattcccaagactggtcacagaagaacaagtctcaaactatcaacatgggttcctcagttagtactaattccagaccaacaactgtatccagagtagaaagtacaaagaaaaagcaaagtagcaagctcctaccaaagatgtgttctgtggtcgatgtatctgacaacagtaagccaaaggggacctctgctttcagctacaagaacctgaagtctgacataaaacatcacccttaggtaatgctctcagagagcttagagaaacccaacttcttgagagaatttgttataggggtagcccaagttttatctacatagccacatttgatgtccactacttcaacaatnttagatnttntcttcttatcctttttcttcgtaact

SEQ ID NO: 47586 - DNA, 149 bp, Glycine max
  Clone ID: PAT_MRT3847_142977C.1
aattccaaaaataatgagtctacaataaacgaaaaccaagggggcgacgtgggtggaactatacattatcggtcacacaatttgtatatctaacatggggcacataaccaatgaacgacaagagttctcctccaaattaaaggaagtac

SEQ ID NO: 47587 - DNA, 3311 bp, Glycine max
  Clone ID: PAT_MRT3847_142978C.1
gtccaactctgtttatctctctctctctctaagttcgttgtaacgcaaacgcaacgcaactcaaacgcacttccttccttcgccgcgtttcctattctcctcagatcactcccgctgtcccgcaccgttatctcgccgtcgccgtttcaaggaaaaaaggcattaaagaaaagattcccttggatcattcatggcatcaagatcatatgttaatctactagacttagctggaggtttactggatattcctcacatgccaagaactattccaaggattatgacagttcctggagttatttctgacctggatgtttatggtagatatgatggggattctgatgttagctcttctggttatcgggagcggaaaatccttgtggcaaacatgttttgcagccgaacagagatattgtctaaactggtgaatgggaaaccagtcccttgtctcctgatctgattggataaagatctaattaaaagatggtttctcttgtgacactgaggtgatctatgtgggatccctcaaggttgaaatagatgctcatgagcaggaagaagttgctcagaaattactggaggactttaattgcatacctacctttctaccccatgatgtccagaagaagttttattatggcttttgcaaacagcagctttggcctctctttcattacatgctacctatgttccctgatcatggtgaccggtttgaccgctcgttgtggcaggcttatgtttctgcaaacaaaatatttgcggacaaggttatggaaataatcaatcctgatgacgattttgtttgggttcaagactatcacttgatggtcttgccgacatttctgaggaagcggtataatcgcgtgaagcttggattctttcttcacagtcctttcccttcatctgaaatttaccgaactttgccagtaagggatgaaattctgaggggattgttgaattctgatttaattggtttccatacatttgattatgctcgccactttctttcttgttgcaaaagaatgctaggtcttgactatgaatctaaacgaggacatataggacttgattactttggccgtactatatttatcaaaattcttcctgtaggcattcatatgggcaggcttgaatctgtattaaatcttcaatctacatcagctaaattgaaagagattcgggaagagtttaagggtaggaaggtgattcttggtgttgatgacatggatatctttaagggcatcagtctgaagcttctagctgttgagcagctgctgcagcagaatcaagatttgaagggcaaagttgtcctagtacaaattgtgaatcctgctaggagttcaggcaaggatgttcaggaagcaaagaaggaaacatatttaattgcccagaggatcaatgatacatatagctcaaataattatcagccagttattctcattgaccgtcctgttcctcgctttgagaagagtgcctattatgctgtagctgaatgttgcattgtcaatgctgtaagggatggtatgaacttagtcccatacaaatatattgtctgtagacaaggaactgcacagatggataaagctttgactagaaaaagtgattctcctcgtacaagcatgcttgttgtgtctgagttcattggttgttctccttctttaagtggagcaatcagggtcaatccctggaacatagatgctgtggctgatgctctgtattcagctgttactatgaatgattcagagaagcaattgaggcatgagaaacactaccggtacatcagttctcatgatgtggcatattgggcacgcagctttgtgcaggatttggagagagcatgcaaagatcattacaccaaaagatgctggggaatgggtttgggcctagggtttagagttgtttctctttctcctggtttcagaaaattgtctgttgatcacattgtttcagcttacaaaagaaccggtagaagagccatatttcttgattatgatggtactatcgtaccaaaatcttccataaataagacccccagccctgaagtcatatccgtgctaaatgatatgtgtaatgatcctaaaaatactgtgttcattgtgagtggaaggggaagagattctttaagtaagtggtttacttcatgcaaaatgattggacttgcagccgaacatggatactttctaaggtggagtaaagattctgaatgggaaaccagtcccttgtctcctgatcttgattggaagaagattgtggaacctgtcatgcagttgtatacagaggcaactgatggatctaatattgaaactaaggaaagtgctttggtctggcatcatcaatatgcagaccccgactttggctcatgccaagccaaagaattgttaaatcatctggaaagtgtcctcgctaatgaacctgcagttgttaccaggggccggcatattgttgaagtcaagccacaggggttaaacaagggctgggtagctgaaaaggttctttccaatatggttaatgatggtaatccaccagattttgtgatgtgtgtgggagatgacatttccgatgaagacatgtttgagagcatattaaggacagtttcatgcccttcattgccagtagttccagagatctttgcctgcactgtaggtcagaaacctagcaaggccaaatattatcttgatgaccctgctgatgtcatgaagttgcttcaaggccttggtgcttcatctaagccaaagccaaggcatctagcacaattccaagtttcttttgagagcacggtttgagttattggttccttgtgcttcttctctagttgggaggattaatattcttcacatgtgaatcagggaatgttaggttattaatggttcccctgacatatatggtgggaccttgctgttgcagataggattctttgcacctgaacgggtttttaatggcttgtttttttgtgttcagtagtgcggttcatgaatgagctttgacaaattcttctcacgtacatggttacatcaaattgttgtatttgctggtgcctagaactgtagaacatgtagttgtttgcattgaacatgaggcaccaaatagcttgtacagttacactatttttctttactattacataatggcgatctggtttgagatatcttgcttcggcctaatggtaaagggtaatccctgaccttgataaaataaatgaaattgctaggagtggttatggatacatgagaagtgaggggttacagttgtattaaaaaaaaaaactattaagatagacttgacccactttagaaaataaataaaggagttgcaat

SEQ ID NO: 47588 - DNA, 700 bp, Glycine max
  unsure (1)..(700): unsure at all n locations
  Clone ID: PAT_MRT3847_142979C.1
aaacaactctctttctctctctctctctctcagttctttgtaacgaaacgcaacgcaacgcaacgcaacgcaacacaaacgcacccttcctatactccgcagatcactctggcaccgttaattcggcgtcgccgtttcaaggaaaaaaggcattaaagaaaagattcccttggatcattcatggcatcaagatcatatgttaatctactagacttagctggaggtttactggatattcctcacacgccaaaaactattccaaggattatgacagttcctggagttatttctgatctggatgtttgtggtagatatgatggggattctgatgttagctcttctggttatcgggagcggaaaatccttgtggcaaacatgttgccattgcaggccaaaagagatattcaaactggtaaatggtgtttcagtttagatgaggattctattctgttacaataaaagatggtttttcttgtgacactgaggtgatctatgtgggatccctcaaggntgaaatagatgctcatgangcagaaagaagttgctcagaaattactggaggactgtaattgcatacctacctttctaccccatgatgtncagaagaagctttattatgggcttttgcaaacagcagctttggcctctctttcattacatgctacctatggtccctgatcatggtgaccgntttgatcgc

SEQ ID NO: 47589 - DNA, 236 bp, Glycine max
  Clone ID: PAT_MRT3847_14297C.1
gattcgaccaaatgggtgtcagaaatttggtgtcttggaacacgatgattgatgggtacatgaggaatgggaaattcgaagatgccctccaagtgttcgatggattgcccgtgaagaatgctatttcttggactgcgctaattggtgggtttgtgaagaaagattaccacgaggaagctctagagtgctttcgagaaatgcagctttctggtgtggcacctgattatgtgactgtt

SEQ ID NO: 47590 - DNA, 875 bp, Glycine max
  Clone ID: PAT_MRT3847_142980C.1
atgtgtgtgggagacccacgcgttcgtgaagacatgtttgagagcatactaaggacagtttcatgcccttcattgccagtagttcctgagatctttgcctgcactgtaggtcagaaacctagcaaggccaaatattatcttgatgatcctgctgatgtcttgaagttgcttcaaggccttggtgcttcatctaagccaaagtcaaggcatctagcacaattccaagtttcttttgagagcacggtttgagttattggttgcttgtgcttcttctcttgttgagaggattaatattcttcacatgtgaatcagggaatgttaggttattaatgttgcccctgacatatatggtgggaccttgctgttgcagataggattctttgcgttcagtagtgcggtaatgagcttgacaaattcttctcacgtaaatggttacatcaaattgttgtatttgctggtgccacctatagctgtagttgttcctagaactgtagaacatatagttgtttgcattgaacatgaggcaccaaatagcttgtacagttacactatttttcttcactatacataatgacgatctggtttgagataaaaaaaaacagacggcggcaaacaagaaaaccatgaactattaaaagaaaagggggcgtccctctatttgtttcaaccttatgaacacgtgcatgcaaggagcaagcttttcatacgccccctaaatgaaattcattggcggtctgctcacatcggcggggctggaaaaaccgtggcgacaccaaatttaattgtctggcctgacatacactttttatccgctggggtcttaaatatgaggcctgacaaatatggcccttcccaacatgtcttcagcctgaatg

SEQ ID NO: 47591 - DNA, 382 bp, Glycine max
  Clone ID: PAT_MRT3847_142981C.1
accttgtcctcgaaacaaggagttgagcatcctctgcttctatcagtccatgagtttgtcaaaggtgccttgttccacaatcttgatctcaagggcccctattgatttatctgacacacgcccttggcgatacacgctgttgagcgactcctcaacggttaagcaacaatcctagatatataagagataagatgatgagagataagatagtaaactatttgcatatttggtttgctgttggaaatcttagaacacatgttcctatataaatccaacagattaaataaaataaacgcaaaggaaaggatcttgatccgctaaaaaaataactttggcccccaaaagtaattttgggcctccaacccaaccttattttaaacca

SEQ ID NO: 47592 - DNA, 287 bp, Glycine max
  Clone ID: PAT_MRT3847_142982C.1
ggaaaaaaagcatctttaattttattttaaggcccctctcgtaacttaaaaaaaaaaaaaaaaaaatggcccttttttcccaaggggaatcaagaaattttgaacggttgggaaataatcgaacccaaaatggcttggtgaaattaaatgaccccaaatttttgaccccagcccttttgtttgaaaacatttagcgtgggggctccaattttggggggggactccacaaccatgaccccagtttccctgggggttttaatttttttttgggcagggcccttgccccc

SEQ ID NO: 47593 - DNA, 454 bp, Glycine max
  Clone ID: PAT_MRT3847_142983C.1
cacctttgaaggtcattgtttttgggtggcaggtgatccttaatagaactcagaccagagaagctctgttctgaaggaacattggtggggtagatgctgatctgagttgccccatgtgccacggcgacgatgtaacaaccactcacctcttctcctgcaggtttggctattcagtatggcaaagatgttaccagcggcttgggtttgagcaggtgctaccaggtagttcttgtgcatacttctggcatcatcaaggttacggtcactggatgacattttggttagtggttatttggttgatctggttgcagaggaacaccatcattttccgcgggaagcaggcttgtgtgcaggaggttgttgattcggttgtgttcaaaacgtggagctgggtgaaggcatattatgctagggacacattttctttttctgattagttattgaatccggtcat

SEQ ID NO: 47594 - DNA, 261 bp, Glycine max
  Clone ID: PAT_MRT3847_142984C.1
cagtcgcgggttttaaaagtcgaagaaccgcgaccagtaggttgtgggagcttaaaaccggaaacacaagcaagcgatacttgattccaagaatgtatcaaaaacttcctactttctcgtgggccacttcttagagggaaagaaaatcactctctgtgctgaccacagacttggagaatcatgttgttttgcattctgaggatatttgctgaacactctcctatttgacataggacttcgtggcagagggaaactcctttt

SEQ ID NO: 47595 - DNA, 355 bp, Glycine max
  Clone ID: PAT_MRT3847_142985C.1
taaaataacacacacttcccactttattacgacaatcaaaagaggtgcggaaattccaatatagcgcaacactacactctacacgagggtcatgcctaatcctctttatggaattacgcattcctccaagcgtatgacaccgcaaccccctgaccctgctgaggatgccgcattccaagaatatctgtatgcaccctgtggaacacaaaaagctggcttatgaggcttaccagccgtgccaaattcttgagagattcccaatagatagatcaaaatctgtggacccgtcgggatcgtcaatctggaaactaacctgccctgaagtgtgattgggacactaaaaactgcacatttc

SEQ ID NO: 47596 - DNA, 479 bp, Glycine max
  unsure (1)..(479): unsure at all n locations
  Clone ID: PAT_MRT3847_142986C.1
gacccgggaatcttcatatactcgggattccttgcatacccggcggcgaacaccgcaccacnttccaattcctcatatcgcggcacattattctactctcagtgccatgcgaaactggaaatccagaccccggcccgatggcagggcgttttttctttgacctttgctcgatggacgttgatcggtgggggacctcggcatccttaagtgaatgaccatggctggcctaccaccaataagaactaccctgctgatgactctctctggatggctgagctgccctacnaatgttctgctgccaacgcgaccctgtctctacaaaagactgcactggtgacgggcctggacacgaatgaaccatcttacatatctgggcttccaaaacgggtatttcgcactgataaccataactttgctaacctacagcgtctgggaaacaaggcgggcccggcctctactcacccctcccatgctgaata

SEQ ID NO: 47597 - DNA, 843 bp, Glycine max
  unsure (1)..(843): unsure at all n locations
  Clone ID: PAT_MRT3847_142987C.1
tccggatattaccctctttgtaattagcaacacaaacatatgtttaccacccccatcatgtgcagtgtgaaaaggcaattaactctttgcaaagcagttagtcagccagcaatacatcctccaataattctgaccaaaagaggcttatccatcagttttcccaccacattttcgctttcattggctggtgaggatgctaatgctgcaatacttgatgcagatgatgatgaggagctgttggaaaaagtaaagagggatagaaaaaagagacttgagagacaaggtatgatcaaatcatcctccaaagaaacaggtctgatcctgcaaaaatgacatttcacttttccctagattacattatcggatgaatgtggacgtactcttacatctttacctaaaggctaaagatgaccagtaatttgcatggttggtttgtcctactatgtgtttcctttccttacttgacggattttgctcactctggaatgcaaataaatgcaagttacctttataggtttagagtctgcagaggatagcagtaaagtagttgtgcccaattcttgagggtgtccaatgaacaaaaatcagtcaaaagtacacgattggcttcttgttctattgtatgtcttgtcaaatgttgtattgagtttttttaaagcaacattagtgtaaacaattttacggtatcatctaagtttgtattgatatatctcatttaatgagtgtaagtgtgtaataaatattaacaaataacaattacatgaggttacaaaacttactanatgatgtaataacacctcatntggtgtaaagcgttcttacattgaccctgtattacattaa

SEQ ID NO: 47598 - DNA, 623 bp, Glycine max
  Clone ID: PAT_MRT3847_142988C.1
ggctcgagagagaatgaaatagccacttttgattccagcctattgcattgtgatgtggaccaatcccatcttgttgatacaggagttagttcatcatctgttagtgcaggtaacatggaaactaagttgacaacttctacagtatcagttgatgtcgagcctgtcaacaattcagcttcacaatatatattagaaaatattagttcgacatcctgtgagatagtggatgtttgtgttctctctcctagcagaattgtgtccacacatgaagttacagatcactgtgaagttcaaggagtgacgcctgttgggtctgcttctattgatgaaaaggaaaaggctgaagctaaaatagccaatgaagctaccatagtcaatgaagcaagctgtgaagctaaactagccaatgaagccagctctgaagctaaaatagtcaatgaagcaaactgtgaagctaaaatagagaatgaagcaggccctgaagctaaagtagtgaatgaagcaagctcggaagctaaaatagccaatgaagcaagcacagctcttcttgttgggtcttctgaacaggaaactgctccttgtcctgaaactgaaatacatttttctgatacatcaggacaact

SEQ ID NO: 47599 - DNA, 408 bp, Glycine max
  Clone ID: PAT_MRT3847_142989C.1
ggggccaaaaaaaagggaaaaaaaaattggggaaaaaacaaattcgccaaagggccaagggccccccccctgaacaggggggccctgtatgtcctaaacccccaaaaaacccccccctaaattggaattccccccccccccgggcggggaaaacccaaaagggaacaacggcgacccccgcggaatgtaaaaaatttccttgaggtcactggcccaaaacccggcccacaaaaacggggttaacgggaccccccaaaaacaaccccccacaggccccggtattttctcctttttaaccaccgcctttacattctcacccacaacctttttttcgttgggggggggcttccttttcacatcaacggggggggaggaaacggtctccgcccgggggttaaccttcggggg

SEQ ID NO: 47600 - DNA, 416 bp, Glycine max
  Clone ID: PAT_MRT3847_14298C.1
gcaggttcatggtgattactttcaacatgtgcttcagcttttgtcttcatgctcccctgatgttctggaatcaataaggcagagcattttactgagtggtcaatcattaaaatctgtagaaccgttagtcattaaagcagtggtggagtcactagttgaaaagtcagttgaggacttaagcagccaatattgcatcctaccgttcattatggcaatgtgtggctcctgcagataggcaaaacacaattaatctctaagagtttgctcctatggagttaaagcggcttgtagattgttttcctctgggtctagagtttccttttgtaacttaattttgaaatccattatatagctttacacaataatcacaggttatcatggttcttaaaagggaagaaaaaaattattttgctcgt

SEQ ID NO: 47601 - DNA, 385 bp, Glycine max
  unsure (1)..(385): unsure at all n locations
  Clone ID: PAT_MRT3847_142990C.1
cgcaggcaccggcccggacggaataaccggccggaccggccagcttacttggcgggcggccgccctaaaaaannngggggggggacaaggaaaacgacgcccacgaaaccacccaacgccagcagaacacgaagagccgacaccgagaacggcaaaaaaagcaacgaaaacaaaacatacacaagcaaacacggacgcccccaagagaaacccccggcggaagaaggaacacaaagaaggaaagagctatcgcacggccgggaagggcgacgaaaacaagaaacaaaccgaaaggccggggaaggaacccacaagcgagaaaaaaaaagcgagcaagcgaacccagcaaaaaatcaagagccaagcccagggggaggaaaacccc

SEQ ID NO: 47602 - DNA, 218 bp, Glycine max
  Clone ID: PAT_MRT3847_142991C.1
catatgtgtttttttttttgttttttttttttttgtaggaacaaaaggggggggtcatttaaaaacccctcccaaaaccgggcctaattttgaggccaaaggttgaacaaccccatttgcgggcccttattcattcccaatttgggagacaccccatttttaaggatgtgggccatgcgcttgaacaaaagggggaaatcaacgtggggaaacctaag

SEQ ID NO: 47603 - DNA, 1027 bp, Glycine max
  Clone ID: PAT_MRT3847_142992C.1
ggctcgagcgttcaagtaaccaaccgtttaccacggcggcggtgtatggaaagagttcttcctttaccctacaccggcggtgcgccacatcctcatagccgctctcgggattcatttctttcagcaggcttccggaatagacgccgtggttttgtacagccccgagattttcaagaaggctgggctggaatccgatggggaacagcttctggcaaccgtggccgttggattcgccaaaaccgtattcatcttagtggctacgtttttgttggatcgggtggggcgtcggccgctgttgttgacaagtgttggcggaatggtgttttctcttctgacgctggggttgagtctcaccgtcattgaccactcacgcgccgtcctcaagtgggccattgggttgagcataggcatggttttgtcctacgtgtccactttctccgtcggagcgggtcccatcacgtgggtttatagctccgagatcttccccttaaggcttcgcgcgcagggtgcggctatgggagttgtcgtgaatagggtcactagtggggtcatctcaatgactttcctgtccctctctaataagatcactattggtggggcattcttcctctttgggggaatcgcaatgtgtggatggatcttcttctataccatgctccccgaaacacagggcaagacccttgaggaaatggaaggctcctttggtaaattcgcctcatggtccaagggtaaggacggtgataacggagacatccaattagccaattagccacccataatcgtgcttaatacttttgagccaatataatataataatataatggtgtgtaacagattagattagctttctaagtagtaacaagtctagtatgcgacgcaaaattatagtactacttcttttcatgaatgaggagagagagagagagagacgggtaataagtgtggtaagctattcgaaaactacattgttaatgtaacctttcctttttccgtggatattatttgatcatttgatgtaattttattt

SEQ ID NO: 47604 - DNA, 408 bp, Glycine max
  Clone ID: PAT_MRT3847_142993C.1
ctgatgccagggtttgtccactatgaggggcatggctgctaaaccggcgagtacggatcggtgcgttggcctgaacaagggctacggctttacctataaggactatgttgctctcccattatatcgtagggggataaccagcaagagggtgcactttgtgagggaccttgttagagaggtagccattattgcaccctatcaatagtgtataactgaggtgctgaaggttgggaaggataagagggcactcaatgttgcagagagaaagctacgtacacacacacgcgcagagatgaatcgtgtgtaaatgtacagtagttctaatgaagatgacggctggtgacgctggagacactaagaaataagtcttatttactgacttacagattcactaaatggacctgtgta

SEQ ID NO: 47605 - DNA, 443 bp, Glycine max
  Clone ID: PAT_MRT3847_142994C.1
atgactattggactattggttatacagtcttgcagacatttatggctcctactagaatgtcatggaaaggaccttgtgaggtctccgcacttgtaacaagtcattattgtttaagtattgttagtcctgtaaaattgtattagcttctcatttcttcaaaatattatgtagagactttttatatggtattatattagaagagagcatcagaatttcaaatttggcaagctctgatcatttgattatttatcttatttcgtttctgaaatgtgaaacaaaatgtgagtggttatgacataaaaggtaagattgctggagtagagcagtttagcagttagaaaagaaaacaagcttgccacatagaagagatgaagggagaatctgcttagtaaacattttggccttaattccattgaaatgccctaaacctttgtcttcaatgc

SEQ ID NO: 47606 - DNA, 480 bp, Glycine max
  Clone ID: PAT_MRT3847_142995C.1
cacgcgtccggtccaagacacgcaactctcaactattggtctccttaattacttatcattctttgtactaacttgcccaacaatctagtgcctaagggcacacgaatatattccaaggtggtctgactaatgctaatgaaatgcaccggttgtcctgttatgcccaatgggagtatcgaagatggtttcaccctaccgagtatgcagctggatgcaatatacccgacagtataaaagcttaactgccactgtgtgtgattgctaagaattatggtcgggctgtccttacgatacctcattaacgctggggctagaaagcccttcgcctggatcaagcgctcaggaatcttgggtagacaggccctaggttgcatgtttaatgctgtctgagcgaaacctaatataatacctgtgacaatggttaatgctatctactgagaatcctagctacactttactgatatagaaaacagaactttg
